United States Patent Application Publication US 2007/0099251 A1 - sequence listing, part 7

SEQ ID NO: 13795 - DNA, 2448 bp, Homo sapiens
gggcgccagcaggaagtgggagaagaggcgacccaaggcgggctggcgggctggcggcagtcgctacttgcctagtagcctcagccgctgtgggctcctggggagatggaggggccggggctgggctcgcagtgcaggaatcacagccatggcccccaccctccaggatttggtcgatatggcatctgtgcacatgaaaacaaagaacttgccaatgcaagagaagctcttcctcttatagaggactctagtaactgtgacattgtcaaagctactcaatacggaatttttgaacgatgtaaagagttggtagaagcaggatatgatgtcaggcaaccagataaagaaaatgtgtcgcttcttcattgggctgctattaacaacagactggatcttgtaaagttttatatttcaaaaggtgctgttgtagatcagttgggtggagatttaaattcaactcctcttcactgggccatccgacaaggacatttacctatggtcatattattactccagcatggtgcagaccccactcttattgatggagagggattcagcagcatccacctggcagtattgtttcaacacatgcctattatagcatatctcatctcaaagggacagagtgtgaatatgacagatgtaaatgggcagacacctctcatgttatcagctcacaaagtaattgggccagaaccaactggatttcttttaaagtttaatccttctctcaatgtggttgataaaatacaccaaaacactccacttcactgggcagttgcagcaggaaatgttaatgcagttgataagcttttggaagctggttctagcctggatatccagaatgttaagggagaaacacctcttgatatggctctacaaaacaaaaatcagctcattattcatatgctaaaaacagaagccaaaatgagagccaaccaaaagttcagactttggaggtggctgcagaaatgcgagctcttcctgctgctgatgctttctgtgattaccatgtgggctattggatacatattggacttcaattcagattcttggcttttaaaaggatgtcttctagtaacactgttttttctgacatctttgtttccaaggttcttggttgggtataagaaccttgtatacttaccaacagcctttctgctaagttctgttttttggatatttatgacttggttcatcttattttttcctgatttagcaggagcccctttctatttcagtttcattttcagcatagtagcctttctatactttttctataagacttgggcaactgatccaggcttcactaaggcttctgaagaagaaaagaaagtgaatatcatcacccttgcagaaactggctctctggacttcagaacattttgtacatcatgtcttataaggaagccattaaggtcactccactgccatgtatgcaactgctgtgtggctcgatatgatcaacactgcctgtggactggacggtgcataggttttggcaaccatcactattacatattcttcttgtttttcctttccatggtatgtggctggattatatatggatctttcatctatttgtccagtcattgtgccacaacattcaaagaagatggattatggacttacctcaatcagattgtggcctgttccccttgggttttatatatcttgatgctagcaactttccatttctcatggtcaacatttttattattaaatcaactctttcagattgcctttctgggcctgacctcccatgagagaatcagcctgcagaagcagagcaagcatatgaaacagacgttgtccctcaggaagacaccatacaatcttggattcatgcagaacctggcagatttctttcagtgtggctgctttggcttggtgaagccctgtgtggtagattggacatcacagtacaccatggtctttcacccagccagggagaaggttcttcgctcagtatgaagaaaagcaacccaaaactctcaatctgatttgtttttgtttatgtcgatgccctgtagtttgaaagtgaagtaaagatttagaattcacctaagtccaaaggaaaacacgtggtttttaaagccattaggtaaaaaaagttctcaataaaggcattacaattttttaggtttagaaagatggacttttctgataaatcttggcagacatctaaaaaaaaaaccatatttttcacaagaaaatgcaagttactttttttggaaataatactcactgattatggataaaatggaatattttcagatactatattggctgtttcaaaatagtactattctttaaacttgtaatttttgctaagttatttgtctttgttgtatctataaatatgtaaaaaatatttaaatagatgtacctgttttgctttcacacttaataaaaaatttttttttgtagttgaaaaaaaaaaaaaaa

SEQ ID NO: 13796 - DNA, 2088 bp, Homo sapiens
cggagagaagagagagcccggccagacccactgcgatgagacagcaggacgcgcccaagcccactcctgcagcccgccgctgctccggcctggcccggagggtgctgaccatcgccttcgccctgctcatcctgggcctcatgacctgggcctacgccgccggggtgccgctggcctccgatcgctacggcctcctggccttcggcctctacggggccttcctttcagcgcacctggtggcgcagagcctcttcgcgtacctggagcaccggcgggtggcggcggcggcgcgggggccgctggatgcagccaccgcgcgcagtgtggcgctgaccatctccgcctaccaggaggaccccgcgtacctgcgccagtgcctggcgtccgcccgcgccctgctgtacccgcgcgcgcggctgcgcgtcctcatggtggtggatggcaaccgcgccgaggacctctacatggtcgacatgttccgcgaggtcttcgctgacgaggaccccgccacgtacgtgtgggacggcaactaccaccagccctgggaacccgcggcggcgggcgcggtgggcgccggagcctatcgggaggtggaggcggaggatcctgggcggctggcagtggaggcgctggtgaggactcgcaggtgcgtgtgcgtggcgcagcgctggggcggcaagcgcgaggtcatgtacacagccttcaaggcgctcggagattcggtggactacgtgcaggtctgtgactcggacacaaggttggaccccatggcactgctggagctcgtgcgggtactggacgaggacccccgggtaggggctgttggtggggacgtgcggatccttaaccctctggactcctgggtcagcttcctaagcagcctgcgatactgggtagccttcaatgtggagcgggcttgtcagagctacttccactgtgtatcctgcatcagcggtcctctaggcctatataggaataacctcttgcagcagtttcttgaggcctggtacaaccagaagttcctgggtacccactgtacttttggggatgaccggcacctcaccaaccgcatgctcagcatgggttatgctaccaagtacacctccaggtcccgctgctactcagagacgccctcgtccttcctgcggtggctgagccagcagacacgctggtccaagtcgtacttccgtgagtggctgtacaacgcgctctggtggcaccggcaccatgcgtggatgacctacgaggcggtggtctccggcctgttccccttcttcgtggcggccactgtgctgcgtctgttctacgcgggccgcccttgggcgctgctgtgggtgctgctgtgcgtgcagggcgtggcactggccaaggcggccttcgcggcctggctgcggggctgcctgcgcatggtgcttctctcgctctacgcgcccctctacatgtgtggcctcctgcctgccaagttcctggcgctagtcaccatgaaccagagtggctggggcacctcgggccggcggaagctggccgctaactacgtccctctgctgcccctggcgctctgggcgctgctgctgcttgggggcctggtccgcagcgtagcacacgaggccagggccgactggagcggcccttcccgcgcagccgaggcctaccacttggccgcgggggccggcgcctacgtgggctactgggtggccatgttgacgctgtactgggtgggcgtgcggaggctttgccggcggcggaccgggggctaccgcgtccaggtgtgagtccagccacgcggatgccgcctcaagggtcttcaggggaggccagaggagagctgctgggccccgagccacgaacttgctgggtggttctctgggcctcagtttccctcctctgccaaacgagggggtcagcccaagattcttcagtctggactatattgggactgggacttctgggtctccagggagggtatttattggtcaggatgtgggatttgaggagtggaggggaaagggtcctgctttctcctcgttcttatttaatctccatttctactgtgtgatcaggatgtaataaagaattttatttattttc

SEQ ID NO: 13797 - DNA, 3824 bp, Homo sapiens
gatccgcggggcgactcccggtctggcttgggcaggctgcccgggccgtggcaggaagccggaagcagccgcggccccagttcgggagacatggcgggcgttaaagctctcgtggcattatccttcagtggggctattggactgacttttcttatgctgggatgtgccttagaggattatgggtgtacttctctgaagtaagatgatttgtcaaaaattctgtgtggttttgttacattgggaatttatttatgtgataactgcgtttaacttgtcatatccaattactccttggagatttaagttgtcttgcatgccaccaaattcaacctatgactacttccttttgcctgctggactctcaaagaatacttcaaattcgaatggacattatgagacagctgttgaacctaagtttaattcaagtggtactcacttttctaacttatccaaaacaactttccactgttgctttcggagtgagcaagatagaaactgctccttatgtgcagacaacattgaaggaaagacatttgtttcaacagtaaattctttagtttttcaacaaatagatgcaaactggaacatacagtgctggctaaaaggagacttaaaattattcatctgttatgtggagtcattatttaagaatctattcaggaattataactataaggtccatcttttatatgttctgcctgaagtgttagaagattcacctctggttccccaaaaaggcagttttcagatggttcactgcaattgcagtgttcatgaatgttgtgaatgtcttgtgcctgtgccaacagccaaactcaacgacactctccttatgtgtttgaaaatcacatctggtggagtaattttccagtcacctctaatgtcagttcagcccataaatatggtgaagcctgatccaccattaggtttgcatatggaaatcacagatgatggtaatttaaagatttcttggtccagcccaccattggtaccatttccacttcaatatcaagtgaaatattcagagaattctacaacagttatcagagaagctgacaagattgtctcagctacatccctgctagtagacagtatacttcctgggtcttcgtatgaggttcaggtgaggggcaagagactggatggcccaggaatctggagtgactggagtactcctcgtgtctttaccacacaagatgtcatatactttccacctaaaattctgacaagtgttgggtctaatgtttcttttcactgcatctataagaaggaaaacaagattgttccctcaaaagagattgtttggtggatgaatttagctgagaaaattcctcaaagccagtatgatgttgtgagtgatcatgttagcaaagttacttttttcaatctgaatgaaaccaaacctcgaggaaagtttacctatgatgcagtgtactgctgcaatgaacatgaatgccatcatcgctatgctgaattatatgtgattgatgtcaatatcaatatctcatgtgaaactgatgggtacttaactaaaatgacttgcagatggtcaaccagtacaatccagtcacttgcggaaagcactttgcaattgaggtatcataggagcagcctttactgttctgatattccatctattcatcccatatctgagcccaaagattgctatttgcagagtgatggtttttatgaatgcattttccagccaatcttcctattatctggctacacaatgtggattaggatcaatcactctctaggttcacttgactctccaccaacatgtgtccttcctgattctgtggtgaagccactgcctccatccagtgtgaaagcagaaattactataaacattggattattgaaaatatcttgggaaaagccagtctttccagagaataaccttcaattccagattcgctatggtttaagtggaaaagaagtacaatggaagatgtatgaggtttatgatgcaaaatcaaaatctgtcagtctcccagttccagacttgtgtgcagtctatgctgttcaggtgcgctgtaagaggctagatggactgggatattggagtaattggagcaatccagcctacacagttgtcatggatataaaagttcctatgagaggacctgaattttggagaataattaatggagatactatgaaaaaggagaaaaatgtcactttactttggaagcccctgatgaaaaatgactcattgtgcagtgttcagagatatgtgataaaccatcatacttcctgcaatggaacatggtcagaagatgtgggaaatcacacgaaattcactttcctgtggacagagcaagcacatactgttacggttctggccatcaattcaattggtgcttctgttgcaaattttaatttaaccttttcatggcctatgagcaaagtaaatatcgtgcagtcactcagtgcttatcctttaaacagcagttgtgtgattgtttcctggatactatcacccagtgattacaagctaatgtattttattattgagtggaaaaatcttaatgaagatggtgaaataaaatggcttagaatctcttcatctgttaagaagtattatatccatgatcattttatccccattgagaagtaccagttcagtctttacccaatatttatggaaggagtgggaaaaccaaagataattaatagtttcactcaagatgatattgaaaaacaccagagtgatgcaggtttatatgtaattgtgccagtaattatttcctcttccatcttattgcttggaacattattaatatcacaccaaagaatgaaaaagctattttgggaagatgttccgaaccccaagaattgttcctgggcacaaggacttaattttcagaagccagaaacgtttgagcatctttttatcaagcatacagcatcagtgacatgtggtcctcttcttttggagcctgaaacaatttcagaagatatcagtgttgatacatcatggaaaaataaagatgagatgatgccaacaactgtggtctctctactttcaacaacagatcttgaaaagggttctgtttgtattagtgaccagttcaacagtgttaacttctctgaggctgagggtactgaggtaacctatgaggacgaaagccagagacaaccctttgttaaatacgccacgctgatcagcaactctaaaccaagtgaaactggtgaagaacaagggcttataaatagttcagtcaccaagtgcttctctagcaaaaattctccgttgaaggattctttctctaatagctcatgggagatagaggcccaggcattttttatattatcagatcagcatcccaacataatttcaccacacctcacattctcagaaggattggatgaacttttgaaattggagggaaatttccctgaagaaaataatgataaaaagtctatctattatttaggggtcacctcaatcaaaaagagagagagtggtgtgcttttgactgacaagtcaagggtatcgtgcccattcccagccccctgtttattcacggacatcagagttctccaggacagttgctcacactttgtagaaaataatatcaacttaggaacttctagtaagaagacttttgcatcttacatgcctcaattccaaacttgttctactcagactcataagatcatggaaaacaagatgtgtgacctaactgtgtaatttcactgaagaaaccttcagatttgtgttataatgggtaatataaagtgtaatagattatagttgtgggtgggagagagaaaagaaaccagagtcaaatttgaaaataattgttccaaatgaa

SEQ ID NO: 13798 - DNA, 2663 bp, Homo sapiens
gacataagtcaaaagctgcgtcagaaggttctaacttttgtcatcactattaccagcattgtcatcgttatcgttatcttcgtcatcatcattaccaccgttatacctgatactgccataacaatcagaacattatgtacaggcacggcatatcttcccaaagatcttggccactatggactacgatctttatttttcttggagtggcggcaatcttgggagtaaccattggtcttcttgttcattttctggcagttgagaagacttactattatcaaggtgattttcatatttctggagtcacatacaatgataattgtgaaaacgcagcttcacaagccagcacaaatctaagcaaagatattgagactaagatgttaaatgcatttcaaaattccagtatatataaggaatatgtcaaatctgaggtcatcaaacttctgcctaatgccaatggttcaaatgtgcagttacagctgaaattcaagtttcctccagcagaaggagttagcatgaggactaaaatcaaggctaaattacatcagatgttgaaaaacaacatggcatcctggaatgcagttcctgcttccattaaactcatggaaatcagcaaggctgcttctgaaatgcttaccaacaactgttgtgggagacaagtagccaacagtatcataactggcaacaaaattgtgaatggaaaaagctccctggagggggcatggccatggcaggccagcatgcaatggaaaggccgtcactactgtggagcctctctgatcagcagcaggtggctattatctgcagctcactgctttgctaagaaaaataattcaaaagattggactgtcaactttggagttgtagtaaataaaccatatatgacacggaaagtccaaaacattatttttcatgaaaattatagcagtcctgggcttcatgatgatattgcccttgtgcagcttgctgaagaagtttcttttacagagtacattcgtaagatttgtcttcctgaagccaaaatgaagctctcagaaaatgacaatgttgtagttacaggttggggaacactttatatgaatggttcatttccagtgatacttcaagaagcctttttgaagattattgacaacaaaatttgcaatgcctcatatgcatactctggctttgtgactgattcaatgttatgtgctggatttatgtcaggagaagctgatgcatgtcagaatgattctggtggaccactagcttaccctgattccagaaatatctggcatcttgttggaatagtaagctggggtgatggatgtggtaaaaagaataagccaggtgtctatactcgagtgacttcttatcgcaattggattacatccaagactggactctgaaaaaaaaggaattatacaaaggaacataaagaccactgtaggctatccttatctgtggctttgggatctttttattttgattgttggtaaactaatcattttattatatataaaaatataaatgtctttattaatattttattatatctaaaacactgtccatgcatttattaatcttttaaattaatgtaagagataggaagaggccaggtgtagtggctcatgcctgtaatcctagcactttgagagaccgagataggcggattgcttgagcccaggagtttgagggcagcctgggaaacatggctaaatccgtgttcaaaaaatacaaaaattagctaggcatggtggcgtgcacctatagtcccagctattcaggaggctgaggtgggaggattgcttgagcccagcaggttgaggctgtggtgatttgtgattgcgccaccactgcactccagcctgggcaacagagtgagaccctgtctcaaaaaaaaaaaaaaaaaaaaaggagagaagaaaataaagaaggctaatatataatttttcttaatagctgagttgtgattcattttaccattatattcagaattgaccttaatttgttttccagaatcaaaagaaaataaaatataaattttgaaactatgagaacatatataggggatttatcaaatgagttactttttattatatcaattataatttcattttattaactggaataagtgcgaaagtgtacattactttttaacttatatgtgaaatgattcatgtacctcacaaaatcatgcaatcttgcagtgaagaaggagtatcagagctccagctacactgagtctttcaatttacagatcaagaaactgaagaccagagaagagaaatgattcggttaaagtcactctccatcatctgtgataagttgacaaatttatccttacacaaatttgtcctcattgagttgacatccaaaatttgtcaggaattaaagaatgacttttgagtggcaattatttatataacattttccattgtcttcatattcaccttttgtcatttgtttgctttctcttgcagcaaaaataatatgaggtcatcaagggcagagaactgtgtggcatctccttatagtaaaagtgcaatcatatggatggctaactttgtaatctctacaaataatttaccttatgtaattttccaaatgtaaaagtcaccaaaaacttaaaggcattaaaataaactaaaaaagtactcatttcttcaaaaaaaaaaaaaaaaaaa

SEQ ID NO: 13799 - DNA, 2749 bp, Homo sapiens
cacacacacacatacacagaatcctcagataacaggaggcaataaatccaacagcacatccacgttcagagaacagtgtccctgctgtcttgctaacagctgccaatacctcactgagtgcctcacaccaacatgggctccaagtgagtttccttcgtctgggcagactccctcccctcttccataaaggctgcaggagacctgtagctgtcacaggaccttccctaagagcccgcagggaaagactgccccagtccggccatcaccatgctccggaccattctggatgctccccagcggttgctgaaggaggggagagcgtcccggcagctggtgctggtggtggtattcgtcgctttgctcctggacaacatgctgtttactgtggtggtgccaattgtgcccaccttcctatatgacatggagttcaaagaagtcaactcttctctgcacctcggccatgccggaagttccccacatgccctcgcctctcctgccttttccaccatcttctccttcttcaacaacaacaccgtggctgttgaagaaagcgtacctagtggaatagcatggatgaatgacactgccagcaccatcccacctccagccactgaagccatctcagctcataaaaacaactgcttgcaaggcacaggtttcttggaggaagagattacccgggtcggggttctgtttgcttcaaaggctgtgatgcaacttctggtcaacccattcgtgggccctctcaccaacaggattggatatcatatccccatgtttgctggctttgttatcatgtttctctccacagttatgtttgctttttctgggacctatactctactctttgtggcccgaacccttcaaggcattggatcttcattttcatctgttgcaggtcttggaatgctggccagtgtctacactgatgaccatgagagaggacgagccatgggaactgctctggggggcctggccttggggttgctggtgggagctccctttggaagtgtaatgtacgagtttgttgggaagtctgcacccttcctcatcctggccttcctggcactactggatggagcactccagctttgcatcctacagccttccaaagtctctcctgagagtgccaaggggactcccctctttatgcttctcaaagacccttacatcctggtggctgcagggtccatctgctttgccaacatgggggtggccatcctggagcccacactgcccatctggatgatgcagaccatgtgctcccccaagtggcagctgggtctagctttcttgcctgccagtgtgtcctacctcattggcaccaacctctttggtgtgttggccaacaagatgggtcggtggctgtgttccctaatcgggatgctggtagtaggtaccagcttgctctgtgttcctctggctcacaatatttttggtctcattggccccaatgcagggcttggccttgccataggcatggtggattcttctatgatgcccatcatggggcacctggtggatctacgccacacctcggtgtatgggagtgtctacgccatcgctgatgtggctttttgcatgggctttgctataggtccatccaccggtggtgccattgtaaaggccatcggttttccctggctcatggtcatcactggggtcatcaacatcgtctatgctccactctgctactacctgcggagccccccggcaaaggaagagaagcttgctattctgagtcaggactgccccatggagacccggatgtatgcaacccagaagcccacgaaggaatttcctctgggggaggacagtgatgaggagcctgaccatgaggagtagcagcagaaggtgctccttgaattcatgatgcctcagtgaccacctctttccctgggaccagatcaccatggctgagcccacggctcagtgggcttcacatacctctgcctgggaatcttctttcctcccctcccatggacactgtccctgatactcttctcacctgtgtaacttgtagctcttcctctatgccttggtgccgcagtggcccatcttttatgggaagacagagtgatgcaccttcccgctgctgtgaggttgattaaacttgagctgtgacgggttctgcaaggggtgactcattgcatagaggtggtagtgagtaatgtgcccctgaaaccagtggggtgactgacaagcctctttaatctgttgcctgattttctctggcatagtcccaacagatcggaagagtgttaccctcttttcctcaacgtgttctttcccgggttttcccagccgagttgagaaaatgttctcagcattgtcttgctgccaaatgccagcttgaagagttttgttttgttttttttccatttattttttttttttaataaagtgagtgatttttctgtggctaaatctagagctgctaaaagggctttaccctcagtgaaaagtgtcttctattttcattatctttcagaaacaggagcccatttctcttctgctggagttattgacattctcctgacctcccctgtgtgttcctaccttttctgaacctcttagactcttagaaataaaagtagaagaaagacagaaaaaataactgattagacccaagatttcatgggaagaagttaaaagaaactgccttgaaatccctcctgattgtagatttcctaataggaggggtgtaatgtgacattgttcatacttgctaataaatacattattgcct

SEQ ID NO: 13800 - DNA, 2753 bp, Homo sapiens
agaatttggactcatatcaagatgctctgaagaagaacaaccctttaggatagccactgcaacatcatgaccaaagacaaagaacctattgttaaaagcttccattttgtttgccttatgatcataatagttggaaccagaatccagttctccgacggaaatgaatttgcagtagacaagtcaaaaagaggtcttattcatgttccaaaagacctaccgctgaaaaccaaagtcttagatatgtctcagaactacatcgctgagcttcaggtctctgacatgagctttctatcagagttgacagttttgagactttcccataacagaatccagctacttgatttaagtgttttcaagttcaaccaggatttagaatatttggatttatctcataatcagttgcaaaagatatcctgccatcctattgtgagtttcaggcatttagatctctcattcaatgatttcaaggccctgcccatctgtaaggaatttggcaacttatcacaactgaatttcttgggattgagtgctatgaagctgcaaaaattagatttgctgccaattgctcacttgcatctaagttatatccttctggatttaagaaattattatataaaagaaaatgagacagaaagtctacaaattctgaatgcaaaaacccttcaccttgtttttcacccaactagtttattcgctatccaagtgaacatatcagttaatactttagggtgcttacaactgactaatattaaattgaatgatgacaactgtcaagttttcattaaatttttatcagaactcaccagaggttcaaccttactgaattttaccctcaaccacatagaaacgacttggaaatgcctggtcagagtctttcaatttctttggcccaaacctgtggaatatctcaatatttacaatttaacaataattgaaagcattcgtgaagaagattttacttattctaaaacgacattgaaagcattgacaatagaacatatcacgaaccaagtttttctgttttcacagacagctttgtacaccgtgttttctgagatgaacattatgatgttaaccatttcagatacaccttttatacacatgctgtgtcctcatgcaccaagcacattcaagtttttgaactttacccagaacgttttcacagatagtatttttgaaaaatgttccacgttagttaaattggagacacttatcttacaaaaaaatggattaaaagaccttttcaaagtaggtctcatgacgaaggatatgccttctttggaaatactggatgttagctggaattctttggaatctggtagacataaagaaaactgcacttgggttgagagtatagtggtgttaaatttgtcttcaaatatgcttactgactctgttttcagatgtttacctcccaggatcaaggtacttgatcttcacagcaataaaataaagagcgttcctaaacaagtcgtaaaactggaagctttgcaagaactcaatgttgctttcaattctttaactgaccttcctggatgtggcagctttagcagcctttctgtattgatcattgatcacaattcagtttcccacccatcggctgatttcttccagagctgccagaagatgaggtcaataaaagcaggggacaatccattccaatgtacctgtgagctaagagaatttgtcaaaaatatagaccaagtatcaagtgaagtgttagagggctggcctgattcttataagtgtgactacccagaaagttatagaggaagcccactaaaggactttcacatgtctgaattatcctgcaacataactctgctgatcgtcaccatcggtgccaccatgctggtgttggctgtgactgtgacctccctctgcatctacttggatctgccctggtatctcaggatggtgtgccagtggacccagactcggcgcagggccaggaacatacccttagaagaactccaaagaaacctccagtttcatgcttttatttcatatagtgaacatgattctgcctgggtgaaaagtgaattggtaccttacctagaaaaagaagatatacagatttgtcttcatgagaggaactttgtccctggcaagagcattgtggaaaatatcatcaactgcattgagaagagttacaagtccatctttgttttgtctcccaactttgtccagagtgagtggtgccattacgaactctattttgcccatcacaatctctttcatgaaggatctaataacttaatcctcatcttactggaacccattccacagaacagcattcccaacaagtaccacaagctgaaggctctcatgacgcagcggacttatttgcagtggcccaaggagaaaagcaaacgtgggctcttttgggctaacattagagccgcttttaatatgaaattaacactagtcactgaaaacaatgatgtgaaatcttaaaaaaatttaggaaattcaacttaagaaaccattatttacttggatgatggtgaatagtacagtcgtaagtaactgtctggaggtgcctccattatcctcatgccttcaggaaagacttaacaaaaacaatgtttcatctggggaactgagctaggcggtgaggttagcctgccagttagagacagcccagtctcttctggtttaatcattatgtttcaaattgaaacagtctcttttgagtaaatgctcagtttttcagctcctctccactctgctttcccaaatggattctgttg

SEQ ID NO: 13801 - DNA, 3236 bp, Homo sapiens
gtgacccacctgcctcctccgcagagcaatggcggtgtctgccgggtccgcgcggacctcgcccagctcagataaagtacagaaagacaaggctgaactgatctcagggcccaggcaggacagccgaatagggaaactcttgggttttgagtggacagatttgtccagttggcggaggctggtgaccctgctgaatcgaccaacggaccctgcaagcttagctgtctttcgttttctttttgggttcttgatggtgctagacattccccaggagcgggggctcagctctctggaccggaaataccttgatgggctggatgtgtgccgcttccccttgctggatgccctacgcccactgccacttgactggatgtatcttgtctacaccatcatgtttctgggggcactgggcatgatgctgggcctgtgctaccggataagctgtgtgttattcctgctgccatactggtatgtgtttctcctggacaagacatcatggaacaaccactcctatctgtatgggttgttggcctttcagctaacattcatggatgcaaaccactactggtctgtggacggtctgctgaatgcccataggaggaatgcccacgtgcccctttggaactatgcagtgctccgtggccagatcttcattgtgtacttcattgcgggtgtgaaaaagctggatgcagactgggttgaaggctattccatggaatatttgtcccggcactggctcttcagtcccttcaaactgctgttgtctgaggagctgactagcctgctggtcgtgcactggggtgggctgctgcttgacctctcagctggtttcctgctcttttttgatgtctcaagatccattggcctgttctttgtgtcctacttccactgcatgaattcccagcttttcagcattggtatgttctcctacgtcatgctggccagcagccctctcttctgctcccctgagtggcctcggaagctggtgtcctactgcccccgaaggttgcaacaactgttgcccctcaaggcagcccctcagcccagtgtttcctgtgtgtataagaggagccggggcaaaagtggccagaagccagggctgcgccatcagctgggagctgccttcaccctgctctacctcctggagcagctattcctgccctattctcattttctcacccagggctataacaactggacaaatgggctgtatggctattcctgggacatgatggtgcactcccgctcccaccagcacgtgaagatcacctaccgtgatggccgcactggcgaactgggctaccttaaccctggggtatttacacagagtcggcgatggaaggatcatgcagacatgctgaagcaatatgccacttgcctgagccgcctgcttcccaagtataatgtcactgagccccagatctactttgatatttgggtctccatcaatgaccgcttccagcagaggatttttgaccctcgtgtggacatcgtgcaggccgcttggtcaccctttcagcgcacatcctgggtgcaaccactcttgatggacctgtctccctggagggccaagttacaggaaatcaagagcagcctagacaaccacactgaggtggtcttcattgcagatttccctggactgcacttggagaattttgtgagtgaagacctgggcaacactagcatccagctgctgcagggggaagtgactgtggagcttgtggcagaacagaagaaccagactcttcgagagggagaaaaaatgcagttgcctgctggtgagtaccataaggtgtatacgacatcacctagcccttcttgctacatgtacgtctatgtcaacactacagagcttgcactggagcaagacctggcatatctgcaagaattaaaggaaaaggtggagaatggaagtgaaacagggcctctacccccagagctgcagcctctgttggaaggggaagtaaaagggggccctgagccaacacctctggttcagacctttcttagacgccaacaaaggctccaggagattgaacgccggcgaaatactcctttccatgagcgattcttccgcttcttgttgcgaaagctctatgtctttcgccgcagcttcctgatgacttgtatctcacttcgaaatctgatattaggccgtccttccctggagcagctggcccaggaggtgacttatgcaaacttgagaccctttgaggcagttggagaactgaatccctcaaacacggattcttcacattctaatcctcctgagtcaaatcctgatcctgtccactcagagttctgaagggggccagatgttgggtgcagatgtagaagcagccagtcacagacccattctatgcaatggacatttatttgaaaaaaattctcaaaagttttttttttttttttgggggggcggggttctaaagctgtttttaactccgagattacaacttagaggaaccaaggaaataaagcaaataagatttaacaacccaagattaagaggccaggaagaggttagacgcaatgtgaaactgtcctcctaggataaggtttaaagtggctttttgggggctgggtgccgtggctcacgcctgtaatcccagcattttgggaggctgaggtgggcagatcacttgaggccaggagttcgagaccagcctggccaacatggcaaaaccccttctctactaaaaatacaaaaattagccagacgtggtggtgggtgcctgtaatccaactacccaggaggctgaggcatgagaatcgcttgggcccaggaggtggaggttgcagtgagccgagatcgagccactgcactcctgggcaacagagcaagacttcgtctcaaaataaataaataaagtggctcttggggaaaagcaatttaatgtaccacgatgaatagctaactgttcccaagtgtttgctatgtgcaacacaccgcgtgagcagtgttacctgcattattacattaggctgagaggtaaaataatttgcccgaagacatacagctagtgacgaatggactgatggtttgaacttaacgtctatttgacttaaggtcctgcaccctgccacttgtaattttcagaatcactgataatctgaaataatgcagcttaaaacatgttttcttaattaaaagtataaaaaaaaaaaaaaaaaaaaaaaaaaaaaaaaaaaaaaaaaaaaaaaaaaaaaaaaaaaaaaaaaaaaaaaaaaaaaaa

SEQ ID NO: 13802 - DNA, 5684 bp, Homo sapiens
gggttgagcgactcggaggcgagcggaggagctggaatatggggagtcagcgaggacggtggggccaggagcccttgggagggcctacggagggagcggccccaggcgctttctagagcgtgagcggtgggggagcaggcgcagggtggcacgagcggaggcggggcccgggcgtggggcacggctggggaagctgccgcctccggccctgcccggctgcctccgccgcggccagtggctatggagcaggcgggcaccagacctgcggcgacagagcatccacggctccggcggcccatgccctggctgctgctactgcctctcctgctgctgttgctgctgctgctacctggcccagcggcctcccagctgcgatactctgtgccagaggagcaggcacccggcgcgctcgtgggcaacgtggctcgcgcgctggggcttgagctgcggcgcttggggccgggttgcttgcgcatcaaccatctgggtgcgcccagtccgcgctacctggagctggacctgacgagtggagcgctcttcgtcaacgagcgcattgatcgggaggcgctgtgtgagcagcggcctcgctgcctgctcagcctggaagtgctggcgcacaaccccgtggcggtgagcgccgttgaggtggaaatattggacatcaacgacaactcaccgcgtttcccgcggcccaactaccagcttcaggtaagcgaatcggtggcgcctggagcgcgctttcacatagagagtgcgcaggaccccgacgtgggcgccaactcagtacagacctacgagctcagccccagcgagcacttcgagctggaccttaagcccctgcaggagaacagtaaagtgcttgagctggtgctgcgtaagggcctagaccgggagcaggcagccttgcaccacctggttctcacagccgtggatgggggcattccagcccgctcgggtacggcacagatctctgtgcgtgtcctggacactaacgacaactctcctgcctttgaccagtccacttatcgcgtccagctacgggaggactcacccccaggcacattggtggtgaagctgaatgcctcagacccggatgagggctccaatggtgagctcaggtactccttgagcagctacacgtcggaccgggagaggcagctcttcagcatagatgccagtaccggggaagtgcgagtaattggggggctggattatgaggaagcctcctcctaccagatctatgtgcaggcgactgaccggggtccagtgcccatggcaggtcactgcaaggtgctggtggacatcgtggacgtgaatgacaatgccccagaggtggtgctcacggacctgtatagcccagtgcctgagaatgctacacccaacaccattgtggccgttctcagtgtcaatgaccaagactcaggccccaaccggaaagtgagcctgggtctggaggccacactgcctttccgactgaatggctttggaaactcctatacactggtggtgagcggcccactggaccgagagcgggtggctgtctacaacatcacggtgacagccacagatgggggaataccgcagctcacatccctgcgtacactgaaggttgagatctctgacatcaatgacaatccaccaagcttcctggaggactcctattccatctacatacaggagaacaatttgccaggtgtgttgctctgtactgtgcaagccacagacccagatgaaaaggagaatgcagaggtgacctactcccttctggagagggagattcaagggctgccagtcacctcctatgtctccattaacagtgccagtggcagcctttatgctgtcaactcctttgactatgagaagtttcgggagttctttgtgactgtggaggctcaggacaaggggagcccaccactgagcagcactgtgactgccaacgtatatgtggtggacatgaatgaccatgcccctcacattctgtaccctacctcaaccaactcgtcagcagccttcgagatggtgcctcgaactgcccctgctggctacctggtcaccaaagtcatagctatggactcagactctgggcaaaatgcttggcttttttaccatctagcccagacttctgacctggacctctttaaggtagagctgcacacaggagaaattaggactaccaggaagatgggagatgagagtggtagcactttcaacctgaccgtggtggtccgagataatggagagccatcactatcagcctctgtggccattacagtagctgtggtggatagggtttccaaaatcctccctgacactcagaggcatgttaagagccctcggacatactctgaaattaccctttatctaataatagcattaagcacagtgtcttttatatttcttttgacaatcatcattttgagcatcatcaagtgctaccgctacactgcgtatggcactgcatgctgtggaggcttctgtggagtaagggaaaggtcccctgcagaactgtacaaacaagccaacaacaatattgatgccaggataccgcatggcctcaaagtgcagcctcacttcattgaagttcgagggaatggctccctcaccaagacctactgctacaaggcctgtctgacagcaggctcagggagtgacactttcatgttttacaatacaggggcccagacaggaccagggccttcgggagcccaagcagcagtgactgacagcaggaatctcacaggccaaagtggtcagaatgctgggaacctgattattctcaaaaatgaggctgtttctcaaaatgagccacgacagcccaaccctgactggcgttactctgcctccctgagagcaggcatgcacagctctgtgcacctagaggaggctggcattctacgggctggtccaggagggcctgatcagcagtggccaacagtatccagtgcaacaccagaaccagaggcaggagaagtgtcccctccagtcggtgcgggtgtcaacagcaacagctggacctttaaatacggaccaggcaaccccaaacaatccggtcccggtgagttgcccgacaaattcattatcccaggatctcctgcaatcatctccatccggcaggagcctactaacagccaaattgacaaaagtgacttcataaccttcggcaaaaaggaggagaccaagaaaaagaagaaaaagaagaagggtaacaagacccaggagaaaaaagagaaagggaacagcacgactgacaacagtgaccagtgaggtcctcaaatggaaacaagccacttagccagtttttgtaataatggcaaatctctcccatgtagcaattccctgctcctttttcctatctacatgagccctcttagagacctcagaaatctgcagaaagttccctgtgtctgtctagaacgcatttaacaggttttgtcgtaaaagctttactaagtctggtgttaactctttctctccactctggcttgttttcagaacctaaaaagcagacccaagtttcctttctcctccgccgcaaaggagaggcttcccagccccgccagtgagaggttggactctctgccctgtgctccggggatcctgtcttgatgacacttgcagggcaggctgaaaagttttgagattgagcagcttgggagtttgtggccactgggtatgtgtggctaccgcgggtatgcgagtgccagatattggctgagacgagccagcttagactaattggtacaaggaaggcaagaaaacaaagacaaataaacagcggaagttatcagtatggaggggaagtgtaaacttaaagggaccagactttctaaatcttacaactcaagaggtggcagccaccctctaggagacaaaactacccccactgacaaggctttaggagaccctaaagtctgttggctgtgacgtcattatacctaaaatctgcatcatacctgcaagccaacagttcagtgttttaacagagaaccaccctgggaaacagaagcagatctgatgtgtttcctatacatgtcctgtgctcactttattaaaaattcttttgcacacaatgtttatgaaaaggccagatccttttccaatacttatgcaaaagcaaaagaaaaccccgacacctcacctttcgctgtttgttgtttcatagatttatttaaaaaaagagaaagtctatagctataaatctttaaagagaaatatgaatacaattcccctaaactctcctcaaaagagaattcagtctacagccatttaaatgatcattgctgctacagaagtgctttaagagaattgcctgaaacatctgtattatatcggccacctgccaatcacagctttactctttcaggtcactctggggctgcctcttgcatgtattactaaataaaatgatctctctttctctctctctctctcttttctaagaaacaattatgtgcactttgatacacaaccttctctaaccaactatatatcaagacccaaaaattgaagaaaaatattgttttctcatacagtgagcagatttttcaatctactaattctgtgacttgtcttggtgtgctagcctacaccttctctttggtttagttttccttttctataacactctgaattgctaatcttactaacacctatgatgttacctgaaatcaatctcccatatgtatgctgtatgctatgctaagactcctgaaatatacttactctgtgcttgtgtatgtgaatgttaatgcaactattacctagagtgaactttaagctttattgttgaatgtaattccattatatttccttttgtacacctgtgaaaaagtggagtagtgtttttttaaccattgttaatcagcttttgtgtatgaaagacacagtaaaatttctttcttaaatcaagatactggtgattcaaggaattttatttatggtccagccaagagccatctcgtgccaagacttctgctggcaagggaatggataaagctgttttgttctagtaacaattttggaatgaatactgacaatattccatgagggtgtgcaagcacaaattttaccaatctgacctctttgaagttgcagaatgctttgaaattctaatggtatctgaaatatcagctcatagaaagtaacaaaatttgctgtcaccttaaataagacattttaattttgttataatgtacaatttagaagtttgattaattatattatctatttaggcattaatataaaagaggtaggagtctgttatttaaaaaaagcattaaatttaaaaaaaaactgtcttgtctacttttagcttcattctcccatattttgaagggtgtgtaacttcagctctgcaggattgcatggggtaaaacttgttaccaacacatgtgaaccattgctacattgtaggttgtgatcattttgccccactgaagcccatgtatctgaccttacgtgccttttgaactaggagaatcgggctaatttattaatgatgataattataatgtatctgtacagcactttttacatttgcgaagtgctttccaatccatgttagttactagttattacagctgtaaggataaaacacgtcatgtggattcattttgaattggtgctattggtatttcctctgttattgctaataaatgaaaatggtggtatgaaaaaaaaaaaaa

SEQ ID NO: 13803 - DNA, 5260 bp, Homo sapiens
atgctgtcttcctggcaaggaggcccaagaccgcggcaactactgctctggcttctgatcctcgcagcctgggagacgggtagtggccagctccactactccgtccccgaggaagcaaaacacggcaccttcgtgggccgcatcgctcaggacctggggctggagctggcggagctggtgccgcgcctgttccgggtggcgtccaaaagacacggggaccttctggaggtaaatctgcagaatggcattttgtttgtgaattctcggatcgaccgcgaggagctgtgtgggcggagcgcggagtgcagcatccacctggaggtgatcgtggacaggcctctgcaggttttccatgtggaggtgaaggtgagggacattaacgacaacccgcccatattccctgaaagcaagaaacgaataatcattgcagaatctagacctccggaaactcgatttccactagatggcgcatccgatgcagatattggagtaaactcggcattgacctaccgactggatcccaacgattatttcactttggacgcacaaaacagtcttgagcaaatgtcttcattatcacttgtactgaggaaaacactggacagagaggaaattcaggaacatagtttattactgacagccagtgatggaggtaaacccgagctgactggcacagttcagctgctcatcacgattctggacgtgaatgacaacgccccggaattttaccaatccgtttataaagtgacggtgttagagaacgccttcaatggaacattagtgatcaagctaaatgccacagatcctgatgatggtacaaatggagatatagtttactcatttagaaggcctgtatggcctgcagtggtatatgcatttaccataaatccgaacaatggagaaattaggacaaaaggcaaactagatttcgaagaaaagaaattatatgaaatatccgtggaggcagttgacaaaggaaatattccaatggcgggtcattgtacccttttggtggaagtactagatgtaaatgataacgccccagaggttaccatcacttctttgtcactccccatcagagaagacactcagcctagcgccattattgccctaatcagtgtgtccgatcgtgactctggctcaaatggacaggtcacctgcaccttgacgccgcatgtccccttcaagctggtgtccacctacaagaactactactcattagtgctggacagcgccctggaccgcgagagcgtatcagcctatgaactggtggtgaccgcgcgggacgggggctcgccttcgctgtgggccacggccagcgtgtcggtgggggtggccgacgtgaacgacaacgcgccggcgttcgcgcagcccgagtacacggtgttcgtgaaggaaaacaatccgccgggctgccacatcttcacggtgtctgctcaggacgcggacgcacaggagaacgcgctggtctcctactcgctggtggagcggcgggtgggcgagcgtgcgctgtcgagctacgtgtcggtgcacgcggagagcggcaaggtgtacgcgctgcagccgttggaccacgaggagctggagctgttgcagttccaggtgagcgcgcgcgactctggcgtgccgcctctgggcagcaacgtgacgctgcaggtgttcgtgctggacgagaacgacaacgctccggcgctgctgacgcccggggctggcagcgcgggaggcacagtgagcgagctgatgccgcggtcggtgggtgcaggccacgtggtggcgaaggtgcgcgcggtggacgccgattcgggctacaatgcgtggctttcgtatgaattgcagctggcggcggtcggcgcgcgcatcccgttccgcgtggggctgtacactggcgagatcagcacgacgcgccctctggacgaggtggacgcgccgcaccaccgccttctggtgctggtgaaggaccacggtgagcccgcgctgacggccacggcaacggtgctgttgtcgctggtggagagcggccaagcgccacaggcttcgtcgagggcgtcggcaggcgctgtgggtccagaagcggcgctggtggatgtcaatgtttacttgatcattgccatctgcgcggtgtccagcctgttggtgctcacgttgctgctgtatactgcgctgcggtgctcggcaccgcccaccgagggcgcgtgcgcgccgggcaagcccactctagtgtgctccagcgcggcagggagttggtcgtactcgcagcagaggcggccgagggtgtgctctggggagggcccgcataagacggacctcatggccttcagtcccagccttcctccttgtctgggttctgcagagggaacaggccagagggaggaggactcagaatgcttgaaagagccacgacagcccaaccctgactggcgttactctgcctccctgagagcaggcatgcacagctctgtgcacctagaggaggctggcattctacgggctggtccaggagggcctgatcagcagtggccaacagtatccagtgcaacaccagaaccagaggcaggagaagtgtcccctccagtcggtgcgggtgtcaacagcaacagctggacctttaaatacggaccaggcaaccccaaacaatccggtcccggtgagttgcccgacaaattcattatcccaggatctcctgcaatcatctccatccggcaggagcctactaacagccaaattgacaaaagtgacttcataaccttcggcaaaaaggaggagaccaagaaaaagaagaaaaagaagaagggtaacaagacccaggagaaaaaagagaaagggaacagcacgactgacaacagtgaccagtgaggtcctcaaatggaaacaagccacttagccagtttttgtaataatggcaaatctctcccatgtagcaattccctgctcctttttcctatctacatgagccctcttagagacctcagaaatctgcagaaagttccctgtgtctgtctagaacgcatttaacaggttttgtcgtaaaagctttactaagtctggtgttaactctttctctccactctggcttgttttcagaacctaaaaagcagacccaagtttcctttctcctccgccgcaaaggagaggcttcccagccccgccagtgagaggttggactctctgccctgtgctccggggatcctgtcttgatgacacttgcagggcaggctgaaaagttttgagattgagcagcttgggagtttgtggccactgggtatgtgtggctaccgcgggtatgcgagtgccagatattggctgagacgagccagcttagactaattggtacaaggaaggcaagaaaacaaagacaaataaacagcggaagttatcagtatggaggggaagtgtaaacttaaagggaccagactttctaaatcttacaactcaagaggtggcagccaccctctaggagacaaaactacccccactgacaaggctttaggagaccctaaagtctgttggctgtgacgtcattatacctaaaatctgcatcatacctgcaagccaacagttcagtgttttaacagagaaccaccctgggaaacagaagcagatctgatgtgtttcctatacatgtcctgtgctcactttattaaaaattcttttgcacacaatgtttatgaaaaggccagatccttttccaatacttatgcaaaagcaaaagaaaaccccgacacctcacctttcgctgtttgttgtttcatagatttatttaaaaaaagagaaagtctatagctataaatctttaaagagaaatatgaatacaattcccctaaactctcctcaaaagagaattcagtctacagccatttaaatgatcattgctgctacagaagtgctttaagagaattgcctgaaacatctgtattatatcggccacctgccaatcacagctttactctttcaggtcactctggggctgcctcttgcatgtattactaaataaaatgatctctctttctctctctctctctcttttctaagaaacaattatgtgcactttgatacacaaccttctctaaccaactatatatcaagacccaaaaattgaagaaaaatattgttttctcatacagtgagcagatttttcaatctactaattctgtgacttgtcttggtgtgctagcctacaccttctctttggtttagttttccttttctataacactctgaattgctaatcttactaacacctatgatgttacctgaaatcaatctcccatatgtatgctgtatgctatgctaagactcctgaaatatacttactctgtgcttgtgtatgtgaatgttaatgcaactattacctagagtgaactttaagctttattgttgaatgtaattccattatatttccttttgtacacctgtgaaaaagtggagtagtgtttttttaaccattgttaatcagcttttgtgtatgaaagacacagtaaaatttctttcttaaatcaagatactggtgattcaaggaattttatttatggtccagccaagagccatctcgtgccaagacttctgctggcaagggaatggataaagctgttttgttctagtaacaattttggaatgaatactgacaatattccatgagggtgtgcaagcacaaattttaccaatctgacctctttgaagttgcagaatgctttgaaattctaatggtatctgaaatatcagctcatagaaagtaacaaaatttgctgtcaccttaaataagacattttaattttgttataatgtacaatttagaagtttgattaattatattatctatttaggcattaatataaaagaggtaggagtctgttatttaaaaaaagcattaaatttaaaaaaaaactgtcttgtctacttttagcttcattctcccatattttgaagggtgtgtaacttcagctctgcaggattgcatggggtaaaacttgttaccaacacatgtgaaccattgctacattgtaggttgtgatcattttgccccactgaagcccatgtatctgaccttacgtgccttttgaactaggagaatcgggctaatttattaatgatgataattataatgtatctgtacagcactttttacatttgcgaagtgctttccaatccatgttagttactagttattacagctgtaaggataaaacacgtcatgtggattcattttgaattggtgctattggtatttcctctgttattgctaataaatgaaaatggtggtatg

SEQ ID NO: 13804 - DNA, 5360 bp, Homo sapiens
tgactgtgatgctggaaaaaatttactaaatatgtacttacagaaaagggtgactgctcataaaatacctcaggcaagcgatcccttaaaactgattgtcccaactcagaggccctcattttctgcaatggtgattatcggaccaagaggcccgggatcccagcgtctgctgctctcgcttctgctccttgcagcctgggaggtggggagcggccagctccactactccgtctacgaggaggccaaacacggcaccttcgtgggccgcatcgctcaggacctggggctggagctggcggagctggtgccgcgcctgttccgggtggcgtccaaaagacacggggaccttctggaggtaaatctgcagaatggcattttgtttgtgaattctcggatcgaccgcgagaagctgtgcgggcggagcgcggagtgcagtatccacctggaggtgatcgtggacaggccgctgcaggttttccatgtggacgtggaggtgaaggacattaacgacaacccgccggtgttcagagaaagggaacaaaaggtacctgtttctgaatctgcgcctctggactctcattttcctctagagggcgcttctgatgcggatatcggcgtaaactctcttttgacctatgcgttaagtctaaatgagaattttgagcttaaaataaaaacaaaaaaagataaaagtatattgcctgaattagttcttcggaagttattggacagagagcaaacgccaaaactcaatttattgctgatggtaatcgatggcggtaaaccagaactaacagggtctgtccagattcaaataaccgtcctggatgtgaatgacaatggtccggcgtttgataagcccagctataaagtagtgttgtctgaaaatgtccaaaacgacacaagagtgatccaactaaatgcttccgatccagacgaaggacttaatggagaaatttcctatgggatcaaaatgattttgccagtgagtgagaaatgtatgttttcaataaatccagacacaggtgaaattagaatttatggtgaactggattttgaagagaataatgcctatgaaattcaggttaacgccattgataaagggattccttccatggcaggtcacagcatggtcctggtggaagttctggacgtgaatgacaatgtccctgaagtaatggttacttcactgtcgctccctgtgcaagaggatgctcaggtgggtaccgtcattgccctgattagcgtgtcggatcgtgactctggagccaatggacaggtcatctgctcactgacacctcatgttcccttcaagctggtgtccacctacaagaattactactcgttggtgctggacagcgccctggaccgcgagagcgtgtcggcctatgagctggtggtgactgcgcgggatgggggctcgccttcgctgtgggccacggctagagtgtccgtggaggtggccgacgtgaacgacaatgcgcctgcgttcgcgcagcccgagtacacagtgttcgtgaaggagaacaacccgccgggctgccacatcttcacggtgtcggcatgggacgcggacgcgcagaagaacgcgctggtgtcctactcgctggtggagcggcgggtgggcgagcacgcactgtcgagctacgtgtcggtgcacgcggagagcggcaaggtgtacgcgctgcagccgctagaccacgaggagctggagctgctgcagttccaggtgagcgcgcgcgacgccggcgtgccgcctctgggcagcaacgtgacgctgcaggtgttcgtgctggacgagaacgacaacgcgccggcactgctggcgactccggctggcagcgcaggaggcgcagttagcgagttggtaccgcggtcggtgggtgcgggccacgtggtggcgaaagtgcgcgcggtggacgctgactccggctataacgcttggctgtcctacgagttgcaaccggcggcggtcggcgcgcacatcccgttccacgtggggctgtacactggcgagatcagcacgacacgcatcctggatgaggcggacgctccgcgccaccgcctgctggtgctggtgaaggaccacggtgagcccgcgctgacgtccacggccacggtgctggtgtcgctggtggagaacggccaggccccaaagacgtcgtcgcgggcctcagtgggcgctgtggatcccgaagcggctctggtggatattaacgtgtacctcatcatcgccatctgtgcggtgtccagcctgctggtgctcacgctgctgctgtacactgcgctgcgttgctcagcgccgcccaccgtgagccggtgcgcgccgggcaagcccacgctggtgtgctccagcgccgtggggagttggtcttactcgcagcagaggaggcagagggtgtgctctgcagagagcccgcccaagacggacctcatggccttcagcccaagccttcagctgtctcgagaagattgtttaaatcctcccagtgaaccacgacagcccaaccctgactggcgttactctgcctccctgagagcaggcatgcacagctctgtgcacctagaggaggctggcattctacgggctggtccaggagggcctgatcagcagtggccaacagtatccagtgcaacaccagaaccagaggcaggagaagtgtcccctccagtcggtgcgggtgtcaacagcaacagctggacctttaaatacggaccaggcaaccccaaacaatccggtcccggtgagttgcccgacaaattcattatcccaggatctcctgcaatcatctccatccggcaggagcctactaacagccaaattgacaaaagtgacttcataaccttcggcaaaaaggaggagaccaagaaaaagaagaaaaagaagaagggtaacaagacccaggagaaaaaagagaaagggaacagcacgactgacaacagtgaccagtgaggtcctcaaatggaaacaagccacttagccagtttttgtaataatggcaaatctctcccatgtagcaattccctgctcctttttcctatctacatgagccctcttagagacctcagaaatctgcagaaagttccctgtgtctgtctagaacgcatttaacaggttttgtcgtaaaagctttactaagtctggtgttaactctttctctccactctggcttgttttcagaacctaaaaagcagacccaagtttcctttctcctccgccgcaaaggagaggcttcccagccccgccagtgagaggttggactctctgccctgtgctccggggatcctgtcttgatgacacttgcagggcaggctgaaaagttttgagattgagcagcttgggagtttgtggccactgggtatgtgtggctaccgcgggtatgcgagtgccagatattggctgagacgagccagcttagactaattggtacaaggaaggcaagaaaacaaagacaaataaacagcggaagttatcagtatggaggggaagtgtaaacttaaagggaccagactttctaaatcttacaactcaagaggtggcagccaccctctaggagacaaaactacccccactgacaaggctttaggagaccctaaagtctgttggctgtgacgtcattatacctaaaatctgcatcatacctgcaagccaacagttcagtgttttaacagagaaccaccctgggaaacagaagcagatctgatgtgtttcctatacatgtcctgtgctcactttattaaaaattcttttgcacacaatgtttatgaaaaggccagatccttttccaatacttatgcaaaagcaaaagaaaaccccgacacctcacctttcgctgtttgttgtttcatagatttatttaaaaaaagagaaagtctatagctataaatctttaaagagaaatatgaatacaattcccctaaactctcctcaaaagagaattcagtctacagccatttaaatgatcattgctgctacagaagtgctttaagagaattgcctgaaacatctgtattatatcggccacctgccaatcacagctttactctttcaggtcactctggggctgcctcttgcatgtattactaaataaaatgatctctctttctctctctctctctcttttctaagaaacaattatgtgcactttgatacacaaccttctctaaccaactatatatcaagacccaaaaattgaagaaaaatattgttttctcatacagtgagcagatttttcaatctactaattctgtgacttgtcttggtgtgctagcctacaccttctctttggtttagttttccttttctataacactctgaattgctaatcttactaacacctatgatgttacctgaaatcaatctcccatatgtatgctgtatgctatgctaagactcctgaaatatacttactctgtgcttgtgtatgtgaatgttaatgcaactattacctagagtgaactttaagctttattgttgaatgtaattccattatatttccttttgtacacctgtgaaaaagtggagtagtgtttttttaaccattgttaatcagcttttgtgtatgaaagacacagtaaaatttctttcttaaatcaagatactggtgattcaaggaattttatttatggtccagccaagagccatctcgtgccaagacttctgctggcaagggaatggataaagctgttttgttctagtaacaattttggaatgaatactgacaatattccatgagggtgtgcaagcacaaattttaccaatctgacctctttgaagttgcagaatgctttgaaattctaatggtatctgaaatatcagctcatagaaagtaacaaaatttgctgtcaccttaaataagacattttaattttgttataatgtacaatttagaagtttgattaattatattatctatttaggcattaatataaaagaggtaggagtctgttatttaaaaaaagcattaaatttaaaaaaaaactgtcttgtctacttttagcttcattctcccatattttgaagggtgtgtaacttcagctctgcaggattgcatggggtaaaacttgttaccaacacatgtgaaccattgctacattgtaggttgtgatcattttgccccactgaagcccatgtatctgaccttacgtgccttttgaactaggagaatcgggctaatttattaatgatgataattataatgtatctgtacagcactttttacatttgcgaagtgctttccaatccatgttagttactagttattacagctgtaaggataaaacacgtcatgtggattcattttgaattggtgctattggtatttcctctgttattgctaataaatgaaaatggtggtatg

SEQ ID NO: 13805 - DNA, 4468 bp, Homo sapiens
atggtgttttctaggagagggggcctgggagcccgggatctgcttctttggcttctgctcctcgcagcctgggaggtggggagcggccagctccactactcgatcccggaggaagccaaacacggcaccttcgttggccgcgttgctcaggacctgggactggagctggcggagctggtgcctcgcctgttccgggtggcgtccaaaacacacagggaccttctggaggtaaatctgcagaatggcattttgtttgtgaattctcggatcgatcgcgaggagctgtgccagtggagcgcggagtgcagcatccacctggagttgatcgccgacaggccgctgcaggttttccatgtggaggtgaaggtgaaagacattaacgataatccacccgtcttcaggggcagagaacaaataatatttattcctgaatctagactcctgaattcgcgttttccgatagaaggagctgctgatgcagacattggtgctaacgctcttctaacgtacacgctcagcccgagtgattatttctctttggatgtagaggcaagtgatgaactgagtaaatctctttggcttgaattgagaaaatatttggatagagaagaaacaccagaacttcacttattactgactgccactgatgggggcaaaccggagctgcaaggtacagttgagctgctgatcaccgtcctcgacgttaatgataacgccccactgtttgaccaggccgtatacagagtccacttgttagagactacagcaaatggaacattagtgaccacattaaatgcctctgatgctgacgaaggtgtaaatggtgaagtcgtcttttcctttgacagtggtatttctcgtgacattcaagaaaaattcaaagttgattccagctcaggagaaattaggttaattgataaactggattatgaagaaacaaaatcctacgaaattcaagtaaaggcagttgataaaggaagtcctccgatgtcaaatcactgtaaggttttggtgaaagtgctggatgtaaatgataatgctccagaactggcggtcacttcattgtatttgcctatcagagaggacgctccactcagcaccgtcatcgccctcatcaccgtgtctgaccgtgactcaggtgccaacgggcaggtgacttgctccttaatgccccacgtccccttcaagctggtgtccaccttcaagaattactactcgttggtgttggacagcgccctggatcgcgagagcctgtcggtctatgagctggtggtgaccgcgcgggacgggggctcgccttcgctgtgggccacggccagggtgtccgtggaggtggccgacgtgaatgacaacgcgcctgcgttcgcgcagcccgagtacacagtattcgtgaaggagaacaacccgccgggctgccacatcttcacggtgtctgcgcgggacgcggacgcgcaggagaacgcgctggtgtcctattcgctggtggaacggcgggtgggcgagcgcgcgctgtcgaactacgtgtcagtgcacgcggagagcggcaaggtgtacgcactgcagcccctggaccacgaggagctggagctgctgcagttccagccacgacagcccaaccctgactggcgttactctgcctccctgagagcaggcatgcacagctctgtgcacctagaggaggctggcattctacgggctggtccaggagggcctgatcagcagtggccaacagtatccagtgcaacaccagaaccagaggcaggagaagtgtcccctccagtcggtgcgggtgtcaacagcaacagctggacctttaaatacggaccaggcaaccccaaacaatccggtcccggtgagttgcccgacaaattcattatcccaggatctcctgcaatcatctccatccggcaggagcctactaacagccaaattgacaaaagtgacttcataaccttcggcaaaaaggaggagaccaagaaaaagaagaaaaagaagaagggtaacaagacccaggagaaaaaagagaaagggaacagcacgactgacaacagtgaccagtgaggtcctcaaatggaaacaagccacttagccagtttttgtaataatggcaaatctctcccatgtagcaattccctgctcctttttcctatctacatgagccctcttagagacctcagaaatctgcagaaagttccctgtgtctgtctagaacgcatttaacaggttttgtcgtaaaagctttactaagtctggtgttaactctttctctccactctggcttgttttcagaacctaaaaagcagacccaagtttcctttctcctccgccgcaaaggagaggcttcccagccccgccagtgagaggttggactctctgccctgtgctccggggatcctgtcttgatgacacttgcagggcaggctgaaaagttttgagattgagcagcttgggagtttgtggccactgggtatgtgtggctaccgcgggtatgcgagtgccagatattggctgagacgagccagcttagactaattggtacaaggaaggcaagaaaacaaagacaaataaacagcggaagttatcagtatggaggggaagtgtaaacttaaagggaccagactttctaaatcttacaactcaagaggtggcagccaccctctaggagacaaaactacccccactgacaaggctttaggagaccctaaagtctgttggctgtgacgtcattatacctaaaatctgcatcatacctgcaagccaacagttcagtgttttaacagagaaccaccctgggaaacagaagcagatctgatgtgtttcctatacatgtcctgtgctcactttattaaaaattcttttgcacacaatgtttatgaaaaggccagatccttttccaatacttatgcaaaagcaaaagaaaaccccgacacctcacctttcgctgtttgttgtttcatagatttatttaaaaaaagagaaagtctatagctataaatctttaaagagaaatatgaatacaattcccctaaactctcctcaaaagagaattcagtctacagccatttaaatgatcattgctgctacagaagtgctttaagagaattgcctgaaacatctgtattatatcggccacctgccaatcacagctttactctttcaggtcactctggggctgcctcttgcatgtattactaaataaaatgatctctctttctctctctctctctcttttctaagaaacaattatgtgcactttgatacacaaccttctctaaccaactatatatcaagacccaaaaattgaagaaaaatattgttttctcatacagtgagcagatttttcaatctactaattctgtgacttgtcttggtgtgctagcctacaccttctctttggtttagttttccttttctataacactctgaattgctaatcttactaacacctatgatgttacctgaaatcaatctcccatatgtatgctgtatgctatgctaagactcctgaaatatacttactctgtgcttgtgtatgtgaatgttaatgcaactattacctagagtgaactttaagctttattgttgaatgtaattccattatatttccttttgtacacctgtgaaaaagtggagtagtgtttttttaaccattgttaatcagcttttgtgtatgaaagacacagtaaaatttctttcttaaatcaagatactggtgattcaaggaattttatttatggtccagccaagagccatctcgtgccaagacttctgctggcaagggaatggataaagctgttttgttctagtaacaattttggaatgaatactgacaatattccatgagggtgtgcaagcacaaattttaccaatctgacctctttgaagttgcagaatgctttgaaattctaatggtatctgaaatatcagctcatagaaagtaacaaaatttgctgtcaccttaaataagacattttaattttgttataatgtacaatttagaagtttgattaattatattatctatttaggcattaatataaaagaggtaggagtctgttatttaaaaaaagcattaaatttaaaaaaaaactgtcttgtctacttttagcttcattctcccatattttgaagggtgtgtaacttcagctctgcaggattgcatggggtaaaacttgttaccaacacatgtgaaccattgctacattgtaggttgtgatcattttgccccactgaagcccatgtatctgaccttacgtgccttttgaactaggagaatcgggctaatttattaatgatgataattataatgtatctgtacagcactttttacatttgcgaagtgctttccaatccatgttagttactagttattacagctgtaaggataaaacacgtcatgtggattcattttgaattggtgctattggtatttcctctgttattgctaataaatgaaaatggtggtatg

SEQ ID NO: 13806 - DNA, 5260 bp, Homo sapiens
atggtgttttctaggagagggggcctgggagcccgggatctgcttctttggcttctgctcctcgcagcctgggaggtggggagcggccagctccactactcgatcccggaggaagccaaacacggcaccttcgttggccgcgttgctcaggacctgggactggagctggcggagctggtgcctcgcctgttccgggtggcgtccaaaacacacagggaccttctggaggtaaatctgcagaatggcattttgtttgtgaattctcggatcgatcgcgaggagctgtgccagtggagcgcggagtgcagcatccacctggagttgatcgccgacaggccgctgcaggttttccatgtggaggtgaaggtgaaagacattaacgataatccacccgtcttcaggggcagagaacaaataatatttattcctgaatctagactcctgaattcgcgttttccgatagaaggagctgctgatgcagacattggtgctaacgctcttctaacgtacacgctcagcccgagtgattatttctctttggatgtagaggcaagtgatgaactgagtaaatctctttggcttgaattgagaaaatatttggatagagaagaaacaccagaacttcacttattactgactgccactgatgggggcaaaccggagctgcaaggtacagttgagctgctgatcaccgtcctcgacgttaatgataacgccccactgtttgaccaggccgtatacagagtccacttgttagagactacagcaaatggaacattagtgaccacattaaatgcctctgatgctgacgaaggtgtaaatggtgaagtcgtcttttcctttgacagtggtatttctcgtgacattcaagaaaaattcaaagttgattccagctcaggagaaattaggttaattgataaactggattatgaagaaacaaaatcctacgaaattcaagtaaaggcagttgataaaggaagtcctccgatgtcaaatcactgtaaggttttggtgaaagtgctggatgtaaatgataatgctccagaactggcggtcacttcattgtatttgcctatcagagaggacgctccactcagcaccgtcatcgccctcatcaccgtgtctgaccgtgactcaggtgccaacgggcaggtgacttgctccttaatgccccacgtccccttcaagctggtgtccaccttcaagaattactactcgttggtgttggacagcgccctggatcgcgagagcctgtcggtctatgagctggtggtgaccgcgcgggacgggggctcgccttcgctgtgggccacggccagggtgtccgtggaggtggccgacgtgaatgacaacgcgcctgcgttcgcgcagcccgagtacacagtattcgtgaaggagaacaacccgccgggctgccacatcttcacggtgtctgcgcgggacgcggacgcgcaggagaacgcgctggtgtcctattcgctggtggaacggcgggtgggcgagcgcgcgctgtcgaactacgtgtcagtgcacgcggagagcggcaaggtgtacgcactgcagcccctggaccacgaggagctggagctgctgcagttccaggtgagcgcgcgggatgcgggcgtgccgcctctgggcagcaacgtgacgctgcaggtgttcgtgctggacgagaacgacaacgcgccggcgctgctggcgcctcgagtgggtggcactattggtgcagtcagtgagctggtgccgcgattggtgggtgcgggtcatgtggtggcgaaggtgcgcgcagtggacgccgactcgggctacaacgcgtggctgtcctatgaactgcagccggcagcaggcggcgcgcgcatcccgttccgcgtggggctgtacacgggcgagatcagcacgactcgtgtcctggacgaggctgacttgtcgcgctaccgccttctggtgctagtgaaggatcacggtgagccggcgctgacagccacggccactgtgcttgtatctctggtggagagcggccaggcgccaaaggcgtcttcgcgggcgtcggtgggtgtcgcgggcccagaggcggcgctggtggatgtcaacgtgtacctgatcatcgccatctgcgcggtgtccagcctgctggtgctcacactgctgctgtacacggcgctgcggtgctcagtgccgcccactgagggtgcgtatgtgccgggcaagcccactctggtgtgctccagcgcgttggggagctggtcgaactcacagcagaggcggcagagggtgtgctctagcgagggcccacccaagaccgacctcatggccttcagcccaggcctatctccaagtcttaacacgtcagaaagaaatgaacaaccagaagcaaatttggatctttctggtaatccacgacagcccaaccctgactggcgttactctgcctccctgagagcaggcatgcacagctctgtgcacctagaggaggctggcattctacgggctggtccaggagggcctgatcagcagtggccaacagtatccagtgcaacaccagaaccagaggcaggagaagtgtcccctccagtcggtgcgggtgtcaacagcaacagctggacctttaaatacggaccaggcaaccccaaacaatccggtcccggtgagttgcccgacaaattcattatcccaggatctcctgcaatcatctccatccggcaggagcctactaacagccaaattgacaaaagtgacttcataaccttcggcaaaaaggaggagaccaagaaaaagaagaaaaagaagaagggtaacaagacccaggagaaaaaagagaaagggaacagcacgactgacaacagtgaccagtgaggtcctcaaatggaaacaagccacttagccagtttttgtaataatggcaaatctctcccatgtagcaattccctgctcctttttcctatctacatgagccctcttagagacctcagaaatctgcagaaagttccctgtgtctgtctagaacgcatttaacaggttttgtcgtaaaagctttactaagtctggtgttaactctttctctccactctggcttgttttcagaacctaaaaagcagacccaagtttcctttctcctccgccgcaaaggagaggcttcccagccccgccagtgagaggttggactctctgccctgtgctccggggatcctgtcttgatgacacttgcagggcaggctgaaaagttttgagattgagcagcttgggagtttgtggccactgggtatgtgtggctaccgcgggtatgcgagtgccagatattggctgagacgagccagcttagactaattggtacaaggaaggcaagaaaacaaagacaaataaacagcggaagttatcagtatggaggggaagtgtaaacttaaagggaccagactttctaaatcttacaactcaagaggtggcagccaccctctaggagacaaaactacccccactgacaaggctttaggagaccctaaagtctgttggctgtgacgtcattatacctaaaatctgcatcatacctgcaagccaacagttcagtgttttaacagagaaccaccctgggaaacagaagcagatctgatgtgtttcctatacatgtcctgtgctcactttattaaaaattcttttgcacacaatgtttatgaaaaggccagatccttttccaatacttatgcaaaagcaaaagaaaaccccgacacctcacctttcgctgtttgttgtttcatagatttatttaaaaaaagagaaagtctatagctataaatctttaaagagaaatatgaatacaattcccctaaactctcctcaaaagagaattcagtctacagccatttaaatgatcattgctgctacagaagtgctttaagagaattgcctgaaacatctgtattatatcggccacctgccaatcacagctttactctttcaggtcactctggggctgcctcttgcatgtattactaaataaaatgatctctctttctctctctctctctcttttctaagaaacaattatgtgcactttgatacacaaccttctctaaccaactatatatcaagacccaaaaattgaagaaaaatattgttttctcatacagtgagcagatttttcaatctactaattctgtgacttgtcttggtgtgctagcctacaccttctctttggtttagttttccttttctataacactctgaattgctaatcttactaacacctatgatgttacctgaaatcaatctcccatatgtatgctgtatgctatgctaagactcctgaaatatacttactctgtgcttgtgtatgtgaatgttaatgcaactattacctagagtgaactttaagctttattgttgaatgtaattccattatatttccttttgtacacctgtgaaaaagtggagtagtgtttttttaaccattgttaatcagcttttgtgtatgaaagacacagtaaaatttctttcttaaatcaagatactggtgattcaaggaattttatttatggtccagccaagagccatctcgtgccaagacttctgctggcaagggaatggataaagctgttttgttctagtaacaattttggaatgaatactgacaatattccatgagggtgtgcaagcacaaattttaccaatctgacctctttgaagttgcagaatgctttgaaattctaatggtatctgaaatatcagctcatagaaagtaacaaaatttgctgtcaccttaaataagacattttaattttgttataatgtacaatttagaagtttgattaattatattatctatttaggcattaatataaaagaggtaggagtctgttatttaaaaaaagcattaaatttaaaaaaaaactgtcttgtctacttttagcttcattctcccatattttgaagggtgtgtaacttcagctctgcaggattgcatggggtaaaacttgttaccaacacatgtgaaccattgctacattgtaggttgtgatcattttgccccactgaagcccatgtatctgaccttacgtgccttttgaactaggagaatcgggctaatttattaatgatgataattataatgtatctgtacagcactttttacatttgcgaagtgctttccaatccatgttagttactagttattacagctgtaaggataaaacacgtcatgtggattcattttgaattggtgctattggtatttcctctgttattgctaataaatgaaaatggtggtatg

SEQ ID NO: 13807 - DNA, 5218 bp, Homo sapiens
atggtatattcccggagaggaagtctgggatcccggctcctgctgctctggcttctccttgcctactggaaggcagggagcggccagctccactactcgatcccggaggaagccaaacacggaaccttcgttggccgcatcgcgcaggacctagggctggagctggcggagctggtgccgcgcctgttccgggtggcgtccaagggccgcggggaccttctggaggtaaatctgcagaatggcattttgtttgtgaattctcggatcgaccgggaggagctgtgccggcggagggcggagtgcagcatccacctggaggtgatcgtggacaggccgctgcaggttttccatgtggaggtggcagtgaaggacatcaatgacaatccgcccaggttctccagacaagaacaaagattattcattttagagtcaagaatgccagattcgcggtttccgctagagggcgcgtcggatttggatattggagcaaatgcacaattgagatacaggttaaatccaaacgaatattttgacttagatgttaaaacaaatgaagaagaaacgaactttttagagctggttttgaggaaatccttagatagagaagaaacacaagaacaccgtttattagtgattgcaactgatggaggaaaacccgaactaacaggtacagttcagttgttgatcaatgtattggatgctaatgataacgccccagaatttgataaatccatttataatgtcagattgttggaaaatgcaccaagtgggacattagttattaaactgaacgcctcagatgcagatgagggcatcaataaggaaatagtgtatttctttagtaatcttgttcttgacgatgtaaagtccaaatttataattaattctaatactggtgaaataaaagttaacggggaactggattatgaagactataactcatatgaaattaatattgatgccatggataaaagtacattcccattatcaggacactgtaaagtagtagtgaaactcctggatgtgaatgataataccccagagatggccataaccacccttttcctgcctgtcaaagaggacgctccactcagcacggtcattgctctgatcagcgtgtctgaccgtgactcaggtgccaacgggcaggtgacctgctccctaatgccccacgttcccttcaagctggtgtccaccttcaagaattactactcgttggtgctggacagcgccctggaccgcgagagcgtgtcggtctatgagctggtggtgaccgcgcgggacgggggctcgccttcgctgtgggccaccgccagcgtgtctgtggaagtggccgacgtgaacgacaacgctccggcgttcgcgcagccccagtataccgtgttcgtgaaggagaacaacccgccaggctgccacatcttcacggtgtctgcacgggacgcggacgcgcaggagaacgccctggtgtcctactcgctggtggagcggcgggtgggcgagcgcccgctgtcgagttacgtttcggtgcacgcggagagcggcaaggtgtacgcgctgcagccgctggaccacgaggaagtggagctgctgcagttccaggtgagcgcgcgcgacgcgggcgtgccgcctctgggcagcaacgtgacgctgcaggtgttcgtgctggacgagaacgacaacgcgccggcgctgctggtgcctcgagtgggtggcaccggcggcgcagtgagcgagctggtgccgaggtcagtgggtgcgggccacgtggtggcgaaggtgcgcgcagtggaccctgattcgggctacaacgcttggctttcgtatgagctgcagccagcgcctggcagtgcgcgcatcccgttccgcgtggggctgtacacaggcgagatcagcacaacacgctctctggatgagaccgaagcaccgcgccaccgccttctggtgctggtgaaggaccatggagagcccccgctgacagccacagccacagtgctggtgtcgctggtggaaagtggccaggcgccgaaggcctcatcgcgggcgtcggcgggcgctgtgggtcccgaggctgccctggtggatgtcaacgtgtacctgatcatcgccatctgtgcggtgtccagcctgctggtgctcacgctgctgctgtacaccgcgctgcggtgctcggcgcagcccaccgaggccgtgtgcacacggggcaagcccactctgttgtgctccagcgcggtggggagctggtcgtactcgcagcagaggagacagagggtgtgctctggggaagctccacccaaaacagacctcatggccttcagtccaagccttcctcagggtcccacctctacagacaacccacgacagcccaaccctgactggcgttactctgcctccctgagagcaggcatgcacagctctgtgcacctagaggaggctggcattctacgggctggtccaggagggcctgatcagcagtggccaacagtatccagtgcaacaccagaaccagaggcaggagaagtgtcccctccagtcggtgcgggtgtcaacagcaacagctggacctttaaatacggaccaggcaaccccaaacaatccggtcccggtgagttgcccgacaaattcattatcccaggatctcctgcaatcatctccatccggcaggagcctactaacagccaaattgacaaaagtgacttcataaccttcggcaaaaaggaggagaccaagaaaaagaagaaaaagaagaagggtaacaagacccaggagaaaaaagagaaagggaacagcacgactgacaacagtgaccagtgaggtcctcaaatggaaacaagccacttagccagtttttgtaataatggcaaatctctcccatgtagcaattccctgctcctttttcctatctacatgagccctcttagagacctcagaaatctgcagaaagttccctgtgtctgtctagaacgcatttaacaggttttgtcgtaaaagctttactaagtctggtgttaactctttctctccactctggcttgttttcagaacctaaaaagcagacccaagtttcctttctcctccgccgcaaaggagaggcttcccagccccgccagtgagaggttggactctctgccctgtgctccggggatcctgtcttgatgacacttgcagggcaggctgaaaagttttgagattgagcagcttgggagtttgtggccactgggtatgtgtggctaccgcgggtatgcgagtgccagatattggctgagacgagccagcttagactaattggtacaaggaaggcaagaaaacaaagacaaataaacagcggaagttatcagtatggaggggaagtgtaaacttaaagggaccagactttctaaatcttacaactcaagaggtggcagccaccctctaggagacaaaactacccccactgacaaggctttaggagaccctaaagtctgttggctgtgacgtcattatacctaaaatctgcatcatacctgcaagccaacagttcagtgttttaacagagaaccaccctgggaaacagaagcagatctgatgtgtttcctatacatgtcctgtgctcactttattaaaaattcttttgcacacaatgtttatgaaaaggccagatccttttccaatacttatgcaaaagcaaaagaaaaccccgacacctcacctttcgctgtttgttgtttcatagatttatttaaaaaaagagaaagtctatagctataaatctttaaagagaaatatgaatacaattcccctaaactctcctcaaaagagaattcagtctacagccatttaaatgatcattgctgctacagaagtgctttaagagaattgcctgaaacatctgtattatatcggccacctgccaatcacagctttactctttcaggtcactctggggctgcctcttgcatgtattactaaataaaatgatctctctttctctctctctctctcttttctaagaaacaattatgtgcactttgatacacaaccttctctaaccaactatatatcaagacccaaaaattgaagaaaaatattgttttctcatacagtgagcagatttttcaatctactaattctgtgacttgtcttggtgtgctagcctacaccttctctttggtttagttttccttttctataacactctgaattgctaatcttactaacacctatgatgttacctgaaatcaatctcccatatgtatgctgtatgctatgctaagactcctgaaatatacttactctgtgcttgtgtatgtgaatgttaatgcaactattacctagagtgaactttaagctttattgttgaatgtaattccattatatttccttttgtacacctgtgaaaaagtggagtagtgtttttttaaccattgttaatcagcttttgtgtatgaaagacacagtaaaatttctttcttaaatcaagatactggtgattcaaggaattttatttatggtccagccaagagccatctcgtgccaagacttctgctggcaagggaatggataaagctgttttgttctagtaacaattttggaatgaatactgacaatattccatgagggtgtgcaagcacaaattttaccaatctgacctctttgaagttgcagaatgctttgaaattctaatggtatctgaaatatcagctcatagaaagtaacaaaatttgctgtcaccttaaataagacattttaattttgttataatgtacaatttagaagtttgattaattatattatctatttaggcattaatataaaagaggtaggagtctgttatttaaaaaaagcattaaatttaaaaaaaaactgtcttgtctacttttagcttcattctcccatattttgaagggtgtgtaacttcagctctgcaggattgcatggggtaaaacttgttaccaacacatgtgaaccattgctacattgtaggttgtgatcattttgccccactgaagcccatgtatctgaccttacgtgccttttgaactaggagaatcgggctaatttattaatgatgataattataatgtatctgtacagcactttttacatttgcgaagtgctttccaatccatgttagttactagttattacagctgtaaggataaaacacgtcatgtggattcattttgaattggtgctattggtatttcctctgttattgctaataaatgaaaatggtggtatg

SEQ ID NO: 13808 - DNA, 4465 bp, Homo sapiens
atggtttccagatgtagctgcctgggggtccagtgtctgctgctctcgcttcttctcctcgcagcctgggaggtggggagcggccagctccactactcagtctacgaggaggccagacacggcaccttcgtgggccgcatcgcgcaggacctggggctggagctggcggagctggtgcagcgcctgttccgggtggcgtccaaaagacacggggaccttctggaggtaaatctgcagaatggcattttgtttgtgaattctcggattgaccgcgaggagctgtgcgggcggagcgtggagtgcagcatccacctggaggtgatcgtggacaggccgctgcaggttttccatgtggacgtggaagtgaaggacattaacgacaacccgcccaggttctccgtaacagaacaaaagctctcaatacctgaatccagactgcttgactctcgatttccactagaaggcgcatctgatgcggatgttggagagaacgcattgcttacttacaaactcagtccaaatgagtattttgttcttgatattataaacaaaaaagacaaagacaaattcccagtgcttgttctgcggaagctgctggatcgtgaagaaaatcctcagctaaagttgttgttgacagcaactgatggaggcaaacctgaatttaccggatctgtttctctgctgatcctggtgttagatgccaatgataacgcccctatctttgacagaccggtttatgaagttaagatgtatgaaaatcaagtgaaccaaacattagtaatacggctcaacgcttctgattcggatgaaggaataaacaaggaaatgatgtattcatttagctctttggtcccacccacgataagaaggaaattttggataaacgaaaggacgggagaaataaaagtaaatgatgctattgactttgaggacagtaacacttatgaaattcatgtagatgttacagataagggaaacccacctatggttggtcactgcacggtcctagtggaactactggatgaaaatgataattcacctgaggtgattgtcacttctctgtctctcccagtgaaagaagatgctcaagtgggcaccgtcattgccctaatcagcgtttctgaccatgattcaggagccaacggacaggtcacctgctctctgacgcctcacgttccgttcaagctggtgtccacctacaagaattactactcattggtgctggacagcgctctggaccgcgagagggtgtcggcctatgagctggtggtgaccgcgcgggacgggggctcgcctccgctgtgggccacggccagcgtgtctgtggaggtggccgacgtgaacgacaacgcgcctgcgttcgcgcagtccgagtacacggtgttcgtgaaggagaacaacccgccaggctgccacatcttcacggtgtctgcgtgggacgcggacgcgcaggagaacgccctggtgtcctactctctggtggagcggcggttgggcgagcgctcgctgtcgagctacgtgtcggtgcacgcggagagcggcaaggtgtacgcgctgcagccgctggaccacgaggagctggagctgctacagttccagccacgacagcccaaccctgactggcgttactctgcctccctgagagcaggcatgcacagctctgtgcacctagaggaggctggcattctacgggctggtccaggagggcctgatcagcagtggccaacagtatccagtgcaacaccagaaccagaggcaggagaagtgtcccctccagtcggtgcgggtgtcaacagcaacagctggacctttaaatacggaccaggcaaccccaaacaatccggtcccggtgagttgcccgacaaattcattatcccaggatctcctgcaatcatctccatccggcaggagcctactaacagccaaattgacaaaagtgacttcataaccttcggcaaaaaggaggagaccaagaaaaagaagaaaaagaagaagggtaacaagacccaggagaaaaaagagaaagggaacagcacgactgacaacagtgaccagtgaggtcctcaaatggaaacaagccacttagccagtttttgtaataatggcaaatctctcccatgtagcaattccctgctcctttttcctatctacatgagccctcttagagacctcagaaatctgcagaaagttccctgtgtctgtctagaacgcatttaacaggttttgtcgtaaaagctttactaagtctggtgttaactctttctctccactctggcttgttttcagaacctaaaaagcagacccaagtttcctttctcctccgccgcaaaggagaggcttcccagccccgccagtgagaggttggactctctgccctgtgctccggggatcctgtcttgatgacacttgcagggcaggctgaaaagttttgagattgagcagcttgggagtttgtggccactgggtatgtgtggctaccgcgggtatgcgagtgccagatattggctgagacgagccagcttagactaattggtacaaggaaggcaagaaaacaaagacaaataaacagcggaagttatcagtatggaggggaagtgtaaacttaaagggaccagactttctaaatcttacaactcaagaggtggcagccaccctctaggagacaaaactacccccactgacaaggctttaggagaccctaaagtctgttggctgtgacgtcattatacctaaaatctgcatcatacctgcaagccaacagttcagtgttttaacagagaaccaccctgggaaacagaagcagatctgatgtgtttcctatacatgtcctgtgctcactttattaaaaattcttttgcacacaatgtttatgaaaaggccagatccttttccaatacttatgcaaaagcaaaagaaaaccccgacacctcacctttcgctgtttgttgtttcatagatttatttaaaaaaagagaaagtctatagctataaatctttaaagagaaatatgaatacaattcccctaaactctcctcaaaagagaattcagtctacagccatttaaatgatcattgctgctacagaagtgctttaagagaattgcctgaaacatctgtattatatcggccacctgccaatcacagctttactctttcaggtcactctggggctgcctcttgcatgtattactaaataaaatgatctctctttctctctctctctctcttttctaagaaacaattatgtgcactttgatacacaaccttctctaaccaactatatatcaagacccaaaaattgaagaaaaatattgttttctcatacagtgagcagatttttcaatctactaattctgtgacttgtcttggtgtgctagcctacaccttctctttggtttagttttccttttctataacactctgaattgctaatcttactaacacctatgatgttacctgaaatcaatctcccatatgtatgctgtatgctatgctaagactcctgaaatatacttactctgtgcttgtgtatgtgaatgttaatgcaactattacctagagtgaactttaagctttattgttgaatgtaattccattatatttccttttgtacacctgtgaaaaagtggagtagtgtttttttaaccattgttaatcagcttttgtgtatgaaagacacagtaaaatttctttcttaaatcaagatactggtgattcaaggaattttatttatggtccagccaagagccatctcgtgccaagacttctgctggcaagggaatggataaagctgttttgttctagtaacaattttggaatgaatactgacaatattccatgagggtgtgcaagcacaaattttaccaatctgacctctttgaagttgcagaatgctttgaaattctaatggtatctgaaatatcagctcatagaaagtaacaaaatttgctgtcaccttaaataagacattttaattttgttataatgtacaatttagaagtttgattaattatattatctatttaggcattaatataaaagaggtaggagtctgttatttaaaaaaagcattaaatttaaaaaaaaactgtcttgtctacttttagcttcattctcccatattttgaagggtgtgtaacttcagctctgcaggattgcatggggtaaaacttgttaccaacacatgtgaaccattgctacattgtaggttgtgatcattttgccccactgaagcccatgtatctgaccttacgtgccttttgaactaggagaatcgggctaatttattaatgatgataattataatgtatctgtacagcactttttacatttgcgaagtgctttccaatccatgttagttactagttattacagctgtaaggataaaacacgtcatgtggattcattttgaattggtgctattggtatttcctctgttattgctaataaatgaaaatggtggtatg

SEQ ID NO: 13809 - DNA, 5260 bp, Homo sapiens
atggattatcactggcgaggagagctgggatcctggcgactactactcttgcttctgctcctcgcagcctggaaggtggggagcggccagctccactactccgtccccgaggaggccaaacacggcaccttcgtgggccggatcgcgcaggacctggggctggagctggcggagctggtgccgcgcctgttccgggtggcgtccaaaagacaccgggaccttctggaggtaagtctgcagaatggcattttgtttgtgaattctcggatcgaccgcgaggagctgtgcgggcggagcgcggagtgcagcatccacctggaggtgatcgtggacaggccgctgcaggttttccatgtggacgtggaggtgaaggatgttaatgacaacccgccagtgttccgggtaaaagaccaaaagctgtttgtttcagaatccagaatgccagactctcggtttccgctagagggcgcgtccgatgcagatgttggagctaactccgtgttaacctacaggcttagctctcatgattacttcatgctagatgtgaattcaaagaacgatgagaataaactggttgagctcgtattaagaaaatccttggacagagaggacgctcctgcgcaccacttattcctgacagccacagatgggggcaaacctgagctcacaggcactgttcagctgctggtcacagtgctggatgtgaatgataatgctcccactttcgaacagtctgaatacgaagtaagaatattcgaaaacgcagacaacggaacaacagttatcaaactgaatgcttctgatccggatgaaggagccaatggggcaatttcatattcttttaatagccttgttgaaactatggttattgaccactttagcatagatcgaaatacgggagaaatagtgattcggggtaatttggattttgaacaagaaaacttatacaaaatcctcattgacgccacggacaaaggccatcctcccatggcgggtcattgcaccgttttagtgagaattttggataaaaatgataacgtccctgagatagcactgacttccttatccttgcctgtacgtgaagacgctcaatttggtactgtcatcgccctaattagcgtgaacgacctcgattcaggtgccaacgggcaggtgacctgctccctgatgccccatgtccccttcaagctggtgtccaccttcaagaattactactcgttggtgctggacagcgccctggaccgcgagagagtgtcggcctatgagttggtggtaaccgcgcgggacgggggctcgccttcgctgtgggccaccgccagcttgtctgtggaggtggccgacgtgaacgacaatgctccggcgttcgcgcagcccgagtacacggtgttcgtgaaggagaacaacccgccgggctgccacatcttcacggtgtctgcgcgagacgcggacgcgcaggagaacgcgctggtgtcctactcgcttgtggagcggcgggtgggcgagcgctcgctgtcgagctacatttcggtgcacacggagagcggcaaggtgtacgcgctgcagccgctggaccacgaggagctagagctgctgcagttccaggtgagcgcgcgcgacgcgggcgtgccgcctctgggcagcaacgtgacgctgcaggtgttcgtgctggacgagaatgacaacgcgccggcactgctggagcctcgggtgggtggcactggtggcgcagcgagcaagctggtgccgcggtctgtgggcgcgggccacgtggtagcgaaggtgcgcgcagtggacgccgactcgggctacaacgcgtggctttcgtatgagctgcagccagctgcaagcagccctcgcatcccgttccgcgtggggctgtacacgggcgagatcagcaccactcgtgtcctggacgaagcggactctccgcgccaccgtctgctggtcctggtgaaggatcatggtgaacctgcgctgaccgccacggccacggttctggtgtcgctggtggagagcggccaggctccaaaagcgtcatcgaggcagtcggctggcgttttgggtccggaagcggcgctggtggatgtcaacgtgtacctgatcatcgccatctgcgcggtatccagcctgctggtgctcacgctgctgctgtacactgcgctgcggtgctcagcactgcccactgagggcgggtgccgggcgggcaagcccactctggtgtgctccagtgcggtggggagctggtcatactcgcaacaacagccgcagagggtgtgctctggtgaggggccaccgaagacggacctcatggccttcagcccctgccttcctcctgatctgggatcagttgatgtaggcgaagagcaagatttaaatgttgatcatggcctcaaaccacgacagcccaaccctgactggcgttactctgcctccctgagagcaggcatgcacagctctgtgcacctagaggaggctggcattctacgggctggtccaggagggcctgatcagcagtggccaacagtatccagtgcaacaccagaaccagaggcaggagaagtgtcccctccagtcggtgcgggtgtcaacagcaacagctggacctttaaatacggaccaggcaaccccaaacaatccggtcccggtgagttgcccgacaaattcattatcccaggatctcctgcaatcatctccatccggcaggagcctactaacagccaaattgacaaaagtgacttcataaccttcggcaaaaaggaggagaccaagaaaaagaagaaaaagaagaagggtaacaagacccaggagaaaaaagagaaagggaacagcacgactgacaacagtgaccagtgaggtcctcaaatggaaacaagccacttagccagtttttgtaataatggcaaatctctcccatgtagcaattccctgctcctttttcctatctacatgagccctcttagagacctcagaaatctgcagaaagttccctgtgtctgtctagaacgcatttaacaggttttgtcgtaaaagctttactaagtctggtgttaactctttctctccactctggcttgttttcagaacctaaaaagcagacccaagtttcctttctcctccgccgcaaaggagaggcttcccagccccgccagtgagaggttggactctctgccctgtgctccggggatcctgtcttgatgacacttgcagggcaggctgaaaagttttgagattgagcagcttgggagtttgtggccactgggtatgtgtggctaccgcgggtatgcgagtgccagatattggctgagacgagccagcttagactaattggtacaaggaaggcaagaaaacaaagacaaataaacagcggaagttatcagtatggaggggaagtgtaaacttaaagggaccagactttctaaatcttacaactcaagaggtggcagccaccctctaggagacaaaactacccccactgacaaggctttaggagaccctaaagtctgttggctgtgacgtcattatacctaaaatctgcatcatacctgcaagccaacagttcagtgttttaacagagaaccaccctgggaaacagaagcagatctgatgtgtttcctatacatgtcctgtgctcactttattaaaaattcttttgcacacaatgtttatgaaaaggccagatccttttccaatacttatgcaaaagcaaaagaaaaccccgacacctcacctttcgctgtttgttgtttcatagatttatttaaaaaaagagaaagtctatagctataaatctttaaagagaaatatgaatacaattcccctaaactctcctcaaaagagaattcagtctacagccatttaaatgatcattgctgctacagaagtgctttaagagaattgcctgaaacatctgtattatatcggccacctgccaatcacagctttactctttcaggtcactctggggctgcctcttgcatgtattactaaataaaatgatctctctttctctctctctctctcttttctaagaaacaattatgtgcactttgatacacaaccttctctaaccaactatatatcaagacccaaaaattgaagaaaaatattgttttctcatacagtgagcagatttttcaatctactaattctgtgacttgtcttggtgtgctagcctacaccttctctttggtttagttttccttttctataacactctgaattgctaatcttactaacacctatgatgttacctgaaatcaatctcccatatgtatgctgtatgctatgctaagactcctgaaatatacttactctgtgcttgtgtatgtgaatgttaatgcaactattacctagagtgaactttaagctttattgttgaatgtaattccattatatttccttttgtacacctgtgaaaaagtggagtagtgtttttttaaccattgttaatcagcttttgtgtatgaaagacacagtaaaatttctttcttaaatcaagatactggtgattcaaggaattttatttatggtccagccaagagccatctcgtgccaagacttctgctggcaagggaatggataaagctgttttgttctagtaacaattttggaatgaatactgacaatattccatgagggtgtgcaagcacaaattttaccaatctgacctctttgaagttgcagaatgctttgaaattctaatggtatctgaaatatcagctcatagaaagtaacaaaatttgctgtcaccttaaataagacattttaattttgttataatgtacaatttagaagtttgattaattatattatctatttaggcattaatataaaagaggtaggagtctgttatttaaaaaaagcattaaatttaaaaaaaaactgtcttgtctacttttagcttcattctcccatattttgaagggtgtgtaacttcagctctgcaggattgcatggggtaaaacttgttaccaacacatgtgaaccattgctacattgtaggttgtgatcattttgccccactgaagcccatgtatctgaccttacgtgccttttgaactaggagaatcgggctaatttattaatgatgataattataatgtatctgtacagcactttttacatttgcgaagtgctttccaatccatgttagttactagttattacagctgtaaggataaaacacgtcatgtggattcattttgaattggtgctattggtatttcctctgttattgctaataaatgaaaatggtggtatg

SEQ ID NO: 13810 - DNA, 6115 bp, Homo sapiens
ttttcctttgtggattcttttttaaaactaccaagtttgagaatatgaatatatttgtttttcatattgttctgcaatgaatataaagtcacttataatcagaaagcaattaaatgtaaataacagtaaagaatgagaactatagaaaatagatatgaaaatgcaagcccacagagatgagaatagatcatgtggaacataaacactaaagagctgcttttataaaacttcaattttttctttgagttccctagcagccaaagtaacaagggagactgaaagtaaaacaattcaaatttgatagtatttttatatgaggaacaacactttcaggaaatgtttaaccctagtttttcatgaggccaccttaacaactgaattctctttctctctcactctgtgtataagtattttagataagtaaaagaacaatgttataatgttaagtcaaacatagacacaataatttaaatttgatgttaatcgagaaatacaatgccatttccatatatatttagtttcaatatgacttataatctgaatattccataaataagcacgttggaaatatttgggggaagaaacccaaaacacgtgaaattctgtggtggtaaatgcagtgcacagtactcacagttttaggcgcaaggtgtcgctctttacttggtggaaagttcatttaaaggttggtctgaacagtgaggcactcccatacaaaggaactccatcataccggatgccaccgtttaaggatcctttgaaacttcttaagaattcaacgagatttttaacctgaaactgaagaatctggtactgtaagtgtaaagaagcttattttggaagccaatttcgtatgcgatgtttggttttcagagaaggggattgggcaccccacgactacagctctggcttctcctcctcgaattctgggaggtggggagcggccagctccactactccgtctcggaggaggccaaacacggcaccttcgtgggccgcatcgcgcaggacctggggctggagctggcggagctggtgcagcgcctgttccgggtggcgtccaaaacacatggggaccttctggaggtaaatctgcagaatggcattttgtttgtgaattctcggatcgaccgcgaggagctgtgcgggcagagcgcggagtgcagcatccacctggaggtgatcgtggacaggccgctgcaggttttccatgtgaacgtggaggtgaaggacattaacgacaacccgccggtgttctcgctcagagaacaaaagctgctgattgcggaatctaagcaatcggactcgcgttttccactagagggagcttctgatgctgacattgaagagaatgctctattgacctacaggctaagtaaaaatgagtatttttctttagattcaccaacaaatggtaagcagattaaaagactgtcacttattttaaagaagtctctggatagagagaaaactccggaacttaatttgctgctaacagctacagacgggggaaaaccagagcttactggcaccgttcggctgttagtccaagtcttggatgtcaacgacaatgatccagagtttgataaatcagaatataaggtgagccttatggaaaatgctgctaaagaaactcttgtgctcaaactaaacgccacagaccgagacgaaggagtcaatggagaggtaacatactccttaatgtcaattaagcccaatggaagacacttatttacactagatcaaaataatggagaagtgagggtcaatggaactttagattatgaagaaaacaagttttataaaattgaagtacaggctacagataaggggactcccccaatggcaggtcactgtacagtctgggtggaaatcttggacaccaacgataactctcctgaagtcgccgtgacttccttgtccctcccagtacgagaggacgctcagcccagcacggtcattgccctgatcagcgtgtctgaccgtgactcaggtgtcaacggacaggtgacctgctcgctgacgccccacgttcccttcaagctggtgtccaccttcaagaattactactcgttggtgctggacagcgccctggaccgcgagaacgtgtgggcctatgaactggtggtgactgcgcgggatgggggttcgccttctctgtgggccacggccagggtatccgtggaggtggccgacgtgaacgacaatgcgcctgcgttcgcacagcccgagtacaccgtgttcgtgaaggagaacaacccaccaggctgccacatcttcacagtgtcggcgcgggacgcggacgcgcaggagaacgcgctggtgtcctactcgctggtggagcggcggttgggcgaccgcgcgctgtcgagctacgtgtcggtgcacgcggagagcggcaaggtgtacgcgctgcagccgttggaccacgaggagctggagctgctacagttccaggtgagcgcgcgcgatgcgggcgtgccgcctctgagcagcaacgtgacgctgcaggtgttcgtgctggacgagaacgacaacgcgccggcactgctggcgactcaggctggcagcgcgggaggcgcagttaacaagctagtaccgcggtcggtgggtgcgggccacgtggtggcgaaggtgcgcgcagtggatgcggactcaggctacaacgcgtggctttcatatgaattgcagccggcggcgggcggctcgcgcatcccgttccgcgtggggctgtacacgggcgagataagcacaacgcgtgccctggacgaggcagactcgccgcgccaccgacttctagtactggtgaaggatcacggtgagccggcgctgacggccacggccaccgtgctggtgtcgttggtggagagcggacaggcgccaaaggcctcttcccggactttggcgggcgccgcgagcccagaggctgcgctggtggatgtcaacgtgtacctgatcatcgccatctgcgtggtgtccagcctcctggtactcacgctgctgctgtatacggcgctgtggtggtcggcaacgcccactgagggcgcgtgcgcgccggggaagcccacgctggtgtgctcccgcgcggtggggagctggtcatactcgcagcagaggcggcagagggtgtgctctgaggagggcccacctaagacggacctcatggccttcagccccagtcttcctctaggtctgaataaagaggaggaaggggaaagacaggagccagggtcaaatcaccccggacagccacgacagcccaaccctgactggcgttactctgcctccctgagagcaggcatgcacagctctgtgcacctagaggaggctggcattctacgggctggtccaggagggcctgatcagcagtggccaacagtatccagtgcaacaccagaaccagaggcaggagaagtgtcccctccagtcggtgcgggtgtcaacagcaacagctggacctttaaatacggaccaggcaaccccaaacaatccggtcccggtgagttgcccgacaaattcattatcccaggatctcctgcaatcatctccatccggcaggagcctactaacagccaaattgacaaaagtgacttcataaccttcggcaaaaaggaggagaccaagaaaaagaagaaaaagaagaagggtaacaagacccaggagaaaaaagagaaagggaacagcacgactgacaacagtgaccagtgaggtcctcaaatggaaacaagccacttagccagtttttgtaataatggcaaatctctcccatgtagcaattccctgctcctttttcctatctacatgagccctcttagagacctcagaaatctgcagaaagttccctgtgtctgtctagaacgcatttaacaggttttgtcgtaaaagctttactaagtctggtgttaactctttctctccactctggcttgttttcagaacctaaaaagcagacccaagtttcctttctcctccgccgcaaaggagaggcttcccagccccgccagtgagaggttggactctctgccctgtgctccggggatcctgtcttgatgacacttgcagggcaggctgaaaagttttgagattgagcagcttgggagtttgtggccactgggtatgtgtggctaccgcgggtatgcgagtgccagatattggctgagacgagccagcttagactaattggtacaaggaaggcaagaaaacaaagacaaataaacagcggaagttatcagtatggaggggaagtgtaaacttaaagggaccagactttctaaatcttacaactcaagaggtggcagccaccctctaggagacaaaactacccccactgacaaggctttaggagaccctaaagtctgttggctgtgacgtcattatacctaaaatctgcatcatacctgcaagccaacagttcagtgttttaacagagaaccaccctgggaaacagaagcagatctgatgtgtttcctatacatgtcctgtgctcactttattaaaaattcttttgcacacaatgtttatgaaaaggccagatccttttccaatacttatgcaaaagcaaaagaaaaccccgacacctcacctttcgctgtttgttgtttcatagatttatttaaaaaaagagaaagtctatagctataaatctttaaagagaaatatgaatacaattcccctaaactctcctcaaaagagaattcagtctacagccatttaaatgatcattgctgctacagaagtgctttaagagaattgcctgaaacatctgtattatatcggccacctgccaatcacagctttactctttcaggtcactctggggctgcctcttgcatgtattactaaataaaatgatctctctttctctctctctctctcttttctaagaaacaattatgtgcactttgatacacaaccttctctaaccaactatatatcaagacccaaaaattgaagaaaaatattgttttctcatacagtgagcagatttttcaatctactaattctgtgacttgtcttggtgtgctagcctacaccttctctttggtttagttttccttttctataacactctgaattgctaatcttactaacacctatgatgttacctgaaatcaatctcccatatgtatgctgtatgctatgctaagactcctgaaatatacttactctgtgcttgtgtatgtgaatgttaatgcaactattacctagagtgaactttaagctttattgttgaatgtaattccattatatttccttttgtacacctgtgaaaaagtggagtagtgtttttttaaccattgttaatcagcttttgtgtatgaaagacacagtaaaatttctttcttaaatcaagatactggtgattcaaggaattttatttatggtccagccaagagccatctcgtgccaagacttctgctggcaagggaatggataaagctgttttgttctagtaacaattttggaatgaatactgacaatattccatgagggtgtgcaagcacaaattttaccaatctgacctctttgaagttgcagaatgctttgaaattctaatggtatctgaaatatcagctcatagaaagtaacaaaatttgctgtcaccttaaataagacattttaattttgttataatgtacaatttagaagtttgattaattatattatctatttaggcattaatataaaagaggtaggagtctgttatttaaaaaaagcattaaatttaaaaaaaaactgtcttgtctacttttagcttcattctcccatattttgaagggtgtgtaacttcagctctgcaggattgcatggggtaaaacttgttaccaacacatgtgaaccattgctacattgtaggttgtgatcattttgccccactgaagcccatgtatctgaccttacgtgccttttgaactaggagaatcgggctaatttattaatgatgataattataatgtatctgtacagcactttttacatttgcgaagtgctttccaatccatgttagttactagttattacagctgtaaggataaaacacgtcatgtggattcattttgaattggtgctattggtatttcctctgttattgctaataaatgaaaatggtggtatg

SEQ ID NO: 13811 - DNA, 5360 bp, Homo sapiens
agaagcggaggaataagagaagcagcaggactttaacagagactagaatatttaaatttttgcaaaacatgctcttctaatttgatcaaaacattgaggattggtaatggcgtcttctatcagaaggggccgaggggcctggacacggctgctctcgcttctgctcctcgcagcctgggaggtggggagcggccagctccgctactccgtccccgaggaggccaaacacggcaccttcgtgggccgcatcgcgcaggacctggggctggagctggaggagctggtgccgcgcctgttccgggtggcgtccaaaagacacggggaccttctggaggtaaatctgcagaatggcattttgtttgtgaattctcggatcgaccgggaggagctgtgcgggcggagcgcggaatgtagcatccacgtggaggtgatcgtggacaggccgctgcaggttttccatgtggaagtggaggtgaaggacattaacgacaacccgccaatatttccaatgacagtaaagactatccggtttcccgaatcaaggctgcttgattctcggtttcctctagagggagcatctgatgcagatataggagtaaatgctcttctctcctacaagctcagctccagtgagtttttcttcctagatatacaggcaaatgatgaactaagcgaatctttgtctctcgtgctggggaaatcgctggacagagaggaaactgctgaggttaatttgttactggtggctactgatgggggcaaacctgagctcacgggcaccgttcaaatacttattaaggtattagatgtaaatgacaatgaaccaacttttgcccaatcagtttacaaagtaaaattgttagagaatacggcaaatgggaccttagtggttaagttaaacgcttctgatgcagatgaaggaccgaacagcgagattgtgtattcactcggtagtgatgtgtcctccactatacagactaagtttaccatagatcccatctcaggggaaatcagaactaagggaaaattagattatgaagaagcaaagtcctacgagattcaggtcactgcaactgacaaaggaaccccttcaatgtcaggacattgtaaaatttcattaaaacttgtggacatcaatgataacacaccagaagtctcaataacgtctctctcacttcccatctcagagaacgcttccctgggcactgtcattgctctcatcacggtgtcggatcgcgactctggtacgaatggacatgtcacctgctccctgacgccccacgtccctttcaagctggtgtccaccttcaagaattactactcgttggtgctggacagcgccctggaccgcgagagcgtgtcagcctatgagctggtggtgaccgcacgggacgggggctcgccttcactgtgggccaccaccagcgtgtccatcgaggtggccgacgtgaacgacaacgcgccggcgttcgcacagcctgagtacacagtattcgtgaaggagaacaacccgccgggctgccacatcttcacggtgtcagcgtgggatgcggacgcgcaggagaacgcgctggtgtcctactcgctggtggagcggcgggtgggcgagcgcgcgttgtcgagctacgtttcggtgcacgcggagagcggcaaggtgtacgcgctgcagccgctggaccacgaggaagtggagctgctgcagttccaggtgagcgcgcgggatgcgggcgtgccgcctctgggcagcaacgtgacgctgcaggtgttcgtgctggacgagaacgacaacgcgccggcactgttggcgcctagggctggcaccgctgctggcgcagtgagtgagctggtgccgtggtcggtgggtgcagggcacgtggtggcgaaggtgcgcgcagtggacgctgactcaggctacaacgcgtggctttcgtacgagcttcagctgggtactggcagcgctcgcatcccgttccgcgtggggctatacacgggtgagatcagcacgacacgtgccctagacgaggctgactcccctcgacaccgcctactcgtgctggtgaaggaccacggcgaaccagcgttgacagccacggccaccgtgttagtgtcgttggtggaaagtggccaggcacccaaggcctcgtcgcgggcgtgggtgggcgccgcgggctcagaggctacgctggtggatgtcaacgtgtacctgatcatcgccatctgcgcggtatccagcctgttggtgctcacggtgctgctgtacactgcgctgcggtgctcggtgccacccaccgagggtgcgcgcgcgccaggaaagcccacgctggtgtgctccagcgccgtggggagctggtcttactcgcagcagaggcggcagagggtgtgctctggggaggacccccccaagacggacctcatggccttcagccctagcttatctcaaggtccagactccgcagaagagaaacagctctcagaatcagaatacgtaggaaagccacgacagcccaaccctgactggcgttactctgcctccctgagagcaggcatgcacagctctgtgcacctagaggaggctggcattctacgggctggtccaggagggcctgatcagcagtggccaacagtatccagtgcaacaccagaaccagaggcaggagaagtgtcccctccagtcggtgcgggtgtcaacagcaacagctggacctttaaatacggaccaggcaaccccaaacaatccggtcccggtgagttgcccgacaaattcattatcccaggatctcctgcaatcatctccatccggcaggagcctactaacagccaaattgacaaaagtgacttcataaccttcggcaaaaaggaggagaccaagaaaaagaagaaaaagaagaagggtaacaagacccaggagaaaaaagagaaagggaacagcacgactgacaacagtgaccagtgaggtcctcaaatggaaacaagccacttagccagtttttgtaataatggcaaatctctcccatgtagcaattccctgctcctttttcctatctacatgagccctcttagagacctcagaaatctgcagaaagttccctgtgtctgtctagaacgcatttaacaggttttgtcgtaaaagctttactaagtctggtgttaactctttctctccactctggcttgttttcagaacctaaaaagcagacccaagtttcctttctcctccgccgcaaaggagaggcttcccagccccgccagtgagaggttggactctctgccctgtgctccggggatcctgtcttgatgacacttgcagggcaggctgaaaagttttgagattgagcagcttgggagtttgtggccactgggtatgtgtggctaccgcgggtatgcgagtgccagatattggctgagacgagccagcttagactaattggtacaaggaaggcaagaaaacaaagacaaataaacagcggaagttatcagtatggaggggaagtgtaaacttaaagggaccagactttctaaatcttacaactcaagaggtggcagccaccctctaggagacaaaactacccccactgacaaggctttaggagaccctaaagtctgttggctgtgacgtcattatacctaaaatctgcatcatacctgcaagccaacagttcagtgttttaacagagaaccaccctgggaaacagaagcagatctgatgtgtttcctatacatgtcctgtgctcactttattaaaaattcttttgcacacaatgtttatgaaaaggccagatccttttccaatacttatgcaaaagcaaaagaaaaccccgacacctcacctttcgctgtttgttgtttcatagatttatttaaaaaaagagaaagtctatagctataaatctttaaagagaaatatgaatacaattcccctaaactctcctcaaaagagaattcagtctacagccatttaaatgatcattgctgctacagaagtgctttaagagaattgcctgaaacatctgtattatatcggccacctgccaatcacagctttactctttcaggtcactctggggctgcctcttgcatgtattactaaataaaatgatctctctttctctctctctctctcttttctaagaaacaattatgtgcactttgatacacaaccttctctaaccaactatatatcaagacccaaaaattgaagaaaaatattgttttctcatacagtgagcagatttttcaatctactaattctgtgacttgtcttggtgtgctagcctacaccttctctttggtttagttttccttttctataacactctgaattgctaatcttactaacacctatgatgttacctgaaatcaatctcccatatgtatgctgtatgctatgctaagactcctgaaatatacttactctgtgcttgtgtatgtgaatgttaatgcaactattacctagagtgaactttaagctttattgttgaatgtaattccattatatttccttttgtacacctgtgaaaaagtggagtagtgtttttttaaccattgttaatcagcttttgtgtatgaaagacacagtaaaatttctttcttaaatcaagatactggtgattcaaggaattttatttatggtccagccaagagccatctcgtgccaagacttctgctggcaagggaatggataaagctgttttgttctagtaacaattttggaatgaatactgacaatattccatgagggtgtgcaagcacaaattttaccaatctgacctctttgaagttgcagaatgctttgaaattctaatggtatctgaaatatcagctcatagaaagtaacaaaatttgctgtcaccttaaataagacattttaattttgttataatgtacaatttagaagtttgattaattatattatctatttaggcattaatataaaagaggtaggagtctgttatttaaaaaaagcattaaatttaaaaaaaaactgtcttgtctacttttagcttcattctcccatattttgaagggtgtgtaacttcagctctgcaggattgcatggggtaaaacttgttaccaacacatgtgaaccattgctacattgtaggttgtgatcattttgccccactgaagcccatgtatctgaccttacgtgccttttgaactaggagaatcgggctaatttattaatgatgataattataatgtatctgtacagcactttttacatttgcgaagtgctttccaatccatgttagttactagttattacagctgtaaggataaaacacgtcatgtggattcattttgaattggtgctattggtatttcctctgttattgctaataaatgaaaatggtggtatg

SEQ ID NO: 13812 - DNA, 4495 bp, Homo sapiens
atggaaataaaaccagaggtatttgacatggtgtttaccccggaggatagattgggaaagcaatgtctgctcctcccgcttctgctcctcgcagcctggaaggtggggagcggccagctccactactccgtacccgaggaggccaaacacggcaccttcgtgggccggatcgcgcaggacctggggctggagctggcggagctggtgccgcgcctgttcaggatggcctccaaagaccgcgaggaccttctggaggtaaatctgcagaatggcattttgtttgtgaattctcggatcgaccgcgaggagctgtgcgggcggagcgcggagtgcagcatccacctggaggtgatcgtggacaggccgctgcaggttttccatgtggacgtggaggtgagggacattaacgacaacccgcccttgttcccggtagaggaacaaagagtgctgatttacgaatctaggctgccagattctgtgtttccactggagggcgcgtccgatgcagatgttggctcaaattccatcttaacctataaactcagttctagcgaatacttcgggctagatgtgaaaataaacagtgatgacaataaacaaattgggctcttattaaagaaatccttggacagagaggaagctcctgcacacaacttattcctgacagccacagatgggggcaaacctgagctcacaggcactgttcagctgctggtcacagtgctggatgtgaatgataatgctcccactttcgaacagtctgaatacgaagtaagaatattcgaaaatgcagacaacggaacaacagttatcagactgaatgcttctgatcgggatgaaggagcgaatggggcaatttcatattcttttaatagccttgttgcagccatggttattgaccactttagcatagatcgaaatacgggagaaatagtgattcggggtaatttggattttgaacaagaaaacttatacaaaatcctcattgacgccacggacaaaggccatcctcccatggcgggtcattgcaccgttttagtgagaattttggataaaaatgataacgtccctgagatagcactgacttccttatccttgcctgtacgtgaagacgctcaatttggtactgtcatcgccctaattagcgtgaacgacctcgattcaggtgccaacgggcaggtgaactgctcgctgacgcctcacgtccctttcaagctggtgtccaccttcaagaattactactcgttggtgctggacagtgccctggaccgcgagagcgtgtcggcctatgagttggtggtaaccgcgcgggacgggggctcgccttcgctgtgggccaccgccagcttgtctgtggaggtggccgacatgaatgacaatgctccggcgttcgcgcagcccgagtacacagtgttcgtgaaggagaacaacccgccgggctgccacatcttcacggtgtctgcgcgagacgcggacgcgcaggagaacgcgctggtgtcctactcgctggtggagcggcgggtgggcgagcgcgcgttgtcgagctacatttcggtgcacgcggagagcggcaaggtgtacgcgctgcagccgctggaccacgaggagctagagctgctgcagtttcagccacgacagcccaaccctgactggcgttactctgcctccctgagagcaggcatgcacagctctgtgcacctagaggaggctggcattctacgggctggtccaggagggcctgatcagcagtggccaacagtatccagtgcaacaccagaaccagaggcaggagaagtgtcccctccagtcggtgcgggtgtcaacagcaacagctggacctttaaatacggaccaggcaaccccaaacaatccggtcccggtgagttgcccgacaaattcattatcccaggatctcctgcaatcatctccatccggcaggagcctactaacagccaaattgacaaaagtgacttcataaccttcggcaaaaaggaggagaccaagaaaaagaagaaaaagaagaagggtaacaagacccaggagaaaaaagagaaagggaacagcacgactgacaacagtgaccagtgaggtcctcaaatggaaacaagccacttagccagtttttgtaataatggcaaatctctcccatgtagcaattccctgctcctttttcctatctacatgagccctcttagagacctcagaaatctgcagaaagttccctgtgtctgtctagaacgcatttaacaggttttgtcgtaaaagctttactaagtctggtgttaactctttctctccactctggcttgttttcagaacctaaaaagcagacccaagtttcctttctcctccgccgcaaaggagaggcttcccagccccgccagtgagaggttggactctctgccctgtgctccggggatcctgtcttgatgacacttgcagggcaggctgaaaagttttgagattgagcagcttgggagtttgtggccactgggtatgtgtggctaccgcgggtatgcgagtgccagatattggctgagacgagccagcttagactaattggtacaaggaaggcaagaaaacaaagacaaataaacagcggaagttatcagtatggaggggaagtgtaaacttaaagggaccagactttctaaatcttacaactcaagaggtggcagccaccctctaggagacaaaactacccccactgacaaggctttaggagaccctaaagtctgttggctgtgacgtcattatacctaaaatctgcatcatacctgcaagccaacagttcagtgttttaacagagaaccaccctgggaaacagaagcagatctgatgtgtttcctatacatgtcctgtgctcactttattaaaaattcttttgcacacaatgtttatgaaaaggccagatccttttccaatacttatgcaaaagcaaaagaaaaccccgacacctcacctttcgctgtttgttgtttcatagatttatttaaaaaaagagaaagtctatagctataaatctttaaagagaaatatgaatacaattcccctaaactctcctcaaaagagaattcagtctacagccatttaaatgatcattgctgctacagaagtgctttaagagaattgcctgaaacatctgtattatatcggccacctgccaatcacagctttactctttcaggtcactctggggctgcctcttgcatgtattactaaataaaatgatctctctttctctctctctctctcttttctaagaaacaattatgtgcactttgatacacaaccttctctaaccaactatatatcaagacccaaaaattgaagaaaaatattgttttctcatacagtgagcagatttttcaatctactaattctgtgacttgtcttggtgtgctagcctacaccttctctttggtttagttttccttttctataacactctgaattgctaatcttactaacacctatgatgttacctgaaatcaatctcccatatgtatgctgtatgctatgctaagactcctgaaatatacttactctgtgcttgtgtatgtgaatgttaatgcaactattacctagagtgaactttaagctttattgttgaatgtaattccattatatttccttttgtacacctgtgaaaaagtggagtagtgtttttttaaccattgttaatcagcttttgtgtatgaaagacacagtaaaatttctttcttaaatcaagatactggtgattcaaggaattttatttatggtccagccaagagccatctcgtgccaagacttctgctggcaagggaatggataaagctgttttgttctagtaacaattttggaatgaatactgacaatattccatgagggtgtgcaagcacaaattttaccaatctgacctctttgaagttgcagaatgctttgaaattctaatggtatctgaaatatcagctcatagaaagtaacaaaatttgctgtcaccttaaataagacattttaattttgttataatgtacaatttagaagtttgattaattatattatctatttaggcattaatataaaagaggtaggagtctgttatttaaaaaaagcattaaatttaaaaaaaaactgtcttgtctacttttagcttcattctcccatattttgaagggtgtgtaacttcagctctgcaggattgcatggggtaaaacttgttaccaacacatgtgaaccattgctacattgtaggttgtgatcattttgccccactgaagcccatgtatctgaccttacgtgccttttgaactaggagaatcgggctaatttattaatgatgataattataatgtatctgtacagcactttttacatttgcgaagtgctttccaatccatgttagttactagttattacagctgtaaggataaaacacgtcatgtggattcattttgaattggtgctattggtatttcctctgttattgctaataaatgaaaatggtggtatg

SEQ ID NO: 13813 - DNA, 5221 bp, Homo sapiens
atggtgtgcccgaatggatacgacccagggggccgacatctactgctgtttattataattctagcagcttgggaggcagggagaggccagctccactactcggtccccgaggaggctaaacatggcaacttcgtgggccgcatcgcgcaggacctggggctggagctggcggagctggtgccgcgcctgttccgggcggtgtgcaaattccgtggggatcttctggaggtaaatctgcagaatggcattttgtttgtgaattctcggatcgaccgcgaggagctgtgcgggcggagcgcggagtgcagcatccacctggaggtgatcgtggaaaggccgctgcaggttttccatgtggacgtggaggtgaaggacattaacgacaaccctccggtgttcccagcgacacaaaggaatctgttcatcgcggaatccaggccgcttgactctcggtttccactagagggcgcgtccgatgcagatatcggggagaacgccctgctcacttacagactgagccccaatgagtatttcttcctggacgtgccaaccagcaaccagcaggtaaaacctcttggacttgtattacggaaacttttagacagagaagaaactccggagcttcatttattgctcacggccaccgatggaggcaaacccgagctgactggcaccgttcaattactcatcacggtactggacaacaatgacaatgccccagtgttcgacagaaccctgtatacggtgaaattaccagaaaacgtttctatcggaacgctggtgattcaccccaatgcctcagatttagacgaaggcttgaatggggatattatttactccttctccagtgatgtttctccagatataaaatccaagttccacatggaccccttaagtggggcaatcacagtgataggacatatggattttgaagaaagtagagcacacaagatcccagtcgaggctgtcgataaaggcttcccacccctggctggtcattgtacagttcttgtggaagttgtggatgtaaatgacaatgctccacagttgactctcacttccctgtctctccctattccagaggacgcccaaccaggtaccgtcatcacattgattagcgtgtttgaccgagattttggagtcaacggacaggttacctgctccctgacgccccgcgttcccttcaagttggtgtccaccttcaagaattactattcattggtgctggacagcgctctggaccgcgagagtgtgtccgcctatgagctggtggttaccgcgcgggacgggggctcgccttctctgtgggccactgctagcgtgtccgtggaggtggccgacgtgaacgacaacgccccggcgttcgcgcagcccgagtatacggtgttcgtgaaggagaacaacccgccgggctgccacatcttcactgtgtcggcgggggacgcggacgcgcagaagaacgcgctggtgtcctactcgctggtggagctgcgggtgggcgagcgcgcgctgtcgagctacgtgtcagtgcacgcggagagcggcaaggtgtacgcgctgcagccgttggaccacgaggagctggagctgttgcagttccaggtgagcgcgcgcgatgcgggcgtgccgcctctgggcagcaacgtgacgctgcaggtgttcgtgctggacgagaacgacaacgcgccggcactgctggcgcctcgggtgggtggcactggtggcgcagtgagagagcttgtgccgcggtctgtgggcgcgggccatgtggtggcgaaggtacgtgcagttgacgctgactcaggctacaacgcgtggctttcgtatgagttgcaaccggtggcggccggtgcgagcatcccgttccgcgtggggctgtacactggtgagatcagcacgacacgagccctagatgagacggacgcaccgcgccaccgccttctggtgcttgtgaaggaccacggggagccctcgctgacagccacagccaccgtgctggtgtcgctggtggaaagcggccaggcaccaaaggcgtcgtcgcgggcatcgttgggcattgcaggcccagagaccgagctggtggatgtcaacgtgtacctgatcatcgccatctgcgcggtgtccagtctgttggtgcttaccctgctgctgtacacggcgttgcggtgctcagcgccgtcctctgagggcgcatgtagtttggtaaagcccactctggtgtgctccagcgcggtggggagctggtcattctcccagcagaggcggcagagggtgtgctctggggagggcccacccaagacagacctcatggccttcagtcccagccttcctcagggtccatcctctacagacaatccacgacagcccaaccctgactggcgttactctgcctccctgagagcaggcatgcacagctctgtgcacctagaggaggctggcattctacgggctggtccaggagggcctgatcagcagtggccaacagtatccagtgcaacaccagaaccagaggcaggagaagtgtcccctccagtcggtgcgggtgtcaacagcaacagctggacctttaaatacggaccaggcaaccccaaacaatccggtcccggtgagttgcccgacaaattcattatcccaggatctcctgcaatcatctccatccggcaggagcctactaacagccaaattgacaaaagtgacttcataaccttcggcaaaaaggaggagaccaagaaaaagaagaaaaagaagaagggtaacaagacccaggagaaaaaagagaaagggaacagcacgactgacaacagtgaccagtgaggtcctcaaatggaaacaagccacttagccagtttttgtaataatggcaaatctctcccatgtagcaattccctgctcctttttcctatctacatgagccctcttagagacctcagaaatctgcagaaagttccctgtgtctgtctagaacgcatttaacaggttttgtcgtaaaagctttactaagtctggtgttaactctttctctccactctggcttgttttcagaacctaaaaagcagacccaagtttcctttctcctccgccgcaaaggagaggcttcccagccccgccagtgagaggttggactctctgccctgtgctccggggatcctgtcttgatgacacttgcagggcaggctgaaaagttttgagattgagcagcttgggagtttgtggccactgggtatgtgtggctaccgcgggtatgcgagtgccagatattggctgagacgagccagcttagactaattggtacaaggaaggcaagaaaacaaagacaaataaacagcggaagttatcagtatggaggggaagtgtaaacttaaagggaccagactttctaaatcttacaactcaagaggtggcagccaccctctaggagacaaaactacccccactgacaaggctttaggagaccctaaagtctgttggctgtgacgtcattatacctaaaatctgcatcatacctgcaagccaacagttcagtgttttaacagagaaccaccctgggaaacagaagcagatctgatgtgtttcctatacatgtcctgtgctcactttattaaaaattcttttgcacacaatgtttatgaaaaggccagatccttttccaatacttatgcaaaagcaaaagaaaaccccgacacctcacctttcgctgtttgttgtttcatagatttatttaaaaaaagagaaagtctatagctataaatctttaaagagaaatatgaatacaattcccctaaactctcctcaaaagagaattcagtctacagccatttaaatgatcattgctgctacagaagtgctttaagagaattgcctgaaacatctgtattatatcggccacctgccaatcacagctttactctttcaggtcactctggggctgcctcttgcatgtattactaaataaaatgatctctctttctctctctctctctcttttctaagaaacaattatgtgcactttgatacacaaccttctctaaccaactatatatcaagacccaaaaattgaagaaaaatattgttttctcatacagtgagcagatttttcaatctactaattctgtgacttgtcttggtgtgctagcctacaccttctctttggtttagttttccttttctataacactctgaattgctaatcttactaacacctatgatgttacctgaaatcaatctcccatatgtatgctgtatgctatgctaagactcctgaaatatacttactctgtgcttgtgtatgtgaatgttaatgcaactattacctagagtgaactttaagctttattgttgaatgtaattccattatatttccttttgtacacctgtgaaaaagtggagtagtgtttttttaaccattgttaatcagcttttgtgtatgaaagacacagtaaaatttctttcttaaatcaagatactggtgattcaaggaattttatttatggtccagccaagagccatctcgtgccaagacttctgctggcaagggaatggataaagctgttttgttctagtaacaattttggaatgaatactgacaatattccatgagggtgtgcaagcacaaattttaccaatctgacctctttgaagttgcagaatgctttgaaattctaatggtatctgaaatatcagctcatagaaagtaacaaaatttgctgtcaccttaaataagacattttaattttgttataatgtacaatttagaagtttgattaattatattatctatttaggcattaatataaaagaggtaggagtctgttatttaaaaaaagcattaaatttaaaaaaaaactgtcttgtctacttttagcttcattctcccatattttgaagggtgtgtaacttcagctctgcaggattgcatggggtaaaacttgttaccaacacatgtgaaccattgctacattgtaggttgtgatcattttgccccactgaagcccatgtatctgaccttacgtgccttttgaactaggagaatcgggctaatttattaatgatgataattataatgtatctgtacagcactttttacatttgcgaagtgctttccaatccatgttagttactagttattacagctgtaaggataaaacacgtcatgtggattcattttgaattggtgctattggtatttcctctgttattgctaataaatgaaaatggtggtatg

SEQ ID NO: 13814 - DNA, 5984 bp, Homo sapiens
ctcgcttttcttgcaatattttataccttttcaattcatagaattactcaagaaaactacctcagttggttgctactttttgttgattccttttaccagacatgactaagtttctttttcatcagtagatttctgggctcctatattcactagagattgcaactcctggatttctcttacactagaatcctatttcgagccatatgggagattctgaattccagaacaaaagaattttgtaatttaaaattcgtgattgctcaatggaatcattttaattgttacttcatttctgtcgttatttaaaacttaagtggagagttttctcagggataagaaaaccacaatcaaggtcatacaaaacttttagaggcagtcagtctgctaagaaggctccagcaagagaaacgggatcttctgtttcaacaatcattacttaagaaaaaattaagaaaatgaaataagttttgcagaataactgtgaaatttttattcatgaaatatgtacttacactttgggccacgtgatgtcactctttgccgcgatgttctctctgaatccagacaaatacagcccttttcccatgggaaagaggctcaattctttttcactctctctgtgctgaacgatggcgaacacagcagaatgggactgacgaaatcagatgatttcttctaatttggaggcaattttcactaattagaagaagactgagtatttgaaatgttatactcaagtcgaggagatccagagggtcagcctctactgctctcgcttctgatcctcgcaatgtgggtggtggggagcggccagctccactactccgtcccggaggaagccgaacacggcaccttcgtgggccgcatcgcgcaggacctggggctggagctggcggagctggtgccgcgcctgttccagttggattccaaaggccgcggggaccttctggaggtaaatctgcagaatggcattttgtttgtgaattctcggatcgaccgcgaggagctgtgcgggcggagcgcggagtgcagcatccacctggaggtgatcgtagacaggccgctgcaggttttccatgtggacgtggaggtgaaggacattaacgacaaccctccagtgttcccagcgacacaaaagaatctgttcatcgcggaatccaggccgcttgactctcggtttccactagagggcgcgtccgatgcagatatcggggagaacgccctgctcacttacagactgagccccaatgagtatttcttcctggacgtgccaaccagcaaccagcaggtaaaacctcttggacttgtattacggaaacttttagacagagaagaaactccggagcttcatttattgctcacggccaccgatggaggcaaacccgagctgactggcaccgttcaattactcatcacggtactggacaacaatgacaatgccccagtgttcgacagaaccctgtatacggtgaaattaccagaaaacgtttctatcggaacgctggtgattcaccccaatgcctcagatttagacgaaggcttgaatggggatattatttactccttctccagtgatgtttctccagatataaaatccaagttccacatggaccccttaagtggggcaatcacagtgataggacatatggattttgaagaaagtagagcacacaagatcccagtcgaggctgtcgataaaggcttcccacccctggctggtcattgtacacttcttgtggaagttgtggatgtaaatgacaatgctccacagttgactatcaaaacgctctcggttcctgtaaaagaggacgcacaactggggacagttattgccctgattagtgtgatcgacctagacgcagatgccaacgggcaggttacctgctccctgacgccccacgtccccttcaagctggtgtccacctacaagaattactactcgttggtgctggacagagctctggaccgcgagagtgtgtccgcctacgagctggtggttaccgcgcgggacgggggctcgccttcactgtgggccacggccagggtgtctgtggaggtggccgacgtgaacgacaacgcaccagcgttcgcgcagtccgagtacacggtgttcgtgaaggagaacaacccgccgggctgccacatcttcacggtgtctgcgcgggacgctgacgcgcaggagaacgccctggtgtcctactcgctggtggagcggcggttgggcgagcgctcgctgtcgagctacgtgtcagtgcacgcggagagcggcaaggtgtacgcgctgcagccgttggaccacgaggagctggagctgctacagttccaggtgagcgcgcgcgacgcgggcgtgccgcctctgggcagcaacgtgacgctgcaggtgttcgtgctggacgagaacgacaatgcgccggcgctgctgacacctcggatgaggggcactgacggcgcagtgagcgagatggtgctgcggtcggtgggcgccggcgtagtggtggggaaggtgcgcgcagtggacgccgactcgggctacaacgcgtggctttcatacgagctgcagccagaaacggccagcgcgagcatcccgttccgcgtggggctgtacacgggcgagatcagcacaacgcgtgccctggacgaaacggacgcaccgcgccagcgcctactggtgctggtgaaagaccacggggagccagcgctgacggccacggccactgtgctggtgtcgctggtggagagcggccaggcgccaaagtcatcgtcgcgggcgtcagtgggtgccacgggccccgaggtgacgctggtggatgtcaacgtgtacctgatcatcgccatctgcgcggtgtctagcctgttggttctcacgctgctgctgtacactgtgctgcggtgctcggcgatgcccaccgagggcgagtgcgcgcctggcaagccgacgctggtgtgttctagcgcggtggggagttggtcgtactcgcagcagaggaggcagagggtgtgctctggcgagggtaagcagaagaccgacctcatggccttcagcccgggcctttctccttgtgctggatctacagagcgaacgggagaaccctctgcttcctcagattcaactgggaagccacgacagcccaaccctgactggcgttactctgcctccctgagagcaggcatgcacagctctgtgcacctagaggaggctggcattctacgggctggtccaggagggcctgatcagcagtggccaacagtatccagtgcaacaccagaaccagaggcaggagaagtgtcccctccagtcggtgcgggtgtcaacagcaacagctggacctttaaatacggaccaggcaaccccaaacaatccggtcccggtgagttgcccgacaaattcattatcccaggatctcctgcaatcatctccatccggcaggagcctactaacagccaaattgacaaaagtgacttcataaccttcggcaaaaaggaggagaccaagaaaaagaagaaaaagaagaagggtaacaagacccaggagaaaaaagagaaagggaacagcacgactgacaacagtgaccagtgaggtcctcaaatggaaacaagccacttagccagtttttgtaataatggcaaatctctcccatgtagcaattccctgctcctttttcctatctacatgagccctcttagagacctcagaaatctgcagaaagttccctgtgtctgtctagaacgcatttaacaggttttgtcgtaaaagctttactaagtctggtgttaactctttctctccactctggcttgttttcagaacctaaaaagcagacccaagtttcctttctcctccgccgcaaaggagaggcttcccagccccgccagtgagaggttggactctctgccctgtgctccggggatcctgtcttgatgacacttgcagggcaggctgaaaagttttgagattgagcagcttgggagtttgtggccactgggtatgtgtggctaccgcgggtatgcgagtgccagatattggctgagacgagccagcttagactaattggtacaaggaaggcaagaaaacaaagacaaataaacagcggaagttatcagtatggaggggaagtgtaaacttaaagggaccagactttctaaatcttacaactcaagaggtggcagccaccctctaggagacaaaactacccccactgacaaggctttaggagaccctaaagtctgttggctgtgacgtcattatacctaaaatctgcatcatacctgcaagccaacagttcagtgttttaacagagaaccaccctgggaaacagaagcagatctgatgtgtttcctatacatgtcctgtgctcactttattaaaaattcttttgcacacaatgtttatgaaaaggccagatccttttccaatacttatgcaaaagcaaaagaaaaccccgacacctcacctttcgctgtttgttgtttcatagatttatttaaaaaaagagaaagtctatagctataaatctttaaagagaaatatgaatacaattcccctaaactctcctcaaaagagaattcagtctacagccatttaaatgatcattgctgctacagaagtgctttaagagaattgcctgaaacatctgtattatatcggccacctgccaatcacagctttactctttcaggtcactctggggctgcctcttgcatgtattactaaataaaatgatctctctttctctctctctctctcttttctaagaaacaattatgtgcactttgatacacaaccttctctaaccaactatatatcaagacccaaaaattgaagaaaaatattgttttctcatacagtgagcagatttttcaatctactaattctgtgacttgtcttggtgtgctagcctacaccttctctttggtttagttttccttttctataacactctgaattgctaatcttactaacacctatgatgttacctgaaatcaatctcccatatgtatgctgtatgctatgctaagactcctgaaatatacttactctgtgcttgtgtatgtgaatgttaatgcaactattacctagagtgaactttaagctttattgttgaatgtaattccattatatttccttttgtacacctgtgaaaaagtggagtagtgtttttttaaccattgttaatcagcttttgtgtatgaaagacacagtaaaatttctttcttaaatcaagatactggtgattcaaggaattttatttatggtccagccaagagccatctcgtgccaagacttctgctggcaagggaatggataaagctgttttgttctagtaacaattttggaatgaatactgacaatattccatgagggtgtgcaagcacaaattttaccaatctgacctctttgaagttgcagaatgctttgaaattctaatggtatctgaaatatcagctcatagaaagtaacaaaatttgctgtcaccttaaataagacattttaattttgttataatgtacaatttagaagtttgattaattatattatctatttaggcattaatataaaagaggtaggagtctgttatttaaaaaaagcattaaatttaaaaaaaaactgtcttgtctacttttagcttcattctcccatattttgaagggtgtgtaacttcagctctgcaggattgcatggggtaaaacttgttaccaacacatgtgaaccattgctacattgtaggttgtgatcattttgccccactgaagcccatgtatctgaccttacgtgccttttgaactaggagaatcgggctaatttattaatgatgataattataatgtatctgtacagcactttttacatttgcgaagtgctttccaatccatgttagttactagttattacagctgtaaggataaaacacgtcatgtggattcattttgaattggtgctattggtatttcctctgttattgctaataaatgaaaatggtggtatg

SEQ ID NO: 13815 - DNA, 5254 bp, Homo sapiens
atggtttccagatgtagctgcctgggggtccagtgtctgctgctctcgcttcttctcctcgcagcctgggaggtggggagcggccagctccactactcagtctacgaggaggccagacacggcaccttcgtgggccgcatcgcgcaggacctggggctggagctggcggagctggtgcagcgcctgttccgggtggcgtccaaaagacacggggaccttctggaggtaaatctgcagaatggcattttgtttgtgaattctcggattgaccgcgaggagctgtgcgggcggagcgtggagtgcagcatccacctggaggtgatcgtggacaggccgctgcaggttttccatgtggacgtggaagtgaaggacattaacgacaacccgcccaggttctccgtaacagaacaaaagctctcaatacctgaatccagactgcttgactctcgatttccactagaaggcgcatctgatgcggatgttggagagaacgcattgcttacttacaaactcagtccaaatgagtattttgttcttgatattataaacaaaaaagacaaagacaaattcccagtgcttgttctgcggaagctgctggatcgtgaagaaaatcctcagctaaagttgttgttgacagcaactgatggaggcaaacctgaatttaccggatctgtttctctgctgatcctggtgttagatgccaatgataacgcccctatctttgacagaccggtttatgaagttaagatgtatgaaaatcaagtgaaccaaacattagtaatacggctcaacgcttctgattcggatgaaggaataaacaaggaaatgatgtattcatttagctctttggtcccacccacgataagaaggaaattttggataaacgaaaggacgggagaaataaaagtaaatgatgctattgactttgaggacagtaacacttatgaaattcatgtagatgttacagataagggaaacccacctatggttggtcactgcacggtcctagtggaactactggatgaaaatgataattcacctgaggtgattgtcacttctctgtctctcccagtgaaagaagatgctcaagtgggcaccgtcattgccctaatcagcgtttctgaccatgattcaggagccaacggacaggtcacctgctctctgacgcctcacgttccgttcaagctggtgtccacctacaagaattactactcattggtgctggacagcgctctggaccgcgagagggtgtcggcctatgagctggtggtgaccgcgcgggacgggggctcgcctccgctgtgggccacggccagcgtgtctgtggaggtggccgacgtgaacgacaacgcgcctgcgttcgcgcagtccgagtacacggtgttcgtgaaggagaacaacccgccaggctgccacatcttcacggtgtctgcgtgggacgcggacgcgcaggagaacgccctggtgtcctactctctggtggagcggcggttgggcgagcgctcgctgtcgagctacgtgtcggtgcacgcggagagcggcaaggtgtacgcgctgcagccgctggaccacgaggagctggagctgctacagttccaggtgagcgcgcgcgatgggggcgtgccgcctctgggcagcaacttgacgctgcaggtgttcgtgctggacgagaacgacaacgctcccgcgctgctggcgtctcccgctggcagcgcgggcggtgcagtcagtgagctggtgctgcggtcggtggttgcgggtcacgtggtggctaaggtgcgcgcagtggacgctgactctggatacaacgcgtggctgtcgtatgaattgcagtcggcggcggttggtgcacgcatcccgtttcgcgtggggctgtacacgggcgagatcagtacgacgcgcgctctggatgagactgactcgccacgccagcgcctactggtgctggtgaaggaccatggcgagccgtcgctgacggccacggccactgtgcttgtgtcgcttgtggagggcagccaggcacccaaggcctcgtcgcgggcttcagtgggcgtggcgcccgaggtggccctggtggatgtcaacgtgtacctgatcatcgccatctgcgcggtgtccagcttgctggtgctcacgctgctgctgtacactgcactgaggtgctcggcggcgcccaccgagggcgcatgtgggccggtgaagcccacgctggtgtgctctagcgcggtggggagctggtcttactcgcagcagaggcggcagagggtgtgttctggggagggcctgcccaaggcggacctcatggccttcagccccagccttccaccatgcccaatggtagatgtggacggggaagatcagtctattggaggggaccactctaggaagccacgacagcccaaccctgactggcgttactctgcctccctgagagcaggcatgcacagctctgtgcacctagaggaggctggcattctacgggctggtccaggagggcctgatcagcagtggccaacagtatccagtgcaacaccagaaccagaggcaggagaagtgtcccctccagtcggtgcgggtgtcaacagcaacagctggacctttaaatacggaccaggcaaccccaaacaatccggtcccggtgagttgcccgacaaattcattatcccaggatctcctgcaatcatctccatccggcaggagcctactaacagccaaattgacaaaagtgacttcataaccttcggcaaaaaggaggagaccaagaaaaagaagaaaaagaagaagggtaacaagacccaggagaaaaaagagaaagggaacagcacgactgacaacagtgaccagtgaggtcctcaaatggaaacaagccacttagccagtttttgtaataatggcaaatctctcccatgtagcaattccctgctcctttttcctatctacatgagccctcttagagacctcagaaatctgcagaaagttccctgtgtctgtctagaacgcatttaacaggttttgtcgtaaaagctttactaagtctggtgttaactctttctctccactctggcttgttttcagaacctaaaaagcagacccaagtttcctttctcctccgccgcaaaggagaggcttcccagccccgccagtgagaggttggactctctgccctgtgctccggggatcctgtcttgatgacacttgcagggcaggctgaaaagttttgagattgagcagcttgggagtttgtggccactgggtatgtgtggctaccgcgggtatgcgagtgccagatattggctgagacgagccagcttagactaattggtacaaggaaggcaagaaaacaaagacaaataaacagcggaagttatcagtatggaggggaagtgtaaacttaaagggaccagactttctaaatcttacaactcaagaggtggcagccaccctctaggagacaaaactacccccactgacaaggctttaggagaccctaaagtctgttggctgtgacgtcattatacctaaaatctgcatcatacctgcaagccaacagttcagtgttttaacagagaaccaccctgggaaacagaagcagatctgatgtgtttcctatacatgtcctgtgctcactttattaaaaattcttttgcacacaatgtttatgaaaaggccagatccttttccaatacttatgcaaaagcaaaagaaaaccccgacacctcacctttcgctgtttgttgtttcatagatttatttaaaaaaagagaaagtctatagctataaatctttaaagagaaatatgaatacaattcccctaaactctcctcaaaagagaattcagtctacagccatttaaatgatcattgctgctacagaagtgctttaagagaattgcctgaaacatctgtattatatcggccacctgccaatcacagctttactctttcaggtcactctggggctgcctcttgcatgtattactaaataaaatgatctctctttctctctctctctctcttttctaagaaacaattatgtgcactttgatacacaaccttctctaaccaactatatatcaagacccaaaaattgaagaaaaatattgttttctcatacagtgagcagatttttcaatctactaattctgtgacttgtcttggtgtgctagcctacaccttctctttggtttagttttccttttctataacactctgaattgctaatcttactaacacctatgatgttacctgaaatcaatctcccatatgtatgctgtatgctatgctaagactcctgaaatatacttactctgtgcttgtgtatgtgaatgttaatgcaactattacctagagtgaactttaagctttattgttgaatgtaattccattatatttccttttgtacacctgtgaaaaagtggagtagtgtttttttaaccattgttaatcagcttttgtgtatgaaagacacagtaaaatttctttcttaaatcaagatactggtgattcaaggaattttatttatggtccagccaagagccatctcgtgccaagacttctgctggcaagggaatggataaagctgttttgttctagtaacaattttggaatgaatactgacaatattccatgagggtgtgcaagcacaaattttaccaatctgacctctttgaagttgcagaatgctttgaaattctaatggtatctgaaatatcagctcatagaaagtaacaaaatttgctgtcaccttaaataagacattttaattttgttataatgtacaatttagaagtttgattaattatattatctatttaggcattaatataaaagaggtaggagtctgttatttaaaaaaagcattaaatttaaaaaaaaactgtcttgtctacttttagcttcattctcccatattttgaagggtgtgtaacttcagctctgcaggattgcatggggtaaaacttgttaccaacacatgtgaaccattgctacattgtaggttgtgatcattttgccccactgaagcccatgtatctgaccttacgtgccttttgaactaggagaatcgggctaatttattaatgatgataattataatgtatctgtacagcactttttacatttgcgaagtgctttccaatccatgttagttactagttattacagctgtaaggataaaacacgtcatgtggattcattttgaattggtgctattggtatttcctctgttattgctaataaatgaaaatggtggtatg

SEQ ID NO: 13816 - DNA, 5352 bp, Homo sapiens
tgaaatatggaggatgcagctgcacttgactgaccgattaaaagatttcccttgactttgagaaacgatatttaatcagaacaaaatactgtgcactaaagatggagttttcctggggaagcggccaggaatcccggcgtctgctgctcttacttcttctcctcgcagcctgggaggcagggaacggtcagctccactactcggtctccgaggaggccaaacacggcaccttcgtgggccgcatcgcgcaggacctgggactggagctggcggagctggtgccgcgcctgttccgggtggcgtccaagggccgcggaggccttctggaggtaaatctgcagaatggcattttgtttgtgaattctcggatcgaccgggaggagctgtgccggcggagcgcggagtgcagcatccacctggaggtgatcgtagacaggccgctgcaggttttccatgtggacgtggaggtgagggacattaacgataacccgccggtgttcccagcaacacaaaagaacctgtccatcgcggaatccaggccgcttgactctcggtttccactagagggcgcctcggatgcagatatcggggagaacgccctgctcacttacagactgagcccaaatgaatacttttctctggaaaaaccacctgatgacgagctggtaaaaggtcttgggcttatattacggaaatctttagacagagaagaagctccggagatttttttagtgctcacagccactgatggaggcaaacccgagttgactggcaccgttcagttactcatcacagtactggatgccaatgacaatgccccagcttttgacagaaccatttataaggtgagattactagaaaatgttcctaatggaacattggtaattaaacttaacgcctcagatttagacgaaggattgaatggggacattgtttattcattctcaaatgatatttcgccaaatgtgaaatccaagtttcacatagatccaattactggacaaattattgtaaagggatatattgactttgaagaaagcaaatcctatgaaattattgtagagggcattgataagggacagctcccactttctggccattgtagagttattgtggaagtagaagacaacaacgataatgtcccagatttggaattcaagtctttatcacttccaattagagaggacgctccactgggtacagtcatcgccctgatcagcgtgtccgacaaagacatgggtgtcaatgggctggtcacctgctccttgacgtcccacgtccccttcaagctggtgtccaccttcaagaattactactcgttggtgctggacagtgccctggaccgcgagagcgtgtcagcctatgagctggtggtgaccgcgcgagacgggggctcgccttcgctgtgggccacggccagtgtttctgtggaggtggctgatgtgaacgacaacgctccggcgttcgcgcagcccgagtacacagtgttcgtgaaggagaacaacccgccgggctgccacatcttcactgtgtctgcgtgggacgcggacgcgcaggagaacgcgctggtgtcctactcgctggtagagcggcgggtaggggagcgcgcgctgtcgagctacgtttcggtgcatgcggagagcggcaaggtgtacgcgctgcagccgctggaccacgaggagctagagctgctgcagtttcaggtgaccgctcgcgatgccggcgtgccacctctgggcagcaacgtgacgctgcaggtgttcgtgctggacgaaaacgacaacgcgccagcactgctagcgcctcgggcgggtggcactggtggcgcagtgagcgagctggtgccatggtcggtgggtgtgggccacgtggtggcaaaggtgcgcgcggtggatgctgactcgggctacaacgcgtggctttcgtacgagctgcagccggggactggtggcgcgcgcatcccgttccgcgtggggctgtacactggcgagatcagcacaacgcgtgccctggacgaaacggacgctccgcgccaccgcctactggtactggtgaaggaccacggcgagcccgcgctgacggccacggccactgtgctggtgtcacttgtggagagtggacaggcgccaaaggcctcctcacgggcgttggtgggcgctgtgggtcccgatgctgcgctggtggatgtcaacgtatacctgatcattgccatctgcgcggtgtccagccttttggtgctcacgctgctgctgtacaccgcgctgcggtgctctgcgctgcccaccgagggcgcgtgcgctccgggcaagcccacgctggtgtgctccagtgcggtggggagctggtcatactcgcagcagaggaggccgagggtgtgctctggtgagggcccacccaagaccgacctcatggccttcagccccagtttacctgactctagggacagagaagatcagctgcagacaactgaggaatcctttgcaaagccacgacagcccaaccctgactggcgttactctgcctccctgagagcaggcatgcacagctctgtgcacctagaggaggctggcattctacgggctggtccaggagggcctgatcagcagtggccaacagtatccagtgcaacaccagaaccagaggcaggagaagtgtcccctccagtcggtgcgggtgtcaacagcaacagctggacctttaaatacggaccaggcaaccccaaacaatccggtcccggtgagttgcccgacaaattcattatcccaggatctcctgcaatcatctccatccggcaggagcctactaacagccaaattgacaaaagtgacttcataaccttcggcaaaaaggaggagaccaagaaaaagaagaaaaagaagaagggtaacaagacccaggagaaaaaagagaaagggaacagcacgactgacaacagtgaccagtgaggtcctcaaatggaaacaagccacttagccagtttttgtaataatggcaaatctctcccatgtagcaattccctgctcctttttcctatctacatgagccctcttagagacctcagaaatctgcagaaagttccctgtgtctgtctagaacgcatttaacaggttttgtcgtaaaagctttactaagtctggtgttaactctttctctccactctggcttgttttcagaacctaaaaagcagacccaagtttcctttctcctccgccgcaaaggagaggcttcccagccccgccagtgagaggttggactctctgccctgtgctccggggatcctgtcttgatgacacttgcagggcaggctgaaaagttttgagattgagcagcttgggagtttgtggccactgggtatgtgtggctaccgcgggtatgcgagtgccagatattggctgagacgagccagcttagactaattggtacaaggaaggcaagaaaacaaagacaaataaacagcggaagttatcagtatggaggggaagtgtaaacttaaagggaccagactttctaaatcttacaactcaagaggtggcagccaccctctaggagacaaaactacccccactgacaaggctttaggagaccctaaagtctgttggctgtgacgtcattatacctaaaatctgcatcatacctgcaagccaacagttcagtgttttaacagagaaccaccctgggaaacagaagcagatctgatgtgtttcctatacatgtcctgtgctcactttattaaaaattcttttgcacacaatgtttatgaaaaggccagatccttttccaatacttatgcaaaagcaaaagaaaaccccgacacctcacctttcgctgtttgttgtttcatagatttatttaaaaaaagagaaagtctatagctataaatctttaaagagaaatatgaatacaattcccctaaactctcctcaaaagagaattcagtctacagccatttaaatgatcattgctgctacagaagtgctttaagagaattgcctgaaacatctgtattatatcggccacctgccaatcacagctttactctttcaggtcactctggggctgcctcttgcatgtattactaaataaaatgatctctctttctctctctctctctcttttctaagaaacaattatgtgcactttgatacacaaccttctctaaccaactatatatcaagacccaaaaattgaagaaaaatattgttttctcatacagtgagcagatttttcaatctactaattctgtgacttgtcttggtgtgctagcctacaccttctctttggtttagttttccttttctataacactctgaattgctaatcttactaacacctatgatgttacctgaaatcaatctcccatatgtatgctgtatgctatgctaagactcctgaaatatacttactctgtgcttgtgtatgtgaatgttaatgcaactattacctagagtgaactttaagctttattgttgaatgtaattccattatatttccttttgtacacctgtgaaaaagtggagtagtgtttttttaaccattgttaatcagcttttgtgtatgaaagacacagtaaaatttctttcttaaatcaagatactggtgattcaaggaattttatttatggtccagccaagagccatctcgtgccaagacttctgctggcaagggaatggataaagctgttttgttctagtaacaattttggaatgaatactgacaatattccatgagggtgtgcaagcacaaattttaccaatctgacctctttgaagttgcagaatgctttgaaattctaatggtatctgaaatatcagctcatagaaagtaacaaaatttgctgtcaccttaaataagacattttaattttgttataatgtacaatttagaagtttgattaattatattatctatttaggcattaatataaaagaggtaggagtctgttatttaaaaaaagcattaaatttaaaaaaaaactgtcttgtctacttttagcttcattctcccatattttgaagggtgtgtaacttcagctctgcaggattgcatggggtaaaacttgttaccaacacatgtgaaccattgctacattgtaggttgtgatcattttgccccactgaagcccatgtatctgaccttacgtgccttttgaactaggagaatcgggctaatttattaatgatgataattataatgtatctgtacagcactttttacatttgcgaagtgctttccaatccatgttagttactagttattacagctgtaaggataaaacacgtcatgtggattcattttgaattggtgctattggtatttcctctgttattgctaataaatgaaaatggtggtatg

SEQ ID NO: 13817 - DNA, 5287 bp, Homo sapiens
atggaaataaaaccagaggtatttgacatggtgtttaccccggaggatagattgggaaagcaatgtctgctcctcccgcttctgctcctcgcagcctggaaggtggggagcggccagctccactactccgtacccgaggaggccaaacacggcaccttcgtgggccggatcgcgcaggacctggggctggagctggcggagctggtgccgcgcctgttcaggatggcctccaaagaccgcgaggaccttctggaggtaaatctgcagaatggcattttgtttgtgaattctcggatcgaccgcgaggagctgtgcgggcggagcgcggagtgcagcatccacctggaggtgatcgtggacaggccgctgcaggttttccatgtggacgtggaggtgagggacattaacgacaacccgcccttgttcccggtagaggaacaaagagtgctgatttacgaatctaggctgccagattctgtgtttccactggagggcgcgtccgatgcagatgttggctcaaattccatcttaacctataaactcagttctagcgaatacttcgggctagatgtgaaaataaacagtgatgacaataaacaaattgggctcttattaaagaaatccttggacagagaggaagctcctgcacacaacttattcctgacagccacagatgggggcaaacctgagctcacaggcactgttcagctgctggtcacagtgctggatgtgaatgataatgctcccactttcgaacagtctgaatacgaagtaagaatattcgaaaatgcagacaacggaacaacagttatcagactgaatgcttctgatcgggatgaaggagcgaatggggcaatttcatattcttttaatagccttgttgcagccatggttattgaccactttagcatagatcgaaatacgggagaaatagtgattcggggtaatttggattttgaacaagaaaacttatacaaaatcctcattgacgccacggacaaaggccatcctcccatggcgggtcattgcaccgttttagtgagaattttggataaaaatgataacgtccctgagatagcactgacttccttatccttgcctgtacgtgaagacgctcaatttggtactgtcatcgccctaattagcgtgaacgacctcgattcaggtgccaacgggcaggtgaactgctcgctgacgcctcacgtccctttcaagctggtgtccaccttcaagaattactactcgttggtgctggacagtgccctggaccgcgagagcgtgtcggcctatgagttggtggtaaccgcgcgggacgggggctcgccttcgctgtgggccaccgccagcttgtctgtggaggtggccgacatgaatgacaatgctccggcgttcgcgcagcccgagtacacagtgttcgtgaaggagaacaacccgccgggctgccacatcttcacggtgtctgcgcgagacgcggacgcgcaggagaacgcgctggtgtcctactcgctggtggagcggcgggtgggcgagcgcgcgttgtcgagctacatttcggtgcacgcggagagcggcaaggtgtacgcgctgcagccgctggaccacgaggagctagagctgctgcagtttcaggtgagcgcgcgcgacgcgggcgtgccgcctctgggcagcaacgtgacgctgcaggtgttcgtgctggacgagaacgacaacgcgccggcgctgctggcgcctcgggtgggtggtactggtggtgcagtgagcgagctggtgccgcggtcactgggtgcaggccaagtggtggcgaaggtgcgcgcagttgacgccgactcaggctacaacgcgtggctttcgtatgagctgcagcccccggcaagcagcgctcgcttcccgtttcgcgtggggctgtacacgggcgagatcagcaccactcgtgtcctggacgaagcggactctccgcgccaccggctgctggtgctggtgaaagaccacggtgagccggcgctgacagcgacggccacggttctggtgtcgctggtggagagtggccaggctccaaaggcgtcatcacgggcgtcggtgggcgccgcgggcccagaggcggcgctggtggatgtcaacgtgtacctgatcatcgccatctgcgcggtatccagcctgctggtcctcacgctactgctgtacacagcgctgcggtgctcggcgccacccaccgagggcgcgtgcacggcggacaagcccacgctggtgtgctccagcgcagtggggagctggtcgtactcgcagcagaggcggcagagggtgtgctccggggagggcccacccaagatggatctcatggcctttagccccagcctttcaccttgtcctattatgatgggtaaggcggagaatcaggatttaaatgaagatcatgatgccaaaccacgacagcccaaccctgactggcgttactctgcctccctgagagcaggcatgcacagctctgtgcacctagaggaggctggcattctacgggctggtccaggagggcctgatcagcagtggccaacagtatccagtgcaacaccagaaccagaggcaggagaagtgtcccctccagtcggtgcgggtgtcaacagcaacagctggacctttaaatacggaccaggcaaccccaaacaatccggtcccggtgagttgcccgacaaattcattatcccaggatctcctgcaatcatctccatccggcaggagcctactaacagccaaattgacaaaagtgacttcataaccttcggcaaaaaggaggagaccaagaaaaagaagaaaaagaagaagggtaacaagacccaggagaaaaaagagaaagggaacagcacgactgacaacagtgaccagtgaggtcctcaaatggaaacaagccacttagccagtttttgtaataatggcaaatctctcccatgtagcaattccctgctcctttttcctatctacatgagccctcttagagacctcagaaatctgcagaaagttccctgtgtctgtctagaacgcatttaacaggttttgtcgtaaaagctttactaagtctggtgttaactctttctctccactctggcttgttttcagaacctaaaaagcagacccaagtttcctttctcctccgccgcaaaggagaggcttcccagccccgccagtgagaggttggactctctgccctgtgctccggggatcctgtcttgatgacacttgcagggcaggctgaaaagttttgagattgagcagcttgggagtttgtggccactgggtatgtgtggctaccgcgggtatgcgagtgccagatattggctgagacgagccagcttagactaattggtacaaggaaggcaagaaaacaaagacaaataaacagcggaagttatcagtatggaggggaagtgtaaacttaaagggaccagactttctaaatcttacaactcaagaggtggcagccaccctctaggagacaaaactacccccactgacaaggctttaggagaccctaaagtctgttggctgtgacgtcattatacctaaaatctgcatcatacctgcaagccaacagttcagtgttttaacagagaaccaccctgggaaacagaagcagatctgatgtgtttcctatacatgtcctgtgctcactttattaaaaattcttttgcacacaatgtttatgaaaaggccagatccttttccaatacttatgcaaaagcaaaagaaaaccccgacacctcacctttcgctgtttgttgtttcatagatttatttaaaaaaagagaaagtctatagctataaatctttaaagagaaatatgaatacaattcccctaaactctcctcaaaagagaattcagtctacagccatttaaatgatcattgctgctacagaagtgctttaagagaattgcctgaaacatctgtattatatcggccacctgccaatcacagctttactctttcaggtcactctggggctgcctcttgcatgtattactaaataaaatgatctctctttctctctctctctctcttttctaagaaacaattatgtgcactttgatacacaaccttctctaaccaactatatatcaagacccaaaaattgaagaaaaatattgttttctcatacagtgagcagatttttcaatctactaattctgtgacttgtcttggtgtgctagcctacaccttctctttggtttagttttccttttctataacactctgaattgctaatcttactaacacctatgatgttacctgaaatcaatctcccatatgtatgctgtatgctatgctaagactcctgaaatatacttactctgtgcttgtgtatgtgaatgttaatgcaactattacctagagtgaactttaagctttattgttgaatgtaattccattatatttccttttgtacacctgtgaaaaagtggagtagtgtttttttaaccattgttaatcagcttttgtgtatgaaagacacagtaaaatttctttcttaaatcaagatactggtgattcaaggaattttatttatggtccagccaagagccatctcgtgccaagacttctgctggcaagggaatggataaagctgttttgttctagtaacaattttggaatgaatactgacaatattccatgagggtgtgcaagcacaaattttaccaatctgacctctttgaagttgcagaatgctttgaaattctaatggtatctgaaatatcagctcatagaaagtaacaaaatttgctgtcaccttaaataagacattttaattttgttataatgtacaatttagaagtttgattaattatattatctatttaggcattaatataaaagaggtaggagtctgttatttaaaaaaagcattaaatttaaaaaaaaactgtcttgtctacttttagcttcattctcccatattttgaagggtgtgtaacttcagctctgcaggattgcatggggtaaaacttgttaccaacacatgtgaaccattgctacattgtaggttgtgatcattttgccccactgaagcccatgtatctgaccttacgtgccttttgaactaggagaatcgggctaatttattaatgatgataattataatgtatctgtacagcactttttacatttgcgaagtgctttccaatccatgttagttactagttattacagctgtaaggataaaacacgtcatgtggattcattttgaattggtgctattggtatttcctctgttattgctaataaatgaaaatggtggtatg

SEQ ID NO: 13818 - DNA, 7805 bp, Homo sapiens
ccagcaccccggggctgcgcactgcagctccccaggccacccaccacccttctggtctctgagcccaggatgcgaggatggccagaccatctctgtgcaccctggtgcctctgggccctgagtgcttgcgccccttcacccgggagtcactggcagccatagaacagcgggcggtggaggaggaggcccggctgcagcggaataagcagatggagattgaggagcccgaacggaagccacgaagtgacttggaggctggcaagaacctacccatgatctacggagaccccccgccggaggtcatcggcatccccctggaggacctggatccctactacagcaataagaagaccttcatcgtactcaacaagggcaaggccatcttccgcttctccgccacacctgctctctacctgctgagccccttcagcgtagtcaggcgcggggccatcaaggtgctcatccatgcgctgttcagcatgttcatcatgatcaccatcttgaccaactgcgtattcatgaccatgagtgacccgcctccctggtccaagaatgtggagtacaccttcacagggatctacacctttgagtccctcatcaagatactggcccgaggcttctgtgtcgacgacttcacattcctccgggacccctggaactggctggacttcagtgtcatcatgatggcgtacctgacagagtttgtggacttgggcaacatctcagccctgaggaccttccgggtgctgcgggccctcaaaaccatcacggtcatcccagggctgaagacgatcgtgggggccctgatccagtcggtgaaaaagctgtcggatgtgatgatcctcactgtcttctgcctgagcgtctttgcgctggtaggactgcagctcttcatgggaaacctgaggcagaagtgtgtgcgctggcccccgccgttcaacgacaccaacaccacgtggtacagcaatgacacgtggtacggcaatgacacatggtatggcaatgagatgtggtacggcaatgactcatggtatgccaacgacacgtggaacagccatgcaagctgggccaccaacgatacctttgattgggacgcctacatcagtgatgaagggaacttctacttcctggagggctccaacgatgccctgctctgtgggaacagcagtgatgctgggcactgccctgagggttatgagtgcatcaagaccgggcggaaccccaactatggctacaccagctatgacaccttcagctgggccttcttggctctcttccgcctcatgacacaggactattgggagaacctcttccagctgacccttcgagcagctggcaagacctacatgatcttcttcgtggtcatcatcttcctgggctctttctacctcatcaatctgatcctggccgtggtggccatggcatatgccgagcagaatgaggccaccctggccgaggataaggagaaagaggaggagtttcagcagatgcttgagaagttcaaaaagcaccaggaggagctggagaaggccaaggccgcccaagctctggaaggtggggaggcagatggggacccagcccatggcaaagactgcaatggcagcctggacacatcgcaaggggagaagggagccccgaggcagagcagcagcggagacagcggcatctccgacgccatggaagaactggaagaggcccaccaaaagtgcccaccatggtggtacaagtgcgcccacaaagtgctcatatggaactgctgcgccccgtggctgaagttcaagaacatcatccacctgatcgtcatggacccgttcgtggacctgggcatcaccatctgcatcgtgctcaacaccctcttcatggccatggaacattaccccatgacggagcactttgacaacgtgctcactgtgggcaacctggtcttcacaggcatcttcacagcagagatggttctgaagctgattgccatggacccctacgagtatttccagcagggttggaatatcttcgacagcatcatcgtcaccctcagcctggtagagctaggcctggccaacgtacagggactgtctgtgctacgctccttccgtctgctgcgggtcttcaagctggccaagtcgtggccaacgctgaacatgctcatcaagatcattggcaattcagtgggggcgctgggtaacctgacgctggtgctggctatcatcgtgttcatcttcgccgtggtgggcatgcagctgtttggcaagagctacaaggagtgcgtgtgcaagattgccttggactgcaacctgccgcgctggcacatgcatgatttcttccactccttcctcatcgtcttccgcatcctgtgcggggagtggatcgagaccatgtgggactgcatggaggtggccggccaagccatgtgcctcaccgtcttcctcatggtcatggtcatcggcaatcttgtggtcctgaacctgttcctggctctgctgctgagctccttcagcgccgacagtctggcagcctcggatgaggatggcgagatgaacaacctgcagattgccatcgggcgcatcaagttgggcatcggctttgccaaggccttcctcctggggctgctgcatggcaagatcctgagccccaaggacatcatgctcagcctcggggaggctgacggggccggggaggctggagaggcgggggagactgcccccgaggatgagaagaaggagccgcccgaggaggacctgaagaaggacaatcacatcctgaaccacatgggcctggctgacggccccccatccagcctcgagctggaccaccttaacttcatcaacaacccctacctgaccatacaggtgcccatcgcctccgaggagtccgacctggagatgcccaccgaggaggaaaccgacactttctcagagcctgaggatagcaagaagccgccgcagcctctctatgatgggaactcgtccgtctgcagcacagctgactacaagccccccgaggaggaccctgaggagcaggcagaggagaaccccgagggggagcagcctgaggagtgcttcactgaggcctgcgtgcagcgctggccctgcctctacgtggacatctcccagggccgtgggaagaagtggtggactctgcgcagggcctgcttcaagattgtcgagcacaactggttcgagaccttcattgtcttcatgatcctgctcagcagtggggctctggccttcgaggacatctacattgagcagcggcgagtcattcgcaccatcctagaatatgccgacaaggtcttcacctacatcttcatcatggagatgctgctcaaatgggtggcctacggctttaaggtgtacttcaccaacgcctggtgctggctcgacttcctcatcgtggatgtctccatcatcagcttggtggccaactggctgggctactcggagctgggacccatcaaatccctgcggacactgcgggccctgcgtcccctgagggcactgtcccgattcgagggcatgagggtggtggtgaacgccctcctaggcgccatcccctccatcatgaatgtgctgcttgtctgcctcatcttctggctgatcttcagcatcatgggtgtcaacctgtttgccggcaagttctactactgcatcaacaccaccacctctgagaggttcgacatctccgaggtcaacaacaagtctgagtgcgagagcctcatgcacacaggccaggtccgctggctcaatgtcaaggtcaactacgacaacgtgggtctgggctacctctccctcctgcaggtggccaccttcaagggttggatggacatcatgtatgcagccgtggactcccgggagaaggaggagcagccgcagtacgaggtgaacctctacatgtacctctactttgtcatcttcatcatctttggctccttcttcaccctcaacctcttcattggcgtcatcattgacaacttcaaccagcagaagaagaagttaggggggaaagacatctttatgacggaggaacagaagaaatactataacgccatgaagaagcttggctccaagaagcctcagaagccaattccccggccccagaacaagatccagggcatggtgtatgacctcgtgacgaagcaggccttcgacatcaccatcatgatcctcatctgcctcaacatggtcaccatgatggtggagacagacaaccagagccagctcaaggtggacatcctgtacaacatcaacatgatcttcatcatcatcttcacaggggagtgcgtgctcaagatgctcgccctgcgccagtactacttcaccgttggctggaacatctttgacttcgtggtcgtcatcctgtccattgtgggccttgccctctctgacctgatccagaagtacttcgtgtcacccacgctgttccgtgtgatccgcctggcgcggattgggcgtgtcctgcggctgatccgcggggccaagggcatccggacgctgctgttcgccctcatgatgtcgctgcctgccctcttcaacatcggcctcctcctcttcctggtcatgttcatctactccatcttcggcatgtccaactttgcctacgtcaagaaggagtcgggcatcgatgatatgttcaacttcgagaccttcggcaacagcatcatctgcctgttcgagatcaccacgtcggccggctgggacgggctcctcaaccccatcctcaacagcgggcccccagactgtgaccccaacctggagaacccgggcaccagtgtcaagggtgactgcggcaacccctccatcggcatctgcttcttctgcagctatatcatcatctccttcctcatcgtggtcaacatgtacatcgccatcatcctggagaacttcaatgtggccacagaggagagcagcgagccccttggtgaagatgactttgagatgttctacgagacatgggagaagttcgaccccgacgccacccagttcatcgcctacagccgcctctcagacttcgtggacaccctgcaggaaccgctgaggattgccaagcccaacaagatcaagctcatcacactggacttgcccatggtgccaggggacaagatccactgcctggacatcctctttgccctgaccaaagaggtcctgggtgactctggggaaatggacgccctcaagcagaccatggaggagaagttcatggcagccaacccctccaaggtgtcctacgagcccatcaccaccaccctcaagaggaagcacgaggaggtgtgcgccatcaagatccagagggcctaccgccggcacctgctacagcgctccatgaagcaggcatcctacatgtaccgccacagccacgacggcagcggggatgacgcccctgagaaggaggggctgcttgccaacaccatgagcaagatgtatggccacgagaatgggaacagcagctcgccaagcccggaggagaagggcgaggcaggggacgccggacccactatggggctgatgcccatcagcccctcagacactgcctggcctcccgcccctcccccagggcagactgtgcgcccaggtgtcaaggagtctcttgtctagcaggcagcatcggggtggcccactgagtctcggcatagtccccagagctcccccgtggtgcctgcacacagagtgagggaggagggctttgaatctgggactgtgcctggctccctgatgggggacaggatttggccacactggggctgacacccaggcccgagcgcctgcgttcccagaccatgggaaatgggaattgcgctcaggggctccatgctgggtctgaggcccctgcctccaagatttaacctgcaagttgctctgacctcctctgggccctgtcgcccctccttttggcctgggggaggtcagaacattcgaatctctgcccctcacttgaggaggagctggcctgcggtggagggatcagttgccccccatcaccagagtcttaagggtcactggcctctccccaggaagtggctcagacccctcagccccagcccagacaaagatgtcttaacctcagggagtgcagacacctaaccccagggcactgccagcccaccccctttgactctggggtgcagcttcacccaccaggccagctcaggaattccctggaaaagggaaatgtgactggttcagaaatagctcctcaaagcctcaaaacctgattggccactggatcctgctgctttgggctgggatggtgactcctgaaacctcttcctaggccacgtccaggtccgtagctcccctggctggctcctaggggaagagcagaaggaaggatgccacttgggaatgaattgtccttttctaggaagcacgggggagtgagacaggctgggtcctgccagctggatcgctgcacatggcctgagcatccagacctgagcgggagtcagggacctgctgctcagtaagaagattctcgccccttccctctctccctgcctcactcctccgtgagcaccaccagggctccaggagcctcatccagcctcagagatctcccttctcatctccccacgcccgtctctttctcacctttcccacctctctccccaaagtgatcctaagaatgtacagttgagctcaggttagatatttcgaccctggggcgtgcagcagggaaggcccaactggttcaggctcaaccttccaacttcctgtggcctgaagaagcacttctgctgcatcgctgttctgggcatggcagggccaggcctctgctggctcaggaggaggggtgagagacctgctcaggcgtcgctggatttattcacttgtgtgtgtacctgtggctgtgtgtctgcttgtatgcttttataggcctgtgtgtatagctgtgtgtgtgttcaagtgcgtgactgtatgtgtgtgtgtgaaccactgtgtactggagcctgcattatgcacgtgtctgggtatctttgtatatatgtgtatatatgtgtgccctggactgtttcaaggtccatggagtacggctggtgtgtcatactgtgcaggcctgtccctgggagtgttcccgtgcctgggagagtggacctgtgctgtgagtgtgtggatgcgtgtgaacgcatgtggtaaggtgtgtactcagggcattctgttggcctaagtgcctcttctttttcttcttgtttctcatgaaaagtttgattaaaattcaggaagcagcaaaaccttcaaaacaagacatgtatgtgtgcttgagtgtgtgaacacgtgtgtgtgtgtgcacatctacatgccatgcctatgggccagagttgtctttattgtccaccatgctctctcacctgctcccagtcctgcctgaacagccctctctctcactcccctctcctccccttcctgtttctcgttgtcacacccatggcctcagccctgctccctgcctcctgcctatgtctcctctatggaaggaggcctccactccttccatctcttccttcagaagtttcgtctaatgggggcagtctccccttcctggcacattgcccctctgccttgccctcctgggccctgggctggcacagcccctggagcctcagaaatctgtttgattggatattctcctcggactgtgtgcaggttgcagaggaagagtagatgagccgggtccggcctctccctgcctgtggcccctcccctgcagacggatgcccattcctgcctggtccagtggggaacaggtcccacgccaggccagcaggcgggctcctttgtacagttcttacaataaaccctccttggtgcctctgg

SEQ ID NO: 13819 - DNA, 4677 bp, Homo sapiens
tgctcctgctcctccgctcctcctgcgcggggtgctgaaacagcccggggaagtagagccgcctccggggagcccaaccagccgaacgccgccggcgtcagcagccttgcgcggccacagcatgaccgctcgcggcctggcccttggcctcctcctgctgctactgtgtccagcgcaggtgttttcacagtcctgtgtttggtatggagagtgtggaattgcatatggggacaagaggtacaattgcgaatattctggcccaccaaaaccattgccaaaggatggatatgacttagtgcaggaactctgtccaggattcttctttggcaatgtcagtctctgttgtgatgttcggcagcttcagacactaaaagacaacctgcagctgcctctacagtttctgtccagatgtccatcctgtttttataacctactgaacctgttttgtgagctgacatgtagccctcgacagagtcagtttttgaatgttacagctactgaagattatgttgatcctgttacaaaccagacgaaaacaaatgtgaaagagttacaatactacgtcggacagagttttgccaatgcaatgtacaatgcctgccgggatgtggaggccccctcaagtaatgacaaggccctgggactcctgtgtgggaaggacgctgacgcctgtaatgccaccaactggattgaatacatgttcaataaggacaatggacaggcaccttttaccatcactcctgtgttttcagattttccagtccatgggatggagcccatgaacaatgccaccaaaggctgtgacgagtctgtggatgaggtcacagcaccatgtagctgccaagactgctctattgtctgtggccccaagccccagcccccacctcctcctgctccctggacgatccttggcttggacgccatgtatgtcatcatgtggatcacctacatggcgtttttgcttgtgttttttggagcattttttgcagtgtggtgctacagaaaacggtattttgtctccgagtacactcccatcgatagcaatatagctttttctgttaatgcaagtgacaaaggagaggcgtcctgctgtgaccctgtcagcgcagcatttgagggctgcttgaggcggctgttcacacgctgggggtctttctgcgtccgaaaccctggctgtgtcattttcttctcgctggtcttcattactgcgtgttcgtcaggcctggtgtttgtccgggtcacaaccaatccagttgacctctggtcagcccccagcagccaggctcgcctggaaaaagagtactttgaccagcactttgggcctttcttccggacggagcagctcatcatccgggcccctctcactgacaaacacatttaccagccatacccttcgggagctgatgtaccctttggacctccgcttgacatacagatactgcaccaggttcttgacttacaaatagccatcgaaaacattactgcctcttatgacaatgagactgtgacacttcaagacatctgcttggcccctctttcaccgtataacacgaactgcaccattttgagtgtgttaaattacttccagaacagccattccgtgctggaccacaagaaaggggacgacttctttgtgtatgccgattaccacacgcactttctgtactgcgtacgggctcctgcctctctgaatgatacaagtttgctccatgacccttgtctgggtacgtttggtggaccagtgttcccgtggcttgtgttgggaggctatgatgatcaaaactacaataacgccactgcccttgtgattaccttccctgtcaataattactataatgatacagagaagctccagagggcccaggcctgggaaaaagagtttattaattttgtgaaaaactacaagaatcccaatctgaccatttccttcactgctgaacgaagtattgaagatgaactaaatcgtgaaagtgacagtgatgtcttcaccgttgtaattagctatgccatcatgtttctatatatttccctagccttggggcacatcaaaagctgtcgcaggcttctggtggattcgaaggtctcactaggcatcgcgggcatcttgatcgtgctgagctcggtggcttgctccttgggtgtcttcagctacattgggttgcccttgaccctcattgtgattgaagtcatcccgttcctggtgctggctgttggagtggacaacatcttcattctggtgcaggcctaccagagagatgaacgtcttcaaggggaaaccctggatcagcagctgggcagggtcctaggagaagtggctcccagtatgttcctgtcatccttttctgagactgtagcatttttcttaggagcattgtccgtgatgccagccgtgcacaccttctctctctttgcgggattggcagtcttcattgactttcttctgcagattacctgtttcgtgagtctcttggggttagacattaaacgtcaagagaaaaatcggctagacatcttttgctgtgtcagaggtgctgaagatggaacaagcgtccaggcctcagagagctgtttgtttcgcttcttcaaaaactcctattctccacttctgctaaaggactggatgagaccaattgtgatagcaatatttgtgggtgttctgtcattcagcatcgcagtcctgaacaaagtagatattggattggatcagtctctttcgatgccagatgactcctacatggtggattatttcaaatccatcagtcagtacctgcatgcgggtccgcctgtgtactttgtcctggaggaagggcacgactacacttcttccaaggggcagaacatggtgtgcggcggcatgggctgcaacaatgattccctggtgcagcagatatttaacgcggcgcagctggacaactatacccgaataggcttcgccccctcgtcctggatcgacgattatttcgactgggtgaagccacagtcgtcttgctgtcgagtggacaatatcactgaccagttctgcaatgcttcagtggttgaccctgcctgcgttcgctgcaggcctctgactccggaaggcaaacagaggcctcaggggggagacttcatgagattcctgcccatgttcctttcggataaccctaaccccaagtgtggcaaagggggacatgctgcctatagttctgcagttaacatcctccttggccatggcaccagggtcggagccacgtacttcatgacctaccacaccgtgctgcagacctctgctgactttattgacgctctgaagaaagcccgacttatagccagtaatgtcaccgaaaccatgggcattaacggcagtgcctaccgagtatttccttacagtgtgttttatgtcttctacgaacagtacctgaccatcattgacgacactatcttcaacctcggtgtgtccctgggcgcgatatttctggtgaccatggtcctcctgggctgtgagctctggtctgcagtcatcatgtgtgccaccatcgccatggtcttggtcaacatgtttggagttatgtggctctggggcatcagtctgaacgctgtatccttggtcaacctggtgatgagctgtggcatctccgtggagttctgcagccacataaccagagcgttcacggtgagcatgaaaggcagccgcgtggagcgcgcggaagaggcacttgcccacatgggcagctccgtgttcagtggaatcacacttacaaaatttggagggattgtggtgttggcttttgccaaatctcaaattttccagatattctacttcaggatgtatttggccatggtcttactgggagccactcacggattaatatttctccctgtcttactcagttacatagggccatcagtaaataaagccaaaagttgtgccactgaagagcgatacaaaggaacagagcgcgaacggcttctaaatttctagccctctcgcagggcatcctgactgaactgtgtctaagggtcggtcggtttaccactggacgggtgctgcatcggcaaggccaagttgaacaccggatggtgccaaccatcggttgtttggcagcagctttgaacgtagcgcctgtgaactcaggaatgcacagttgacttgggaagcagtattactagatctggaggcaaccacaggacactaaacttctcccagcctcttcaggaaagaaacctcattctttggcaagcaggaggtgacactagatggctgtgaatgtgatccgctcactgacactctgtaaaggccaatcaatgcactgtctgtctctccttttaggagtaagccatcccacaagttctataccatatttttagtgacagttgaggttgtagatacactttataacattttatagtttaaagagctttattaatgcaataaattaactttgtacacatttttatataaaaaaacagcaagtgatttcagaatgttgtaggcctcattagagcttggtctccaaaaatctgtttgaaaaaagcaacatgttcttcacagtgttcccctagaaaggaagagatttaattgccagttagatgtggcatgaaatgagggacaaagaaagcatctcgtaggtgtgtctactgggttttaacttatttttctttaataaaatacattgttttcctaaaaaaaaaaaaaaaaaa

SEQ ID NO: 13820 - DNA, 2450 bp, Homo sapiens
agaacggcttccggcgggagctgtgcagctccttatcatggggacaattcatctctttcgaaaaccacaaagatccttttttggcaagttgttacgggaatttagacttgtagcagctgaccgaaggtcctggaagatactgctctttggtgtaataaacttgatatgtactggcttcctgcttatgtggtgcagttctactaatagtatagctttaactgcctatacttacctgaccatttttgatctttttagtttaatgacatgtttaataagttactgggtaacattgaggaaacctagccctgtctattcatttgggtttgaaagattagaagtcctggctgtatttgcctccacagtcttggcacagttgggagctctctttatattaaaagaaagtgcagaacgctttttggaacagcccgagatacacacgggaagattattagttggtacttttgtggctctttgtttcaacctgttcacgatgctttctattcggaataaaccttttgcttatgtctcagaagctgctagtacgagctggcttcaagagcatgttgcagatcttagtcgaagcttgtgtggaattattccgggacttagcagtatcttccttccccgaatgaatccatttgttttgattgatcttgctggagcatttgctctttgtattacatatatgctcattgaaattaataattattttgccgtagacactgcctctgctatagctattgccttgatgacatttggcactatgtatcccatgagtgtgtacagtgggaaagtcttactccagacaacaccaccccatgttattggtcagttggacaaactcatcagagaggtatctaccttagatggagttttagaagtccgaaatgaacatttttggaccctaggttttggctcattggctggatcagtgcatgtaagaattcgacgagatgccaatgaacaaatggttcttgctcatgtgaccaacaggctgtacactctagtgtctactctaactgttcaaattttcaaggatgactggattaggcctgccttattgtctgggcctgttgcagccaatgtcctaaacttttcagatcatcacgtaatcccaatgcctcttttaaagggtactgatgatttgaacccagttacatcaactccagctaaacctagtagtccacctccagaattttcatttaacactcctgggaaaaatgtgaacccagttattcttctaaacacacaaacaaggccttatggttttggtctcaatcatggacacacaccttacagcagcatgcttaatcaaggacttggagttccaggaattggagcaactcaaggattgaggactggttttacaaatataccaagtagatatggaactaataatagaattggacaaccaagaccatgatagactctaacttatttttataaggaatattgactccttggcttccaatttatttagtaatccaactttgcattgactgtttaatcatttactctaaatgttagataatagtagtcttgttcacatttcatgaaacctatgaaactatatttttgtaaaatgtatttgtgacagtgaaatcctcgtaaatgttaaaggctttaaataggcttcctttagaaaatgtgtttctttaaatttggattttggtatctttggttttgtagttgactgcagtgtgatgtgaccttacctttataagagccacttgatggagtagatctgtcacattactaagatacgatatttctttttttttccgagacggagtcttgctctgccactgtgcccggccaatacattattattaacttaaggctgtactttattaaggcttccttagtttttgttttgttttgttttttgagatggagtctcactctgtcgcccaggctggaatgcagtggcatgatctcagctcactgcaacctctgcctcctgagttcaaatgattctcctgcctcagcctcccgagtagctgggattacaggcacctgccaccacgcccagctaatttttgtatttttagtaaagacgggggatttcaccatgttggccaggctggtcttgaactcctgacctcatgatccacccaccttagcctcccaaagtgctgggattaggtgtgagccaccgcacctggccgatattttctttaatgaaatttataaatatgcttcttgaataatacacattttgggaaagggaaaaatgtctgttcaaaaagtaaaggtctcttttatagcttttccaaacttaattgctaaatttttctttgaggttctcctgaattatgtcttacaaactaaaagcaaaaatttttagcagaaattttggaatacattctatctagcacaatttgaatttttaattatcaagatttttgttaaagtttctctcctttaaaaattttagtacatttgtaaat

SEQ ID NO: 13821 - DNA, 2699 bp, Homo sapiens
agtggtacaagatgtggaggtggaagacagtgatattgtgtccggaatttattccttcttgtgggttctcggtctcactaacttcaagaatgaagccgcagaccgtcgcggtgtgttacagttcttaaagatggtgtgtccagagtttgttccttcagatgttcagatgtgtcgagtttcttccttccggtgggttcgtggtctccctgacttcagaagtgaagccacataccttcgcaatgctggccaagaagagctgaaatagaaaacagcctagaacctaacactatttactgtaaaatttttgcaccaggatggaaggggattcttaccacaatgcaaccaccgtcaatggcaccccagtaaatcaccagcctttggaacgccacaggttgtgggaagtcatcaccattgcagctgtgactgctgtggtaagcctgatcaccattgtgggcaatgtcttggtcatgatctccttcaaagtcaacagccagctcaagacagttaacaactattacctgctcagcttagcctgtgcagatctcatcattggaatcttctccatgaacctctacaccacctacatcctcatgggacgctgggctctcgggagtctggcttgtgacctttggcttgcactggactacgtggccagcaacgcttctgtcatgaaccttctggtgatcagttttgaccgttacttttccatcacaagacccttgacatatcgggccaagcgtactccgaaaagggctggcatcatgattggcttggcctggctgatctccttcatcctctgggccccagcaatcctctgctggcagtacttggttgggaagcggacagttccactggatgagtgccagatccagtttctctctgagcccaccatcacttttggcactgccattgctgccttctacatccctgtttctgtcatgaccatcctctactgtcgaatctaccgggaaacagagaagcgaaccaaggacctggctgacctccagggttctgactctgtgaccaaagctgagaagagaaagccagctcatagggctctgttcagatcctgcttgcgctgtcctcgacccaccctggcccagcgggaaaggaaccaggcctcctggtcatcctcccgcaggagcacctccaccactgggaagccatcccaagccactggcccaagcgccaattgggccaaagctgagcagctcaccacctgtagcagctacccttcctcagaggatgaggacaagcccgccactgaccctgtcctccaagtggtctacaagagtcagggtaaggaaagcccaggggaagaattcagtgctgaagagactgaggaaacttttgtgaaagctgaaactgaaaaaagtgactatgacaccccaaactaccttctgtctccagcagctgctcatagacccaagagtcagaaatgtgtggcctataagttccgattggtggtaaaagctgacgggaaccaggagaccaacaatggctgtcacaaggtgaaaatcatgccctgccccttcccagtggccaaggaaccttcaacgaaaggcctcaatcccaaccccagccatcaaatgaccaaacgaaagagagtggtcctagtcaaagagaggaaagcagcccagacactgagtgccattctcctggccttcatcatcacatggaccccgtataacatcatggtcctggtttctaccttctgtgacaagtgtgtcccagtcaccctgtggcacttgggctattggttgtgctatgtcaatagcactgtcaaccccatctgctatgccctctgcaacagaaccttcaggaagacctttaagatgctgcttctctgccgatggaaaaagaaaaaagtggaagagaagttgtactggcaggggaacagcaagctaccctgaaaagtcaacaactcctctcgaaagaacaatgaccacagtcaacatcctctgaggatgagcaagctgattctggtttgtatattttcaaaaagaagacatctcattttgagtccttgaagatttttgtaaaggctcaagtttggttgccaaatggaaggggccatagctgcagcaattgctgacatattaaatgactcttgcctatgaccaaggccatttgatgccaggggagtttgccaatgaagtaaagggataggctcatggcccttcacaagaggaagcacactgggtaacaatgaacagtgactcagggaacttatgccccttctgtaggaaacagcagagaccaggtggaaaccttttcctgtggaaacctgtcatagaattttgtgcaatatgtatgtgtctatgaagctgtcttgtgccagtgagaaccagcaggagaatgtacaacagtgtcacttgttaacgagactgatattcaacaggcttctaagaatatgtatcttcataaactgatcactatctattatgcagctattatgtggtctatactatactgtggtttgttttcctgtccccacatctgagtgaaggtcttgctcttccctttcatatccaatgtcaattccttgtactcactgaacccatgctgatctccagggaaccatccttcctctcagaatccagagtctggaaggactgaaacctggtcatacccagtcctttcaaggggcctcttttctactaataaagatggatcaagtctcaaaaaaaaaaaaaaaa

SEQ ID NO: 13822 - DNA, 2826 bp, Homo sapiens
gctccaagaaaccagccaacggctggaggatgtggaggagcaggtagggtggctcatggctacattagattcaggggacatctcctcagatgccctgcaaaccatgaaataaaaatggaggaggaacaacaacaacaaacaaaaaaaaaaagcaaagaggaactgcaagttcagtccctagcgactaacagtgagcagaggaagtaaagggggagttgtaagagaggcggtatcaacagcctgctgatgaaagaggcgactctgcagaaagaggcaacttgacatatcaggactttaaccgctgtagaaatagctcaggcataccaagcccatgcaaacacagaattgcagaagttcaggagaggcttatcacttccctgagaagaaaaacacattttcagttttgcctgcatcataagagtgagcactccattgctttctttcctggccacactgctacaatccagcactaactatccatgtccagggtaaggatcgagatcgagaagcccacactgccagtgaaaaagctacgtctttactgcataaattagaggaagcaatttcggaacaacggaaccttcaaactataaatactgaattatcgaacacttgccaggcacttcagcagaagacaaggaaactgaagaagctttttagatgaggaatttcctcactatgattccctgtcctgcgcagatgcaattcaacaacctcttcaagaaaaattgaagcagtgttgccacaaactatatggtggtcaagaagcaagaatacatcagacacccctgaccttgaaacatacgtgctggtacacacctctgctggatgccttatctctggatagttttacagcagttccaaccctggaatcaacacctttctcaggtgtagccaaccaaatccacactctgtgtgaaaggcccacatatggagaagtaaaggatggtgctttggatgtaaaaagacaacacaagtgcccaggccccacaagtggccccagcccaggaacgaatctctcaggctgcatcaggatgaatgatgacccaagtatggaagagaatggtgttgaacgcgtgtgtcctgagagcctgctgcagtccagggaatattcctcactaccattacccagacacacttcatcgacagacggtactataacttcaagtgatcctggattagaaattctgaatatggcttcttgtgaccttgacagaaactcgctctgtaagaaagaggaggatacaagatcagcttctcccacgatagaggcccaaggcacaagtccagctcatgataatattgcattccaagactctacgagtaaggataaaaccatattaaatctggaagccaaagaggaaccagaaacaatagaagaacataaaaaagaacatgcttcaggagactctgtggtttcccctcttcctgtaaccactgtgaaatcggttaaccttagacaaagtgagaacacttctgctaatgagaaggaggtggaggcagaatttctcagattatctttgggatttaagtgtgactggtttaccttggagaagagagtgaagcttgaagagaggtcccgtgacttggcagaagaaaatttgaagaaagaaatcactaactgtttaaaactattagagtctttaacacctctgtgtgaagatgacaaccaggcacaggaaatcattaagaagctggagaagagtataaagtttcttagccagtgtgcagcacgagtggccagtagggctgagatgttgggagccatcaatcaggaaagccgggttagtaaagcagttgaagtgatgattcagcacgtagaaaacttgaagaggatgtatgccaaagagcacgctgaattagaagaactgaaacaggttcttctgcagaatgaaaggtctttcaatcctcttgaagatgatgatgactgccaaattaaaaaacgttcagcttctctaaactccaagccatcttctctacgaagagtgactattgcctctttacccagaaatattggaaatgcaggaatggtggctgggatggaaaataatgatcgattcagtagaaggtcaagcagttggcgtattttggggtcaaagcagagtgaacaccgtccctcattacctcgatttattagcacctattcctgggcagatgctgaagaagaaaaatgtgaactaaaaactaaagatgactcagagccatctggagaagaaacagtagaaaggacaaggaagccaagtctttctgaaaagaaaaataatccatcaaagtgggatgtctcttcagtttatgacacaatagcttcctgggcaacaaatctcaagtcctccatcagaaaggctaataaggccctctggctctctattgcattcattgtactgtttgcagctttgatgagcttcctcacaggccaattattccagaagtctgtggatgccgctcccacacagcaagaggactcatggacgtctctagaacatatcttgtggccatttaccagactccgacacaatgggccaccaccagtgtgacagcaggacatcctaatatatggatcttgatttttaagtttcagtatctgaacttcgtaaattagtaacttttagctgggaaagtatagcatgaaaccagaggttctcagaatgactgtaagatagcttacatttcctctttttgcctttatctccccaactaaaatacaatggggaagaagtctgcctatgatctttgaatgagctttttaaggaagaaatattatatattgtttgttaaagtttattgaaataaagaatcatttaaatcttcaaaaaaaaaaaaaaaaaa

SEQ ID NO: 13823 - DNA, 3414 bp, Homo sapiens
atgaaggtgaaggaggagaaggctggggtaggaaagctggaccacactaaccacaggaggagatttccggatcagaaagaatgccctcctatccacattgggcttccagtacccacttaccctcaaagaaaaactgaccagaagggacatctttcaggcctgcaaaaagtccactggggcctgcggccagaccagccacagcaggaactgactggcccagggagtggggcaagcagccaggacagcagcatggatcttatcagcaggactcggtccccagctgctgagcagctccaggacatcctgggggaggaagatgaggctcccaaccccaccctctttacagagatggatactctgcagcatgacggagaccagatggagtggaaggagtcagccaggtggataaagtttgaagaaaaggtagaggaaggcggcgaacgctggagcaagccccacgtgtccacactatccctgcacagcctcttcgagctccgtacctgcctgcagacggggacggtgctgctggatttggacagtggctccttaccacagatcatagatgatgtcattgagaagcagattgaggatggtctcctgcggccagagctccgggagagggtcagttacgtcctcctgaggaggcaccgccaccaaaccaagaagcccatccaccgctccttagctgacattgggaagtcagtctccaccacaaatcgcagtcctgcccggagccctggtgctggcccgagtctacaccactccacggaagacctgcggatgcggcagagtgcaaattacggacgtctgtgtcatgcccagagcagaagcatgaatgacatttctctcaccccaaacacagaccagcggaaaaacaaattcatgaagaagatccccaaggactcagaagcgtccaacgtgctcgtgggcgaggtggacttcctagaccagccattcatcgcgttcgtgcgcctcatccagtcggccatgctgggaggagtgaccgaggtgcctgtccccaccagatttctgtttatactactgggaccttctgggagagcaaaatcctacaatgaaattggccgtgccattgcaaccctcatggtagatgatctcttcagtgacgtggcctacaaagcccgcaatcgggaagatctgatcgcaggaattgatgaatttctggatgaggtcatcgtccttcctcctggagaatgggacccaaatatccggattgagccccccaagaaggtgccctctgctgacaagaggaaatctgtgttctccctagcagagctgggccagatgaatggctctgtgggaggaggcggcggagctcctggaggaggcaatggaggtggtggtggtggtggcagtggcggcggggctggcagtggcggggccggcggaacaagcagcggggatgatggagagatgccagccatgcatgaaatcggggaggaacttatctggacaggaaggttcttcggtggcctgtgtctggatatcaagaggaagttgccctggttcccaagtgacttctatgatggcttccacattcagtccatctctgccatcctattcatctacctcggctgtatcaccaacgcgatcacctttggtgggcttctgggggatgccaccgacaattatcagggagtgatggagagcttcctgggcactgccatggctggctccttgttctgcctcttctcgggacagcctctcatcattctcagcagcacggggcccatcctcatctttgagaagctcctcttcgacttcagcaaaggcaatggcctggactacatggagttccgcctctggattggcctacactcagctgtccagtgccttatcctagtggccacagatgccagctttatcatcaaatatatcacccgcttcaccgaggagggcttctccacccttatcagcttcatcttcatctacgatgccatcaagaagatgatcggtgccttcaagtactaccctatcaatatggacttcaagccaaacttcatcactacctacaagtgcgagtgtgtcgcccctgacacagtgaatacaaccgtgttcaatgcttcagccccattggcaccagacaccaacgcttctctgtacaacctccttaacctcacagcgttggactggtccctgctgagcaagaaggagtgtctgagctacggcgggcgcctgcttgggaattcctgcaagtttatcccagacctggcgctcatgtccttcatccttttctttgggacatactccatgaccctgaccctgaagaagttcaaattcagccgctattttcctaccaaggtccgggccctggtggctgacttttccattgttttctccatcctgatgttctgtggaatcgatgcctgttttggcctagaaactcccaagctgcatgtgcccagtgtcatcaagccaccgcggcctgaccgaggctggttcgtggccccctttgggaagaacccgtggtgggtatacccagcaagcatcctgcccgccctgctggtgaccatcctgatcttcatggaccagcagatcactgccgtcattgtcaaccggaaggagaacaaactgaagaaggctgccggctaccatctggacctgttctgggtgggcatcctcatggctttgtgctcctttatggggctcccctggtacgtggctgccacggtcatctccatcgcccacatcgacagcctcaagatggagacagagaccagtgcccctggggagcagccccagtttctgggagtcagggaacagagagtaaccggcatcatcgtcttcatcctgacgggaatctctgtcttcctggctcccatcctaaagtgtatccccctgccggtgctgtacggagtcttcctctacatgggcgtggcctccctgaatggcatccagatggggaccggagggtcagaattcaaaatccagaagaagctgactccattctgggaacgctgcaagctcttcctgatgccagccaagcaccagccggaccatgccttcctgcggcacgtgccgctgcgccggatccacctcttcaccctggtgcagatcctctgcctggcggtgctctggatcctcaaatccacggtggctgccatcatcttcccggtcatgatcctgggcctcatcatcgttcgaaggcttctggatttcatcttttcccagcacgacctggcctggattgacaacatcctcccagagaaggaaaaaaaggagacagacaagaagaggaagagaaaaaaaggggcccacgaggactgtgatgaggagccccagttccctcctccctcggttataaagattcccatggaaagtgtccaatcagatccccaaaacggtatccactgcattgccagaaaaagatcttccagttggagttactcactctga

SEQ ID NO: 13824 - DNA, 3503 bp, Homo sapiens
ggcatcccaggatttggaattcagctgtgagctcatgagctgatggatgtttccaggagtaccctgaagaccacccaggtgggagtgtaagataaccttccagataaagagttgctgctaccaaaagagtgctgacaccatcacagtatgttcccttctcaaccctggacatggttcagaaacagctaaagcagacaagaatctggggcagccaatattgtaccacctgccaaagcttggcacaaacaatctggaagccaaaaattgcacatactgtggaacagagcaagtggttctggcctccctgggatttggatcctggtttccagagctaagaacacaaagtcatgaaggtgaaggaggagaaggctggggtaggaaagctggaccacactaaccacaggaggagatttccggatcagaaagaatgccctcctatccacattgggcttccagtacccacttaccctcaaagaaaaactgaccagaagggacatctttcaggcctgcaaaaagtccactggggcctgcggccagaccagccacagcaggaactgactggcccagggagtggggcaagcagccaggacagcagcatggatcttatcagcaggactcggtccccagctgctgagcagctccaggacatcctgggggaggaagatgaggctcccaaccccaccctctttacagagatggatactctgcagcatgacggagaccagatggagtggaaggagtcagccaggtggataaagtttgaagaaaaggtagaggaaggcggcgaacgctggagcaagccccacgtgtccacactatccctgcacagcctcttcgagctccgtacctgcctgcagacggggacggtgctgctggatttggacagtggctccttaccacagatcatagatgatgtcattgagaagcagattgaggatggtctcctgcggccagagctccgggagagggtcagttacgtcctcctgaggaggcaccgccaccaaaccaagaagcccatccaccgctccttagctgacattgggaagtcagtctccaccacaaatcgcagtcctgcccggagccctggtgctggcccgagtctacaccactccacggaagacctgcggatgcggcagagtgcaaattacggacgtctgtgtcatgcccagagcagaagcatgaatgacatttctctcaccccaaacacagaccagcggaaaaacaaattcatgaagaagatccccaaggactcagaagcgtccaacgtgctcgtgggcgaggtggacttcctagaccagccattcatcgcgttcgtgcgcctcatccagtcggccatgctgggaggagtgaccgaggtgcctgtccccaccagatttctgtttatactactgggaccttctgggagagcaaaatcctacaatgaaattggccgtgccattgcaaccctcatggtagatgatctcttcagtgacgtggcctacaaagcccgcaatcgggaagatctgatcgcaggaattgatgaatttctggatgaggtcatcgtccttcctcctggagaatgggacccaaatatccggattgagccccccaagaaggtgccctctgctgacaagaggaaatctgtgttctccctagcagagctgggccagatgaatggctctgtgggaggaggcggcggagctcctggaggaggcaatggaggtggtggtggtggtggcagtggcggcggggctggcagtggcggggccggcggaacaagcagcggggatgatggagagatgccagccatgcatgaaatcggggaggaacttatctggacaggaaggttcttcggtggcctgtgtctggatatcaagaggaagttgccctggttcccaagtgacttctatgatggcttccacattcagtccatctctgccatcctattcatctacctcggctgtatcaccaacgcgatcacctttggtgggcttctgggggatgccaccgacaattatcagggagtgatggagagcttcctgggcactgccatggctggctccttgttctgcctcttctcgggacagcctctcatcattctcagcagcacggggcccatcctcatctttgagaagctcctcttcgacttcagcaaaggcaatggcctggactacatggagttccgcctctggattggcctacactcagctgtccagtgccttatcctagtggccacagatgccagctttatcatcaaatatatcacccgcttcaccgaggagggcttctccacccttatcagcttcatcttcatctacgatgccatcaagaagatgatcggtgccttcaagtactaccctatcaatatggacttcaagccaaacttcatcactacctacaagtgcgagtgtgtcgcccctgacacagtgaatacaaccgtgttcaatgcttcagccccattggcaccagacaccaacgcttctctgtacaacctccttaacctcacagcgttggactggtccctgctgagcaagaaggagtgtctgagctacggcgggcgcctgcttgggaattcctgcaagtttatcccagacctggcgctcatgtccttcatccttttctttgggacatactccatgaccctgaccctgaagaagttcaaattcagccgctattttcctaccaaggtccgggccctggtggctgacttttccattgttttctccatcctgatgttctgtggaatcgatgcctgttttggcctagaaactcccaagctgcatgtgcccagtgtcatcaagccaacgcggcctgaccgaggctggttcgtggccccctttgggaagaacccgtggtgggtatacccagcaagcatcctgcccgccctgctggtgaccatcctgatcttcatggaccagcagatcactgccgtcattgtcaaccggaaggagaacaaactgaagaaggctgccggctaccatctggacctgttctgggtgggcatcctcatggctttgtgctcctttatggggctcccctggtacgtggctgccacggtcatctccatcgcccacatcgacagcctcaagatggagacagagaccagtgcccctggggagcagccccagtttctgggagtcagggaacagagagtaaccggcatcatcgtcttcatcctgacgggaatctctgtcttcctggctcccatcctaaagatcctgggcctcatcatcgttcgaaggcttctggatttcatcttttcccagcacgacctggcctggattgacaacatcctcccagagaaggaaaaaaaggagacagacaagaagaggaagagaaaaaaaggggcccacgaggactgtgatgaggagccccagttccctcctccctcggttataaagattcccatggaaagtgtccaatcagatccccaaaacggtatccactgcattgccagaaaaagatcttccagttggagttactcactctgattcttccttcagtgacacagaacttgaccgaag

SEQ ID NO: 13825 - DNA, 3810 bp, Homo sapiens
ggcatcccaggatttggaattcagctgtgagctcatgagctgatggatgtttccaggagtaccctgaagaccacccaggtgggagtgtaagataaccttccagataaagagttgctgctaccaaaagagtgctgacaccatcacagtatgttcccttctcaaccctggacatggttcagaaacagctaaagcagacaagaatctggggcagccaatattgtaccacctgccaaagcttggcacaaacaatctggaagccaaaaattgcacatactgtggaacagagcaagtggttctggcctccctgggatttggatcctggtttccagagctaagaacacaaagtcatgaaggtgaaggaggagaaggctggggtaggaaagctggaccacactaaccacaggaggagatttccggatcagaaagaatgccctcctatccacattgggcttccagtacccacttaccctcaaagaaaaactgaccagaagggacatctttcaggcctgcaaaaagtccactggggcctgcggccagaccagccacagcaggaactgactggcccagggagtggggcaagcagccaggacagcagcatggatcttatcagcaggactcggtccccagctgctgagcagctccaggacatcctgggggaggaagatgaggctcccaaccccaccctctttacagagatggatactctgcagcatgacggagaccagatggagtggaaggagtcagccaggtggataaagtttgaagaaaaggtagaggaaggcggcgaacgctggagcaagccccacgtgtccacactatccctgcacagcctcttcgagctccgtacctgcctgcagacggggacggtgctgctggatttggacagtggctccttaccacagatcatagatgatgtcattgagaagcagattgaggatggtctcctgcggccagagctccgggagagggtcagttacgtcctcctgaggaggcaccgccaccaaaccaagaagcccatccaccgctccttagctgacattgggaagtcagtctccaccacaaatcgcagtcctgcccggagccctggtgctggcccgagtctacaccactccacggaagacctgcggatgcggcagagtgcaaattacggacgtctgtgtcatgcccagagcagaagcatgaatgacatttctctcaccccaaacacagaccagcggaaaaacaaattcatgaagaagatccccaaggactcagaagcgtccaacgtgctcgtgggcgaggtggacttcctagaccagccattcatcgcgttcgtgcgcctcatccagtcggccatgctgggaggagtgaccgaggtgcctgtccccaccagatttctgtttatactactgggaccttctgggagagcaaaatcctacaatgaaattggccgtgccattgcaaccctcatggtagatgatctcttcagtgacgtggcctacaaagcccgcaatcgggaagatctgatcgcaggaattgatgaatttctggatgaggtcatcgtccttcctcctggagaatgggacccaaatatccggattgagccccccaagaaggtgccctctgctgacaagaggaaatctgtgttctccctagcagagctgggccagatgaatggctctgtgggaggaggcggcggagctcctggaggaggcaatggaggtggtggtggtggtggcagtggcggcggggctggcagtggcggggccggcggaacaagcagcggggatgatggagagatgccagccatgcatgaaatcggggaggaacttatctggacaggaaggttcttcggtggcctgtgtctggatatcaagaggaagttgccctggttcccaagtgacttctatgatggcttccacattcagtccatctctgccatcctattcatctacctcggctgtatcaccaacgcgatcacctttggtgggcttctgggggatgccaccgacaattatcagggagtgatggagagcttcctgggcactgccatggctggctccttgttctgcctcttctcgggacagcctctcatcattctcagcagcacggggcccatcctcatctttgagaagctcctcttcgacttcagcaaaggcaatggcctggactacatggagttccgcctctggattggcctacactcagctgtccagtgccttatcctagtggccacagatgccagctttatcatcaaatatatcacccgcttcaccgaggagggcttctccacccttatcagcttcatcttcatctacgatgccatcaagaagatgatcggtgccttcaagtactaccctatcaatatggacttcaagccaaacttcatcactacctacaagtgcgagtgtgtcgcccctgacacagtgaatacaaccgtgttcaatgcttcagccccattggcaccagacaccaacgcttctctgtacaacctccttaacctcacagcgttggactggtccctgctgagcaagaaggagtgtctgagctacggcgggcgcctgcttgggaattcctgcaagtttatcccagacctggcgctcatgtccttcatccttttctttgggacatactccatgaccctgaccctgaagaagttcaaattcagccgctattttcctaccaaggtccgggccctggtggctgacttttccattgttttctccatcctgatgttctgtggaatcgatgcctgttttggcctagaaactcccaagctgcatgtgcccagtgtcatcaagccaacgcggcctgaccgaggctggttcgtggccccctttgggaagaacccgtggtgggtatacccagcaagcatcctgcccgccctgctggtgaccatcctgatcttcatggaccagcagatcactgccgtcattgtcaaccggaaggagaacaaactgaagaaggctgccggctaccatctggacctgttctgggtgggcatcctcatggctttgtgctcctttatggggctcccctggtacgtggctgccacggtcatctccatcgcccacatcgacagcctcaagatggagacagagaccagtgcccctggggagcagccccagtttctgggagtcagggaacagagagtaaccggcatcatcgtcttcatcctgacgggaatctctgtcttcctggctcccatcctaaagtgtatccccctgccggtgctgtacggagtcttcctctacatgggcgtggcctccctgaatggcatccagatggggaccggagggtcagaattcaaaatccagaagaagctgactccattctgggaacgctgcaagctcttcctgatgccagccaagcaccagccggaccatgccttcctgcggcacgtgccgctgcgccggatccacctcttcaccctggtgcagatcctctgcctggcggtgctctggatcctcaaatccacggtggctgccatcatcttcccggtcatgtctctctccaccacagatcctgggcctcatcatcgttcgaaggcttctggatttcatcttttcccagcacgacctggcctggattgacaacatcctcccagagaaggaaaaaaaggagacagacaagaagaggaagagaaaaaaaggggcccacgaggactgtgatgaggagccccagttccctcctccctcggttataaagattcccatggaaagtgtccaatcagatccccaaaacggtatccactgcattgccagaaaaagatcttccagttggagttactcactctgattcttccttcagtgacacagaacttgaccgaag

SEQ ID NO: 13826 - DNA, 3746 bp, Homo sapiens
ggcatcccaggatttggaattcagctgtgagctcatgagctgatggatgtttccaggagtaccctgaagaccacccaggtgggagtgtaagataaccttccagataaagagttgctgctaccaaaagagtgctgacaccatcacagtatgttcccttctcaaccctggacatggttcagaaacagctaaagcagacaagaatctggggcagccaatattgtaccacctgccaaagcttggcacaaacaatctggaagccaaaaattgcacatactgtggaacagagcaagtggttctggcctccctgggatttggatcctggtttccagagctaagaacacaaagtcatgaaggtgaaggaggagaaggctggggtaggaaagctggaccacactaaccacaggaggagatttccggatcagaaagaatgccctcctatccacattgggcttccagtacccacttaccctcaaagaaaaactgaccagaagggacatctttcaggcctgcaaaaagtccactggggcctgcggccagaccagccacagcaggaactgactggcccagggagtggggcaagcagccaggacagcagcatggatcttatcagcaggactcggtccccagctgctgagcagctccaggacatcctgggggaggaagatgaggctcccaaccccaccctctttacagagatggatactctgcagcatgacggagaccagatggagtggaaggagtcagccaggtggataaagtttgaagaaaaggtagaggaaggcggcgaacgctggagcaagccccacgtgtccacactatccctgcacagcctcttcgagctccgtacctgcctgcagacggggacggtgctgctggatttggacagtggctccttaccacagatcatagatgatgtcattgagaagcagattgaggatggtctcctgcggccagagctccgggagagggtcagttacgtcctcctgaggaggcaccgccaccaaaccaagaagcccatccaccgctccttagctgacattgggaagtcagtctccaccacaaatcgcagtcctgcccggagccctggtgctggcccgagtctacaccactccacggaagacctgcggatgcggcagagtgcaaattacggacgtctgtgtcatgcccagagcagaagcatgaatgacatttctctcaccccaaacacagaccagcggaaaaacaaattcatgaagaagatccccaaggactcagaagcgtccaacgtgctcgtgggcgaggtggacttcctagaccagccattcatcgcgttcgtgcgcctcatccagtcggccatgctgggaggagtgaccgaggtgcctgtccccaccagatttctgtttatactactgggaccttctgggagagcaaaatcctacaatgaaattggccgtgccattgcaaccctcatggtagatgatctcttcagtgacgtggcctacaaagcccgcaatcgggaagatctgatcgcaggaattgatgaatttctggatgaggtcatcgtccttcctcctggagaatgggacccaaatatccggattgagccccccaagaaggtgccctctgctgacaagaggaaatctgtgttctccctagcagagctgggccagatgaatggctctgtgggaggaggcggcggagctcctggaggaggcaatggaggtggtggtggtggtggcagtggcggcggggctggcagtggcggggccggcggaacaagcagcggggatgatggagagatgccagccatgcatgaaatcggggaggaacttatctggacaggaaggttcttcggtggcctgtgtctggatatcaagaggaagttgccctggttcccaagtgacttctatgatggcttccacattcagtccatctctgccatcctattcatctacctcggctgtatcaccaacgcgatcacctttggtgggcttctgggggatgccaccgacaattatcagggagtgatggagagcttcctgggcactgccatggctggctccttgttctgcctcttctcgggacagcctctcatcattctcagcagcacggggcccatcctcatctttgagaagctcctcttcgacttcagcaaaggcaatggcctggactacatggagttccgcctctggattggcctacactcagctgtccagtgccttatcctagtggccacagatgccagctttatcatcaaatatatcacccgcttcaccgaggagggcttctccacccttatcagcttcatcttcatctacgatgccatcaagaagatgatcggtgccttcaagtactaccctatcaatatggacttcaagccaaacttcatcactacctacaagtgcgagtgtgtcgcccctgacacagtgaatacaaccgtgttcaatgcttcagccccattggcaccagacaccaacgcttctctgtacaacctccttaacctcacagcgttggactggtccctgctgagcaagaaggagtgtctgagctacggcgggcgcctgcttgggaattcctgcaagtttatcccagacctggcgctcatgtccttcatccttttctttgggacatactccatgaccctgaccctgaagaagttcaaattcagccgctattttcctaccaaggtccgggccctggtggctgacttttccattgttttctccatcctgatgttctgtggaatcgatgcctgttttggcctagaaactcccaagctgcatgtgcccagtgtcatcaagccaacgcggcctgaccgaggctggttcgtggccccctttgggaagaacccgtggtgggtatacccagcaagcatcctgcccgccctgctggtgaccatcctgatcttcatggaccagcagatcactgccgtcattgtcaaccggaaggagaacaaactgaagaaggctgccggctaccatctggacctgttctgggtgggcatcctcatggctttgtgctcctttatggggctcccctggtacgtggctgccacggtcatctccatcgcccacatcgacagcctcaagatggagacagagaccagtgcccctggggagcagccccagtttctgggagtcagggaacagagagtaaccggcatcatcgtcttcatcctgacgggaatctctgtcttcctggctcccatcctaaagtgtatccccctgccggtgctgtacggagtcttcctctacatgggcgtggcctccctgaatggcatccagttctgggaacgctgcaagctcttcctgatgccagccaagcaccagccggaccatgccttcctgcggcacgtgccgctgcgccggatccacctcttcaccctggtgcagatcctctgcctggcggtgctctggatcctcaaatccacggtggctgccatcatcttcccggtcatgatcctgggcctcatcatcgttcgaaggcttctggatttcatcttttcccagcacgacctggcctggattgacaacatcctcccagagaaggaaaaaaaggagacagacaagaagaggaagagaaaaaaaggggcccacgaggactgtgatgaggagccccagttccctcctccctcggttataaagattcccatggaaagtgtccaatcagatccccaaaacggtatccactgcattgccagaaaaagatcttccagttggagttactcactctgattcttccttcagtgacacagaacttgaccgaag

SEQ ID NO: 13827 - DNA, 3592 bp, Homo sapiens
ggcggggggcgcacagagccagaggggcttgcgagcggcggctgagggaccgcggggagggggcgccgagcggctccagcgcagagactctcactgcacgccggaggccccttcctcgctccgcccgcgcgaccgcgcgccccagtcccgccccgccccgctaaccgccccagacacagcgctcgccgagggtcgcttggaccctgatcttacccgtgggcaccctgcgctctgcctgccgcgaagaccggctccccgacccgcagaagtcaggagagagggtgaagcggagcagcccgaggcggggcagcctcccggagcagcgccgcgcagagcccgggacaatggggccgcggcggctgctgctggtggccgcctgcttcagtctgtgcggcccgctgttgtctgcccgcacccgggcccgcaggccagaatcaaaagcaacaaatgccaccttagatccccggtcatttcttctcaggaaccccaatgataaatatgaaccattttgggaggatgaggagaaaaatgaaagtgggttaactgaatacagattagtctccatcaataaaagcagtcctcttcaaaaacaacttcctgcattcatctcagaagatgcctccggatatttgaccagctcctggctgacactctttgtcccatctgtgtacaccggagtgtttgtagtcagcctcccactaaacatcatggccatcgttgtgttcatcctgaaaatgaaggtcaagaagccggcggtggtgtacatgctgcacctggccacggcagatgtgctgtttgtgtctgtgctcccctttaagatcagctattacttttccggcagtgattggcagtttgggtctgaattgtgtcgcttcgtcactgcagcattttactgtaacatgtacgcctctatcttgctcatgacagtcataagcattgaccggtttctggctgtggtgtatcccatgcagtccctctcctggcgtactctgggaagggcttccttcacttgtctggccatctgggctttggccatcgcaggggtagtgcctctcgtcctcaaggagcaaaccatccaggtgcccgggctcaacatcactacctgtcatgatgtgctcaatgaaaccctgctcgaaggctactatgcctactacttctcagccttctctgctgtcttcttttttgtgccgctgatcatttccacggtctgttatgtgtctatcattcgatgtcttagctcttccgcagttgccaaccgcagcaagaagtcccgggctttgttcctgtcagctgctgttttctgcatcttcatcatttgcttcggacccacaaacgtcctcctgattgcgcattactcattcctttctcacacttccaccacagaggctgcctactttgcctacctcctctgtgtctgtgtcagcagcataagctcgtgcatcgaccccctaatttactattacgcttcctctgagtgccagaggtacgtctacagtatcttatgctgcaaagaaagttccgatcccagcagttataacagcagtgggcagttgatggcaagtaaaatggatacctgctctagtaacctgaataacagcatatacaaaaagctgttaacttaggaaaagggactgctgggaggttaaaaagaaaagtttataaaagtgaataacctgaggattctattagtccccacccaaactttattgattcacctcctaaaacaacagatgtacgacttgcatacctgctttttatgggagctgtcaagcatgtatttttgtcaattaccagaaagataacaggacgagatgacggtgttattccaagggaatattgccaatgctacagtaataaatgaatgtcacttctggatatagctaggtgacatatacatacttacatgtgtgtatatgtagatgtatgcacacacatatattatttgcagtgcagtatagaataggcactttaaaacactctttccccgcaccccagcaattatgaaaataatctctgattccctgatttaatatgcaaagtctaggttggtagagtttagccctgaacatttcatggtgttcatcaacagtgagagactccatagtttgggcttgtaccacttttgcaaataagtgtattttgaaattgtttgacggcaaggtttaagttattaagaggtaagacttagtactatctgtgcgtagaagttctagtgttttcaattttaaacatatccaagtttgaattcctaaaattatggaaacagatgaaaagcctctgttttgatatgggtagtattttttacattttacacactgtacacataagccaaaactgagcataagtcctctagtgaatgtaggctggctttcagagtaggctattcctgagagctgcatgtgtccgcccccgatggaggactccaggcagcagacacatgccagggccatgtcagacacagattggccagaaaccttcctgctgagcctcacagcagtgagactggggccactacatttgctccatcctcctgggattggctgtgaactgatcatgtttatgagaaactggcaaagcagaatgtgatatcctaggaggtaatgaccatgaaagacttctctacccatcttaaaaacaacgaaagaaggcatggacttctggatgcccatccactgggtgtaaacacatctagtagttgttctgaaatgtcagttctgatatggaagcacccattatgcgctgtggccactccaataggtgctgagtgtacagagtggaataagacagagacctgccctcaagagcaaagtagatcatgcatagagtgtgatgtatgtgtaataaatatgtttcacacaaacaaggcctgtcagctaaagaagtttgaacatttgggttactatttcttgtggttataacttaatgaaaacaatgcagtacaggacatatattttttaaaataagtctgatttaattgggcactatttatttacaaatgttttgctcaatagattgctcaaatcaggttttcttttaagaatcaatcatgtcagtctgcttagaaataacagaagaaaatagaattgacattgaaatctaggaaaattattctataatttccatttacttaagacttaatgagactttaaaagcattttttaacctcctaagtatcaagtatagaaaatcttcatggaattcacaaagtaatttggaaattaggttgaaacatatctcttatcttacgaaaaaatggtagcattttaaacaaaatagaaagttgcaaggcaaatgtttatttaaaagagcaggccaggcgcggtggctcacgcctgtaatcccagcactttgggaggctgaggcgggtggatcacgaggtcaggagatcgagaccatcctggctaacacggtgaaacccgtctctactaaaaatgcaaaaaaaattagccgggcgtggtggcaggcacctgtagtcccagctactcgggaggctgaggcaggagactggcgtgaacccaggaggcggaccttgtagtgagccgagatcgcgccactgtgctccagcctgggcaacagagcaagactccatctc

SEQ ID NO: 13828 - DNA, 3483 bp, Homo sapiens
atggagaagtgggaggagctgaacagccatcagccaggagaggagtacgaccccagcaaagcgacctttgtgaaggtggtgccaacccccaacaatggctccacggagctcgtggccctgcaccgcaatgagggcgaagacgggcttgaggtgctgtccttcgaattccagaagatcaagtattcctacgatgccctggagaagaagcagtttctccccgtggcctttcctgtgggaaacgccttctcatactatcagagcaacagaggcttccaggaagactcagagatccgagcagctgagaagaaatttgggagcaacaaggccgagatggtggtgcctgacttctcggagcttttcaaggagagagccacagcccccttctttgtatttcaggtgttctgtgtggggctctggtgcctggatgagtactggtactacagcgtctttacgctatccatgctggtggcgttcgaggcctcgctggtgcagcagcagatgcggaacatgtcggagatccggaagatgggcaacaagccccacatgatccaggtctaccgaagccgcaagtggaggcccattgccagtgatgagatcgtaccaggggacatcgtctccatcggccgctccccacaggagaacctggtgccatgtgacgtgcttctgctgcgaggccgctgcatcgtagacgaggccatgctcacgggggagtccgtgccacagatgaaggagcccatcgaagacctcagcccagaccgggtgctggacctccaggctgattcccggctgcacgtcatcttcgggggcaccaaggtggtgcagcacatccccccacagaaagccaccacgggcctgaagccggttgacagcgggtgcgtggcctacgtcctgcggaccggattcaacacatcccagggcaagctgctgcgcaccatcctcttcggggtcaagagggtgactgcgaacaacctggagaccttcatcttcatcctcttcctcctggtgtttgccatcgctgcagctgcctatgtatggattgaaggtaccaaggaccccagccggaaccgctacaagctgtttctggagtgcaccctgatcctcacctcggtcgtgcctcctgagctgcccatcgagctgtccctggccgtcaacacctccctcatcgccctggccaagctctacatgtactgcacagagcccttccggatcccctttgctggcaaggtcgaggtgtgctgctttgacaagacggggacgttgaccagtgacagcctggtggtgcgcggtgtggccgggctgagagacgggaaggaggtgaccccagtgtccagcatccctgtagaaacacaccgggccctggcctcgtgccactcgctcatgcagctggacgacggcaccctcgtgggtgaccctctagagaaggccatgctgacggccgtggactggacgctgaccaaagatgagaaagtattcccccgaagtattaaaactcaggggctgaaaattcaccagcgctttcattttgccagtgccctgaagcgaatgtccgtgcttgcctcgtatgagaagctgggctccaccgacctctgctacatcgcggccgtgaagggggcccccgaaactctgcactccatgttctcccagtgcccgcccgactaccaccacatccacaccgagatctcccgggaaggagcccgcgtcctggcgctggggtacaaggagctgggacacctcactcaccagcaggcccgggaggtcaagcgggaggccctggagtgcagcctcaagttcgtcggcttcattgtggtctcctgcccgctcaaggctgactccaaggccgtgatccgggagatccagaatgcgtcccaccgggtggtcatgatcacgggagacaacccgctcactgcatgccacgtggcccaggagctgcacttcattgaaaaggcccacacgctgatcctgcagcctccctccgagaaaggccggcagtgcgagtggcgctccattgacggcagcatcgtgctgcccctggcccggggctccccaaaggcactggccctggagtacgcactgtgcctcacaggcgacggcttggcccacctgcaggccaccgacccccagcagctgctccgcctcatcccccatgtgcaggtgttcgcccgtgtggctcccaagcagaaggagtttgtcatcaccagcctgaaggagctgggctacgtgaccctcatgtgtggggatggcaccaacgacgtgggcgccctgaagcatgctgacgtgggtgtggcgctcttggccaatgcccctgagcgggttgtcgagcggcgacggcggccccgggacagcccaaccctgagcaacagtggcatcagagccacctccaggacagccaagcagcggtcggggctccctccctccgaggagcagccaacctcccagagggaccgcctgagccaggtgctgcgagacctcgaggacgagagtacgcccattgtgaaactgggggatgccagcatcgcagcacccttcacctccaagctctcatccatccagtgcatctgccacgtgatcaagcagggccgctgcacgctggtgaccacgctacagatgttcaagatcctggcgctcaatgccctcatcctggcctacagccagagcgtcctctacctggagggagtcaagttcagtgacttccaggccaccctacaggggctgctgctggccggctgcttcctcttcatctcccgttccaagcccctcaagaccctctcccgagaacggcccctgcccaacatcttcaacctgtacaccatcctcaccgtcatgctccagttctttgtgcacttcctgagccttgtctacctgtaccgtgaggcccaggcccggagccccgagaagcaggagcagttcgtggacttgtacaaggagtttgagccaagcctggtcaacagcaccgtctacatcatggccatggccatgcagatggccaccttcgccatcaattacaaaggcccgcccttcatggagagcctgcccgagaacaagcccctggtgtggagtctggcagtttcactcctggccatcattggcctgctcctcggctcctcgcccgacttcaacagccagtttggcctcgtggacatccctgtggagttcaagctggtcattgcccaggtcctgctcctggacttctgcctggcgctcctggccgaccgcgtcctgcagttcttcctggggaccccgaagctgaaagtgccttcctgagatggcagtgctggtacccactgcccaccctggctgccgctgggcgggaaccccaacagggccccgggagggaaccctgcccccaaccccccacagcaaggctgtacagtctcgcccttggaagactgagctgggacccccacagccatccgctggcttggccagcagaaccagccccaagccagcacctttggtaaataaagcagcatctgagattttaaa

SEQ ID NO: 13829 - DNA, 4108 bp, Homo sapiens
gtgacccagggagacaaacacttggagatacttggggctgagtttgagcaagactccctaacctgtgtctggacaggtctgatgtcctgtgtggcccaagaagaactgaccccgtgtctggagctcccaccgttattgcatccctgctgtggctcacctgctgctgtctccaggagcccctgagaagatttgcttcctctcccctgctaagctccaggtcctgagattaaattaggggctggagctcactgcactccagcagtcatgggacccaggatagggccagcgggtgaggtaccccaggtaccagacaaggaaaccaaagccacaatgggcacagaaaacacacctggaggcaaagccagcccagaccctcaggacgtgcggccaagtgtgttccataacatcaagctgttcgttctgtgccacagcctgctgcagctggcgcagctcatgatctccggctacctaaagagctccatctccacagtggagaagcgcttcggcctctccagccagacgtcggggctgctggcctccttcaacgaggtggggaacacagccttgattgtgtttgtgagctattttggcagccgggtgcaccgaccccgaatgattggctatggggctatccttgtggccctggcgggcctgctcatgactctcccgcacttcatctcggagccataccgctacgacaacaccagccctgaggatatgccacaggacttcaaggcttccctgtgcctgcccacaacctcggccccagcctcggccccctccaatggcaactgctcaagctacacagaaacccagcatctgagtgtggtggggatcatgttcgtggcacagaccctgctgggcgtgggcggggtgcccattcagccctttggcatctcctacatcgatgactttgcccacaacagcaactcgcccctctacctcgggatcctgtttgcagtgaccatgatggggccaggcctggcctttgggctgggcagcctcatgctgcgcctttatgtggacattaaccagatgccagaaggtggtatcagcctgaccataaaggacccccgatgggtgggtgcctggtggctgggtttcctcatcgctgccggtgcagtggccctggctgccatcccctacttcttcttccccaaggaaatgcccaaggaaaaacgtgagcttcagtttcggcgaaaggtcttagcagtcacagactcacctgccaggaagggcaaggactctccctctaagcagagccctggggagtccacgaagaagcaggatggcctagtccagattgcaccaaacctgactgtgatccagttcattaaagtcttccccagggtgctgctgcagaccctacgccaccccatcttcctgctggtggtcctgtcccaggtatgcttgtcatccatggctgcgggcatggccaccttcctgcccaagttcctggagcgccagttttccatcacagcctcctacgccaacctgctcatcggctgcctctccttcccttcggtcatcgtgggcatcgtggtgggtggcgtcctggtcaagcggctccacctgggccctgtgggatgcggtgccctttgcctgctggggatgctgctgtgcctcttcttcagcctgccgctcttctttatcggctgctccagccaccagattgcgggcatcacacaccagaccagtgcccaccctgggctggagctgtctccaagctgcatggaggcctgctcctgcccattggacggctttaaccctgtctgcgaccccagcactcgtgtggaatacatcacaccctgccacgcaggctgctcaagctgggtggtccaggatgctctggacaacagccaggttttctacaccaactgcagctgcgtggtggagggcaaccccgtgctggcaggatcctgcgactcaacgtgcagccatctggtggtgcccttcctgctcctggtcagcctgggctcggccctggcctgtctcacccacacaccctccttcatgctcatcctaagaggagtgaagaaagaagacaagactttggctgtgggcatccagttcatgttcctgaggattttggcctggatgcccagccccgtgatccacggcagcgccatcgacaccacctgtgtgcactgggccctgagctgtgggcgtcgagctgtctgtcgctactacaataatgacctgctccgaaaccggttcatcggcctccagttcttcttcaaaacaggttctgtgatctgcttcgccttagttttggctgtcctgaggcagcaggacaaagaggcaaggaccaaagagagcagatccagccctgccgtagagcagcaattgctagtgtcggggccagggaagaagccagaggattcccgagtgtgagctgtcttggggccccacctggccaagagtagcagccacagcagtacctcctctgagtcctttgcccaagattgggtgtcaagagccctgtgttccattctggctcctccactaaattgctgtgtgacttcaggcaagacattgatcctctctcagcctttgcttgctagtctgaaccaaagagttgtttgggcatttgctgtgttggccatttctggagcaagagggtcttcttcctccttcccccagccagccagctgtcctggggccaggctttcctgggtggaaagaagtatacctttccctggggccctaggatagcaaagtgagccatagtgggccaggctgccctccatgctgggccccagcccaggtctgcactcgcctggatcaccttctttgagccttagccatctcctgtcaggtaggaatgaacttgccagccttcaggctcgttcagctatgaccatctgtgcggtcagggtacactcagctctcctccccaactccagcagcctttaagaagtgtccctttggcgccccctggaggcagagcactgagctggaccctgggtagactcccacagggaggacggagctggcctcaggagtgggacacccagacttggcagggccttcaagaggcctgtgtgggggccccaggaatccttagctgaagcggggagactcactctccatctcaggaaattctagcccttgccctcagggagccacggttgagggtgaggcccaacacctgccttagggccctgggtgggcaagtctgggccctggggtagggagggagactcaggcccacacttgggtattttctaatttcagacaaacacacactcagcgcgcactcactgattcctacacattgccaagatttcacacatgtgaccaggggccaccaaagtccctgtgacctttgtgactaggatcctaatttctctattttctcctgggtgcctgggtctgtgtcacctggggcagtgtggataatgtttagttctgtgacactgttttttgggggtggcacctggttctccgatgcctgggctggtgtcaggcccaggactgtagtgctgggagcagtaaagctcagctctgtgtaatgagtgatgctatggcttgctcgtgtcttatgatccaatccttttctacatcagcccttgttttgttttatggctagtcttatctggcctggttatttccttgcggggaggagagggtttgctaatctgctcccagcccaacctattaccaccccacctcgctgggacctactgctcgggaggcagcagacagggagccaccagcagtggcttcctggccctgtgctgggggtggggggaagctgggggcacatgtggcccttgccttctgagcagctcccagtgccagggctttgagactttcccacatgataaaagaaaagggaggtacagaagttccaattccctttttattttgctggttggtatctgtaaatgtttaataaatatctgagcatgtatctatcaacgccaagaatttcaaagtctccttcaacaatatgaggcttttaggatgtttatattccttcatccctcttgtttcccaggttttgcagggaaaaaaagtctggaattatagatacagcttattattaaatttgttcttgcataaaaaaaaaaaaaaaaaaaaaaaaaaaaaaaaaaaaaaaaaa

SEQ ID NO: 13830 - DNA, 1855 bp, Homo sapiens
ccatgtcgctcactgtcgtcagcatggcgtgcgttgggttcttcttgctgcagggggcctggccactcatgggtggtcaggacaaacccttcctgtctgcccggcccagcactgtggtgcctcgaggaggacacgtggctcttcagtgtcactatcgtcgtgggtttaacaatttcatgctgtacaaagaagacagaagccacgttcccatcttccacggcagaatattccaggagagcttcatcatgggccctgtgaccccagcacatgcagggacctacagatgtcggggttcacgcccacactccctcactgggtggtcggcacccagcaaccccctggtgatcatggtcacaggaaaccacagaaaaccttccctcctggcccacccagggcccctgctgaaatcaggagagacagtcatcctgcaatgttggtcagatgtcatgtttgagcacttctttctgcacagagatgggatctctgaggacccctcacgcctcgttggacagatccatgatggggtctccaaggccaacttctccatcggtcccttgatgcctgtccttgcaggaacctacagatgttatggttctgttcctcactccccctatcagttgtcagctcccagtgaccccctggacatcgtgatcacaggtctatatgagaaaccttctctctcagcccagccgggccccacggttcaggcaggagagaacgtgaccttgtcctgtagctcctggagctcctatgacatctaccatctgtccagggaaggggaggcccatgaacgtaggctccgtgcagtgcccaaggtcaacagaacattccaggcagactttcctctgggccctgccacccacggagggacctacagatgcttcggctctttccgtgccctgccctgcgtgtggtcaaactcaagtgacccactgcttgtttctgtcacaggaaacccttcaagtagttggccttcacccacagaaccaagctccaaatctggtatctgcagacacctgcatgttctgattgggacctcagtggtcatcttcctcttcatcctcctcctcttctttctcctttatcgctggtgctccaacaaaaagaatgctgctgtaatggaccaagagcctgcgggggacagaacagtgaataggcaggactctgatgaacaagaccctcaggaggtgacgtacgcacagttggatcactgcgttttcatacagagaaaaatcagtcgcccttctcagaggcccaagacacccctaacagataccagcgtgtacacggaacttccaaatgctgagcccagatccaaagttgtctcctgcccacgagcaccacagtcaggtcttgagggggttttctagggagacaacagccctgtctcaaaaccaggttgccagatccaatgaaccagcagctggaatctgaaggcatcagtctgcatcttaggggatcgctcttcctcacaccacgaatctgaacatgcctctctcttgcttacaaatgcctaaggtcgccactgcctgctgcagagaaaacacactcctttgcttagcccacaaggtatctatttcacttgacccctgcccacctctccaacctaactggcttacttcctagtcctacttgaggctgcaatcacactgaggaactcacaattccaaacatacaagaggctccctcttaacacggcacttacacacttgctgttccaccttccctcatgctgttccacctcccctcagactatctttcagccttctgtcatcagtaaaatttataaattttttttataacttcagtgtagctctctcctcttcaaataaacatgtctgccctcatggtttcg

SEQ ID NO: 13831 - DNA, 4410 bp, Homo sapiens
cctcctccacagtggtgaggtcacagccccttggagccctccctcttcccacccctcccgctcccgggtctcctttggcctggggtaacccgaggtgcagagctgagaatgaggcgatttcggaggatggagaaatagccccgagtcccgtggaaaatgaggccggcggacttgctgcagctggtgctgctgctcgacctgcccagggacctgggcggaatggggtgttcgtctccaccctgcgagtgccatcaggaggaggacttcagagtcacctgcaaggatattcaacgcatccccagcttaccgcccagtacgcagactctgaagcttattgagactcacctgagaactattccaagtcatgcattttctaatctgcccaatatttccagaatctacgtatctatagatgtgactctgcagcagctggaatcacactccttctacaatttgagtaaagtgactcacatagaaattcggaataccaggaacttaacttacatagaccctgatgccctcaaagagctccccctcctaaagttccttggcattttcaacactggacttaaaatgttccctgacctgaccaaagtttattccactgatatattctttatacttgaaattacagacaacccttacatgacgtcaatccctgtgaatgcttttcagggactatgcaatgaaaccttgacactgaagctgtacaacaatggctttacttcagtccaaggatatgctttcaatgggacaaagctggatgctgtttacctaaacaagaataaatacctgacagttattgacaaagatgcatttggaggagtatacagtggaccaagcttgctggacgtgtctcaaaccagtgtcactgcccttccatccaaaggcctggagcacctgaaggaactgatagcaagaaacacctggactcttaagaaacttccactttccttgagtttccttcacctcacacgggctgacctttcttacccaagccactgctgtgcttttaagaatcagaagaaaatcagaggaatccttgagtccttgatgtgtaatgagagcagtatgcagagcttgcgccagagaaaatctgtgaatgccttgaatagccccctccaccaggaatatgaagagaatctgggtgacagcattgttgggtacaaggaaaagtccaagttccaggatactcataacaacgctcattattacgtcttctttgaagaacaagaggatgagatcattggttttggccaggagctcaaaaacccccaggaagagactctacaagcttttgacagccattatgactacaccatatgtggggacagtgaagacatggtgtgtacccccaagtccgatgagttcaacccgtgtgaagacataatgggctacaagttcctgagaattgtggtgtggttcgttagtctgctggctctcctgggcaatgtctttgtcctgcttattctcctcaccagccactacaaactgaacgtcccccgctttctcatgtgcaacctggcctttgcggatttctgcatggggatgtacctgctcctcatcgcctctgtagacctctacactcactctgagtactacaaccatgccatcgactggcagacaggccctgggtgcaacacggctggtttcttcactgtctttgcaagcgagttatcggtgtatacgctgacggtcatcaccctggagcgctggtatgccatcaccttcgccatgcgcctggaccggaagatccgcctcaggcacgcatgtgccatcatggttgggggctgggtttgctgcttccttctcgccctgcttcctttggtgggaataagtagctatgccaaagtcagtatctgcctgcccatggacaccgagacccctcttgctctggcatatattgtttttgttctgacgctcaacatagttgccttcgtcatcgtctgctgctgttatgtgaagatctacatcacagtccgaaatccgcagtacaacccaggggacaaagataccaaaattgccaagaggatggctgtgttgatcttcaccgacttcatatgcatggccccaatctcattctatgctctgtcagcaattctgaacaagcctctcatcactgttagcaactccaaaatcttgctggtactcttctatccacttaactcctgtgccaatccattcctctatgctattttcaccaaggccttccagagggatgtgttcatcctactcagcaagtttggcatctgtaaacgccaggctcaggcataccgggggcagagggttcctccaaagaacagcactgatattcaggttcaaaaggttacccacgagatgaggcagggtctccacaacatggaagatgtctatgaactgattgaaaactcccatctaaccccaaagaagcaaggccaaatctcagaagagtatatgcaaacggttttgtaagttaacactacactactcacaatggtaggggaacttacaaaataatagtttcttgaatatgcattccaatcccatgacacccccaacacatagctgccctcactcttgtgcaggcgatgtttcaatgtttcatggggcaagagtttatctctggagagtgattagtattaacctaatcattgcccccaagaaggaagttaggctaccagcatatttgaatgccaggtgaaatcaaaataatctacactatctagaagactttcttgatgccaagtccagagatgtcattgtgtaggatgttcagtaaatattaactgagctatgtcaatatagagcttctcagttttgtataacatttcatactaaagattcagcaaatggaaaatgctattaatttggttggtgaccacaagataaaatcagtcccacgttggctcagttcaactagatgttccctgatacaaagagaacttgatttccttaaaactgaaaagccaaacacagctagctgtcatacaagaaacagctattatgagacatgaaggagggtaagaattagctttaagttttgttttgctttgttttgttttttaactcaacctattaatcatctcttcacaagaatccacctgatgtgaccaagctattatgtgttgcctggaaaaactggcaagatttcagcttatgtggcctagcaaactaagaattgctcttcttggccagcctcatagcataaaagatgtgaactctaggaagtctttctgagtagcaataagtgggaattatgggcagagcacactcaatcccctgttgattaataaaacaggctggacactaattaactatgggacttaaatctgtagaaatgaaggagtccaatagcttcttccaattttaaaactctagtacatccctttccctcaaatatatatttctaagataaagagaaagaagagcactaagtaagtagaatctgtttttcctattttgtagggctgctgactcctagtccttgaagcctagacacatgacccaggaaatttttcctttgtttcacttttgattatgatgtctgagccaaaaattcaattaagtaaacatactcgcctggatctgaatcattcatttaattactagatctacccagctgttatatcaggccaaaaacagattcgtgtttatataaaagagtaaacgatggttgcaaattttggctatttagagttgctacttcactatgaagagtcacttcaaaacacttcgcttgtctttagggatgatttttgccatttccagtccacggtatgatactaaagctgtcaagagaggtttcttcttttctgaaactgccagctctttccagccctgttgatcactggacataaagcttcttttccccaataattcttctttacttaaaatagtcaggatctttatctacagatgtactctccaggttacctgtgatgatagccccctaatgtcctgctagaaaagtctccaagcagagatgacattacttctgaatgctcataaaccacaccatgaaataaaagctctttgttgttttaagattgtgaagtgtcgttaatgggtccccacagatggtccctgctggactcacctggaatctctccacagccatacccactcatcactatcattgagacctgcacatcttaatagaaatattataaacatcgaaaatcatgacttacctagaagttcgcttgtaactaatgaaattaaacaaatgtgttgccttttgtcatgtgtttctctcctgtgacatttcaaaatatcacatcttgataaataatgtgtttcatcttgaatagctgaactaattgctttggaaacagagtcctagaaaagtgacttcaacagaattgttactaaaatttgcactcacaacatgaaataaattttcttcctatggaataatcgtgaaaaaaaaaa

SEQ ID NO: 13832 - DNA, 3280 bp, Homo sapiens
ctgggcaatggcgggcgcctctcccccagcctcgctgccgccttgcagtttgatctcagactgctgtgctagcaatcagcgagactccgtgggcgtaggaccctccgagccagctcttcttggatccctcgtggaaactacatagaatctaatcgtgatgactgcacggtgtctttgatctatgctgtgcaccttaagaagtcaggctatgtcttctttgagtaccagtatgtcgacaacaacatcttctttgagttctttattcaaaatgatcagtgccaggagatggacaccaccactgacaagtgggtaaaacttacagacaatggagaatggggctctcattctgacagctccttaaatgcttgaaggcaattaccaggtaatgctgaaatcaggcacaaacatactctactggagaactacaggcatccttatgggttctaaggcggtcaagcctgtgctggtaaaaaatatcacaattgaaggggtggcgtacacatcagaatgttttccttgcaagccaggcacattcagcaacaaaccaggttcattcaactgccaggtgtgtcccagaaacacctattctgagaaaggagccaaagaatgtataaggtgtaaagacgactctcaattttcagaggaaggatccagtgagtgtacagagcgccctccctgtaccacaaaagactatttccagatccatactccatgtgatgaagaaggaaagacacagataatgtacaagtggatagagcccaaaatctgccgggaggatctcacagatgctattagattgcccccttctggagagaagaaggattgtccgccttgcaaccctggattttataacaatggatcatcttcttgccatccctgtcctcctggaacattttcagatggaaccaaagaatgtagaccatgtccagcaggaacggagcctgcacttggctttgaatataaatggtggaatgtccttcctggcaacatgaaaacttcctgcttcaatgttgggaattcaaagtgcgatggaatgaatggttgggaggtggctggagatcatatccagagtggggctggaggttctgacaatgattacctgatcttaaacttgcatatcccaggatttaaaccaccaacatctatgactggagccacgggttctgaactaggaagaataacatttgtctttgagaccctctgttcagctgactgtgttttgtacttcatggtggatattaatagaaaaagtacaaatgtggtagaatcgtggggtggaaccaaagaaaaacaagcttacacccatatcatcttcaagaatgcaacttttacatttacatgggcattccagagaactaatcagggtcaagataatagacggttcatcaatgacatggtgaagatttattctatcacagccactaatgcagttgatggggtggcgtcctcatgccgtgcctgtgccctcggttctgaacagtcgggttcatcgtgtgtcccctgccctccaggccactacattgagaaagaaaccaaccagtgcaaggaatgtccacctgacacctacctgtccatacatcaggtctatggcaaagaggcttgtattccatgcgggcctgggagtaaaaacaatcaggaccattcggtttgctatagtgactgctttttctaccatgaaaaagaaaatcagagtttgcactatgactttagcaacctcagcagtgtgggctcattaatgaatggccccagcttcacctccaaaggaacaaaatacttccatttcttcaatatcagtttatgtgggcatgaggggaagaagatggctctctgtaccaacaatataacagactttacagtaaaagaaatagtggcagggtcagatgattacacaaatttggtaggggcatttgtatgccagtcaacaattattccttctgaaagtaagggtttccgagcagccttatcatcacaatccatcattctggcagatacattcataggagtcacagttgaaaccacattgaaaaatattaatataaaagaagatatgttcccagttccaacaagccaaataccagatgtgcatttcttttataagtcttctacagcaacaacatcttgtattaatggccgatcaactgctgtgaaaatgaggtgtaatcctactaaatctggagcaggagtgatttcagtccccagcaagtgcccagcaggtacctgtgatgggtgtacgttctatttcctgtgggagagtgctgaagcttgccctctgtgtacggagcatgacttccatgagattgagggagcctgcaagagaggatttcaggaaaccttgtatgtgtggaatgaacctaaatggtgcattaaaggaatttctttgcctgagaaaaagttggcaacctgtgaaacggttgacttttggctgaaggtgggagccggtgtgggagcttttactgccgttttgctggtggctctgacctgctacttctggaaaaagaatcaaaaactggaatacaaatattccaagttagtaatgacgactaactcaaaagagtgtgaactcccggctgcagacagttgtgctatcatggaaggagaagataatgaagaggaagttgtatattccaataaacagtcactactaggaaaactcaaatctttggcaaccaaggaaaaagaagaccattttgaatctgttcaactgaaaacctcaagatccccaaatatatgaagagacagtgctgtagccttgagactaatgaacaaagaaacctgctctagttttacaggaccatattttagggtctgtcctcatacctgtcacattggtgatctcacagaggagggccatgccgctgaaaagggaaggagattgaaacatttgattgccttatcacatggtcaagtaccttgccaaataaaggaaagcaaatgatttgggtctcaactgaagatgaagctcaactcaggaagagatttatctgtatatacacataactgaaaaccaagtttaagcccaccaatgcactgctgatgcatgccatataattaatgggtaacttttattctttatgatgtctacataacaagtgtgatttggaaggcacatgtgagcatatgcattatgatccaatttatgttttttctttgtttatattttggggaaaattaaaatttttttaaggtatatttttcccattatttattttcctgaccttaaaacagcttttctactaaaaaatggtgagcaatgaagacaataaatttttcatttttccat

SEQ ID NO: 13833 - DNA, 1959 bp, Homo sapiens
acaagatcatgctttttattattaaggaatgttaacttcctcttttagtatggcccctctgccatcacatatggagaccatcctttgctggggagaatctccccttctttgccaggatcctttttttgcaatttctcctagttattagtttatgcaaactcaggggtacaaaatgattttaagggaagcatgctgccaaaataaccatgacgttccttcccaagctacaaataagtcattgattagcccattggtgtaccttacctcaataaacaagggccagttgtattctgccctggatcttgtataatgaacttcttcttctccatagctcacagcaggcagtgaaggctgaggatcttcatgcttcttccctggctcccctagaatggatgtgtgtggctggaaagaaatggaggttgcgctggtcaattttgataattcagatgaaatccaagaagagccaggctatgccacagacttcgactcaaccagcccaaaaggccggcctgggggcagctccttctccaacgggaagatcctcatcagcgaaagcaccaaccatgagacggccttctccaagcttccgggagactatgctgaccccccagggcctgagccagtggtcctaaatgaaggaaaccagcgggtgatcatcaacattgctgggctgagatttgagacccagctcagaacccttagtcagttcccagagactctcctgggagaccgggaaaaaaggatgcagttctttgactccatgagaaatgagtatttctttgatcggaaccggcccagttttgatggaatcctatattattaccaatctggtgggaaaattcggcgcccagccaatgttcccattgatatctttgctgatgaaatctccttctatgagctgggtagtgaggccatggaccagttccgggaggatgaaggcttcatcaaagaccctgaaacactgctacccaccaatgacatccaccgtcagttctggctcctctttgagtaccctgaaagttccagcgctgcccgtgctgtggccgtggtctcggtgttggttgtggtcatctccatcaccatcttctgcctggagacactgccagagttccgggaggatagggagctaaaggtggtcagagaccccaatctcaacatgagcaagacagtcctctcccagaccatgttcaccgaccctttcttcatggtggagtctacctgcatcgtgtggttcaccttcgagctggtgctccggttcgtggtctgccccagcaagactgacttcttcaggaacatcatgaacatcattgacatcatctccattatcccctactttgcaactctcatcacagagctagtccaggagacagagccgagtgcccaacagaacatgtccctggccatcctgaggatcatccgcctggtgagggtcttccgcatcttcaagctctcgcgccactccaaggggctgcagatcctcgggcaaacactgaaggcgtccatgcgggagttggggttgctcatcttctttctcttcattggagtcatcctcttctccagtgcagtctactttgctgaggtggatgagccagagtcccatttctctagcattcctgatggcttctggtgggcagtggtcaccatgacaactgtaggctatggggacatgtgcccgaccaccccaggggggaagattgtgggcactctgtgtgccattgcaggggtcctcaccattgccctccctgtgcctgtcattgtctccaacttcaattacttctaccaccgggagactgagaatgaagaaaagcagaacatcccaggagaaattgaaagaatcctcaacagtgtaggctcaagaatgggcagcacagactctcttaataagaccaatggtggctgttccacagagaagtctaggaaatgatcagtccagggcttcttgggtccatcctgtctctc

SEQ ID NO: 13834 - DNA, 4775 bp, Homo sapiens
acccgcgcgaggtaggcgctctggtgcttgcggaggacgcttccttcctcagatgcaccgatcttcccgatactgcctttggagcggctagattgctagccttggctgctccattggcctgccttgccccttacctgccgattgcatatgaactcttcttctgtctgtacatcgttgtcgtcggagtcgtcgcgatcgtcgtggcgctcgtgtgatggccttcgtccgtttagagtagtgtagttagttaggggccaacgaagaagaaagaagacgcgattagtgcagagatgctggaggtggtcagttactaagctagagtaagatagcggagcgaaaagagccaaacctagccggggggcgcacggtcacccaaaggaggtcgactcgccggcgcttcctatcgcgccgagctccctccattcctctccctccgccgaggcgcgaggttgcggcgcgcagcgcagcgcagctcagcgcaccgactgccgcgggctccgctgggcgattgcagccgagtccgtttctcgtctagctgccgccgcggcgaccgctgcctggtcttcctcccggacgctagtgggttatcagctaacacccgcgagcatctataacataggccaactgacgccatccttcaaaaacaactaaaggatgatatgatgaacctagcctgttaatttcgtcttctcaattttaaactttggttgcttaagactgaagcaatcatggtgaacctgaggaatgcggtgcattcattccttgtgcacctaattggcctattggtttggcaatgtgatatttctgtgagcccagtagcagctatagtaactgacattttcaatacctccgatggtggacgcttcaaattcccagacggggtacaaaactggccagcactttcaatcgtcatcataataatcatgacaataggtggcaacatccttgtgatcatggcagtaagcatggaaaagaaactgcacaatgccaccaattacttcttaatgtccctagccattgctgatatgctagtgggactacttgtcatgcccctgtctctcctggcaatcctttatgattatgtctggccactacctagatatttgtgccccgtctggatttctttagatgttttattttcaacagcgtccatcatgcacctctgcgctatatcgctggatcggtatgtagcaatacgtaatcctattgagcatagccgtttcaattcgcggactaaggccatcatgaagattgctattgtttgggcaatttctataggtgtatcagttcctatccctgtgattggactgagggacgaagaaaaggtgttcgtgaacaacacgacgtgcgtgctcaacgacccaaatttcgttcttattgggtccttcgtagctttcttcataccgctgacgattatggtgattacgtattgcctgaccatctacgttctgcgccgacaagctttgatgttactgcacggccacaccgaggaaccgcctggactaagtctggatttcctgaagtgctgcaagaggaatacggccgaggaagagaactctgcaaaccctaaccaagaccagaacgcacgccgaagaaagaagaaggagagacgtcctaggggcaccatgcaggctatcaacaatgaaagaaaagcttcgaaagtccttgggattgttttctttgtgtttctgatcatgtggtgcccatttttcattaccaatattctgtctgttctttgtgagaagtcctgtaaccaaaagctcatggaaaagcttctgaatgtgtttgtttggattggctatgtttgttcaggaatcaatcctctggtgtatactctgttcaacaaaatttaccgaagggcattctccaactatttgcgttgcaattataaggtagagaaaaagcctcctgtcaggcagattccaagagttgccgccactgctttgtctgggagggagcttaatgttaacatttatcggcataccaatgaaccggtgatcgagaaagccagtgacaatgagcccggtatagagatgcaagttgagaatttagagttaccagtaaatccctccagtgtggttagcgaaaggattagcagtgtgtgagaaagaacagcacagtcttttcctacggtacaagctacatatgtaggaaaattttcttctttaatttttctgttggtcttaactaatgtaaatattgctgtctgaaaaagtgtttttacatatagctttgcaaccttgtactttacaatcatgcctacattagtgagatttagggttctatatttactgtttataataggtggagactaacttattttgattgtttgatgaataaaatgtttatttttgctctccctcccttctttccttccttttttcctttcttccttcctttctctctttcttttgtgcatatggcaacgttcatgttcatctcaggtggcatttgcaggtgaccagaatgaggcacatgacagtggttatatttcaaccacacctaaattaacaaattcagtggacatttgttctgggttaacagtaaatatacactttacattcttgctctgctcatctacacatataaacacagtaagataggttctgctttctgatacatctgtcagtgagtcagaggcagaacctagtcttgttgttcatataggggcaaaaatttgacattgtcagaatgttgtgttggtatttactgcaatgtctgtccctaaacatagtggtattttaacatagcagctggttaaccgggactacagaagtggaaggataatgagatgtaatacaccaaatagcttttcacttcttaaggacagtgttcaaattctgattattacaacaagcaaactgaaattagtgttttcattctggtccttagtaaattcctaattctatgattaaactgggaaatgagatcccagagttatttcccaacccaggattcaacatcaattgggttttgatctcagcatcctggaaatttgtgtgcttcacacaaagtgaaattagtattttgagccttattaaaatattttcttaattatggtacctctgtctataggacttaatttagcagtccatttttgagtaaaacttgtattggaagtatagatggtagaaactttggaagttttacttgattaaggactacagaattgggcccttagaatgtgaaaaaaaaaagtaattaaaaagacacttttaccgaactcgggattacagaaacacggagtttccatttggattttaaacaaaatttatgtcattttcagatccttccaaactctctagtgcaggaaaaggctgcagctaatttgtgaaagtggcaagctcttcattgcactgcagttatttaccagaagtttaaatctttgttaaaatatagtgttgtgttacaataagtgttggccatcatttcattcgtgggcctgctgctctctaagaattcagtagcattttaatagtttctaaaccatgaaaagttttcaagcattgctaaagtcaggccattcagtctatgctgtgtgcagagtatacaagtgtttctagtaacagtatttccatacgtgcccatttcacacaactgtggataaattttggaagaattcatgatgctagttcttacgcttgacagttacttacacacctgagaatgtgcctctcagtatcttaaaattggttaatgaaaaatctgaatttctaaaacccttggtctgtgttctcaacacacagtatagataaatccaatagtctgccacaagggcagtggaagagctgctgtatttgaggaaactcatacagtctctatttgatttgcaacactggccaaacatcagtcatttgcttgagcatgcccaaatattacatgaaagtcaagtctacctgccttgcctgttaggtctgttgaagtgcatgttaaaataattatatgaagcagaatgagatgatttaattcttaccgaaatgaaaatggctgaagaaacacagcatgcatttagcatgagttctgcacatacagatggtgtcctgcatgtatgccatgtatgttgcatgaatccatcgatttgtattaatgtagggcagaatagctgatagaagaaggactgaagaaaatccttcagcaatccttaaaaagaccatgcattcagatctgaagtagtgtgagtgttagaaaaaactggaaacatctgatttctgaactatcagggcaagctcatagcacatgttttacaaagaaacaaaatataaatcacagatttccaaaagtactagcaataagttgaatgataatagctcacagcacatttgttaatgattcttgtgtcatcaagtagtagtacttaatagtacccaacctggtaattatcctcaagttgtgtgctattcgtaagttctgtgcagtttggtatgaaacaaatatactcatttggatataaatcttacccttcaatgttaaatctacaaacttttataaatgttttaaagaagtccatgtgataattgtaaaggtgatgaatttaccatcaaacaaatcattttgatgtattattatatatgtatatctgtgtaagacacgtgcaacagactgccttatattattttctgtaattcttctcctttgtcaaatggtattttttgtgaatggttgcaaagtgttgtcttattcctaattcctgtatgttatccactacaggttttatgagacttcctattaatttattaaatttattaaatgttgaaaaaaaaaaaaaaaaaaaaaaa

SEQ ID NO: 13835 - DNA, 2882 bp, Homo sapiens
agcggaggagtaggctggcgggcgcagggggcggggtgcgccctccctccccggccagggcgctcgggagcggggacccgagcctgcagccgagctccgctgccggccctggacactcggctcagccaagcatccttcctgggggccgaggaagtggggccactctgccgttccgaggacctgggaggagccctcggtaccccgggccccggggccctggggcacacacgtccagcccagcccgagcctgcgtttcctgagccgggatctggggcgagatggccgcaggcggcagtgcgcccgagccccgcgtcctcgtctgcctcggggcgctcctggccggctgggtcgccgtaggattggaggctgttgtcattggagaagttcatgagaatgttactctgcactgtggcaacatctcgggactgaggggccaggtgacctggtaccggaacaactcggagcctgtcttccttctctcgtccaactctagcctccggccagctgagcctcgcttctctctagtggatgccacctccctgcacattgaatcgctgagcctgggagatgagggaatctacacctgccaggagatcctgaatgtgactcagtggttccaagtgtggctgcaggtggccagcggcccctatcagattgaggtccacatcgtggccaccggcacactccccaacggcaccctctatgcagccaggggctcccaggtggacttcagctgcaacagcagctccaggccaccacccgtggttgaatggtggttccaggccctgaattccagcagcgagtcctttggccacaacctgacagtcaactttttctcactgttactgatatcgccaaacctccaagggaactacacctgtttagccttgaatcagctcagcaagagacatcgaaaggtgaccaccgagctcctggtctactatccccctccatcagctccccagtgctgggcacagatggcatcaggatcgttcatgttgcagcttacctgtcgctgggatgggggataccctgaccctgacttcctgtggatagaagagccaggaggtgtaatcgtggggaagtcaaagctgggggtggaaatgctgagcgagtcccagctgtcggatggcaagaagttcaagtgtgttacaagccacatagttgggccagagtcgggcgccagctgcatggtgcagatcaggggtccctcccttctctctgagcccatgaagacttgcttcactgggggcaatgtgacgcttacatgccaggtgtctggggcctacccccctgccaagatcctgtggctgaggaaccttacccagcccgaggtgatcatccagcctagcagccgccatctcattacccaggatggccagaactccaccctcactatccacaactgctcccaggacctggatgagggctactacatctgccgagctgacagccctgtaggggtgagggagatggaaatctggctgagtgtgaaagaacctttaaatatcggggggattgtgggaaccattgtgagcctccttctgctgggactggccattatctcagggcttctgttgcattatagccctgtgttctgctggaaagtaggaaacacttccaggggacaaaacatggatgatgtcatggttttggtggattcagaagaggaagaggaggaggaggaggaggaggaggaagatgctgcagtaggggaacaggagggagcacgtgagagagaggagttgccaaaagaaatacctaagcaggaccacattcacagagtgaccgccttggtgaatgggaacatagaacagatgggaaatggattccaggatcttcaagatgacagcagtgaggagcaaagtgacattgttcaagaagaagacaggccagtctgaagaagaggatggtccatggttgtcttgctctgaaagcttggagagctacattgaagacgagctcttcattcagctttgactccacctgcacccctggcgggggcttgcactaacaatgtttgggtctcagcaaaaaacaaaaccaagcacacacatctttccttccatgtattgaaaaacattggtttgatttgctctaagttttcccaatgatgtttaaaagctttgagaaggaaagctgctttggtgtctgaggtgccacttctgctgtgaatcctggctttatccaggttgatctactgtgatagatgctgatttagagggaacagaggtcagggaagcactgggtcttggtgccttttgccgctttttttttttttttttttttttttttttgagacggagtctccctctattgcccaggctggagtgcaatggcacgatcttggctcaccacaacttctgcctcccaggttcaagcgattctcctgcctcagccacggcaccttgcaaatatcagctccttggaacaggtgaagttccaggtaccaatgccaatcagaggaaggcagtttggttcaggctttggagttagaaacacctgaagttgaatctgggctctgttgcttccttctttcatgggctagagcacgactctttacctctctcttggcctcaatttcctcacctgtaaaatagatgaggaagctgctcacttattattgtctcgttctgaaagcttggaaagctacatcgaagatgagctcttcattcagctttgatttgacctgtacccctggtgggggattgcactggcaacatttgggtctcagcaaaaaaaccaagcacacacatctttccttccatttattgaaaaacatctttgtaagatccattcattgaaaaacataatccatttattgaaaaatatctttgtaagatcacctgctaaatatgaaaatctgaaaaaaaaaaaaaaaa

SEQ ID NO: 13836 - DNA, 2078 bp, Homo sapiens
ttcccgcaaacaaatcaccgccaccacttaggaaaccacgggaaagctgtgattgcagcgccacggtcgccagatttctgctcctgggcacattacccccaactccgaggccccctttttggcagggctagtctggactggccaatccaggtccctgcacgcctctcaccgcaacatccccgcagggcgctgcgcgcggggtactagccaggcggcgcggcccgatgacgcattgcgcctgcgcgcgcgaccgagctcgggaggggtggggcgccaggtgcttgggggcgcggcgaccgccgaggccggctaaacgcagaatggggaagaatcctgtgcgtcctccacgagctcttccacctgtgccaagtcaagatgatattccacttagtcgtcctaagaaaaagaagcccagaacaaaaaacacaccagcaagtgcttctttggaaggccttgctcagactgctggtcgaaggccctctgagggcaatgagccatcaactaaagaactcaaagagcacccagaggctcctgttcaaagaagacagaaaaagacaaggctacctcttgaattggagacttcctccacccaaaagaagtcatctagttcatctttattacgaaatgaaaatggtattgatgcggagccagctgaggaggcagttattcaaaaacctcggaggaagacaaagaaaacccagccagcagaattacagtatgccaatgagctaggagtagaagatgaagacataatcactgatgagcaaactactgtggaacagcagtctgtattcactgcacccactggcattagccagcctgtaggcaaagtatttgtggaaaaaagccggagattccaggctgctgatcgttcagagttgataaagaccacagaaaacatagatgtgtcaatggacgtgaagccttcctggaccaccagagatgtggcacttacagtgcaccgggctttcaggatgattggtctcttttctcatggattcttggctggctgtgctgtgtggaatattgttgtgatatatgttctagcaggagatcagctatccaacctctcaaaccttctgcaacaatacaagaccctagcgtatccattccagagtcttctgtacttgcttttggctctgagtacaatttcagcttttgacaggattgactttgctaaaatatcagtagcaatccgaaattttttggccctggatcctacagctttagcatctttcttgtactttactgctcttatactatctctgagtcagcaaatgacaagtgacagaatccacctttacacaccttcttctgttaatggtagcctctgggaagcaggaattgaggaacagattctccagccatggattgtggtgaatctcgtggtggctcttctggttggattatcttggctatttttgtcttataggccaggcatggatcttagtgaagagttaatgttctcctcagaggtggaagaatatcctgataaagagaaagaaatcaaagcctcttcataataccagctcacctttggaggaataatgacccagtatttgtcccatttttgtttttaaatgtatttttataagatgtatacatgtgtatttgtaatagattttttgattatataatactgaaacatctctcaatattatgaaaaatgttaaaattgtgtttgctgtttatgtctaaacattaatttgtctagcattatcatcttaatgacaaagggaataatgaactagaaaccagcaagtgaaagtgtttatttcctattttctcaaaacagttgtatttataactattaccttaaaaagcactggtttagaaaaagccataacttaaatagtgttataaaatatatatcaggtttaaacataaatttagcgaatatggtagaagggaaaaaagccttcatttttgacctccccttactgaataaattgaaatatgaagtttgtcttttctgaaactggcttagtgattgagtatcatgtaataattataatataatttagcttgaaagatgctctacattatgaccaataaaaagggaatgtatgttttgtttg

SEQ ID NO: 13837 - DNA, 1822 bp, Homo sapiens
ttgccagacagcatagaggctgaggctggggccaggacccagacagagacacacggtcactgcagctgaagccgctgcccctgctacaggcaccaccaggaccagctgatcattccagcccacagcaatggagccacatgactcctcccacatggactctgagttccgatacactctcttcccgattgtttacagcatcatctttgtgctcggggtcattgctaatggctacgtgctgtgggtctttgcccgcctgtacccttgcaagaaattcaatgagataaagatcttcatggtgaacctcaccatggcggacatgctcttcttgatcaccctgccactttggattgtctactaccaaaaccagggcaactggatactccccaaattcctgtgcaacgtggctggctgccttttcttcatcaacacctactgctctgtggccttcctgggcgtcatcacttataaccgcttccaggcagtaactcggcccatcaagactgctcaggccaacacccgcaagcgtggcatctctttgtccttggtcatctgggtggccattgtgggagctgcatcctacttcctcatcctggactccaccaacacagtgcccgacagtgctggctcaggcaacgtcactcgctgctttgagcattacgagaagggcagcgtgccagtcctcatcatccacatcttcatcgtgttcagcttcttcctggtcttcctcatcatcctcttctgcaacctggtcatcatccgtaccttgctcatgcagccggtgcagcagcagcgcaacgctgaagtcaagcgccgggcgctgtggatggtgtgcacggtcttggcggtgttcatcatctgcttcgtgccccaccacgtggtgcagctgccctggacccttgctgagctgggcttccaggacagcaaattccaccaggccattaatgatgcacatcaggtcaccctctgcctccttagcaccaactgtgtcttagaccctgttatctactgtttcctcaccaagaagttccgcaagcacctcaccgaaaagttctacagcatgcgcagtagccggaaatgctcccgggccaccacggatacggtcactgaagtggttgtgccattcaaccagatccctggcaattccctcaaaaattagtccctgcttccaggcctgaagtcttctcctccatgaacatcatggactgagctgggggaagaagggatatctactgtggtctgggcaccacctctgtgggcactggtgggccattagatttggaggctacctcacctgggcagggatgatggcagagccaggctgttggaaaatccagaactcaaatgagccccttcatccgcctgtgggcgcatactacagtaactgtgactgatgactttatcctgagtcccttaatcttatggggccggaaggaatgtcagggccaggtgcagaccttgggggaagactttaaaccacctagttctccccgatggggcatcggtctaaagctttgggggagtgggcgcagtggctcacacctgtaatcccagcactttgggaggccgaggtgggcagatcatgggtcaagagatcgagaccatcctggccaacattgtaaaaccccatctctactaaaacatacaaaaattagccgggcatggtggcacacgcctgtagtcccagctactcaggaggctgaggcaggagaatcgcttgaacctgggaggcagaggttgcagtgaacctagattgcaccattgcactctagcctggcaacagagcgagattccatctcaaaaaaaaaaaaaaaaaaaaaaaaaa

SEQ ID NO: 13838 - DNA, 4465 bp, Homo sapiens
aacgtccgcgggcgcggggtgtgtcgggtgtcgacggcggcgctttgcggccggtcgtgcgggtcgggcgcgggcgggcgcggcggcagtggcgcgcacaggtgattgactggccagctgcctgaaggagcgccaggtcctccttgctggcaggtggcgaagcccattggggcggcggtgcagaccgcggcggcggctgcggcggtctggctcgggaggcgttcctggggccaaggccatggccccgcggctgcagctggagaaggcggcctggcgctgggcggagacggtgcggcccgaggaggtgtcgcaggagcacatcgagaccgcttaccgcatctggctggagccctgcattcgcggcgtgtgcagacgaaactgcaaaggaaatccgaattgcttggttggtattggtgagcatatttggttaggagaaatagatgaaaatagttttcataacatcgatgatcccaactgtgagaggagaaaaaagaactcatttgtgggcctgactaaccttggagccacttgttatgtcaacacatttcttcaagtgtggtttctcaacttggagcttcggcaggcactctacttatgtccaagcacttgtagtgactacatgctgggagacggcatccaagaagaaaaagattatgagcctcaaacaatttgtgagcatctccagtacttgtttgccttgttgcaaaacagtaataggcgatacattgatccatcaggatttgttaaagccttgggcctggacactggacaacagcaggatgctcaagaattttcaaagctctttatgtctctattggaagatactttgtctaaacaaaagaatccagatgtgcgcaatattgttcaacagcagttctgtggagaatatgcctatgtaactgtttgcaaccagtgtggcagagagtctaagcttttgtcaaaattttatgagctggagttaaatatccaaggccacaaacagttaacagattgtatctcggaatttttgaaggaagaaaaattagaaggagacaatcgctatttttgcgagaactgtcaaagcaaacagaatgcaacaagaaagattcgacttcttagccttccttgcactctgaacttgcagctaatgcgttttgtctttgacaggcaaactggacataagaaaaagctgaatacctacattggcttctcagaaattttggatatggagccttatgtggaacataaaggtgggtcctacgtgtatgaactcagcgcagtcctcatacacagaggagtgagtgcttattctggccactacatcgcccacgtgaaagatccacagtctggtgaatggtataagtttaatgatgaagacatagaaaagatggaggggaagaaattacaactagggattgaggaagatctagcagaaccttctaagtctcagacacgtaaacccaagtgtggcaaaggaactcattgctctcgaaatgcatatatgttggtttatagactgcaaactcaagaaaagcccaacactactgttcaagttccagcctttcttcaagagctggtagatcgggataattccaaatttgaggagtggtgtattgaaatggctgagatgcgtaagcaaagtgtggataaaggaaaagcaaaacacgaagaggttaaggagctgtaccaaaggttacctgctggagctgagccctatgagtttgtctctctggaatggctgcaaaagtggttggatgaatcaacacctaccaaacctattgataatcacgcttgcctgtgttcccatgacaagcttcacccggataaaatatcaattatgaagaggatatctgaatatgcagctgacattttctatagtagatatggaggaggtccaagactaactgtgaaagccctgtgtaaggaatgtgtagtagaacgttgtcgcatattgcgtctgaagaaccaactaaatgaagattataaaactgttaataatctgctgaaagcagcagtaaagggcagcgatggattttgggtggggaagtcctccttgcggagttggcgccagctagctcttgaacagctggatgagcaagatggtgatgcagaacaaagcaacggaaagatgaacggtagcaccttaaataaagatgaatcaaaggaagaaagaaaagaagaggaggaattaaattttaatgaagatattctgtgtccacatggtgagttatgcatatctgaaaatgaaagaaggcttgtttctaaagaggcttggagcaaactgcagcagtactttccaaaggctcctgagtttccaagttacaaagagtgctgttcacagtgcaagattttagaaagagaaggggaagaaaatgaagccttacataagatgattgcaaacgagcaaaagacttctctcccaaatttgttccaggataaaaacagaccgtgtctcagtaactggccagaggatacggatgtcctctacatcgtgtctcagttctttgtagaagagtggcggaaatttgttagaaagcctacaagatgcagccctgtgtcatcagttgggaacagtgctcttttgtgtccccacgggggcctcatgtttacatttgcttccatgaccaaagaagattctaaacttatagctctcatatggcccagtgagtggcaaatgatacaaaagctctttgttgtggatcatgtaattaaaatcacgagaattgaagtgggagatgtaaacccttcagaaacacagtatatttctgagcccaaactctgtccagaatgcagagaaggcttattgtgtcagcagcagagggacctgcgtgaatacactcaagccaccatctatgtccataaagttgtggataataaaaaggtgatgaaggattcggctccggaactgaatgtgagtagttctgaaacagaggaggacaaggaagaagctaaaccagatggagaaaaagatccagattttaatcaaagcaatggtggaacaaagcggcaaaagatatcccatcaaaattatatagcctatcaaaagcaagttattcgccgaagtatgcgacatagaaaagttcgtggtgagaaagcacttctcgtttctgctaatcagacgttaaaagaattgaaaattcagatcatgcatgcattttcagttgctccttttgaccagaatttgtcaattgatggaaagattttaagtgatgactgtgccaccctaggcacccttggcgtcattcctgaatctgtcattttattgaaggctgatgaaccaattgcagattatgctgcaatggatgatgtcatgcaagtttgtatgccagaagaagggtttaaaggtactggtcttcttggacattaatctttgaatacttgctgactgctaagaaatgaccagaggggaagaggagtttgacatgttagggcattaaagcaaaggtggatttaagaattaaaccattacatgccccttccaaaaggcagaaatccattcaaacgtgactgtcccaaatgccttatgtcaaataaagcagattgcactgatggacatcagacttgaaggaaatgtttccaattttatatttaaggggggtggtgggtgggagggggcaagtaaagacggaacaagtttagtagcagtaatagtaaatcatgtttacatatgagatttatagtcgtgggaggggaataaagttctgttatatttccttgctcgagtttcataccagatgcgttggtccataaaggattgtatcaagtagatgggacaacattctgctctgaacgaaaagtaattttagagacataacctgcttaccaatgcctgtctttgattcatattctactttcaataaagcatgaaagtgaagaacttgtcctaagtgtggaaaagtgtcttcagatttagactcttctccatgtcagctgcagcgccacccgccttacacctgcccggccgtctgtctcttggtattgggtaaaggagggggcacctgcatgtctcctgcaatgagcaaggaattatgtctcatgttttgacttcagaggctttttgctttggtgcatttcagaaaggatggagaacatttattatgtgtgaaagcatcctcttccggttttgctgttattcaaaagtgggaaatgtacctggcacgtttgaaaataaaaaatctgactacctatcagaagagtaaatcagactgaagtacatttggataacacaaggtttctataaaatttgttcttcctgtcctccatgtcactgtttcttggacctcagttctctttttgaaagcattattccaaaatgccctgagagggtctcttagatcattgtttaaaaaaggaaaaaagtatatggatgtgctgtccatccaactcaggattatcattcttagcaacacgtaaccgaagcaatattcttaagaatattgaaggggtttttttaattgaacttaagactggagtttttcctttgaaa

SEQ ID NO: 13839 - DNA, 2910 bp, Homo sapiens
acttgaggagtcgactgagagctttatctttgcccctgtgacgggtggcctgtggtttcctgccaacaactcctgtttccggaggcccaacaaggcccacgcagagccaggaggggcagtggggctgggcctgggtggccccaccagccccgccccatctatctttgggaatttatttgtccatgggcgaggctggcctgcagtctgttgccttccaggggccaagagctgctctgatcacccagggattctctctccaacccaagtgcctccagctgacctctggctcctgtcctctggctccacctgcaccgccctgctcttcctaaggggccaggaagcccccagaagctctaccatcgacgtgggtggtggcacccggctcaccctgagagcagaggccgtgcagggggctcagttctgagccccagccggcccaccatggcacggcggttccaggaggagctggccgccttcctcttcgagtatgacaccccccgcatggtgctggtgcgtaataagaaggtgggcgttatcttccgactgatccagctggtggtcctggtctacgtcatcgggtgggtgtttctctatgagaagggctaccagacctcgagcggcctcatcagcagtgtctctgtgaaactcaagggcctggccgtgacccagctccctggcctcggcccccaggtctgggatgtggctgactacgtcttcccagcccagggggacaactccttcgtggtcatgaccaatttcatcgtgaccccgaagcagactcaaggctactgcgcagagcacccagaagggggcatatgcaaggaagacagtggctgtacccctgggaaggccaagaggaaggcccaaggcatccgcacgggcaagtgtgtggccttcaacgacactgtgaagacgtgtgagatctttggctggtgccccgtggaggtggatgacgacatcccgcgccctgcccttctccgagaggccgagaacttcactcttttcatcaagaacagcatcagctttccacgcttcaaggtcaacaggcgcaacctggtggaggaggtgaatgctgcccacatgaagacctgcctctttcacaagaccctgcaccccctgtgcccagtcttccagcttggctacgtggtgcaagagtcaggccagaacttcagcaccctggctgagaagggtggagtggttggcatcaccatcgactggcactgtgacctggactggcacgtacggcactgcagacccatctatgagttccatgggctgtacgaagagaaaaatctctccccaggcttcaacttcaggtttgccaggcactttgtggagaacgggaccaactaccgtcacctcttcaaggtgtttgggattcgctttgacatcctggtggacggcaaggccgggaagtttgacatcatccctacaatgaccaccatcggctctggaattggcatctttggggtggccacagttctctgtgacctgctgctgcttcacatcctgcctaagaggcactactacaagcagaagaagttcaaatacgctgaggacatggggccaggggcggctgagcgtgacctcgcagctaccagctccaccctgggcctgcaggagaacatgaggacatcctgatgctcgggccccaactcctgactgggtgcagcgtgaggcttcagcctggagccctggtgggtcccagccagggcagaggggcctccccaggaagtctcctaccctctcagccaggcagagagcagtttgccagaagctcagggtgcatagtaggagagacctgtgcaaatctgagctccggctccgaccccacacaccctgagggagccctaccctagcctcagccgctcctggtggggaatggctggggctgggcaggaccctcccacacacctgcaccctagcttcgtgcttctctctccggactctcattatccaacccgctgcctccatttctctagatctgtgctctccgatgtggcagtcagtaaccataggtgactaaattaaactaaaataaaatagaatgaaacacaaaattcaattcctcggctgaactagccacatttcaactgctcagtagatacgtgtggttagtggctgccatactggacagctcggggcattttcactgtcaaagaaagttctattagacagccctgcttgagccctgtttcttcctggccttcggtttccctggggaacttatcgacaatgcaagctcctgggcccacccccagacctcctgaaccaaaagctccagggctggccgtatgatctgtgtggatggcaaactccccaggccattctgggacctaagtttaagaagtgccgtcctcgaactttctgactctaagctcctgagcgggagtcagacttagccctgagcctgcacttcctgttcaggtgcagacactgaacagggtctcaaacaccttcagcatgtgtgttgtgtgctcacgtgccacacagtgtctcatgcacacaacccagtgtacacaccacctacgtgcacacagcatccttccacactgtgtatgtgaacagcttgggccctgcaaacacaaccatctacacacatctacacccccaagcacacacacatggtccgtgccatgtcacctccatagggaaaggcttctctccaagtgtgccaggccaggacagccctcccagccatgaatccttactcagctacctcgggttggggtgggagccccagccaaatcctgggctccctgcctgtggctcagccccagctcccaaggcctgcctggctctgtctgaacagaaggtctgggggaagcgacgggtggagtacaataaagggaatgaggacaaacaaaaaaaaaaaaaaaaaaaaaaaaaaaaaaaaaaaaaaaaaaaaaa

SEQ ID NO: 13840 - DNA, 2999 bp, Homo sapiens
atacttgtgcggttccaagtgtggagaaagcggctctgggtctagattgagggatactccccctttccaccatgggcaagaagggcaaagttggcaagagccgacgagacaagttttatcacttggcgaaggagacgggttaccgttcccgatctgctttcaagctgatccagctcaatcgccgctttcagttcctgcagaaagcccgagccttgctggacctgtgtgctgcgccagggggatggctgcaggtagctgccaagtttatgcctgtatccagccttattgtgggagtggacctggttccaatcaagcctctccccaatgtggtgactctccaggaggacatcacaacagaacgttgtaggcaggccctgaggaaggagctgaagacctggaaggttgatgttgtgctcaatgatggggcccccaacgttggggctagctgggtccatgatgcttactcacaagcccatttgacactgatggctctacgtttggcttgtgactttttggcccgtggtggcagcttcatcacaaaggttttccgttctcgtgactatcagcctctgctatggatctttcagcagctgttccgccgtgtccaggccaccaagccccaagcctctcgccatgaatctgcagagatctttgtagtctgccaaggattcctggcccctgacaaggttgacagtaaattctttgaccccaaatttgcctttaaggaggttgaagttcaggctaagaccgttactgaattggttactaagaagaagccaaaggctgaaggctatgctgagggtgacctcactctctatcaccgtacctcagtcactgacttcctccgagctgccaaccctgttgacttcctctccaaggccagcgaaatcatggtagatgatgaagagttggcacagcatccagctaccactgaggacatacgggtgtgctgtcaggacatcagagtgttggggcgcaaggagctcaggtcgctactaaactggagaacaaaacttcggcgatatgtggccaagaagctgaaagaacaagcaaaggcactggacatcagcctcagctctggagaggaagatgaaggtgatgaggaggactcaacagctggaaccacaaagcagccctctaaggaggaggaggaagaggaggaggaggaacaactgaaccagaccttggcagaaatgaaggcccaggaggtggcggaattgaagaggaagaaaaagaagctgttgcgtgagcagagaaagcagcgggagcgtgtggagctgaagatggatctgcctggggtttccattgcagacgagggggagactggcatgttctccttgtgcaccatccggggtcaccagttattagaggaagtaacacaaggggatatgagtgcagcagacacatttctgtccgatctgccaagggatgatatctatgtgtcagatgttgaggacgacggtgatgacacatctctggatagtgacctggatccagaggagctggcaggagtcaggggacatcagggtctaagggaccaaaagcgtatgcgacttactgaagtgcaagatgataaagaggaggaggaggaggagaatccactgctggtaccactggaggaaaaggcagtactgcaggaagaacaagccaacctgtggttctcaaagggcagctttgctgggatcgaggacgatgccgatgaggccctggagatcagtcaggcccagctgttatttgagaaccggcggaagggacggcagcagcagcagaagcagcagctgccacagacacccccttcctgtttgaagactgagataatgtctcccctgtaccaagatgaagcccctaagggaacagaggcttcttcggggacagaagctgccactggccttgaaggggaagaaaaggatggcatctcagacagtgatagcagtactagcagtgaggaagaagagagctgggaacccctccgtggtaagaagcgaagccgtgggcctaagtcagatgatgacgggtttgagatagtgcctattgaggacccagcgaaacatcggatactggaccccgaaggccttgctctaggtgctgttattgcctcttccaaaaaggccaagagagacctcatagataactccttcaaccggtacacatttaatgaggatgagggggagcttccggagtggtttgtgcaagaggaaaagcagcaccggatacgacagttgcctgttggtaagaaggaggtggagcattaccggaaacgctggcgggaaatcaatgcacgtcccatcaagaaggtggctgaggctaaggctagaaagaaaaggaggatgctgaagaggctggagcagaccaggaagaaggcagaagccgtggtgaacacagtggacatctcagaacgagagaaagtggcacagctgcgaagtctctacaagaaggctgggcttggcaaggagaaacgccatgtcacctacgttgtagccaaaaaaggtgtgggccgcaaagtgcgccggccagctggagtcagaggtcatttcaaggtggtggactcaaggatgaagaaggaccaaagagcacagcaacgtaaggaacaaaagaaaaaacacaaacggaagtaagcagagctgccaggctcccaggagagcatggggactaggaggaagggtgtggcatggctcagtctggcccccttgattaccggcctagcccctgctcacatcacagctgtctgaagaacagtgaggtggagtgcctagaactcccgtggtggtcctgagcagagaggaggatgtcctcctgcctgcctgaaggtctcccatgaaaacactgctgaactgtgttgacactcatgaccctttttttaaaccgttaaagggaagttcggtgttggagcgatactcaatgtagtcagtctacacctggacgtgtgggccacttaagccctccccacccccatcctattcctaaataaaaccaggataatggaaaaaaaaaaaaaaaaa

SEQ ID NO: 13841 - DNA, 773 bp, Homo sapiens
cccaggtaatttgagcaaaggccacagtgaactccggcgtggctgaggaaggaggaggcacccacaggctgctgggaggagagcataaggctcaaaatggaaaatcataaatccaataataaggaaaacataacaattgttgatatatccagaaaaattaaccagcttccagaagcagaaaggaatctacttgaaaatggatcggtttatgttggattaaatgctgctctttgtggcctcatagcaaacagtctttttcgacgcatcttgaatgtgacaaaggctcgcatagctgctggcttaccaatggcagggataccttttcttacaacagacttaacttacagatgttttgtaagttttcctttgaatacaggtgatttggattgtgaaacctgtaccataacacggagtggactgactggtcttgttattggtggtctataccctgttttcttggctatacctgtaaatggtggtctagcagccaggtatcaatcagctctgttaccacacaaagggaacatcttaagttactggattagaacttctaagcctgtctttagaaagatgttatttcctattttgctccagactatgttttcagcataccttgggtctgaacaatataaactacttataaaggcccttcagttatctgaacctggcaaagaaattcactgattttaaacaaatatgtaaacaaaaataaaatggtaaaaacagaaaaaaaaaaaaaaaaaaaaaaaaaaaaaaaaaaaaaaaaaaaaaaa

SEQ ID NO: 13842 - DNA, 4044 bp, Homo sapiens
ggcaatcattggtaacctcgctcattcattagaatcacgtaagaactcaaaaggaaacgtgtctctcggagtgagggcgtttgcgtaaatctataggtttttcgacatcgatgccagttgctttgtcttctgtagtcgccaaggtggttgagagtttaagcttgcggatattgcaaagggttattagattcataagtcacaccaagtggtgggcgatccactgagcaaagccgaacttctcacatgatgacttcaaacaagacacattaccttccagcatctgttggggagacgagattttaagacacttgagtctccaggacagcaaaggcacaatgttccaccaggtgagaagagtgatgaccatccttttccttactatggttatttcatactttggttgcatgaaggctgcccccatgaaagaagcaaacatccgaggacaaggtggcttggcctacccaggtgtgcggacccatgggactctggagagcgtgaatgggcccaaggcaggttcaagaggcttgacatcattggctgacactttcgaacacgtgatagaagagctgttggatgaggaccagaaagttcggcccaatgaagaaaacaataaggacgcagacttgtacacgtccagggtgatgctcagtagtcaagtgcctttggagcctcctcttctctttctgctggaggaatacaaaaattacctagatgctgcaaacatgtccatgagggtccggcgccactctgaccctgcccgccgaggggagctgagcgtgtgtgacagtattagtgagtgggtaacggcggcagacaaaaagactgcagtggacatgtcgggcgggacggtcacagtccttgaaaaggtccctgtatcaaaaggccaactgaagcaatacttctacgagaccaagtgcaatcccatgggttacacaaaagaaggctgcaggggcatagacaaaaggcattggaactcccagtgccgaactacccagtcgtacgtgcgggcccttaccatggatagcaaaaagagaattggctggcgattcataaggatagacacttcttgtgtatgtacattgaccattaaaaggggaagatagtggatttatgttgtatagattagattatattgagacaaaaattatctatttgtatatatacataacagggtaaattattcagttaagaaaaaaataattttatgaactgcatgtataaatgaagtttatacagtacagtggttctacaatctatttattggacatgtccatgaccagaagggaaacagtcatttgcgcacaacttaaaaagtctgcattacattccttgataatgttgtggtttgttgccgttgccaagaactgaaaacataaaaagttaaaaaaaataataaattgcatgctgctttaattgtgaattgataataaactgtcctctttcagaaaacagaaaaaaaacacacacacacacaacaaaaatttgaaccaaaacattccgtttacattttagacagtaagtatcttcgttcttgttagtactatatctgttttactgcttttaacttctgatagcgttggaattaaaacaatgtcaaggtgctgttgtcattgctttactggcttaggggatgggggatggggggtatatttttgtttgttttgtgtttttttttcgtttgtttgttttgttttttagttcccacagggagtagagatggggaaagaattcctacaatatatattctggctgataaaagatacatttgtatgttgtgaagatgtttgcaatatcgatcagatgactagaaagtgaataaaaattaaggcaactgaacaaaaaaatgctcacactccacatcccgtgatgcacctcccaggccccgctcattctttgggcgttggtcagagtaagctgcttttgacggaaggacctatgtttgctcagaacacattctttccccccctccccctctggtctcctctttgttttgttttaaggaagaaaaatcagttgcgcgttctgaaatattttaccactgctgtgaacaagtgaacacattgtgtcacatcatgacactcgtataagcatggagaacagtgatttttttttagaacagaaaacaacaaaaaataaccccaaaatgaagattattttttatgaggagtgaacatttgggtaaatcatggctaagcttaaaaaaaactcatggtgaggcttaacaatgtcttgtaagcaaaaggtagagccctgtatcaacccagaaacacctagatcagaacaggaatccacattgccagtgacatgagactgaacagccaaatggaggctatgtggagttggcattgcatttaccggcagtgcgggaggaatttctgagtggccatcccaaggtctaggtggaggtggggcatggtatttgagacattccaaaacgaaggcctctgaaggacccttcagaggtggctctggaatgacatgtgtcaagctgcttggacctcgtgctttaagtgcctacattatctaactgtgctcaagaggttctcgactggaggaccacactcaagccgacttatgcccaccatcccacctctggataattttgcataaaattggattagcctggagcaggttgggagccaaatgtggcatttgtgatcatgagattgatgcaatgagatagaagatgtttgctacctgaacacttattgctttgaaactagacttgaggaaaccagggtttatcttttgagaacttttggtaagggaaaagggaacaggaaaagaaaccccaaactcaggccgaatgatcaaggggacccataggaaatcttgtccagagacaagacttcgggaaggtgtctggacattcagaacaccaagacttgaaggtgccttgctcaatggaagaggccaggacagagctgacaaaattttgctccccagtgaaggccacagcaaccttctgcccatcctgtctgttcatggagagggtccctgcctcacctctgccattttgggttaggagaagtcaagttgggagcctgaaatagtggttcttggaaaaatggatccccagtgaaaactagagctctaagcccattcagcccatttcacacctgaaaatgttagtgatcaccacttggaccagcatccttaagtatcagaaagccccaagcaattgctgcatcttagtagggtgagggataagcaaaagaggatgttcaccataacccaggaatgaagataccatcagcaaagaatttcaatttgttcagtctttcatttagagctagtctttcacagtaccatctgaatacctctttgaaagaaggaagactttacgtagtgtagatttgttttgtgttgtttgaaaatattatctttgtaattatttttaatatgtaaggaatgcttggaatatctgctatatgtcaactttatgcagcttccttttgagggacaaatttaaaacaaacaaccccccatcacaaacttaaaggattgcaagggccagatctgttaagtggtttcataggagacacatccagcaattgtgtggtcagtggctcttttacccaataagatacatcacagtcacatgcttgatggtttatgttgacctaagatttattttgttaaaatctctctctgttgtgttcgttcttgttctgttttgttttgttttttaaagtcttgctgtggtctctttgtggcagaagtgtttcatgcatggcagcaggcctgttgcttttttatggcgattcccattgaaaatgtaagtaaatgtctgtggccttgttctctctatggtaaagatattattcaccatgtaaaacaaaaaacaatatttattgtattttagtatatttatataattatgttattgaaaaaaattggcattaaaacttaaccgcatcagaacctattgtaaatacaagttctatttaagtgtactaattaacatataatatatgttttaaatatagaatttttaatgtttttaaatatattttcaaagtacataaaaaaaaaaaaaaaaaa

SEQ ID NO: 13843 - DNA, 3958 bp, Homo sapiens
agtggacttacaagtccgaagccaatgtagcttggaaaacttgggaggcggaattcctaccgctgggaactgaaagggtctgcgacactctcgggcaggccgaacccacatctctacccatcctgcgcccctcttctgaagcgccctccagggaagttaagagttttgactttcggggagtggttgggatgtacgtgggggattcttgactcgggttagtctctggggatgcagagccgggaagaggaatggttccaccaggtgagaagagtgatgaccatccttttccttactatggttatttcatactttggttgcatgaaggctgcccccatgaaagaagcaaacatccgaggacaaggtggcttggcctacccaggtgtgcggacccatgggactctggagagcgtgaatgggcccaaggcaggttcaagaggcttgacatcattggctgacactttcgaacacgtgatagaagagctgttggatgaggaccagaaagttcggcccaatgaagaaaacaataaggacgcagacttgtacacgtccagggtgatgctcagtagtcaagtgcctttggagcctcctcttctctttctgctggaggaatacaaaaattacctagatgctgcaaacatgtccatgagggtccggcgccactctgaccctgcccgccgaggggagctgagcgtgtgtgacagtattagtgagtgggtaacggcggcagacaaaaagactgcagtggacatgtcgggcgggacggtcacagtccttgaaaaggtccctgtatcaaaaggccaactgaagcaatacttctacgagaccaagtgcaatcccatgggttacacaaaagaaggctgcaggggcatagacaaaaggcattggaactcccagtgccgaactacccagtcgtacgtgcgggcccttaccatggatagcaaaaagagaattggctggcgattcataaggatagacacttcttgtgtatgtacattgaccattaaaaggggaagatagtggatttatgttgtatagattagattatattgagacaaaaattatctatttgtatatatacataacagggtaaattattcagttaagaaaaaaataattttatgaactgcatgtataaatgaagtttatacagtacagtggttctacaatctatttattggacatgtccatgaccagaagggaaacagtcatttgcgcacaacttaaaaagtctgcattacattccttgataatgttgtggtttgttgccgttgccaagaactgaaaacataaaaagttaaaaaaaataataaattgcatgctgctttaattgtgaattgataataaactgtcctctttcagaaaacagaaaaaaaacacacacacacacaacaaaaatttgaaccaaaacattccgtttacattttagacagtaagtatcttcgttcttgttagtactatatctgttttactgcttttaacttctgatagcgttggaattaaaacaatgtcaaggtgctgttgtcattgctttactggcttaggggatgggggatggggggtatatttttgtttgttttgtgtttttttttcgtttgtttgttttgttttttagttcccacagggagtagagatggggaaagaattcctacaatatatattctggctgataaaagatacatttgtatgttgtgaagatgtttgcaatatcgatcagatgactagaaagtgaataaaaattaaggcaactgaacaaaaaaatgctcacactccacatcccgtgatgcacctcccaggccccgctcattctttgggcgttggtcagagtaagctgcttttgacggaaggacctatgtttgctcagaacacattctttccccccctccccctctggtctcctctttgttttgttttaaggaagaaaaatcagttgcgcgttctgaaatattttaccactgctgtgaacaagtgaacacattgtgtcacatcatgacactcgtataagcatggagaacagtgatttttttttagaacagaaaacaacaaaaaataaccccaaaatgaagattattttttatgaggagtgaacatttgggtaaatcatggctaagcttaaaaaaaactcatggtgaggcttaacaatgtcttgtaagcaaaaggtagagccctgtatcaacccagaaacacctagatcagaacaggaatccacattgccagtgacatgagactgaacagccaaatggaggctatgtggagttggcattgcatttaccggcagtgcgggaggaatttctgagtggccatcccaaggtctaggtggaggtggggcatggtatttgagacattccaaaacgaaggcctctgaaggacccttcagaggtggctctggaatgacatgtgtcaagctgcttggacctcgtgctttaagtgcctacattatctaactgtgctcaagaggttctcgactggaggaccacactcaagccgacttatgcccaccatcccacctctggataattttgcataaaattggattagcctggagcaggttgggagccaaatgtggcatttgtgatcatgagattgatgcaatgagatagaagatgtttgctacctgaacacttattgctttgaaactagacttgaggaaaccagggtttatcttttgagaacttttggtaagggaaaagggaacaggaaaagaaaccccaaactcaggccgaatgatcaaggggacccataggaaatcttgtccagagacaagacttcgggaaggtgtctggacattcagaacaccaagacttgaaggtgccttgctcaatggaagaggccaggacagagctgacaaaattttgctccccagtgaaggccacagcaaccttctgcccatcctgtctgttcatggagagggtccctgcctcacctctgccattttgggttaggagaagtcaagttgggagcctgaaatagtggttcttggaaaaatggatccccagtgaaaactagagctctaagcccattcagcccatttcacacctgaaaatgttagtgatcaccacttggaccagcatccttaagtatcagaaagccccaagcaattgctgcatcttagtagggtgagggataagcaaaagaggatgttcaccataacccaggaatgaagataccatcagcaaagaatttcaatttgttcagtctttcatttagagctagtctttcacagtaccatctgaatacctctttgaaagaaggaagactttacgtagtgtagatttgttttgtgttgtttgaaaatattatctttgtaattatttttaatatgtaaggaatgcttggaatatctgctatatgtcaactttatgcagcttccttttgagggacaaatttaaaacaaacaaccccccatcacaaacttaaaggattgcaagggccagatctgttaagtggtttcataggagacacatccagcaattgtgtggtcagtggctcttttacccaataagatacatcacagtcacatgcttgatggtttatgttgacctaagatttattttgttaaaatctctctctgttgtgttcgttcttgttctgttttgttttgttttttaaagtcttgctgtggtctctttgtggcagaagtgtttcatgcatggcagcaggcctgttgcttttttatggcgattcccattgaaaatgtaagtaaatgtctgtggccttgttctctctatggtaaagatattattcaccatgtaaaacaaaaaacaatatttattgtattttagtatatttatataattatgttattgaaaaaaattggcattaaaacttaaccgcatcagaacctattgtaaatacaagttctatttaagtgtactaattaacatataatatatgttttaaatatagaatttttaatgtttttaaatatattttcaaagtacataaaaaaaaaaaaaaaaaa

SEQ ID NO: 13844 - DNA, 3972 bp, Homo sapiens
gctgccgccgccgcgcccgggcgcacccgcccgctcgctgtcccgcgcaccccgtagcgcctcgggctcccgggccggacagaggagccagcccggtgcgcccctccacctcctgctcggggggctttaatgagacacccaccgctgctgtggggccggcggggagcagcaccgcgacggggaccggggctgggcgctggagccagaatcggaaccacgatgtgactccgccgccggggacccgtgaggtttgtgtggaccccgagttccaccaggtgagaagagtgatgaccatccttttccttactatggttatttcatactttggttgcatgaaggctgcccccatgaaagaagcaaacatccgaggacaaggtggcttggcctacccaggtgtgcggacccatgggactctggagagcgtgaatgggcccaaggcaggttcaagaggcttgacatcattggctgacactttcgaacacgtgatagaagagctgttggatgaggaccagaaagttcggcccaatgaagaaaacaataaggacgcagacttgtacacgtccagggtgatgctcagtagtcaagtgcctttggagcctcctcttctctttctgctggaggaatacaaaaattacctagatgctgcaaacatgtccatgagggtccggcgccactctgaccctgcccgccgaggggagctgagcgtgtgtgacagtattagtgagtgggtaacggcggcagacaaaaagactgcagtggacatgtcgggcgggacggtcacagtccttgaaaaggtccctgtatcaaaaggccaactgaagcaatacttctacgagaccaagtgcaatcccatgggttacacaaaagaaggctgcaggggcatagacaaaaggcattggaactcccagtgccgaactacccagtcgtacgtgcgggcccttaccatggatagcaaaaagagaattggctggcgattcataaggatagacacttcttgtgtatgtacattgaccattaaaaggggaagatagtggatttatgttgtatagattagattatattgagacaaaaattatctatttgtatatatacataacagggtaaattattcagttaagaaaaaaataattttatgaactgcatgtataaatgaagtttatacagtacagtggttctacaatctatttattggacatgtccatgaccagaagggaaacagtcatttgcgcacaacttaaaaagtctgcattacattccttgataatgttgtggtttgttgccgttgccaagaactgaaaacataaaaagttaaaaaaaataataaattgcatgctgctttaattgtgaattgataataaactgtcctctttcagaaaacagaaaaaaaacacacacacacacaacaaaaatttgaaccaaaacattccgtttacattttagacagtaagtatcttcgttcttgttagtactatatctgttttactgcttttaacttctgatagcgttggaattaaaacaatgtcaaggtgctgttgtcattgctttactggcttaggggatgggggatggggggtatatttttgtttgttttgtgtttttttttcgtttgtttgttttgttttttagttcccacagggagtagagatggggaaagaattcctacaatatatattctggctgataaaagatacatttgtatgttgtgaagatgtttgcaatatcgatcagatgactagaaagtgaataaaaattaaggcaactgaacaaaaaaatgctcacactccacatcccgtgatgcacctcccaggccccgctcattctttgggcgttggtcagagtaagctgcttttgacggaaggacctatgtttgctcagaacacattctttccccccctccccctctggtctcctctttgttttgttttaaggaagaaaaatcagttgcgcgttctgaaatattttaccactgctgtgaacaagtgaacacattgtgtcacatcatgacactcgtataagcatggagaacagtgatttttttttagaacagaaaacaacaaaaaataaccccaaaatgaagattattttttatgaggagtgaacatttgggtaaatcatggctaagcttaaaaaaaactcatggtgaggcttaacaatgtcttgtaagcaaaaggtagagccctgtatcaacccagaaacacctagatcagaacaggaatccacattgccagtgacatgagactgaacagccaaatggaggctatgtggagttggcattgcatttaccggcagtgcgggaggaatttctgagtggccatcccaaggtctaggtggaggtggggcatggtatttgagacattccaaaacgaaggcctctgaaggacccttcagaggtggctctggaatgacatgtgtcaagctgcttggacctcgtgctttaagtgcctacattatctaactgtgctcaagaggttctcgactggaggaccacactcaagccgacttatgcccaccatcccacctctggataattttgcataaaattggattagcctggagcaggttgggagccaaatgtggcatttgtgatcatgagattgatgcaatgagatagaagatgtttgctacctgaacacttattgctttgaaactagacttgaggaaaccagggtttatcttttgagaacttttggtaagggaaaagggaacaggaaaagaaaccccaaactcaggccgaatgatcaaggggacccataggaaatcttgtccagagacaagacttcgggaaggtgtctggacattcagaacaccaagacttgaaggtgccttgctcaatggaagaggccaggacagagctgacaaaattttgctccccagtgaaggccacagcaaccttctgcccatcctgtctgttcatggagagggtccctgcctcacctctgccattttgggttaggagaagtcaagttgggagcctgaaatagtggttcttggaaaaatggatccccagtgaaaactagagctctaagcccattcagcccatttcacacctgaaaatgttagtgatcaccacttggaccagcatccttaagtatcagaaagccccaagcaattgctgcatcttagtagggtgagggataagcaaaagaggatgttcaccataacccaggaatgaagataccatcagcaaagaatttcaatttgttcagtctttcatttagagctagtctttcacagtaccatctgaatacctctttgaaagaaggaagactttacgtagtgtagatttgttttgtgttgtttgaaaatattatctttgtaattatttttaatatgtaaggaatgcttggaatatctgctatatgtcaactttatgcagcttccttttgagggacaaatttaaaacaaacaaccccccatcacaaacttaaaggattgcaagggccagatctgttaagtggtttcataggagacacatccagcaattgtgtggtcagtggctcttttacccaataagatacatcacagtcacatgcttgatggtttatgttgacctaagatttattttgttaaaatctctctctgttgtgttcgttcttgttctgttttgttttgttttttaaagtcttgctgtggtctctttgtggcagaagtgtttcatgcatggcagcaggcctgttgcttttttatggcgattcccattgaaaatgtaagtaaatgtctgtggccttgttctctctatggtaaagatattattcaccatgtaaaacaaaaaacaatatttattgtattttagtatatttatataattatgttattgaaaaaaattggcattaaaacttaaccgcatcagaacctattgtaaatacaagttctatttaagtgtactaattaacatataatatatgttttaaatatagaatttttaatgtttttaaatatattttcaaagtacataaaaaaaaaaaaaaaaaa

SEQ ID NO: 13845 - DNA, 4084 bp, Homo sapiens
gtgtgtaatccgggcgataggagtccattcagcaccttggacagagccaacggatttgtccgaggtggcggtacccccaggtagtcttcttggccccgctgtaaagccaaccctgtgtcgcccttaaaaagcgtcttttctgaggttcggctcacactgagatcggggctggagagagagtcagattttggagcggagcgtttggaaagcgagccccagtttggtcccctcattgagctcgctgaagttggcttcctagcggtgtaggctggaatagactcttggcaagctccgggttggtatactgggttaactttgggaaatgcaagtgtttatctccaggatctagccaccggggtggtgtaagccgcaaagaagttccaccaggtgagaagagtgatgaccatccttttccttactatggttatttcatactttggttgcatgaaggctgcccccatgaaagaagcaaacatccgaggacaaggtggcttggcctacccaggtgtgcggacccatgggactctggagagcgtgaatgggcccaaggcaggttcaagaggcttgacatcattggctgacactttcgaacacgtgatagaagagctgttggatgaggaccagaaagttcggcccaatgaagaaaacaataaggacgcagacttgtacacgtccagggtgatgctcagtagtcaagtgcctttggagcctcctcttctctttctgctggaggaatacaaaaattacctagatgctgcaaacatgtccatgagggtccggcgccactctgaccctgcccgccgaggggagctgagcgtgtgtgacagtattagtgagtgggtaacggcggcagacaaaaagactgcagtggacatgtcgggcgggacggtcacagtccttgaaaaggtccctgtatcaaaaggccaactgaagcaatacttctacgagaccaagtgcaatcccatgggttacacaaaagaaggctgcaggggcatagacaaaaggcattggaactcccagtgccgaactacccagtcgtacgtgcgggcccttaccatggatagcaaaaagagaattggctggcgattcataaggatagacacttcttgtgtatgtacattgaccattaaaaggggaagatagtggatttatgttgtatagattagattatattgagacaaaaattatctatttgtatatatacataacagggtaaattattcagttaagaaaaaaataattttatgaactgcatgtataaatgaagtttatacagtacagtggttctacaatctatttattggacatgtccatgaccagaagggaaacagtcatttgcgcacaacttaaaaagtctgcattacattccttgataatgttgtggtttgttgccgttgccaagaactgaaaacataaaaagttaaaaaaaataataaattgcatgctgctttaattgtgaattgataataaactgtcctctttcagaaaacagaaaaaaaacacacacacacacaacaaaaatttgaaccaaaacattccgtttacattttagacagtaagtatcttcgttcttgttagtactatatctgttttactgcttttaacttctgatagcgttggaattaaaacaatgtcaaggtgctgttgtcattgctttactggcttaggggatgggggatggggggtatatttttgtttgttttgtgtttttttttcgtttgtttgttttgttttttagttcccacagggagtagagatggggaaagaattcctacaatatatattctggctgataaaagatacatttgtatgttgtgaagatgtttgcaatatcgatcagatgactagaaagtgaataaaaattaaggcaactgaacaaaaaaatgctcacactccacatcccgtgatgcacctcccaggccccgctcattctttgggcgttggtcagagtaagctgcttttgacggaaggacctatgtttgctcagaacacattctttccccccctccccctctggtctcctctttgttttgttttaaggaagaaaaatcagttgcgcgttctgaaatattttaccactgctgtgaacaagtgaacacattgtgtcacatcatgacactcgtataagcatggagaacagtgatttttttttagaacagaaaacaacaaaaaataaccccaaaatgaagattattttttatgaggagtgaacatttgggtaaatcatggctaagcttaaaaaaaactcatggtgaggcttaacaatgtcttgtaagcaaaaggtagagccctgtatcaacccagaaacacctagatcagaacaggaatccacattgccagtgacatgagactgaacagccaaatggaggctatgtggagttggcattgcatttaccggcagtgcgggaggaatttctgagtggccatcccaaggtctaggtggaggtggggcatggtatttgagacattccaaaacgaaggcctctgaaggacccttcagaggtggctctggaatgacatgtgtcaagctgcttggacctcgtgctttaagtgcctacattatctaactgtgctcaagaggttctcgactggaggaccacactcaagccgacttatgcccaccatcccacctctggataattttgcataaaattggattagcctggagcaggttgggagccaaatgtggcatttgtgatcatgagattgatgcaatgagatagaagatgtttgctacctgaacacttattgctttgaaactagacttgaggaaaccagggtttatcttttgagaacttttggtaagggaaaagggaacaggaaaagaaaccccaaactcaggccgaatgatcaaggggacccataggaaatcttgtccagagacaagacttcgggaaggtgtctggacattcagaacaccaagacttgaaggtgccttgctcaatggaagaggccaggacagagctgacaaaattttgctccccagtgaaggccacagcaaccttctgcccatcctgtctgttcatggagagggtccctgcctcacctctgccattttgggttaggagaagtcaagttgggagcctgaaatagtggttcttggaaaaatggatccccagtgaaaactagagctctaagcccattcagcccatttcacacctgaaaatgttagtgatcaccacttggaccagcatccttaagtatcagaaagccccaagcaattgctgcatcttagtagggtgagggataagcaaaagaggatgttcaccataacccaggaatgaagataccatcagcaaagaatttcaatttgttcagtctttcatttagagctagtctttcacagtaccatctgaatacctctttgaaagaaggaagactttacgtagtgtagatttgttttgtgttgtttgaaaatattatctttgtaattatttttaatatgtaaggaatgcttggaatatctgctatatgtcaactttatgcagcttccttttgagggacaaatttaaaacaaacaaccccccatcacaaacttaaaggattgcaagggccagatctgttaagtggtttcataggagacacatccagcaattgtgtggtcagtggctcttttacccaataagatacatcacagtcacatgcttgatggtttatgttgacctaagatttattttgttaaaatctctctctgttgtgttcgttcttgttctgttttgttttgttttttaaagtcttgctgtggtctctttgtggcagaagtgtttcatgcatggcagcaggcctgttgcttttttatggcgattcccattgaaaatgtaagtaaatgtctgtggccttgttctctctatggtaaagatattattcaccatgtaaaacaaaaaacaatatttattgtattttagtatatttatataattatgttattgaaaaaaattggcattaaaacttaaccgcatcagaacctattgtaaatacaagttctatttaagtgtactaattaacatataatatatgttttaaatatagaatttttaatgtttttaaatatattttcaaagtacataaaaaaaaaaaaaaaaaa

SEQ ID NO: 13846 - DNA, 4016 bp, Homo sapiens
ggctgctctcgctgccgctccccccggcgaactagcatgaaatctccctgcctctgccgagatcaaatggagcttctcgctgatggggtgcgagtattacctccgccatgcaatttccactatcaataatttaacttctttgctgcagaacagaaggagtacataccgggcaccaaagactcgcgccccctcccccctttaattaagcgaagggaacgtgaaaaaataatagagtgtgggagttttggggccgaagtctttcccggagcagctgccttgatggttactttgacaagtagtgactgaaaagttccaccaggtgagaagagtgatgaccatccttttccttactatggttatttcatactttggttgcatgaaggctgcccccatgaaagaagcaaacatccgaggacaaggtggcttggcctacccaggtgtgcggacccatgggactctggagagcgtgaatgggcccaaggcaggttcaagaggcttgacatcattggctgacactttcgaacacgtgatagaagagctgttggatgaggaccagaaagttcggcccaatgaagaaaacaataaggacgcagacttgtacacgtccagggtgatgctcagtagtcaagtgcctttggagcctcctcttctctttctgctggaggaatacaaaaattacctagatgctgcaaacatgtccatgagggtccggcgccactctgaccctgcccgccgaggggagctgagcgtgtgtgacagtattagtgagtgggtaacggcggcagacaaaaagactgcagtggacatgtcgggcgggacggtcacagtccttgaaaaggtccctgtatcaaaaggccaactgaagcaatacttctacgagaccaagtgcaatcccatgggttacacaaaagaaggctgcaggggcatagacaaaaggcattggaactcccagtgccgaactacccagtcgtacgtgcgggcccttaccatggatagcaaaaagagaattggctggcgattcataaggatagacacttcttgtgtatgtacattgaccattaaaaggggaagatagtggatttatgttgtatagattagattatattgagacaaaaattatctatttgtatatatacataacagggtaaattattcagttaagaaaaaaataattttatgaactgcatgtataaatgaagtttatacagtacagtggttctacaatctatttattggacatgtccatgaccagaagggaaacagtcatttgcgcacaacttaaaaagtctgcattacattccttgataatgttgtggtttgttgccgttgccaagaactgaaaacataaaaagttaaaaaaaataataaattgcatgctgctttaattgtgaattgataataaactgtcctctttcagaaaacagaaaaaaaacacacacacacacaacaaaaatttgaaccaaaacattccgtttacattttagacagtaagtatcttcgttcttgttagtactatatctgttttactgcttttaacttctgatagcgttggaattaaaacaatgtcaaggtgctgttgtcattgctttactggcttaggggatgggggatggggggtatatttttgtttgttttgtgtttttttttcgtttgtttgttttgttttttagttcccacagggagtagagatggggaaagaattcctacaatatatattctggctgataaaagatacatttgtatgttgtgaagatgtttgcaatatcgatcagatgactagaaagtgaataaaaattaaggcaactgaacaaaaaaatgctcacactccacatcccgtgatgcacctcccaggccccgctcattctttgggcgttggtcagagtaagctgcttttgacggaaggacctatgtttgctcagaacacattctttccccccctccccctctggtctcctctttgttttgttttaaggaagaaaaatcagttgcgcgttctgaaatattttaccactgctgtgaacaagtgaacacattgtgtcacatcatgacactcgtataagcatggagaacagtgatttttttttagaacagaaaacaacaaaaaataaccccaaaatgaagattattttttatgaggagtgaacatttgggtaaatcatggctaagcttaaaaaaaactcatggtgaggcttaacaatgtcttgtaagcaaaaggtagagccctgtatcaacccagaaacacctagatcagaacaggaatccacattgccagtgacatgagactgaacagccaaatggaggctatgtggagttggcattgcatttaccggcagtgcgggaggaatttctgagtggccatcccaaggtctaggtggaggtggggcatggtatttgagacattccaaaacgaaggcctctgaaggacccttcagaggtggctctggaatgacatgtgtcaagctgcttggacctcgtgctttaagtgcctacattatctaactgtgctcaagaggttctcgactggaggaccacactcaagccgacttatgcccaccatcccacctctggataattttgcataaaattggattagcctggagcaggttgggagccaaatgtggcatttgtgatcatgagattgatgcaatgagatagaagatgtttgctacctgaacacttattgctttgaaactagacttgaggaaaccagggtttatcttttgagaacttttggtaagggaaaagggaacaggaaaagaaaccccaaactcaggccgaatgatcaaggggacccataggaaatcttgtccagagacaagacttcgggaaggtgtctggacattcagaacaccaagacttgaaggtgccttgctcaatggaagaggccaggacagagctgacaaaattttgctccccagtgaaggccacagcaaccttctgcccatcctgtctgttcatggagagggtccctgcctcacctctgccattttgggttaggagaagtcaagttgggagcctgaaatagtggttcttggaaaaatggatccccagtgaaaactagagctctaagcccattcagcccatttcacacctgaaaatgttagtgatcaccacttggaccagcatccttaagtatcagaaagccccaagcaattgctgcatcttagtagggtgagggataagcaaaagaggatgttcaccataacccaggaatgaagataccatcagcaaagaatttcaatttgttcagtctttcatttagagctagtctttcacagtaccatctgaatacctctttgaaagaaggaagactttacgtagtgtagatttgttttgtgttgtttgaaaatattatctttgtaattatttttaatatgtaaggaatgcttggaatatctgctatatgtcaactttatgcagcttccttttgagggacaaatttaaaacaaacaaccccccatcacaaacttaaaggattgcaagggccagatctgttaagtggtttcataggagacacatccagcaattgtgtggtcagtggctcttttacccaataagatacatcacagtcacatgcttgatggtttatgttgacctaagatttattttgttaaaatctctctctgttgtgttcgttcttgttctgttttgttttgttttttaaagtcttgctgtggtctctttgtggcagaagtgtttcatgcatggcagcaggcctgttgcttttttatggcgattcccattgaaaatgtaagtaaatgtctgtggccttgttctctctatggtaaagatattattcaccatgtaaaacaaaaaacaatatttattgtattttagtatatttatataattatgttattgaaaaaaattggcattaaaacttaaccgcatcagaacctattgtaaatacaagttctatttaagtgtactaattaacatataatatatgttttaaatatagaatttttaatgtttttaaatatattttcaaagtacataaaaaaaaaaaaaaaaaa

SEQ ID NO: 13847 - DNA, 4247 bp, Homo sapiens
gttccccaactgctgttttattgtgctattcatgcctagacatcacatagctagaaaggcccatcagacccctcaggccactgctgttcctgtcacacattcctgcaaaggaccatgttgctaacttgaaaaaaattactattaattacacttgcagttgttgcttagtaacatttatgattttgtgtttctcgtgacagcatgagcagagatcattaaaaattaaacttacaaagctgctaaagtgggaagaaggagaacttgaagccacaatttttgcacttgcttagaagccatctaatctcaggtttatatgctagatcttgggggaaacactgcatgtctctggtttatattaaaccacatacagcacactactgacactgatttgtgtctggtgcagctggagtttatcaccaagacataaaaaaaccttgaccctgcagaatggcctggaattacaatcagatgggccacatggcatcccggtgaaagaaagccctaaccagttttctgtcttgtttctgctttctccctacagttccaccaggtgagaagagtgatgaccatccttttccttactatggttatttcatactttggttgcatgaaggctgcccccatgaaagaagcaaacatccgaggacaaggtggcttggcctacccaggtgtgcggacccatgggactctggagagcgtgaatgggcccaaggcaggttcaagaggcttgacatcattggctgacactttcgaacacgtgatagaagagctgttggatgaggaccagaaagttcggcccaatgaagaaaacaataaggacgcagacttgtacacgtccagggtgatgctcagtagtcaagtgcctttggagcctcctcttctctttctgctggaggaatacaaaaattacctagatgctgcaaacatgtccatgagggtccggcgccactctgaccctgcccgccgaggggagctgagcgtgtgtgacagtattagtgagtgggtaacggcggcagacaaaaagactgcagtggacatgtcgggcgggacggtcacagtccttgaaaaggtccctgtatcaaaaggccaactgaagcaatacttctacgagaccaagtgcaatcccatgggttacacaaaagaaggctgcaggggcatagacaaaaggcattggaactcccagtgccgaactacccagtcgtacgtgcgggcccttaccatggatagcaaaaagagaattggctggcgattcataaggatagacacttcttgtgtatgtacattgaccattaaaaggggaagatagtggatttatgttgtatagattagattatattgagacaaaaattatctatttgtatatatacataacagggtaaattattcagttaagaaaaaaataattttatgaactgcatgtataaatgaagtttatacagtacagtggttctacaatctatttattggacatgtccatgaccagaagggaaacagtcatttgcgcacaacttaaaaagtctgcattacattccttgataatgttgtggtttgttgccgttgccaagaactgaaaacataaaaagttaaaaaaaataataaattgcatgctgctttaattgtgaattgataataaactgtcctctttcagaaaacagaaaaaaaacacacacacacacaacaaaaatttgaaccaaaacattccgtttacattttagacagtaagtatcttcgttcttgttagtactatatctgttttactgcttttaacttctgatagcgttggaattaaaacaatgtcaaggtgctgttgtcattgctttactggcttaggggatgggggatggggggtatatttttgtttgttttgtgtttttttttcgtttgtttgttttgttttttagttcccacagggagtagagatggggaaagaattcctacaatatatattctggctgataaaagatacatttgtatgttgtgaagatgtttgcaatatcgatcagatgactagaaagtgaataaaaattaaggcaactgaacaaaaaaatgctcacactccacatcccgtgatgcacctcccaggccccgctcattctttgggcgttggtcagagtaagctgcttttgacggaaggacctatgtttgctcagaacacattctttccccccctccccctctggtctcctctttgttttgttttaaggaagaaaaatcagttgcgcgttctgaaatattttaccactgctgtgaacaagtgaacacattgtgtcacatcatgacactcgtataagcatggagaacagtgatttttttttagaacagaaaacaacaaaaaataaccccaaaatgaagattattttttatgaggagtgaacatttgggtaaatcatggctaagcttaaaaaaaactcatggtgaggcttaacaatgtcttgtaagcaaaaggtagagccctgtatcaacccagaaacacctagatcagaacaggaatccacattgccagtgacatgagactgaacagccaaatggaggctatgtggagttggcattgcatttaccggcagtgcgggaggaatttctgagtggccatcccaaggtctaggtggaggtggggcatggtatttgagacattccaaaacgaaggcctctgaaggacccttcagaggtggctctggaatgacatgtgtcaagctgcttggacctcgtgctttaagtgcctacattatctaactgtgctcaagaggttctcgactggaggaccacactcaagccgacttatgcccaccatcccacctctggataattttgcataaaattggattagcctggagcaggttgggagccaaatgtggcatttgtgatcatgagattgatgcaatgagatagaagatgtttgctacctgaacacttattgctttgaaactagacttgaggaaaccagggtttatcttttgagaacttttggtaagggaaaagggaacaggaaaagaaaccccaaactcaggccgaatgatcaaggggacccataggaaatcttgtccagagacaagacttcgggaaggtgtctggacattcagaacaccaagacttgaaggtgccttgctcaatggaagaggccaggacagagctgacaaaattttgctccccagtgaaggccacagcaaccttctgcccatcctgtctgttcatggagagggtccctgcctcacctctgccattttgggttaggagaagtcaagttgggagcctgaaatagtggttcttggaaaaatggatccccagtgaaaactagagctctaagcccattcagcccatttcacacctgaaaatgttagtgatcaccacttggaccagcatccttaagtatcagaaagccccaagcaattgctgcatcttagtagggtgagggataagcaaaagaggatgttcaccataacccaggaatgaagataccatcagcaaagaatttcaatttgttcagtctttcatttagagctagtctttcacagtaccatctgaatacctctttgaaagaaggaagactttacgtagtgtagatttgttttgtgttgtttgaaaatattatctttgtaattatttttaatatgtaaggaatgcttggaatatctgctatatgtcaactttatgcagcttccttttgagggacaaatttaaaacaaacaaccccccatcacaaacttaaaggattgcaagggccagatctgttaagtggtttcataggagacacatccagcaattgtgtggtcagtggctcttttacccaataagatacatcacagtcacatgcttgatggtttatgttgacctaagatttattttgttaaaatctctctctgttgtgttcgttcttgttctgttttgttttgttttttaaagtcttgctgtggtctctttgtggcagaagtgtttcatgcatggcagcaggcctgttgcttttttatggcgattcccattgaaaatgtaagtaaatgtctgtggccttgttctctctatggtaaagatattattcaccatgtaaaacaaaaaacaatatttattgtattttagtatatttatataattatgttattgaaaaaaattggcattaaaacttaaccgcatcagaacctattgtaaatacaagttctatttaagtgtactaattaacatataatatatgttttaaatatagaatttttaatgtttttaaatatattttcaaagtacataaaaaaaaaaaaaaaaaa

SEQ ID NO: 13848 - DNA, 3555 bp, Homo sapiens
cgcggcagctgcgtccccatgaggaggggaggaagatgccggctgagctgctgctgctgctgattgttgccttcgccagccccagctgccaggtgctctcatcactgcgcatggctgcaatcctggatgatcagacagtgtgtggccgcggtgagcgtctggccttggccttggcccgggagcagatcaacgggatcatcgaggtcccagccaaggcccgagtggaagtagacatctttgagctgcagcgggacagccagtacgagaccacggacaccatgtgtcagatcttacccaaaggggttgtgtctgtccttgggccctcctctagcccagcatctgcctccaccgtgagccatatctgtggagagaaggagatcccccacatcaaggtgggtcccgaggagacaccccgccttcagtaccttcgcttcgcgtctgtcagcctgtaccccagtaacgaggacgtcagcttggcggtctcccgaatcctcaagtccttcaactacccctcggccagcctcatctgcgccaaggctgagtgcctgctgcgattggaggaactggtgcgtggcttcctcatctccaaggagacgctgtcagtgaggatgttggacgacagccgggaccccacaccactgctcaaggagatccgtgatgacaaggtgtccaccatcatcatcgacgccaacgcctccatctcccacctcatcctccgtaaggcctcggaactgggaatgacctcagcgttttacaagtacatcctcaccaccatggacttccccatcctgcatctggacggtattgtggaggactcctccaacatcctgggcttctccatgttcaacacgtcccaccccttctaccctgagtttgtccgcagcctcaacatgtcctggagggagaactgtgaagccagcacctacctgggccctgcgctgtcagccgccctgatgtttgacgccgtgcacgtggtggtgagcgctgtccgagagctgaaccgcagccaggagatcggtgtgaagcctctggcctgtacatcggccaacatttggccccacgggaccagcctcatgaactacctgcgcatggtagagtatgatgggctgaccgggcgggtcgagttcaacagcaaagggcagagaaccaactacaccctgcgcatcctagaaaagtcccggcagggccaccgtgagattggggtgtggtactctaaccgcaccctggccatgaatgccaccaccctggacatcaacctgtcgcagacactggccaacaagaccctggtggtcacaaccatcctggagaacccatacgtcatgcgccggcccaacttccaggccctgtcggggaacgaacgcttcgagggcttctgcgtggacatgctgcgggagctggccgagctgctgcgcttccgctaccgcctgcggttggtggaggatgggctgtacggggcgcccgagcccaacggctcctggacgggcatggttggcgagctcatcaaccggaaggcagacctggctgtggccgccttcaccatcacagctgagcgggagaaggtcatcgacttttccaagccctttatgaccctggggatcagcatcctctaccgagtgcacatgggccgcaagcctggctacttctccttcctggaccccttctcccctgctgtgtggctcttcatgcttcttgcctacctggctgtcagctgcgtcctgtttctggctgccaggctgagcccctatgagtggtataacccacacccatgcctgcgggcacgcccccacatcctggagaaccagtacacgctgggcaacagcctgtggtttcccgtggggggcttcatgcagcagggctcggagatcatgccccgggcgctgtccacgcgctgtgtcagcggagtctggtgggccttcaccttgatcatcatctcctcctacacggccaacctggccgccttcctcaccgtgcagcgcatggaggtgcctgtggagtcggccgatgacctggcagatcagaccaacatcgagtatggcaccatccacgccggctccaccatgaccttcttccagaattcacggtaccaaacgtaccagcgcatgtggaactacatgcagtcgaagcagcccagcgtgttcgtcaagagcacagaagagggcattgcccgcgtcctcaactcccgctacgccttcctgctcgagtccaccatgaacgaataccaccggcgcctcaactgcaacctcacccagatcgggggactcctcgacaccaagggctacggcattggcatgccgctgggctccccgttccgggatgagatcacactggccatcctgcagcttcaggagaacaaccggctggagatcctgaagcgcaagtggtgggaggggggccggtgccccaaggaggaggaccatcgagctaaaggtttgggcatggagaacattggtggcatttttatcgtgctcatctgtggcctcatcattgctgtcttcgtggcggtcatggaattcatatggtccacacggaggtcagctgagtccgaggaggtgtcggtgtgccaggagatgctgcaggagctgcgccacgccgtttcttgccgcaagacgtcgcgttcccgccggcgccgacgcccgggcggcccgagccgggccctgctgtcactgcgcgcggtccgcgagatgcgcctcagcaacggcaagctctactcggccggcgcgggcggggatgcgggcagcgcgcacgggggcccgcagcgcctcctggacgacccggggccccccagcggagcccgacccgccgcccccaccccctgcacccacgtgcgcgtctgccaggagtgccggcgcatccaggcgctgcgggcctcgggggccggcgcgcctccgcgtggcctgggcgtccccgccgaagccaccagcccgccccggccgcggcctggccccgccggcccccgggagctggcggagcacgagtgaccacgggcggggctgtgcgggcgcccggactgaccgaagggacggggcccgccccaggccccagcagtctccgctcccgcagcgggcgcgggacaggacttgtgcgccggcgccccggacgccgcgattttgcctttggttccccgcgaagtccgaggcctggctctggagcccgcctgcgccccccagtggactcgcgagagggtgccgcgggcgagaagggcgcaggaaccgaggactccaggggctggggacttcgggggcggctctgggaagcggaaagcagtcagcggagaggaccccattctgggactgctcaggctccccaagacttgacgcagccccccacgcttctggaggtggggagggcctctggacagatgggtgtcccctggtgcccctccactcttctcttcctctcttttttggggggagaaacctcggaatttctatgagacctcccccagggagggggtcagttgggcccccatccctccccttgccacatcgcagcccctgttggaataaaaaaaagaacaaaaccccagaaaaaaaaaaaaaaaaaaaaaaaaaaaaa

SEQ ID NO: 13849 - DNA, 2189 bp, Homo sapiens
cctagcgctcctctccggcttccaccagcccatcgctccacgctctcttggctgctgcagtctcggtctctctctctctctctctctctctctctctctctctctctctctctctctctctctctctctctctctcccaagtttcctatctcgtcaagatcagggcaaaagaagaaaacaccgaattctgcttgccgtttcagagcggcggtgatgaagacaaaattgaacatctacaacatcgagttcctgctttttgttttcttggtgtgggaccctgccaggttggtgctggctaacatccaagaagatgaggctaaaaataacattaccatctttacgagaattcttgacagacttctggatggttacgataatcggcttagaccaggactgggagacagtattactgaagtcttcactaacatctacgtgaccagttttggccctgtctcagatacagatatggaatatacaattgatgttttctttcgacaaaaatggaaagatgaacgtttaaaatttaaaggtcctatgaatatccttcgactaaacaatttaatggctagcaaaatctggactccagataccttttttcacaatgggaagaaatcagtagctcataatatgacaatgccaaataagttgcttcgaattcaggatgatgggactctgctgtataccatgaggcttacagttcaagctgaatgcccaatgcacttggaggatttcccaatggatgctcattcatgtcctctgaaatttggcagctatgcatatacaacttcagaggtcacttatatttggacttacaatgcatctgattcagtacaggttgctcctgatggctctaggttaaatcaatatgacctgctgggccaatcaatcggaaaggagacaattaaatccagtacaggtgaatatactgtaatgacagctcatttccacctgaaaagaaaaattgggtattttgtgattcaaacctatctgccttgcatcatgactgtcattctctcccaagtttcattctggcttaacagagaatctgtgcctgcaagaactgtgtttggagtaacaactgtcctaacaatgacaactctaagcatcagtgctcggaattctctccccaaagtggcttatgcaactgccatggactggtttattgctgtttgttatgcatttgtgttctctgccctaattgaatttgcaactgttaattacttcaccaaaagaggatggacttgggatgggaagagtgtagtaaatgacaagaaaaaagaaaaggcttccgttatgatacagaacaacgcttatgcagtggctgttgccaattatgccccgaatctttcaaaagatccagttctctccaccatctccaagagtgcaaccacgccagaacccaacaagaagccagaaaacaagccagctgaagcaaagaaaactttcaacagtgttagcaaaattgacagaatgtccagaatagtttttccagttttgtttggtacctttaatttagtttactgggctacatatttaaacagagaacctgtattaggggtcagtccttgaattgagacccatgttatctttgggatgtatagcaacattaaatttggtttgttttgctatgtacagtctgactaataactgctaatttgtgatccaacatgtacagtatgtatatagtgacatagcttaccagtagacctttaatggagacatgcatttgctaactcatggaactgcagacagaaagcactccatgcgaaaacagccattgccttttttaaagatttaccctaggacctgatttaaagtgaatttcaagtgacctgattaatttcctattcttccaaatgagatgaaaatggggatcctgtacaaccctttgtggacccttttggtttagctcttaagtaggggtattttctactgttgcttaattatgatggaagataacattgtcattcctagatgaatcctttgaagtaacaaacattgtatctgacatcagctctgttcatgagtgctcagagtccctgctaatgtaattggaagcttggtacacataagaaaaactagagatttgaaatctagctatgaattactctatatagtatctatagccatgtacatattacagcatgacaagctcgaaataattatgagtcagcccgaaagatgttaat

SEQ ID NO: 13850 - DNA, 6103 bp, Homo sapiens
cgccaggtcgcgcacagcgccccgagcccaggcgcctccccgcccccctcccgcgctccgcggcggcggcggcggcggcagcagtagcagcaatatggctgttgatgggtgtttggggtggcgctggcggcgggaggagctcccccgagcccctgcgccggctgcccgttgctagctatggcaaatggtggcggcggcggcggcggcagcagcggcggcggcggcggcggcggaggcagcagtcttagaatgagtagcaatatccacgcgaaccatctcagcctagacgcgtcctcctcctcctcctcctcctcttcctcttcttcttcttcctcctcctcttcctcctcgtcctcggtccacgagcccaagatggatgcgctcatcatcccggtgaccatggaggtgccgtgcgacagccggggccaacgcatgtggtgggctttcctggcctcctccatggtgactttcttcgggggcctcttcatcatcttgctctggcggacgctcaagtacctgtggaccgtgtgctgccactgcgggggcaagacgaaggaggcccagaagattaacaatggctcaagccaggcggatggcactctcaaaccagtggatgaaaaagaggaggcagtggccgccgaggtcggctggatgacctccgtgaaggactgggcgggggtgatgatatccgcccagacactgactggcagagtcctggttgtcttagtctttgctctcagcatcggtgcacttgtaatatacttcatagattcatcaaacccaatagaatcctgccagaatttctacaaagatttcacattacagatcgacatggctttcaacgtgttcttccttctctacttcggcttgcggtttattgcagccaacgataaattgtggttctggctggaagtgaactctgtagtggatttcttcacggtgccccccgtgtttgtgtctgtgtacttaaacagaagttggcttggtttgagatttttaagagctctgagactgatacagttttcagaaattttgcagtttctgaatattcttaaaacaagtaattccatcaagctggtgaatctgctctccatatttatcagcacgtggctgactgcagccgggttcatccatttggtggagaattcaggggacccatgggaaaatttccaaaacaaccaggctctcacctactgggaatgtgtctatttactcatggtcacaatgtccaccgttggttatggggatgtttatgcaaaaaccacacttgggcgcctcttcatggtcttcttcatcctcgggggactggccatgtttgccagctacgtccctgaaatcatagagttaataggaaaccgcaagaaatacgggggctcctatagtgcggttagtggaagaaagcacattgtggtctgcggacacatcactctggagagtgtttccaacttcctgaaggactttctgcacaaggaccgggatgacgtcaatgtggagatcgtttttcttcacaacatctcccccaacctggagcttgaagctctgttcaaacgacattttactcaggtggaattttatcagggttccgtcctcaatccacatgatcttgcaagagtcaagatagagtcagcagatgcatgcctgatccttgccaacaagtactgcgctgacccggatgcggaggatgcctcgaatatcatgagagtaatctccataaagaactaccatccgaagataagaatcatcactcaaatgctgcagtatcacaacaaggcccatctgctaaacatcccgagctggaattggaaagaaggtgatgacgcaatctgcctcgcagagttgaagttgggcttcatagcccagagctgcctggctcaaggcctctccaccatgcttgccaacctcttctccatgaggtcattcataaagattgaggaagacacatggcagaaatactacttggaaggagtctcaaatgaaatgtacacagaatatctctccagtgccttcgtgggtctgtccttccctactgtttgtgagctgtgttttgtgaagctcaagctcctaatgatagccattgagtacaagtctgccaaccgagagagccgtatattaattaatcctggaaaccatcttaagatccaagaaggtactttaggatttttcatcgcaagtgatgccaaagaagttaaaagggcatttttttactgcaaggcctgtcatgatgacatcacagatcccaaaagaataaaaaaatgtggctgcaaacggcttgaagatgagcagccgtcaacactatcaccaaaaaaaaagcaacggaatggaggcatgcggaactcacccaacacctcgcctaagctgatgaggcatgaccccttgttaattcctggcaatgatcagattgacaacatggactccaatgtgaagaagtacgactctactgggatgtttcactggtgtgcacccaaggagatagagaaagtcatcctgactcgaagtgaagctgccatgaccgtcctgagtggccatgtcgtggtctgcatctttggcgacgtcagctcagccctgatcggcctccggaacctggtgatgccgctccgtgccagcaactttcattaccatgagctcaagcacattgtgtttgtgggctctattgagtacctcaagcgggaatgggagacgcttcataacttccccaaagtgtccatattgcctggtacgccattaagtcgggctgatttaagggctgtcaacatcaacctctgtgacatgtgcgttatcctgtcagccaatcagaataatattgatgatacttcgctgcaggacaaggaatgcatcttggcgtcactcaacatcaaatctatgcagtttgatgacagcatcggagtcttgcaggctaattcccaagggttcacacctccaggaatggatagatcctctccagataacagcccagtgcacgggatgttacgtcaaccatccatcacaactggggtcaacatccccatcatcactgaactagtgaacgatactaatgttcagtttttggaccaagacgatgatgatgaccctgatacagaactgtacctcacgcagccctttgcctgtgggacagcatttgccgtcagtgtcctggactcactcatgagcgcgacgtacttcaatgacaatatcctcaccctgatacggaccctggtgaccggaggagccacgccggagctggaggctctgattgctgaggaaaacgcccttagaggtggctacagcaccccgcagacactggccaatagggaccgctgccgcgtggcccagttagctctgctcgatgggccatttgcggacttaggggatggtggttgttatggtgatctgttctgcaaagctctgaaaacatataatatgctttgttttggaatttaccggctgagagatgctcacctcagcacccccagtcagtgcacaaagaggtatgtcatcaccaacccgccctatgagtttgagctcgtgccgacggacctgatcttctgcttaatgcagtttgaccacaatgccggccagtcccgggccagcctgtcccattcctcccactcgtcgcagtcctccagcaagaagagctcctctgttcactccatcccatccacagcaaaccgacagaaccggcccaagtccagggagtcccgggacaaacagaagtacgtgcaggaagagcggctttgatatgtgtatccaccgccactgtgtgaaactgtatctgccactcatttccccagttggtgtttccaacaaagtaactttccctgttttcccctgtagtccccccctttttttttacacatatttgcatatgtatgatagtgtgcatgtggttgtcatttttatttcaccaccataaaacccttgagcacaacagcaaataagcagacggaccaaaagttatttatgattctgggggaaaaataacccaaaggcatgctccagacataaatagctcactgcaggaacgagttcacagattagaagggagcacttgtgatcaacgtcagttaggcagagcaagtttatttaatgtaaaagaaaagttgattctgatttatcaggattatcagggtgctttgggttttgattttgttgttgttgttgttttcctttctttctttttttatacacacaataagttagcacatgtttatttgaaacaagcaaccaaacagcaatgaaaacatattgattgtttccagtctctgggccgaagtattgcgaagcatttgaaaagctttcacgatttgtgtagatgattatgaaggacctgcttgttgcaagagaacatcagtgatttttttagttactcaccaaggccttttgtcccagagccagttccctctgggagttcttatgaacatttctcaccttaatatggaggagagaatagtattccaatcatggatgtatcaaattctagtcatttagtttaagtgaaaagaggtttgattgcatattaaattgttattctgtctccttatgttgccatatgaatagctattttttttctttcacttttgacatttgggatgaaaagccatatgtatcataaatatcagatgtaagtcattaaaaactgccttcctgggacttttacatcttttaaaaggtgaattacttaccttatgtacagaataaataatgctcaggaaagagcaagtatttttccatgcattctcaggggatctttttactcccctttgtttgattagttagggccccaatgccaggtaggaggaagggctggggcaatggtagagtgagaggaagacaaacccagctgcagatcatgcttttctaggagccgacatgctaaataaattagaatgtaggaggatcagccacagttgactcaacaaagacaaaagccagccaccaccttcaactgttggcacagctgtgcggtgctggctgtcccaatgcagaaagctggtgggaaggaattcctcatcatcactttctttaatgtagccaatttaggcagggtaatgacggcaatagagagctgctccttgtcattatgagacgtgggataagaagagtgcaacagtgagccaaacacattttggtatagttatttttttcttcttttgttttctttcttttttaacacttagtaagcatgagaggagaggtagaaaaatacccttttttcaacatatagttgtcagatgctttgtgcatgcaaatcatgctttaggcagtgcggtatttcttaaaaactggccaattcaccataaccaatttcccttatggatggactaggctggtatatacatatttgaaaagttttacttcaaagaattccatcgaatagaataggggtaaaagggaggaggaaaacatgtcacagctgtaccatctctaaaaaggtgtttttatggtgaatgttttggatttagattttggatcccccgtcccctcaagcatgatagttttggatatttgcttgctgtgtgaattgacaagcacttttactgacaaatggtgaggctcagtcagaacctccaccctcccccacaccaaagacaggggcagcgtagtattcaaaccagtattgtggtggggaataattgtatacatgtaaattatcaagccctatgagtggaagaattttttcaaattatttttgtccctctatatattgatttatattatgtataactatctctttatataaactatatataattatatatatataactatataattatatatatataactatatatataactatatatatgtatcccctagtattggatcatgaagagctcttcatgcattctttgcaaaggaggttataaagttacgccctcagaacatttataactataagaatgtgccagttaaagtgctcaacaggaaatatgacagtttaaaagcattgtaaaactcacatagcttacttctctctctaaagtgcaacaaggatgaatagaatgggccaaggtatgacaattaatggttctgcatgacctagccactgctgggggttttcttctataacgttgtccttgtgaaaacttttgtgaaattaaaaaaaaaggagttacaaatttta

SEQ ID NO: 13851 - DNA, 3459 bp, Homo sapiens
ctcaatcagctttatgcagagaagaagcttactgagctcactgctggtgctggtgtaggcaagtgctgctttggcaatctgggctgacctggcttgtctcctcagaactccttctccaaccctggagcaggcttccatgctgctgtgggcgtccttgctggcctttgctccagtctgtggacaatctgcagctgcacacaaacctgtgatttccgtccatcctccatggaccacattcttcaaaggagagagagtgactctgacttgcaatggatttcagttctatgcaacagagaaaacaacatggtatcatcggcactactggggagaaaagttgaccctgaccccaggaaacaccctcgaggttcgggaatctggactgtacagatgccaggcccggggctccccacgaagtaaccctgtgcgcttgctcttttcttcagactccttaatcctgcaggcaccatattctgtgtttgaaggtgacacattggttctgagatgccacagaagaaggaaagagaaattgactgctgtgaaatatacttggaatggaaacattctttccatttctaataaaagctgggatcttcttatcccacaagcaagttcaaataacaatggcaattatcgatgcattggatatggagatgagaatgatgtatttagatcaaatttcaaaataattaaaattcaagaactatttccacatccagagctgaaagctacagactctcagcctacagaggggaattctgtaaacctgagctgtgaaacacagcttcctccagagcggtcagacaccccacttcacttcaacttcttcagagatggcgaggtcatcctgtcagactggagcacgtacccggaactccagctcccaaccgtctggagagaaaactcaggatcctattggtgtggtgctgaaacagtgaggggtaacatccacaagcacagtccctcgctacagatccatgtgcagcggatccctgtgtctggggtgctcctggagacccagccctcagggggccaggctgttgaaggggagatgctggtccttgtctgctccgtggctgaaggcacaggggataccacattctcctggcaccgagaggacatgcaggagagtctggggaggaaaactcagcgttccctgagagcagagctggagctccctgccatcagacagagccatgcagggggatactactgtacagcagacaacagctacggccctgtccagagcatggtgctgaatgtcactgtgagagagaccccaggcaacagagatggccttgtcgccgcgggagccactggagggctgctcagtgctcttctcctggctgtggccctgctgtttcactgctggcgtcggaggaagtcaggagttggtttcttgggagacgaaaccaggctccctcccgctccaggcccaggagagtcctcccattccatctgccctgcccaggtggagcttcagtcgttgtatgttgatgtacaccccaaaaagggagatttggtatactctgagatccagactactcagctgggagaagaagaggaagctaatacctccaggacacttctagaggataaggatgtctcagttgtctactctgaggtaaagacacaacacccagataactcagctggaaagatcagctctaaggatgaagaaagttaagagaatgaaaagttacgggaacgtcctactcatgtgatttctcccttgtccaaagtcccaggcccagtgcagtccttgcggcacctggaatgatcaactcattccagctttctaattcttctcatgcatatgcattcactcccaggaatactcattcgtctactctgatgttgggatggaatggcctctgaaagacttcactaaaatgaccaggatccacagttaagagaagaccctgtagtatttgctgtgggcctgacctaatgcattccctagggtctgctttagagaagggggataaagagagagaaggactgttatgaaaaacagaagcacaaattttggtgaattgggatttgcagagatgaaaaagactgggtgacctggatctctgcttaatacatctacaaccattgtctcactggagactcacttgcatcagtttgtttaactgtgagtggctgcacaggcactgtgcaaacaatgaaaagccccttcacttctgcctgcacagcttacactgtcaggattcagttgcagattaaagaacccatctggaatggtttacagagagaggaatttaaaagaggacatcagaagagctggagatgcaagctctaggctgcgcttccaaaagcaaatgataattatgttaatgtcattagtgacaaagatttgcaacattagagaaaagagacacaaatataaaattaaaaacttaagtaccaactctccaaaactaaatttgaacttaaaatattagtataaactcataataaactctgcctttaaaaaaagataaatatttcctacgtctgttcactgaaataattaccaaccccttagcaataagcactccttgcagagaggttttattctctaaataccattcccttctcaaaggaaataaggttgcttttcttgtaggaactgtgtctttgagttactaattagtttatatgagaataattcttgcaataaatgaagaaggaataaaagaaataggaagccacaaatttgtatggatatttcatgatacacctactggttaaataattgacaaaaaccagcagccaaatattagaggtctcctgatggaagtgtacaataccacctacaaattatccatgccccaagtgttaaaactgaatccattcaagtctttctaactgaatacttgttttatagaaaatgcatggagaaaaggaatttgtttaaataacattatgggattgcaaccagcaaaacataaactgagaaaaagttctatagggcaaatcacctggcttctataacaaataaatgggaaaaaaatgaaataaaaagaagagagggaggaagaaagggagagagaagaaaagaaaaatgaagaaaagtaattagaatattttcaacataaagaaaagacgaatatttaaggtgacagatatcccaactacgctgatttgatctttacaaattatatgagtgtatgaatttgtcacatgtatcacccccaaaaaaagagaaaaagaaaaatagaagacatataaattaaatgagacgagacatgtcgaccaaaaggaatgtgtgggtcttgtttggatcctgactcaaattaagaaaaaataaaactacctacgaaatactaagaaaaatttgtatactaatattaagaaattgttgtgtgttttggatataagtgatagtttattgtagtgatgtttttataaaagcaaaaggatattcactttcagcgcttatactgaagtattagattaaagcttattaacgta

SEQ ID NO: 13852 - DNA, 4919 bp, Homo sapiens
agcggactgtagagaagatttttattttttgtttcattaacagattattataaagcaaaaagcatgcagaaaaagaagcagacgttttacattgggaattaatgaaagcgtgtctgctagttttgggtaggagaactgggaagttgttgcttaaaattttatatcacctccacaaacaaaactcttcggaaatggtaaaataagaaaatgcatgattctagaggcattcctaagcacccacgtgtcaggctttgtggtgtctgtggtatcatccgaccgtttggactggttagggcttactgagagctccatttctggaaagccttacaagactgaggaatatcagactgcgaatcaccgggaacggttcctttgcagcacagaagcaatctctctccccatcttcgcatattctgatggcaaaacaagtggaagaaaagaggaagcatgactgcagatcagatcagttctctttgtggattatattttcagtaaaatgtatggatctatcttttccttgttcttatatctagatcatgagacttgactgaggctgtatccttatcctccatccatctatggcgaactatagccatgcagctgacaacattttgcaaaatctctcgcctctaacagcctttctgaaactgacttccttgggtttcataataggagtcagcgtggtgggcaacctcctgatctccattttgctagtgaaagataagaccttgcatagagcaccttactacttcctgttggatctttgctgttcagatatcctcagatctgcaatttgtttcccatttgtgttcaactctgtcaaaaatggctctacctggacttatgggactctgacttgcaaagtgattgcctttctgggggttttgtcctgtttccacactgctttcatgctcttctgcatcagtgtcaccagatacttagctatcgcccatcaccgcttctatacaaagaggctgaccttttggacgtgtctggctgtgatctgtatggtgtggactctgtctgtggccatggcatttcccccggttttagacgtgggcacttactcattcattagggaggaagatcaatgcgccttccaacaccgctccttcagggctaatgattccttaggatttatgctgcttcttgctctcatcctcctagccacacagcttgtctacctcaagctgatatttttcgtccacgatcgaagaaaaatgaagccagtccagtttgtagcagcagtcagccagaactggacttttcatggtcctggagccagtggccaggcagctgccaattggctagcaggatttggaaggggtcccacaccacccaccttgctgggcatcaggcaaaatgcaaacaccacaggcagaagaaggctattggtcttagacgagttcaaaatggagaaaagaatcagcagaatgttctatataatgacttttctgtttctaaccttgtggggcccctacctggtggcctgttattggagagtttttgcaagagggcctgtagtaccagggggatttctaacagctgctgtctggatgagttttgcccaagcaggaatcaatccttttgtctgcattttctcaaacagggagctgaggcgctgtttcagcacaacccttctttactgcagaaaatccaggttaccaagggaaccttactgtgttatatgagggagcatctgtaaatctttagccttgtgaaaactaaccttctctgctgagcaattgtggcccatagccatattttgagaagaaattcaagaatggaatcagcagttttaaggatttgggcaacattctgcagtctttgcaatagttcacctataatcctattttaaatctcagagtgatcctgctgactgccagcaaaggtttgtaattaagaagggactgaaccactgccctaagtttctttatgtggtcaaaaactagataatgaaagtagcaggtgctaagtatcagtgctaaatgctctgtatgtcactacatatgaaaaaacatcaaaaaacaattagcattggacatcttaataaattaagttgacatgaggtaaatgtgttgataaaaactaattttagaagtttgaagactttaaaacatttcatactactattgttttgcaaagactaaaatatttggggacttaaagtactgtaatccactaaagacgtgccaatgaattattggaatatcacactttaaaaaccgccttgtaagttctggggagcattccaaagcagtatattggttccaattagagtttactttttttgtattaatacattgctatttctaaataccactttcctcatctactagtaagattgctagcattgaactgtattatgtggtttttgttgatttggtataaagtttttccaattcatttatattttacaaatgctagatattggtctgggaggcaacattaatggtaccagcctgtcacaactgagcagttctaataatgcagaataaatacatgttgccttaaagggttatctagtatccttcatcttatttagcactggagcaaatagccaagggaaatcaaatcagtaactggtcatggtcatgcatctaaaagtgcatggaagatcatttattactttttccttttttctcacatggtttgaaacttaaagtgcacatcactgaaataatgagattttcttctacggtgtgctaccctttctaaactgttctaagaagcaggcagttgatgtatgtttatattttaagtcagctgtcaaggggagaccacagccttagtatgacatcctgcacaatttgtgaagcatttattctactgaaggcacagtcttgtttatactttctgcacattcagtgtattggtaatttaaattatttcagttttaacttgtgaaagcttatattatgatttctggtattttagaaatacattagagtctgtgagtctcattctttaagatacagatatgtgaacttcaatataaagttgcatttgccaaaatttacccgtgtagcctgttaattttcttgaaataagttttacatttttggcacataacaacgttttttttaatttgggaggcaagcacaaactaggaagactagctttattatggttttgctttttgattcttgtagctactatattccagactggaaatgtatgaatgataatcaacataatgctgataaactgacataatattatctgtaaaagcattatttggtagtttattataatcatccctctattattcttaaatgccagtagtatttagagatgtgtacctgcttagttaattggctcagaattttaatataaacatcacactttaatttggagcatagtaccatagaaatttggggttctaaatatacaacttgtaagaagaatggtttacactaacattatgacaaaactagaaaaagttattatttttgtttgctttctgttgttttgtttattggttggtttttgtgaagtttatttttttttggtatttgataattaagattaggaatctaataacacagaattccatattgctatagtacttctgtaaagagaatatcaatataaataaggaaaataaatcaatgaaatgtttcaatgatatatgcaactattcagttttgctcttataaggacagctcaagccatgaattagtgagcattctgacctcatttttactttacaccaaagttgattagatctgagacaaaatttaatgcacaacagtgagttggatctagcaataaagtctccttggtactgaaatcattatctaaaataaaggaaatgttatcaaaagatgttctgataacattgtgattgtaactcaaaaaaatttatagtagaaacgtaattgcaatgatgataataactaactctgcttagaggttcaaatatcaccagcaatcagtaaaaaattcagcaataatcttaaggccagagagaacaggttcaccattgcatagacaagaaaacagatatgggttaagagttggggactgaggagtcaagagcaacggccacgtgaagctgcctgactccacctagctatttggaataaccgattcccacagttttggtaagaaaccagccccagtaatcagtaagtcaggctgaactgcagtgacttttatttaagcctactcctgactaacttggcatttgcaggtcaagcaggaagcagttgacaagacacatcctcagtgaatcaatgccatttgtaactcaactggtaacagtagtaatcatacaaaataaaaacctgcttcagtgtcttaatgaccaaatcacattatctattttagcactcattccaaaattcagtatttaatgtaattaatctttaatccataaaaatacatccccactgtagcggggcagggggtgtccaacttccctgtgagactgattatcaataataatgtgtctccctcttggactgagcacacatctgagctgaacggcctttaaattgtttttcataatagtggtgatatgtttgcttggatacgtctgtactatttcatctggttcattttgcatgtaatagatttatctgtgagatgcctggctgaagctaggcattcagtctgtgactgtggaatcctatgcaggtattaaccaaggcagaaagaggtgagtaacttgcccatttctccacagagaccccatttaaataacacaaaattgaccatagtgattagatgaaaaaattatttgtagataggataatctattgactgaattatcttttgcagatatcagctggttggatttctcaccaggattgtctatagaagttaactgatttatgattgttaacacataaatatggccacttatccatttgcctcaacttcaaaaaaaaaaaaaaagaaaaaaaaaaaaaaaa

SEQ ID NO: 13853 - DNA, 1770 bp, Homo sapiens
gaggagtggattacatattccaacagttgttattacattggtaaggaaagaagaacttgggaagaaagagtttgctggcctgtgcttcgaagaactctgatctgctttctatagataatgaggaagaaatggtatgtgtggggacttcccagttggctgtaagttgccatttgaactaaacgaaatagatcaggaactgaggacatatctaaattttctagttttatagaaggcttttatccacaagaatcaagatcttccctctctgagcaggaatcctttgtgcattgaagactttagattcctctctgcggtagacgtgcacttataagtatttgatggggtggattcgtggtcggaggtctcgacacagctgggagatgagtgaatttcataattataacttggatctgaagaagagtgatttttcaacacgatggcaaaagcaaagatgtccagtagtcaaaagcaaatgtagagaaaatgcatctccattttttttctgctgcttcatcgctgtagccatgggaatccgtttcattattatggtagcaatatggagtgctgtattcctaaactcattattcaaccaagaagttcaaattcccttgaccgaaagttactgtggcccatgtcctaaaaactggatatgttacaaaaataactgctaccaattttttgatgagagtaaaaactggtatgagagccaggcttcttgtatgtctcaaaatgccagccttctgaaagtatacagcaaagaggaccaggatttacttaaactggtgaagtcatatcattggatgggactagtacacattccaacaaatggatcttggcagtgggaagatggctccattctctcacccaacctactaacaataattgaaatgcagaagggagactgtgcactctatgcctcgagctttaaaggctatatagaaaactgttcaactccaaatacatacatctgcatgcaaaggactgtgtaaagatgatcaaccatctcaataaaagccaggaacagagaagagattacaccagcggtaacactgccaaccgagactaaaggaaacaaacaaaaacaggacaaaatgaccaaagactgtcagatttcttagactccacaggaccaaaccatagaacaatttcactgcaaacatgcatgattctccaagacaaaagaagagagatcctaaaggcaattcagatatccccaaggctgcctctcccaccacaagcccagagtggatgggctgggggaggggtgctgttttaatttctaaaggtaggaccaacacccaggggatcagtgaaggaagagaaggccagcagatcagtgagagtgcaaccccaccctccacaggaaattgcctcatgggcagggccacagcagagagacacagcatgggcagtgccttccctgcctgtgggggtcatgctgccacttttaatgggtcctccacccaacggggtcagggaggtggtgctgccccagtgggccatgattatcttaaaggcattattctccagccttaagatcttaggacgtttcctttgctatgatttgtacttgcttgagtcccatgactgtttctcttcctctctttcttccttttggaatagtaatatccatcctatgtttgtcccactattgtattttggaagcacataacttgtttggtttcacaggttcacagttaagaaggaattttgcctctgaataaatagaatcttgagtctcatgcaaaaaaaaaaaaaaaaaaaaaaaaa

SEQ ID NO: 13854 - DNA, 2196 bp, Homo sapiens
tgtggagcttctgagatctgtggaggtttttctctgcaaatgcaggaagaaatcaggtggatggatgcataattatggccctgctcctggtctctttgctggcattcctgagcttgggctcaggatgtcatcatcggatctgtcactgctctaacagggtttttctctgccaagagagcaaggtgacagagattccttctgacctcccgaggaatgccattgaactgaggtttgtcctcaccaagcttcgagtcatccaaaaaggtgcattttcaggatttggggacctggagaaaatagagatctctcagaatgatgtcttggaggtgatagaggcagatgtgttctccaaccttcccaaattacatgaaattagaattgaaaaggccaacaacctgctctacatcaaccctgaggccttccagaaccttcccaaccttcaatatctgttaatatccaacacaggtattaagcaccttccagatgttcacaagattcattctctccaaaaagttttacttgacattcaagataacataaacatccacacaattgaaagaaattctttcgtggggctgagctttgaaagtgtgattctatggctgaataagaatgggattcaagaaatacacaactgtgcattcaatggaacccaactagatgagctgaatctaagcgataataataatttagaagaattgcctaatgatgttttccacggagcctctggaccagtcattctctctgagcttcatccaatttgcaacaaatctattttaaggcaagaagttgattatatgactcaggctaggggtcagagatcctctctggcagaagacaatgagtccagctacagcagaggatttgacatgacgtacactgagtttgactatgacttatgcaatgaagtggttgacgtgacctgctcccctaagccagatgcattcaacccatgtgaagatatcatggggtacaacatcctcagagtcctgatatggtttatcagcatcctggccatcactgggaacatcatagtgctagtgatcctaactaccagccaatataaactcacagtccccaggttccttatgtgcaacctggcctttgctgatctctgcattggaatctacctgctgctcattgcatcagttgatatccataccaagagccaatatcacaactatgccattgactggcaaactggggcaggctgtgatgctgctggctttttcactgtctttgccagtgagctgtcagtctacactctgacagctatcaccttggaaagatggcataccatcacgcatgccatgcagctggactgcaaggtgcagctccgccatgctgccagtgtcatggtgatgggctggatttttgcttttgcagctgccctctttcccatctttggcatcagcagctacatgaaggtgagcatctgcctgcccatggatattgacagccctttgtcacagctgtatgtcatgtccctccttgtgctcaatgtcctggcctttgtggtcatctgtggctgctatatccacatctacctcacagtgcggaaccccaacatcgtgtcctcctctagtgacaccaggatcgccaagcgcatggccatgctcatcttcactgacttcctctgcatggcacccatttctttctttgccatttctgcctccctcaaggtgcccctcatcactgtgtccaaagcaaagattctgctggttctgtttcaccccatcaactcctgtgccaaccccttcctctatgccatctttaccaaaaactttcgcagagatttcttcattctgctgagcaagtgtggctgctatgaaatgcaagcccaaatttataggacagaaacttcatccactgtccacaacacccatccaaggaatggccactgctcttcagctcccagagtcaccagtggttccacttacatacttgtccctctaagtcatttagcccaaaactaaaacacaatgtgaaaatgtatctgagtattgaatgataattcagtcttgcctttgaagggtatgtcacaaagagctgacagtgcttctacacatttcatctaatttaatattcctggcatacctttaaggtaaattggtcaggaactattaattccatgtgatacattaggaagctgaattattagtaacaacaataataattaaagaatgcaatactgta

SEQ ID NO: 13855 - DNA, 3998 bp, Homo sapiens
ccgggagcccgggcgccctggagtgaggaggaccgggagctggctctggaggctgcggaggcgacgccggagagaacgaagcctcggctgggagcggatctttcgaagatggtttggctgccttggagatttggagatctgatgccacgatgaggactcacacacggggggctcccagtgtgtttttcatatatttgctttgctttgtgtcagcctacatcaccgacgagaacccagaagttatgattcccttcaccaatgccaactacgacagccatcccatgctgtacttctccagggcagaagtggcggagctgcagctcagggctgccagctcgcacgagcacattgcagcccgcctcacggaggctgtgcacacgatgctgtccagccccttggaatacctccctccctgggatcccaaggactacagtgcccgctggaatgaaatttttggaaacaacttgggtgccttggcaatgttctgtgtgctgtatcctgagaacattgaagcccgagacatggccaaagactacatggagaggatggcagcgcagcctagttggttggtgaaagatgctccttgggatgaggtcccgcttgctcactccctggttggttttgccactgcttatgacttcttgtacaactacctgagcaagacacaacaggagaagtttcttgaagtgattgccaatgcctcagggtatatgtatgaaacttcatacaggagaggatggggatttcaatacctgcacaatcatcagcccaccaactgtatggctttgctcacgggaagcctagtcctgatgaatcaaggatatcttcaagaagcctacttatggaccaaacaagttctgaccatcatggagaaatctctggtcttgctcagggaggtgacggatggctccctctatgaaggagttgcgtatggcagctacaccactagatcactcttccaatacatgtttctcgtccagaggcacttcaacatcaaccactttggccatccgtggcttaaacaacactttgcatttatgtatagaaccatcctgccagggtttcaaaggactgtggctattgcggactcaaattacaactggttttatggtccagaaagccaattagtgttccttgataaatttgtcatgcgtaatggcagtggtaactggctagctgaccaaatcagaaggaaccgtgtggtggaaggtccaggaacaccatccaaagggcagcgctggtgcactctgcacacagaatttctctggtatgatggcagcttgaaatcggttcctcctccagactttggcacccctacactgcattattttgaagactggggtgtcgtgacttatggaagtgcactacctgcagaaatcaatagatctttcctttccttcaagtctggaaaactggggggacgtgcaatatatgacattgtccacagaaacaaatacaaagattggatcaaaggatggagaaattttaatgcagggcatgaacatcctgatcaaaactcatttacttttgctcccaatggtgtgcctttcattactgaggctctgtacgggccaaagtacaccttcttcaacaatgttttgatgttttccccagctgtgtcaaagagctgcttttctccctgggtgggtcaggtcacagaagactgctcatcaaaatggtctaaatacaagcatgacctggcagctagttgtcaggggagggtggttgcagcagaggagaaaaatggggtggttttcatccgaggagaaggtgtgggagcttataacccccagctcaacctgaagaatgttcagaggaatctcatcctcctacatccacagctgcttctccttgtagaccaaatacacctgggagaggagagtcccttggagacagcagcgagcttcttccataatgtggatgttccttttgaggagactgtggtagatggtgtccatggggctttcatcaggcagagagatggtctctataaaatgtactggatggacgatactggctacagcgagaaagcaacctttgcctcagtgacatatcctcggggctatccctacaacgggacaaactatgtgaatgtcaccatgcacctccgaagtcccatcaccagggcagcttacctcttcatagggccatctatagatgttcagagcttcactgtccacggagactctcagcaactggatgtgttcatagccaccagcaaacatgcctacgccacatacctgtggacaggtgaggccacaggacagtctgcctttgcacaggtcattgctgatcgtcacaaaattctgtttgaccggaattcagccatcaagagcagcattgtccctgaggtgaaggactatgctgctattgtggaacagaacttgcagcattttaaaccagtgtttcagctgctggagaagcagatactgtcccgagtccggaacacagctagctttaggaagactgctgaacgcctgctgagattttcagataagagacagactgaggaggccattgacaggatttttgccatatcacagcaacagcagcagcaaagcaagtcaaagaaaaaccgaagggcaggcaaacgctataaatttgtggatgctgtccctgatatttttgcacagattgaagtcaatgagaaaaagattagacagaaagctcagattttggcacagaaagaactacccatagatgaagatgaagaaatgaaagaccttttagattttgcagatgtaacatacgagaaacataaaaatgggggcttgattaaaggccggtttggacaggcacggatggtgacaactacacacagcagggccccatcactgtctgcttcctataccaggttgttcctgattctgaacattgctattttctttgtcatgttggcaatgcaactgacttatttccagagggcccagagcctacatggccaaagatgtctttatgcagttcttctcatagatagctgtattttattatggttgtactcttcttgttcccaatcacagtgttagcactgaagctataaattacctggtcattttgtgatcacaagagtctatgcaaaaaaaaaaatttctttaccccagattatcagatttttttccctcagattcattttaacaaattaagggaagatattttgacacaagaaagcaggaacgtggagaaattggagcaggaaaagaaattatcaaagcaatagaaatagcttggtggtcctatggtgtttttggaagtatttggcattgctaattgagcagtccatatagtactacttttagaagaaacaaaaagtctattttttaaagtaatgttttttcttatgagaaaaaggtttagatagaattgggttttattaatattaatttaatgctattagcaatttccatatactatattgtggaaaagactgaagaatacaattctgagaaatataaaaaaattttaatggtatactcatgttgaaagataaatgttgctaagtcctggtatgatggtgtgagcttccttggggaagtacttcttgagttatgtaactaacaggatgttttactacagatctggatggctattcagataacatggcaaaaaatgatagcagaagatcattaaaaacttaaaatatattttattagaaaacatttatctatgaatgaatatttccttgatgctggtctctgcacacatatgcttggttacttgcatgcattcattggttgttcaataagtgagatgattacagataatactgtattttccttatatggaaaaccgttatagacccaataacaactaaacctttcaaaagaaaatattttctattatgaatgttgattttcataccaaagaagatggagagtctaaaatttggatatgattcttatgtttttttaatagaaaaccttcttcaagtttattttcctaaataaacatcataattgtgaaaaaaaaaaaaaaaaaaaaaaaaaaaaaaaaaaaaaaaa

SEQ ID NO: 13856 - DNA, 3104 bp, Homo sapiens
acggcgcgctgggctcacactgtcccgccgcggacgggctttgtggttgggggcgcgcgtgcgagtgccagtgagagtgtgggtgcgcgctgtgggccgcggcgcgggtgggtggccgtgcgttcttgcgagccggcctgcaggaggcgaggctcccctggcctcccgcacccagcggcggaccgagcccctggagggaagttgccgcagccgcccgggccgccggccctcctgtcccgcgccaggtacacagcttctcctagcatgacttcgatctgatcagcaaacaagaaaatttgtctcccgtagttctggggcgtgttcaccacctacaaccacagagctgtcatggctgccatctctacttccatccctgtaatttcacagccccagttcacagccatgaatgaaccacagtgcttctacaacgagtccattgccttcttttataaccgaagtggaaagcatcttgccacagaatggaacacagtcagcaagctggtgatgggacttggaatcactgtttgtatcttcatcatgttggccaacctattggtcatggtggcaatctatgtcaaccgccgcttccattttcctatttattacctaatggctaatctggctgctgcagacttctttgctgggttggcctacttctatctcatgttcaacacaggacccaatactcggagactgactgttagcacatggctccttcgtcagggcctcattgacaccagcctgacggcatctgtggccaacttactggctattgcaatcgagaggcacattacggttttccgcatgcagctccacacacggatgagcaaccggcgggtagtggtggtcattgtggtcatctggactatggccatcgttatgggtgctatacccagtgtgggctggaactgtatctgtgatattgaaaattgttccaacatggcacccctctacagtgactcttacttagtcttctgggccattttcaacttggtgacctttgtggtaatggtggttctctatgctcacatctttggctatgttcgccagaggactatgagaatgtctcggcatagttctggaccccggcggaatcgggataccatgatgagtcttctgaagactgtggtcattgtgcttggggcctttatcatctgctggactcctggattggttttgttacttctagacgtgtgctgtccacagtgcgacgtgctggcctatgagaaattcttccttctccttgctgaattcaactctgccatgaaccccatcatttactcctaccgcgacaaagaaatgagcgccacctttaggcagatcctctgctgccagcgcagtgagaaccccaccggccccacagaaggctcagaccgctcggcttcctccctcaaccacaccatcttggctggagttcacagcaatgaccactctgtggtttagaacggaaactgagatgaggaaccagccgtcctctcttggaggataaacagcctccccctacccaattgccagggcaaggtggggtgtgagagaggagaaaagtcaactcatgtacttaaacactaaccaatgacagtatttgttcctggaccccacaagacttgatatatattgaaaattagcttatgtgacaaccctcatcttgatccccatcccttctgaaagtaggaagttggagctcttgcaatggaattcaagaacagactctggagtgtccatttagactacactaactagacttttaaaagattttgtgtggtttggtgcaagtcagaataaattctggctagttgaatccacaacttcatttatatacaggcttcccttttttatttttaaaggatacgtttcacttaataaacacgtttatgcctatcagcatgtttgtgatggatgagactatggactgcttttaaactaccataattccattttttcccttacataggaaaactgtaagttggaattatcttttgtttagaaagcatgcatgtaatgtatgtatgcagtatgccttacttaaaaagattaaaaggatactaatgttaaatcttctaggaaatagaacctagacttcaaagccagtatttgtttaggtcatgaagcaaacaatgctctaatcacaatattaactgtttaattaaaatgttgtaacaagtataaaacagggaatgtaagtttattaccaaagtgatatgtattccaaaaaagtcatagaagatgaagcactataatattgttcccatatatttaaaatacccaagtacattctaattaccagtatatcagaggaaaattttcgtagtctttgtaaaataatatactcatcatagaaaacttgaaaaatgcagaaatgtataaaaaagcaaaaatgattactgataatatcacaacccagaagtaaccacctttaaaaagcaacccccatgtatgcctatatgtgtattgtatactttttttacataattggagtcatactgtaaacagttttataagtagatctttttcattgcaaaattgccacattttcttatggcattaaaaattttacaaaaacataattttaatggctatattatattccatttaatggatgcaactcagtttatttaaccattcccatgttgttaactatttaggttgtttctaattttcattattataaagttgcagaaatttggtgtacataaaactgtctccatataattgattattaggatatattcccatgaaggattctttttttaaaaaaatgtgaaatgtcatcttgtacttacacctttcatgaaaagggatttcctgcttttgtactgcatgggtggcagttgtgaggaaaagccagtcaaatgacctttttacaaaagaaatgcagtggtcacttcagttgagagtgactttttaatacaacaagatcaactagaagaattcaactgtctcaagaatcaaggtaccccaatatatctcgcaattccaaactttgtttgagggactcgttatccagctcttggtagccacacctgcaatgtaaaatggaagaaaatgcaaagaaaccaaatgtgccgagtgaataaaggattgtcatatcaaaaaaaaaaaaaaaa

SEQ ID NO: 13857 - DNA, 3182 bp, Homo sapiens
acggcgcgctgggctcacactgtcccgccgcggacgggctttgtggttgggggcgcgcgtgcgagtgccagtgagagtgtgggtgcgcgctgtgggccgcggcgcgggtgggtggccgtgcgttcttgcgagccggcctgcaggaggcgaggctcccctggcctcccgcacccagcggcggaccgagcccctggagggaagttgccgcagccgcccgggccgccggccctcctgtcccgcgccaggtggacgtctgatttatgaagctccccatccacctatctgagtacctgacttctcaggactgacacctacagcatcaggtacacagcttctcctagcatgacttcgatctgatcagcaaacaagaaaatttgtctcccgtagttctggggcgtgttcaccacctacaaccacagagctgtcatggctgccatctctacttccatccctgtaatttcacagccccagttcacagccatgaatgaaccacagtgcttctacaacgagtccattgccttcttttataaccgaagtggaaagcatcttgccacagaatggaacacagtcagcaagctggtgatgggacttggaatcactgtttgtatcttcatcatgttggccaacctattggtcatggtggcaatctatgtcaaccgccgcttccattttcctatttattacctaatggctaatctggctgctgcagacttctttgctgggttggcctacttctatctcatgttcaacacaggacccaatactcggagactgactgttagcacatggctccttcgtcagggcctcattgacaccagcctgacggcatctgtggccaacttactggctattgcaatcgagaggcacattacggttttccgcatgcagctccacacacggatgagcaaccggcgggtagtggtggtcattgtggtcatctggactatggccatcgttatgggtgctatacccagtgtgggctggaactgtatctgtgatattgaaaattgttccaacatggcacccctctacagtgactcttacttagtcttctgggccattttcaacttggtgacctttgtggtaatggtggttctctatgctcacatctttggctatgttcgccagaggactatgagaatgtctcggcatagttctggaccccggcggaatcgggataccatgatgagtcttctgaagactgtggtcattgtgcttggggcctttatcatctgctggactcctggattggttttgttacttctagacgtgtgctgtccacagtgcgacgtgctggcctatgagaaattcttccttctccttgctgaattcaactctgccatgaaccccatcatttactcctaccgcgacaaagaaatgagcgccacctttaggcagatcctctgctgccagcgcagtgagaaccccaccggccccacagaaggctcagaccgctcggcttcctccctcaaccacaccatcttggctggagttcacagcaatgaccactctgtggtttagaacggaaactgagatgaggaaccagccgtcctctcttggaggataaacagcctccccctacccaattgccagggcaaggtggggtgtgagagaggagaaaagtcaactcatgtacttaaacactaaccaatgacagtatttgttcctggaccccacaagacttgatatatattgaaaattagcttatgtgacaaccctcatcttgatccccatcccttctgaaagtaggaagttggagctcttgcaatggaattcaagaacagactctggagtgtccatttagactacactaactagacttttaaaagattttgtgtggtttggtgcaagtcagaataaattctggctagttgaatccacaacttcatttatatacaggcttcccttttttatttttaaaggatacgtttcacttaataaacacgtttatgcctatcagcatgtttgtgatggatgagactatggactgcttttaaactaccataattccattttttcccttacataggaaaactgtaagttggaattatcttttgtttagaaagcatgcatgtaatgtatgtatgcagtatgccttacttaaaaagattaaaaggatactaatgttaaatcttctaggaaatagaacctagacttcaaagccagtatttgtttaggtcatgaagcaaacaatgctctaatcacaatattaactgtttaattaaaatgttgtaacaagtataaaacagggaatgtaagtttattaccaaagtgatatgtattccaaaaaagtcatagaagatgaagcactataatattgttcccatatatttaaaatacccaagtacattctaattaccagtatatcagaggaaaattttcgtagtctttgtaaaataatatactcatcatagaaaacttgaaaaatgcagaaatgtataaaaaagcaaaaatgattactgataatatcacaacccagaagtaaccacctttaaaaagcaacccccatgtatgcctatatgtgtattgtatactttttttacataattggagtcatactgtaaacagttttataagtagatctttttcattgcaaaattgccacattttcttatggcattaaaaattttacaaaaacataattttaatggctatattatattccatttaatggatgcaactcagtttatttaaccattcccatgttgttaactatttaggttgtttctaattttcattattataaagttgcagaaatttggtgtacataaaactgtctccatataattgattattaggatatattcccatgaaggattctttttttaaaaaaatgtgaaatgtcatcttgtacttacacctttcatgaaaagggatttcctgcttttgtactgcatgggtggcagttgtgaggaaaagccagtcaaatgacctttttacaaaagaaatgcagtggtcacttcagttgagagtgactttttaatacaacaagatcaactagaagaattcaactgtctcaagaatcaaggtaccccaatatatctcgcaattccaaactttgtttgagggactcgttatccagctcttggtagccacacctgcaatgtaaaatggaagaaaatgcaaagaaaccaaatgtgccgagtgaataaaggattgtcatatcaaaaaaaaaaaaaaaa

SEQ ID NO: 13858 - DNA, 2877 bp, Homo sapiens
ccaatattttggtttttataattttcatttgtgaagaattatttgagaaagggtggcgaggggagatttcctgacggcagtttcttaagctgtccattagtagaagagcaagaaagccttggatgtcaacgcctcgctcttgagaccagccaccaaaccacgaaaagtgactttcttctcgtgtgctctctacggcccttctgatggaagcagaaacagggagcagcgtggagactggaaagaaggccaacagaggcactcgaattgccctggtcgtgtttgtcggtggcaccctagttctgggcacgatcctctttctagtgagtcaaggtctcttaagtctccaagctaaacaggagtactgcctgaagccagaatgcatcgaagcggctgctgccatcttaagtaaagtaaatctgtctgtggatccttgtgataatttcttccggttcgcttgtgatggctggataagcaataatccaattcccgaagatatgccaagctatggggtttatccttggctgagacataatgttgacctcaagttgaaggaacttttggagaaatcaatcagtagaaggcgggacaccgaagccatacagaaagccaaaatcctttattcatcctgcatgaatgagaaagcgattgaaaaagcagatgccaagccactgctacacatcctacggcattcacctttccgctggcccgtgcttgaatctaatattggccctgaaggggtttggtcagagagaaagttcagccttctgcagacacttgcaacgtttcgtggtcaatacagcaattctgtgttcatccgtttgtatgtgtcccctgatgacaaagcatccaatgaacatatcttgaagctggaccaagcaacactctccctggccgtgagggaagactaccttgataacagtacagaagccaagtcttatcgggatgccctttacaagttcatggtggatactgccgtgcttttaggagctaacagttccagagcagagcatgacatgaagtcagtgctcagattggaaattaagatagctgagataatgattccacatgaaaaccgaaccagcgaggccatgtacaacaaaatgaacatttctgaactgagtgctatgattccccagttcgactggctgggctacatcaagaaggtcattgacaccagactctacccccatctgaaagacatcagcccctccgagaatgtggtggtccgcgtcccgcagtactttaaagatttgtttaggatattagggtctgagagaaagaagaccattgccaactatttggtgtggagaatggtttattccagaattccaaaccttagcaggcgctttcagtatagatggctggaattctcaagggtaatccaggggaccacaactttgctgcctcaatgggacaaatgtgtaaactttattgaaagtgccctcccttatgttgttggaaagatgtttgtagatgtgtacttccaggaagataagaaggaaatgatggaggaattggttgagggcgttcgctgggcctttattgacatgctagagaaagaaaatgagtggatggatgcaggaacgaaaaggaaagccaaagaaaaggcgagagctgttttggcaaaagttggctatccagagtttataatgaatgatactcatgttaatgaagacctcaaagctatcaagttttcagaagccgactactttggcaacgtcctacaaactcgcaagtatttagcacagtctgatttcttctggctaagaaaagccgttccaaaaacagagtggtttacaaatccgacgactgtcaatgccttctacagtgcatccaccaaccagatccgatttccagcaggagagctccagaagcctttcttttggggaacagaatatcctcgatctctgagttatggtgctataggagtaattgtcggacatgaatttacacatggatttgataataatggtagaaaatatgataaaaatggaaacctggatccttggtggtctactgaatcagaagaaaagtttaaggaaaaaacaaaatgcatgattaaccagtatagcaactattattggaagaaagctggcttaaatgtcaaggggaagaggaccctgggagaaaatattgctgataatggaggcctgcgggaagcttttagggcttacaggaaatggataaatgacagaaggcagggacttgaggagcctcttctaccaggcatcacattcaccaacaaccagctcttcttcctgagttatgctcatgtgaggtgcaattcctacagaccagaagctgcccgagaacaagtccaaattggtgctcacagtccccctcagtttagggtcaatggtgcaattagtaactttgaagaattccagaaagcttttaactgtccacccaattccacgatgaacagaggcatggactcctgccgactctggtagctgggacgctggtttatggcatcctgagacagttgcacagtgccagcggaggctgcactgagccttcatcgcccattgctttaggcctggagactttcatttttagtgcattttcattatttgggtaggtgacctgcttggatctagacagcatctgttcaaagttgtagggcttataaagtggaatataagaatgaactaagtatgtttctttagaaaatcaaaccaacaaaaataaatccctaggctacttttgttaaaatgctatctgctaaattgttgctattgtccattttagggtgttggccacagttatgtggtacatagcatttcaatctatagctttgtgggaagcctaaattgatgtatcctttaaaagttcaatctattaaacttgtagcctctcaaaaaaaaaaaaaaaaaa

SEQ ID NO: 13859 - DNA, 809 bp, Homo sapiens
gtaaggtgaaggtgcccagcaggctgaggcttgtgtgcaacccagaagagagctcgctaacgccagcaagaaggttcagaacagcctggctttggaaaggaatttcatcctgcccacacactgcatagcaggagggaagcatgtctactttatccaatttcacacagacgctggaagacgtcttccgaaggatttttattacttatatggacaattggcgccagaacacaacagctgagcaagaggccctccaagccaaagttgatgctgagaacttctactatgtcatcctgtacctcatggtgatgattggaatgttctctttcatcatcgtggccatcctggtgagcactgtgaaatccaagagacgggaacactccaatgacccctaccaccagtacattgtagaggactggcaggaaaagtacaagagccaaatcttgaatctagaagaatcgaaggccaccatccatgagaacattggtgcggctgggttcaaaatgtccccctgataagggagaaaggcaccaagctaacatctgacgtccagacatgaagagatgccagtgccacgaggcaaatccaaattgtctttgcttagaagaaagtgagttccttgctctctgttgagaattttcatggagattatgtggttggccaataaagatagatgacatttcaatctcagtgatttatgcttgcttgttggagcaatattttgtgctgaagacctcttttactttccgggcaagtgaatgtcattttaatcaatatcaatgatgaaaataaagccaaatttgaagaaaaaa

SEQ ID NO: 13860 - DNA, 4869 bp, Homo sapiens
gcgtggaagcggagcggcggcctcgctgtaacgcagaagcgaaatgtagcgagccgggtgtcgcggctggacgctcgccttggctgggggtgtgggggggcacgccgggggccaaggaggactgtcgaggaggagtgatgagaagagggggtgccctgcaccccccgagaccacgggccacgctgccacttgccaggcgccccccttcctcccaggcgaggggcaggtgttccacactgattctcgtgactttaaggaccagggatttgaagaggtattagctcttcccaggaagggaggaagtttctggaagagaagggaaagacggcagacgctgcgctgggaccagcagagcctgaggagctgtgggaagctgacagagcccagccaaaggagcgggaaggagccgcagccccaggctggcactgtgttctgaaagatttgaactcaagctgctttttacggaagaggggccacttcagagggcaccccagaatttggttgagctcttctactctggatgccccctgctctgaggagcctgccactgagaaccaaagaagataagaggacagatactttttcttcaagcacagagctggtgggttggagtcaggcatctgcacccctagtggctgtctggtgaggaatttcttgtttcttcccagcttgcggcttcagtgcttgatggggctgcctgttggtggatcagtttttgcagtgcctggtaggagtggagagccgtgggaagaggtcctgcggcgcccaagcctgggttcaccccaagactaagttctttcccaagttagagaagaagagagaaagcaaaaagaagagaggaaagttctcccttcccctcctccgtgcctgtcatgtcctctaagccagagccgaaggacgtccaccaactgaacgggactggcccttctgcctctccctgctcttcagatggcccagggagagagcccttggctgggacctcagagttcctggggcctgatggggctggggtagaggtggtgattgagtctcgggccaacgccaagggggttcgggaggaggacgccctgctggagaacgggagccagagcaacgaaagtgacgacgtcagcacagaccgtggccctgcgccaccttccccgctcaaggagacctccttttccatcgggctgcaagtactgtttccattcctcctggcaggctttgggaccgtggctgctggcatggtgttggacatcgtgcagcactgggaagtcttccagaaggtgacagaggtcttcatcctagtgcctgcgctgctggggctcaaagggaacctggaaatgaccctggcatcaaggctttccactgcagccaacattggacacatggacacacccaaggagctctggcggatgatcactgggaacatggccctcatccaggtgcaggccacggtggtgggcttcctggcgtccatcgcagccgtcgtctttggctggatccctgatggccacttcagtattccgcacgccttcctgctctgtgctagcagcgtggccacagccttcattgcctccctggtactgggtatgatcatgattggagtcatcattggctctcgcaagattgggatcaacccagacaacgtggccacacccattgctgccagcctgggcgacctcatcaccttggcgctgctctcaggcatcagctggggactctacctggaactgaatcactggcgatacatctacccactggtgtgtgctttctttgtggccctgctgcctgtctgggtggtgctggcccgacgaagtccagccacaagggaggtgttgtactcgggctgggagcctgttatcattgccatggccatcagcagtgtgggaggcctcatcttggacaagactgtctcagaccccaactttgctgggatggctgtcttcacgcctgtgattaatggtgttgggggcaatctggtggcagtgcaggccagccgcatctccaccttcctgcacatgaatggaatgcccggagagaactctgagcaagctcctcgccgctgtcccagtccttgtaccaccttcttcagccctgatgtgaattctcgctcagcccgggtcctcttcctcctcgtggtcccaggacacctggtgttcctctacaccatcagctgtatgcagggcgggcacaccaccctcacactcatcttcatcatcttctatatgacagctgcactgctccaggtgctgattctcctgtacatcgcagactggatggtgcactggatgtggggccggggcctggacccggacaacttctccatcccatacttgactgctctgggggacctgcttggcactgggctcctagcactcagcttccatgttctctggctcataggggaccgagacacggatgtcggggactagcttggtcactcaacattttccccatccctctgcactttctatttgaaatttttcttttgttcccctgtccctcctccaccccacactcccacctctttctaggacttcactttgataccaaattctcattattttcaatgggaatttttatacattgagccaagtttgtatagcaagaatttgggaaacacagatggcctgagataagcagtacaagtaggtttttgagacaatcaccaagtgcagtttcatggtgggtgcctccaggtgatgtggactggagcaggggagttttgtctggaatctggggacatggggtttggctttagcaacctgtcttggccctaatgagaaaccctttgtaagtgggctctggatttttggttttgttttctttttatctgttttgttttatttttggttttggttgaacagagggacagaagaataagtaacactcccaaacacagacatacttttgtagaagtggaccaacttcaaagctctggacaggagacacctgctccaggcccctgtgatcccagttctgttctcttgccctctggacctaagcgttcccactcgcagaaagagtaaggtggactgacttttcaatttgtgcacatgcctcttgttcaatggcctggtcaacatcaacaacccctccctctgatcatttccagttgattgtcatatccaggaaaaaatggaacagtgcactcttctccctgttgacccatgtccacctattggttccccaaaatccacattctccctgggcccagatgactttgtctccctgggcccagattctttgtctctcttcaaccttcatctcaaattgtctctaagcactaccttccccagagcttgccaggttgggttttgagattagggtcaggtcatgggtatgtggagaatggtttggaggttgaggacaaccacaggtgtctcattgctgccatttctcctgaggacataatcacttggtcaccttggaccctgtcacttcctaaaattactcgttctgtcatgccatagaggtcagttttcctctttcttggcttctacccacaaacattcaccaatcatttattcgttcatttagcaaatatgcagcctccgcaagatgagctctcctgcagacaagcatggtctgaaacattctttgagcaatatttattgagtgcctactatgtgttaggtactgtgccaggcactgataagccagtggtaagggaaacacagctctaacctcacctcattctccaggttacaaaggccatgtgcccctttgaatctggcagagaaagtttcctcgttgtaagtatttgcatctacttcaagccagattcttctgcctctttctcctttccagacccctactctgtgcagtgctgaccacagctagagccaccgccccattgctcaaccagtatttatttccctaaacgacccttcctcacattcccttccctccacctctccttaccaagcacccaaaagaggatttagaactagcagggtggacatcatctggttgtttctacttttctctgcctagcacaaaattgggagaaaactggagcctccatccgcagtcacacgtgtacagatctggggatttggatgtaggctttttctaacttctctctcagaagcttctacagaaacccttccatctgtagcctcaagggcccacctccaagggaaggcttaggcaatgatcctgtttctaccaacactgcaccttatcccaggaacctgccctagacctccagagaccatattttctctccctccatttctacccagacctccaggcctccttctggaatcatagaaccgtagaattggaaggaattttagaggttttctagttggagttgtgtccaacagaattcattaacaccagcctgggcttgtttttcctcctccctctggacttttttcatcttttcctccacctcaaaaaatacttacacacagattcttcttgtacaggcatcaaaaccaactcctctgcccctaaggctgtgtccctgtggtctccagccacccctaccccagtcactcgccccttcctcatctctggaatttggccaggcagtcccagaagactctggagtgacctcctttgcctaaaaagcagacagataggcatgccccaggccctgagtgagcagaggaggactgtagggtgagagggaaagaaaatgaaggtgactttcatggaagtttcatttcttttccccgattgtaccaactgcatgtacttttggcctggctgcaaggagcaatattggtttactctcgtatccttaaaaagttacagaactgtgtcttaagagaattatttatagttactataactgaattgacaaatgtcaacttaactgataaattatatttggtaaaataaagaggacgtttatttagaaaaaaaaaaaaaaaa

SEQ ID NO: 13861 - DNA, 1309 bp, Homo sapiens
ggacaggtgccccgggagcttcccgctcgcgaagacccagacggctgcaggagcccgggcagcctcggggtcagcggcaccatgaacgtctcgggctgcccaggggccgggaacgcgagccaggcgggcggcgggggaggctggcaccccgaggcggtcatcgtgcccctgctcttcgcgctcatcttcctcgtgggcaccgtgggcaacacgctggtgctggcggtgctgctgcgcggcggccaggcggtcagcactaccaacctgttcatccttaacctgggcgtggccgacctgtgtttcatcctgtgctgcgtgcccttccaggccaccatctacaccctggacggctgggtgttcggctcgctgctgtgcaaggcggtgcacttcctcatcttcctcaccatgcacgccagcagcttcacgctggccgccgtctccctggacaggtatctggccatccgctacccgctgcactcccgcgagctgcgcacgcctcgaaacgcgctggcagccatcgggctcatctgggggctgtcgctgctcttctccgggccctacctgagctactaccgccagtcgcagctggccaacctgaccgtgtgccatcccgcgtggagcgcccctcgccgccgcgccatggacatctgcaccttcgtcttcagctacctgcttcctgtgctggttctcggcctgacctacgcgcgcaccttgcgctacctctggcgcgccgtcgacccggtggccgcgggctcgggtgcccggcgcgccaagcgcaaggtgacacgcatgatcctcatcgtggccgcgctcttctgcctctgctggatgccccaccacgcgctcatcctctgcgtgtggttcggccagttcccgctcacgcgcgccacttatgcgcttcgcatcctctcgcacctggtctcctacgccaactcctgcgtcaaccccatcgtttacgcgctggtctccaagcacttccgcaaaggcttccgcacgatctgcgcgggcctgctgggccgtgccccaggccgagcctcgggccgtgtgtgcgctgccgcgcggggcacccacagtggcagcgtgttggagcgcgagtccagcgacctgttgcacatgagcgaggcggcgggggcccttcgtccctgccccggcgcttcccagccatgcatcctcgagccctgtcctggcccgtcctggcagggcccaaaggcaggcgacagcatcctgacggttgatgtggcctgaaagcacttagcgggcgcgctgggatgtcacagagttggagtcattgttgggggaccgtgggccg

SEQ ID NO: 13862 - DNA, 4930 bp, Homo sapiens
aaacccgatctccttggacttgaatgaggaggaggaggcggcggcggcggcggcggcggaggcgctcggctggggaaagctagcggcagaggctcagccccggcggcagcgcgcgccccgctgccagcccattttccggacgccacccgcgggcactgccgacgcccccggggctgccgaggggaggccgggggggcgcagcggagcgcggtcccgcgcactgagccccgcggcgccccgggaacttggcggcgacccgagcccggcgagccggggcgcgcctcccccgccgcgcgcctcctgcatgcggggccccagctccgggcgccggccggagccccccccggccgcccccgagccccccgcgccccgcgccgcgccgccgcgccgtccatgcaccgcttgatgggggtcaacagcaccgccgccgccgccgccgggcagcccaatgtctcctgcacgtgcaactgcaaacgctctttgttccagagcatggagatcacggagctggagtttgttcagatcatcatcatcgtggtggtgatgatggtgatggtggtggtgatcacgtgcctgctgagccactacaagctgtctgcacggtccttcatcagccggcacagccaggggcggaggagagaagatgccctgtcctcagaaggatgcctgtggccctcggagagcacagtgtcaggcaacggaatcccagagccgcaggtctacgccccgcctcggcccaccgaccgcctggccgtgccgcccttcgcccagcgggagcgcttccaccgcttccagcccacctatccgtacctgcagcacgagatcgacctgccacccaccatctcgctgtcagacggggaggagcccccaccctaccagggcccctgcaccctccagcttcgggaccccgagcagcagctggaactgaaccgggagtcggtgcgcgcacccccaaacagaaccatcttcgacagtgacctgatggatagtgccaggctgggcggcccctgcccccccagcagtaactcgggcatcagcgccacgtgctacggcagcggcgggcgcatggaggggccgccgcccacctacagcgaggtcatcggccactacccggggtcctccttccagcaccagcagagcagtgggccgccctccttgctggaggggacccggctccaccacacacacatcgcgcccctagagagcgcagccatctggagcaaagagaaggataaacagaaaggacaccctctctagggtccccaggggggccgggctggggctgcgtaggtgaaaaggcagaacactccgcgcttcttagaagaggagtgagaggaaggcggggggcgcagcaacgcatcgtgtggccctcccctcccacctccctgtgtataaatatttacatgtgatgtctggtctgaatgcacaagctaagagagcttgcaaaaaaaaaaagaaaaaagaaaaaaaaaaaccacgtttctttgttgagctgtgtcttgaaggcaaaagaaaaaaaatttctacagtagtctttcttgtttctagttgagctgcgtgcgtgaatgcttattttcttttgtttatgataatttcacttaactttaaagacatatttgcacaaaacctttgtttaaagatctgcaatattatatatataaatatatataagataagagaaactgtatgtgcgagggcaggagtatttttgtattagaagaggcctattaaaaaaaaaagttgttttctgaactagaagaggaaaaaaatggcaatttttgagtgccaagtcagaaagtgtgtattaccttgtaaagaaaaaaattacaaagcaggggtttagagttatttatataaatgttgagattttgcactattttttaatataaatatgtcagtgcttgcttgatggaaacttctcttgtgtctgttgagactttaagggagaaatgtcggaatttcagagtcgcctgacggcagagggtgagcccccgtggagtctgcagagaggccttggccaggagcggcgggctttcccgaggggccactgtccctgcagagtggatgcttctgcctagtgacaggttatcaccacgttatatattccctaccgaaggagacaccttttcccccctgacccagaacagcctttaaatcacaagcaaaataggaaagttaaccacggaggcaccgagttccaggtagtggttttgcctttcccaaaaatgaaaataaactgttaccgaaggaattagtttttcctcttcttttttccaactgtgaaggtccccgtggggtggagcatggtgcccctcacaagccgcagcggctggtgcccgggctaccagggacatgccagagggctcgatgacttgtctctgcagggcgctttggtggttgttcagctggctaaaggttcaccggtgaaggcaggtgcggtaactgccgcactggaccctaggaagccccaggtattcgcaatctgacctcctcctgtctgtttcccttcacggatcaattctcacttaagaggccaataaacaacccaacatgaaaaggtgacaagcctgggtttctcccaggataggtgaaagggttaaaatgagtaaagcagttgagcaaacaccaacccgagcttcgggcgcagaattcttcaccttctcttcccctttccatctcctttccccgcggaaacaacgcttcccttctggtgtgtctgttgatctgtgttttcatttacatctctcttagactccgctcttgttctccaggttttcaccagatagatttggggttggcgggacctgctggtgacgtgcaggtgaaggacaggaaggggcatgtgagcgtaaatagaggtgaccagaggagagcatgaggggtggggctttgggacccaccggggccagtggctggagcttgacgtctttcctccccatgggggtgggagggcccccagctggaagagcagactcccagctgctaccccctcccttcccatgggagtggctttccattttgggcagaatgctgactagtagactaacataaaagatataaaaggcaataactattgtttgtgagcaacttttttataacttccaaaacaaaaacctgagcacagttttgaagttctagccactcgagctcatgcatgtgaaacgtgtgctttacgaaggtggcagctgacagacgtgggctctgcatgccgccagcctagtagaaagttctcgttcattggcaacagcagaacctgcctctccgtgaagtcgtcagcctaaaatttgtttctctcttgaagaggattctttgaaaaggtcctgcagagaaatcagtacaggttatcccgaaaggtacaaggacgcacttgtaaagatgattaaaacgtatctttcctttatgtgacgcgtctctagtgccttactgaagaagcagtgacactcccgtcgctcggtgaggacgttcccggacagtgcctcactcacctgggactggtatcccctcccagggtccaccaagggctcctgcttttcagacaccccatcatcctcgcgcgtcctcaccctgtctctaccagggaggtgcctagcttggtgaggttactcctgctcctccaacctttttttgccaaggtttgtacacgactcccatctaggctgaaaacctagaagtggaccttgtgtgtgtgcatggtgtcagcccaaagccaggctgagacagtcctcatatcctcttgagccaaactgtttgggtctcgttgcttcatggtatggtctggatttgtgggaatggctttgcgtgagaaaggggaggagagtggttgctgccctcagccggcttgaggacagagcctgtccctctcatgacaactcagtgttgaagcccagtgtcctcagcttcatgtccagtggatggcagaagttcatggggtagtggcctctcaaaggctgggcgcatcccaagacagccagcaggttgtctctggaaacgaccagagttaagctctcggcttctctgctgagggtgcaccctttcctctagatggtagttgtcacgttatctttgaaaactcttggactgctcctgaggaggccctcttttccagtaggaagttagatgggggttctcagaagtggctgattggaaggggacaagcttcgtttcaggggtctgccgttccatcctggttcagagaaggccgagcgtggctttctctagccttgtcactgtctccctgcctgtcaatcaccacctttcctccagaggaggaaaattatctcccctgcaaagcccggttctacacagatttcacaaattgtgctaagaaccgtccgtgttctcagaaagcccagtgtttttgcaaagaatgaaaagggaccccatatgtagcaaaaatcagggctgggggagagccgggttcattccctgtcctcattggtcgtccctatgaattgtacgtttcagagaaattttttttcctatgtgcaacacgaagcttccagaaccataaaatatcccgtcgataaggaaagaaaatgtcgttgttgttgtttttctggaaactgcttgaaatcttgctgtactatagagctcagaaggacacagcccgtcctcccctgcctgcctgattccatggctgttgtgctgattccaatgctttcacgttggttcctggcgtgggaactgctctcctttgcagccccatttcccaagctctgttcaagttaaacttatgtaagctttccgtggcatgcggggcgcgcacccacgtccccgctgcgtaagactctgtatttggatgccaatccacaggcctgaagaaactgcttgttgtgtatcagtaatcattagtggcaatgatgacattctgaaaagctgcaatacttatacaataaattttacaattctttggaaaaaaaaaaaaaaaaaa

SEQ ID NO: 13863 - DNA, 4343 bp, Homo sapiens
tggtcatcgcacggcggcagctcctcacctggatttagaagagctggcgtccccgcccgcccaagcctttaaactctcgtctgccagaacccgccaactctccaggcttagggccagtttccgcgattctaagagtaattgcgtgggcacctgtgctggggccaggcgcaaagaagggagttggtctgcgcgaagatcgtcaacctgctaacagaccgcacatgcactttgcaccgaccatctacgtctcagtctggaggttgcgcactttggctgctgacgcgctggtggtgcctattaatcatttaccagtccagagccgcgccagttaatggctgtgccgtgcggtgctcccacatcctggcctctcctctccacggtcgcctgtgcccgggcaccccggagctgcaaactgcagagcccaggcaaccgctgggctgtgcgccccgccggcgccggtaggagccgcgctccccgcagcggttgcgctctacccggaggcgctgggcggctgtgggctgcaggcaagcggtcgggtggggagggagggcgcaggcggcgggtgcgcgaggagaaagccccagccctggcagccccactggcccccctcagctgggatgttccccaatggcaccgcctcctctccttcctcctctcctagccccagcccgggcagctgcggcgaaggcggcggcagcaggggccccggggccggcgctgcggacggcatggaggagccagggcgaaatgcgtcccagaacgggaccttgagcgagggccagggcagcgccatcctgatctctttcatctactccgtggtgtgcctggtggggctgtgtgggaactctatggtcatctacgtgatcctgcgctatgccaagatgaagacggccaccaacatctacatcctaaatctggccattgctgatgagctgctcatgctcagcgtgcccttcctagtcacctccacgttgttgcgccactggcccttcggtgcgctgctctgccgcctcgtgctcagcgtggacgcggtcaacatgttcaccagcatctactgtctgactgtgctcagcgtggaccgctacgtggccgtggtgcatcccatcaaggcggcccgctaccgccggcccaccgtggccaaggtagtaaacctgggcgtgtgggtgctatcgctgctcgtcatcctgcccatcgtggtcttctctcgcaccgcggccaacagcgacggcacggtggcttgcaacatgctcatgccagagcccgctcaacgctggctggtgggcttcgtgttgtacacatttctcatgggcttcctgctgcccgtgggggctatctgcctgtgctacgtgctcatcattgctaagatgcgcatggtggccctcaaggccggctggcagcagcgcaagcgctcggagcgcaagatcaccttaatggtgatgatggtggtgatggtgtttgtcatctgctggatgcctttctacgtggtgcagctggtcaacgtgtttgctgagcaggacgacgccacggtgagtcagctgtcggtcatcctcggctatgccaacagctgcgccaaccccatcctctatggctttctctcagacaacttcaagcgctctttccaacgcatcctatgcctcagctggatggacaacgccgcggaggagccggttgactattacgccaccgcgctcaagagccgtgcctacagtgtggaagacttccaacctgagaacctggagtccggcggcgtcttccgtaatggcacctgcacgtcccggatcacgacgctctgagcccgggccacgcaggggctctgagcccgggccacgcaggggccctgagccaaaagagggggagaatgagaagggaaggccgggtgcgaaagggacggtatccagggcgccagggtgctgtcgggataacgtggggctaggacactgacagcctttgatggaggaacccaagaaaggcgcgcgacaatggtagaagtgagagctttgcttataaactgggaaggctttcaggctacctttttctgggtctcccactttctgttccttcctccactgcgcttactcctctgaccctccttctattttccctaccctgcaacttctatcctttcttccgcaccgtcccgccagtgcagatcacgaactcattaacaactcattctgatcctcagcccctccagtcgttatttctgtttgtttaagctgagccacggataccgccacgggtttccctcggcgttagtccctagccgcgcggggccgctgtccaggttctgtctggtgcccctactggagtcccgggaatgaccgctctccctttgcgcagccctaccttaaggaaagttggacttgagaaagatctaagcagctggtcttttctcctactcttgggtgaaggtgcatctttccctgccctcccctgtccccctctcgccgcccgcccgccaccaccactctcactccacccagagtagagccaggtgcttagtaaaataggtcccgcgcttcgaactccaggctttctggagttcccacccaagccctcctttggagcaaagaaggagctgagaacaagccgaatgaggagtttttataagattgcggggtcggagtgtgggcgcgtaataggaatcaccctcctactgcgcgttttcaaagaccaagcgctgggcgctcccgggccgcgcgtctgcgttaggcagggcagggtagtgcagggcacaccttccccggggttcggggttcggggttcggttgcagggctgcagcccgccttggctttctccctcacccaagtttccggaggagccgacctaaaagtaacaatagataaggtttcctgctccagtgtatctcaaaagaccgggcgccaggggcgggggacctagggcgacgtcttcagagtccgccagtgttggcggtgtcgccgcaacctgcaggctcccgagtggggcctgcctggtctctagagggttgctgcctttcaagcggtgcctaagaagttattttcttgtttaacatatatatttattaatttatttgtcgtgttggaaaatgtgtctctgctttccttttctctgcttgcctagccccaggtcttttctttgggaccctgggggcgggcatggaagtggaagtaggggcaagctcttgccccactccctggccatctcaacgcctctcctcaatgctgggccctcttatctcatcctttcctctagcttttctatttttgattgtgttgagtgaagtttggagatttttcatacttttcttactatagtctcttgtttgtcttattaggataatacataaatgataatgtgggttatcctcctctccatgcacagtggaaagtcctgaactcctggctttccaggagacatatataggggaacatcaccctatatataatttgagtgtatatatatttatatatatgatgtggacatatgtatacttatcttgctccattgtcatgagtccatgagtctaagtatagccactgatggtgacaggtgtgagtctggctggaacactttcagtttcaggagtgcaagcagcactcaaacctggagctgaggaatctaattcagacagagactttaatcactgctgaagatgcccctgctccctctgggttccagcagaggtgattcttacatatgatccagttaacatcatcactttttttgaggacattgaaagtgaaataatttgtgtctgtgtttaatattaccaactacattggaagcctgagcagggcgaggaccaataattttaattatttatatttcctgtattgctttagtatgctggcttgtacatagtaggcactaaatacatgtttgttggttgattgtttaagccagagtgtattacaacaatctggagatactaaatctggggttctcaggttcactcattgacatgatatacaatggttaaaatcactattgaaaaatacgttttgtgtatatttgcttcaacaactttgtgctttcctgaaagcagtaaccaagagttaagatatccctaatgttttgcttaaactaatgaacaaatatgctttgggtcataaatcagaaagtttagatctgtcccttaataaaaatatatattactactcctttggaaaatagatttttaatggttaagaactgtgaaatttacaaatcaaaatcttaatcattatccttctaagaggatacaaatttagtgctcttaacttgttaccattgtaatattaactaaataaacagatgtattatgctgttaaaaaaaaaaaaaaaaaaaaaaaaaaaaaaaaaaaaaaaaaaaaaaaaaaaa

SEQ ID NO: 13864 - DNA, 3111 bp, Homo sapiens
gtgcgggcgagcggcgacggcggcggcggcgggcacagattaattaaaagaagaatgaactataatccttgaaggtaactgggcaattttttaagtcggaggctgttcttactggtgtgaggatttacacacgtcttcagtttttcagcacagaccagcagaccatcatttttagaggaaatactccctctgccctcctttttggtttccttggtggtaaagattaaatttggttgcatcattttgacttgtgtttgagtctaggttttatggcacaaggaatggcataaacttttcatgtgttttggttaaaacaaaccagaccattgcattgaccctggacatctttaattgagaaattggtaactttattttaatatgtatatctgaagaattcaagaaaacaaaggcatcctcagaggtgtgcctcttttctttattattagaggcaaaacgaacaattttataggatttgtagtgaaattataccagattataaggagaaccaaaactaagtcgcaaaatttattaatttaaggggctctcgctttgaaagtttgagagtaagttacgataggcatttgtatccattcattactttcctcttttcaaataagcaactaaatagaaatgctaatctcagacttaattatttaacagaagagtgtaccatggaaaacctccagacaaatttctccttggttcagggctcaactaaaaaactgaatgggatgggagatgatggcagccccccagcgaaaaaaatgataacggacattcatgtaaatggaaaaacgataaacaaggtgccaacagttaagaaggaacacttggatgactatggagaagcaccagtggaaactgatggagagcatgttaagcgaacctgtacttctgttcctgaaactttgcatttaaatcccagtttgaaacacacattggcacaattccatttaagtagtcagagctcgctgggtggaccagcagcattttctgctcggcattcccaagaaagcatgtcgcctactgtatttctgcctcttccatcacctcaggttcttcctggcccattgctcatcccttcagatagctccacagaactcactcagactgtgttggaaggggaatctatttcttgttttcaagttggaggagaaaagagactctgtttgccccaagtcttaaattctgttctccgagaatttacactccagcaaataaatacagtgtgtgatgaactgtacatatattgttcaaggtgtacttcagaccagcttcatatcttaaaggtactgggcatacttccattcaatgccccatcctgtgggctgattacattaactgatgcacaaagattatgtaatgctttattgcggccacgaacttttcctcaaaatggtagcgtacttcctgctaaaagctcattggcccagttaaaggaaactggcagtgcctttgaagttgagcatgaatgcctaggcaaatgtcagggtttatttgcaccccagttttatgttcagcctgatgctccgtgtattcaatgtctggagtgttgtggaatgtttgcaccccagacgtttgtgatgcattctcacagatcacctgacaaaagaacttgccactggggctttgaatcagctaaatggcattgctatcttcatgtgaaccaaaaatacttaggaacacctgaagaaaagaaactgaagataattttagaagaaatgaaggagaagtttagcatgagaagtggaaagagaaatcaatccaagacagatgcaccatcaggaatggaattacagtcatggtatcctgttataaagcaggaaggtgaccatgtttctcagacacattcatttttacaccccagctactacttatacatgtgtgataaagtggttgccccaaatgtgtcacttacttctgctgtatcccagtctaaagagctcacaaagacagaggcaagtaagtccatatcaagacagtcagagaaggctcacagtagtggtaaacttcaaaaaacagtgtcttatccagatgtctcacttgaggaacaggagaaaatggatttaaaaacaagtagagaattatgtagccgtttagatgcatcaatctcaaataattctacaagtaaaaggaaatctgagtctgccacttgcaacttagtcagagacataaacaaagtgggaattggccttgttgctgccgcttcatctccgcttcttgtgaaagatgtcatttgtgaggatgataagggaaaaatcatggaagaagtaatgagaacttatttaaaacaacaggaaaaactaaacttgattttgcaaaagaagcaacaacttcagatggaagtaaaaatgttgagtagttcaaaatctatgaaggaactcactgaagaacagcagaatttacagaaagagcttgaatctttgcagaatgaacatgctcaaagaatggaagaattttatgttgaacagaaagacttagagaaaaaattggagcagataatgaagcaaaaatgtacctgtgactcaaatttagaaaaagacaaagaggctgaatatgcaggacagttggcagaactgaggcagagattggaccatgctgaggccgataggcaagaactccaagatgaactcagacaggaacgggaagcaagacagaagttagagatgatgataaaagagctaaagctgcaaattctgaaatcatcaaagactgctaaagaatagaaactgttaaagagattcatctgtgtattactgacaaggttttttttgtttgttgcttgctttggtaatcgaattctgaagaatttatctgcatgacgataactaggcattctatccatttgtagatcagagaaagtgaagagattatatattagtacttaaatttttacattttccaaatgaatgaaaatgtatgtttctttgtacttttttaaaaaaatcagcttagtaacaatactatatggtttcaactagtaggtaatctgcttatatttctaatgcaaacttaacaattgtgtactttttaaaagctgcaatatgtgatggaaaaaaaaaaaaaaaaaaaaaaaaaaaaaaaaaaaaaaaaaagaaaaaaaaaaaaaaa

SEQ ID NO: 13865 - DNA, 939 bp, Homo sapiens
atggatggagataaccagagtgagaactcacagttccttctcctggggatctcagagagtcctgagcagcagcggatcctgttttggatgttcctgtccatgtacctggtcacggtgctgggaaatgtgctcatcatcctggccatcagctctgattcccacctgcacacccccatgtacttcttcctggccaacctctccttcactgacctcttctttgtcaccaacacaatccccaagatgctggtgaacttccagtcccagaacaaagccatctcctatgcagggtgtctgacacagctctacttcctggtctccttggtgaccctggacaacctcatcctggccgtgatggcgtatgatcgctatgtggccacctgctgccccctccactatgtcacagccatgagccctgggctctgtgtcttgctcctctccttgtgttgggggctgtctgttctctatggcctcctcctcaccttcctcctgaccagggtgaccttctgtgggcctcgagagatccactacctcttctgtgacatgtacatcctgctgtggctggcatgttccaacacccacatcattcacacagcgttgattgccactggctgcttcatcttcctcacccccttagggttcatgaccacatcctatgtacgtattgtcagaaccatccttcaaatgccctcggcctctaagaaatacaaaaccttctctacctgtgcctcccatttgggtgtggtctccctcttttatgggacgcttgctatggtgtacctgcagcccctccatacctactccatgaaggactcagtagccacagtgatgtatgctgtgctgacacctatgatgaaccctttcatctacaggctgaggaacaaagacatgcatggggctccgggaagagtcctatggagaccctttcagaggcctaaatga

SEQ ID NO: 13866 - DNA, 11626 bp, Homo sapiens
gggagccgcggcagagactgtgggtgccacaagcggacaggagccacagctgggacagctgcgagcggagccgagcagtggctgtagcggccacgactgggagcagccgccgccgcctcctcgggagtcggagccgccgcttctccactggcaggggccgcctgaagtgggagcagcgcctggagaaggcgggaggagcccggcccgggggacgggcggcgggatagcgggaccccggcggcgcggtgcgcttcagggcgcagcggcggccgcagaccgagccccgggcgcggcaagaggcggcgggagccggtggcggctcggcatcatgcgtcgagggcgtctgctggagatcgccctgggatttaccgtgcttttagcgtcctacacgagccatggggcggacgccaatttggaggctgggaacgtgaaggaaaccagagccagtcgggccaagagaagaggcggtggaggacacgacgcgcttaaaggacccaatgtctgtggatcacgttataatgcttactgttgccctggatggaaaaccttacctggcggaaatcagtgtattgtccccatttgccggcattcctgtggggatggattttgttcgaggccaaatatgtgcacttgcccatctggtcagatagctccttcctgtggctccagatccatacaacactgcaatattcgctgtatgaatggaggtagctgcagtgacgatcactgtctatgccagaaaggatacatagggactcactgtggacaacctgtttgtgaaagtggctgtctcaatggaggaaggtgtgtggccccaaatcgatgtgcatgcacttacggatttactggaccccagtgtgaaagagattacaggacaggcccatgttttactgtgatcagcaaccagatgtgccagggacaactcagcgggattgtctgcacaaaaacgctctgctgtgccacagtcggccgagcctggggccacccctgtgagatgtgtcctgcccagcctcacccctgccgccgtggcttcattccaaatatccgcacgggagcttgtcaagatgtggatgaatgccaggccatccccgggctctgtcagggaggaaattgcattaatactgttgggtcttttgagtgcaaatgccctgctggacacaaacttaatgaagtgtcacaaaaatgtgaagatattgatgaatgcagcaccattcctggaatctgtgaagggggtgaatgtacaaacacagtcagcagttacttttgcaaatgtccccctggtttttacacctctccagatggtaccagatgcatagatgttcgcccaggatactgttacacagctctgacaaacgggcgctgctctaaccagctgccacagtccataaccaaaatgcagtgctgctgtgatgccggccgatgctggtctccaggggtcactgtcgcccctgagatgtgtcccatcagagcaaccgaggatttcaacaagctgtgctctgttcctatggtaattcctgggagaccagaatatcctcccccaccccttggccccattcctccagttctccctgttcctcctggctttcctcctggacctcaaattccggtccctcgaccaccagtggaatatctgtatccatctcgggagccaccaagggtgctgccagtaaacgttactgattactgccagttggtccgctatctctgtcaaaatggacgctgcattccaactcctgggagttgccggtgtgagtgcaacaaagggttccagctggacctccgtggggagtgtattgatgttgatgaatgtgagaaaaacccctgtgctggtggtgagtgtattaacaaccagggttcgtacacctgtcagtgccgagctggatatcagagcacactcacgcggacagaatgccgagacattgatgagtgtttacagaatggccggatctgcaataatggacgctgcatcaacacagatggcagttttcattgcgtgtgtaatgcgggctttcatgttacacgagatgggaagaactgtgaagatatggatgaatgcagcataaggaacatgtgccttaatggaatgtgtatcaatgaagatggcagttttaaatgtatttgcaaacctggattccagctggcatcagatggacgttattgcaaagacattaacgagtgtgaaacccctgggatctgcatgaatgggcgttgcgtcaacactgatggctcctacagatgtgaatgcttccctggactggctgtgggtctggatggccgtgtgtgtgttgacacacacatgcggagcacatgctatggtggatacaagagaggccagtgtatcaaacctttgtttggtgctgtcactaaatctgaatgctgttgcgccagcactgagtatgcatttggggaaccttgccagccgtgtcctgcacagaattcagcggaatatcaggcactctgcagcagtgggccaggaatgacgtcagcaggcagtgatataaatgaatgtgcactagatcctgatatttgcccaaatggaatctgtgaaaaccttcgtgggacctataaatgtatatgcaattcaggatatgaagtggattcaactgggaaaaactgcgttgatattaatgaatgtgtactgaacagtctcctttgtgacaatggacaatgtagaaatactcctggaagttttgtctgtacctgccccaagggatttatctacaaacctgatctaaaaacatgtgaagacattgatgaatgcgaatcaagtccttgcattaatggagtctgcaagaacagcccaggctcttttatttgtgaatgttcttctgaaagtactttggatccaacaaaaaccatctgcatagaaaccatcaagggcacttgctggcagactgtcattgatgggcgatgtgagatcaacatcaatggagccaccttaaagtcccagtgctgctcctccctcggtgctgcgtggggaagcccgtgcaccctatgccaagttgatcccatatgtggtaaagggtactcaagaattaaaggaacacaatgtgaagatatagatgaatgtgaagtgttcccaggagtgtgtaaaaatggcctgtgtgttaacactagggggtcattcaagtgtcagtgtcccagtggaatgactttggatgccacaggaaggatctgtcttgatatccgcctggaaacctgcttcctgaggtacgaggacgaggagtgcaccctgcctattgctggccgccaccgcatggacgcctgctgctgctccgtcggggcagcctggggtactgaggaatgcgaggagtgtcccatgagaaatactcctgagtacgaggagctgtgtccgagaggacccggatttgccacaaaagaaattacaaatggaaagcctttcttcaaagatatcaatgagtgcaagatgatacccagcctctgcacccacggcaagtgcagaaacaccattggcagctttaagtgcaggtgtgacagcggctttgctcttgattctgaagaaaggaactgcacagacattgacgaatgccgcatatctcctgacctctgtggcagaggccagtgtgtgaacacccctggggactttgaatgcaagtgtgacgaaggctatgaaagtggattcatgatgatgaagaactgcatggatattgatgagtgtcagagagatcctctcctatgccgaggtggtgtttgccataacacagagggaagttaccgctgtgaatgcccgcctggccatcagctgtcccccaacatctccgcgtgtatcgacatcaatgaatgtgagctgagtgcacacctgtgccccaatggccgttgcgtgaacctcatagggaagtatcagtgtgcctgcaaccctggctaccattcaactcccgataggctattttgtgttgacattgatgaatgcagcataatgaatggtggttgtgaaaccttctgcacaaactctgaaggcagctatgaatgtagctgtcagccgggatttgcactaatgcctgaccagagatcatgcaccgacatcgatgagtgtgaagataatcccaatatctgtgatggtggtcagtgcacaaatatccctggagagtacaggtgcttgtgttatgatggattcatggcatctgaagacatgaagacttgtgtagatgtcaatgagtgtgacctgaatccaaatatctgcctaagtgggacctgtgaaaacacgaaaggctcatttatctgccactgtgatatgggctactccggcaaaaaaggaaaaactggctgtacagacatcaatgaatgtgaaattggagcacacaactgtggcaaacatgctgtatgtaccaatacagcaggaagcttcaaatgtagctgcagtcccgggtggattggagatggcattaagtgcactgatctggacgaatgttccaatggaacccatatgtgcagccagcatgcagactgcaagaataccatgggatcttaccgctgtctgtgcaaggaaggatacacaggtgatggcttcacttgtacagaccttgatgagtgctctgagaacctgaatctctgtggcaatggccagtgcctcaatgcaccaggaggataccgctgtgaatgcgacatgggcttcgtgcccagtgctgacgggaaagcctgtgaagatattgatgagtgctcccttccgaacatctgtgtctttggaacttgccacaacctccctggcctgttccgctgtgagtgtgagataggctacgaactggacagaagcggcgggaactgcacagatgtgaatgaatgcctggatccaaccacgtgcatcagtgggaactgtgtcaacactccaggcagctatatctgtgactgcccacctgattttgaactgaacccaactcgagttggctgtgttgatacccgctctggaaattgctatttggatattcgacctcgaggagacaatggagatacagcctgcagcaatgaaattggagttggtgtttccaaagcttcctgctgctgttctctgggtaaagcctggggtactccttgtgagatgtgtcctgctgtgaacacatccgagtacaaaattctttgtcctggaggggaaggtttccgaccaaatcctatcaccgttatattggaagatattgatgagtgccaggagctaccagggctgtgccaaggaggaaaatgtatcaacacctttgggagtttccagtgccgctgtccaaccggctactacctgaatgaagatacacgagtgtgtgatgatgtgaatgaatgtgagactcctggaatctgtggtccagggacatgttacaacaccgttggcaactacacctgtatctgtcctccagactacatgcaagtgaatgggggaaataattgcatggatatgagaagaagtttgtgctacagaaactactatgctgacaaccagacctgtgatggagaattgttattcaacatgaccaagaagatgtgctgctgttcctacaacattggccgggcgtggaacaagccctgtgaacagtgtcccatcccaagtacagatgagtttgctacactctgtggaagtcaaaggccaggctttgtcatcgacatttataccggtttacccgttgatattgatgagtgccgggagatcccaggggtctgtgaaaatggagtgtgtatcaacatggttggcagcttccgatgtgaatgtccagtgggattcttctataatgacaagttgttggtttgtgaagatattgacgagtgtcagaacggcccagtgtgccagcgcaacgccgaatgcatcaacactgcaggcagctaccgctgtgactgtaagcccggctaccgcttcacctccacaggacagtgcaatgatcgtaatgaatgtcaagaaatccccaatatatgcagtcatgggcagtgcattgacacagttggaagcttttattgcctttgccacactggttttaaaacaaatgatgaccaaaccatgtgcttggacataaatgaatgtgaaagagatgcctgtgggaatggaacttgccggaacacaattggttccttcaactgccgctgcaatcatggtttcatcctttctcacaacaatgactgtatagatgttgatgaatgtgcaagtggaaatgggaatctttgcagaaatggccaatgcattaatacagtggggtctttccagtgccagtgcaatgaaggctatgaggtggctccagatgggaggacctgtgtggatatcaatgaatgtcttctagaacccagaaaatgtgcaccaggtacctgtcaaaacttggatgggtcctacagatgcatttgcccacctggatacagtcttcaaaatgagaagtgtgaagatattgatgagtgtgtcgaagagccagaaatttgtgccctgggcacatgcagtaacactgaaggcagcttcaaatgtctgtgtccagaagggttttccttgtcctccagtggaagaaggtgccaagatttgcgaatgagctactgttatgcgaagtttgaaggaggaaagtgttcatcacccaaatccagaaatcactccaagcaggaatgctgctgtgccttgaagggagaaggctggggagacccctgcgagctctgccccacggaacctgatgaggccttccgccagatatgtccttatggaagtgggatcatcgtgggacctgatgattcagcagttgatatggacgaatgcaaagaacccgatgtctgtaaacatggacagtgcatcaatacagatggttcctatcgctgcgagtgtccctttggttatattctagcagggaatgaatgtgtagatactgatgaatgttctgttggcaatccttgtggaaatggaacctgcaagaatgtgattggaggttttgaatgcacctgcgaggagggatttgagcccggtccaatgatgacatgtgaagatataaatgaatgtgcccagaatcctctgctctgtgccttccgatgtgtgaacacttatgggtcatatgaatgcaaatgtcccgtgggatatgtgctcagagaagaccgtaggatgtgcaaagatgaggatgagtgtgaagagggaaaacatgactgtactgaaaaacaaatggaatgcaagaacctcattggcacatatatgtgcatctgtggacccgggtatcagcggagacctgatggagaaggctgtgtagatgagaatgaatgtcagacgaagccagggatctgtgagaatgggcgctgcctcaacacccgtgggagctacacctgtgagtgtaatgatgggtttaccgccagccccaaccaggacgagtgccttgacaatcgggaagggtactgcttcacagaggtgctacaaaacatgtgtcagatcggctccagcaacaggaaccccgtcaccaaatcggaatgctgctgtgacggagggagaggctggggtccccactgtgagatctgccctttccaggggactgtggctttcaagaaactctgtccccatggccgaggattcatgaccaatggagcagatatcgatgaatgcaaggttattcacgatgtttgccgaaatggggaatgtgtcaatgacagaggatcatatcattgcatttgtaaaactgggtacactccagatataactgggacttcctgtgtagatctgaacgagtgcaaccaggctcccaaaccctgcaattttatctgcaaaaacacagaagggagttaccagtgttcatgcccgaaaggctacattctgcaagaggatggaaggagctgcaaagatcttgatgagtgtgcaaccaagcaacacaactgccagttcctatgtgttaacaccattggcggcttcacatgcaaatgtcctcccggatttacccaacaccatacgtcctgcattgataacaatgaatgcacctctgacatcaatctgtgcgggtctaagggcatttgccagaacactcctggaagcttcacctgtgaatgccagcggggattctcacttgatcagaccggctccagctgtgaagacgtggacgagtgtgagggtaaccaccgctgccagcatggctgccagaacatcattgggggctacaggtgcagctgcccccagggctacctccagcactaccagtggaaccagtgtgttgatgaaaacgaatgcctcagcgctcacatctgcggaggagcctcctgtcacaacaccctggggagctacaagtgcatgtgtcccgccggcttccagtatgaacagttcagtggaggatgccaagacatcaatgaatgtggctctgcgcaggccccctgcagctatggctgttccaataccgagggcggttacctgtgtggctgtccacctggttacttccgcataggccaagggcactgtgtttctggaatgggcatgggccgaggaaacccagagccacctgtcagtggtgaaatggatgacaattcactctccccagaggcttgttacgagtgtaagatcaatggctaccccaaacggggcaggaaacggagaagcacaaacgaaactgatgcctccaatatcgaggatcagtctgagacagaagccaatgtgagtcttgcaagttgggatgttgagaagacagccatctttgctttcaatatttcccacgtcagtaacaaggttcgaatcctagaactccttccagctcttacaactctgacgaatcacaacagatacttgatcgaatctggaaatgaagatggcttctttaaaatcaaccaaaaggaagggatcagctacctccacttcacaaagaagaagccagtggctggaacctattcattacaaatcagtagtactccactttataaaaagaaagaacttaaccaactagaagacaaatatgacaaagactacctcagtggtgaactgggtgataatctgaagatgaaaatccaggttttgcttcattaattcaccatccagagaccaaataattaaaagaaaaacaaatatagataggtagaactatattttcccccaatcagaatcatcatatcataggtacaatctttcaccaagtaaatttgtataaataagcactattctttgtattaccaaagcaaggtacaggtgactaccctagttcaaaacaaccactttctcaggcttctcatgtgtgtagctaagctaccttgtcatatgtgttgattcttgaaaactgggacgtgtatttccattgggggttggccatttatgctgacatgccatccttccagcaaacgtacgggaatgtgctttcaattgatggactactctattttttgcaaatttgtaaactttgcttctccaaatacaagtactaggttgtccatttatggtacctatttggtgctagtaaattttcaaactagatttataaatgcactgtaatatgtacacaacttagaaaccaaattacaagtattcagttccaatacttcattaatttcaatcaaccaaagttagttcagtagcttatctcagttatgagtataatacattacatgtaaattaagtgtgtgtatactgtaatcgtgctattttttatcattgaaacatttataaactagaataataatgcccttaatgtgagggtttgtaatggtgcttattaagaccaaagacttgttaaatgtatacaccaagtggtaatgaaatttcggtgactggcccacacgtgcatagaggtctgggaggaccaggaaacagcctcagtggccagaggatcaccagtgcatccttcatcacagcatgtgcaatatgccaagattaccctcggtcattcctgtcaacaaggggtcaatgtcataaatgtcacaataaaacaatctcttcttttttttagtttaccccttggctttgtgttcttgcatggatttggggttggaggggccattccggaggctaaataaagtctcctggatttaaattatcctgggtctcttacttatggcttatgaaagtaccaaatgtataaccactagaagaaaatttaacatatgagtcgatcccttgttttatccattgaaagtagcagagtctggtgtcattaacctgacttgcttgtgagaaatttagattgtagagtcatttctgaaacatgacctaattcatcttgtgacttttaaatagtcttaaataccaagttcagtcattgtcttagagcacatgaatttcattataatagatttatcatgcccccctctcaaatatacacagttttggcaagccttaggtgttctgttccatttttttttcccctaaacatctttcgttagtcaatgctcatctaattacaaagggataatcccagactgtatccaattgctgtaacttttggtttcttaatgtcataatttttaaagtctgttttattttaagtgcaatattgagtatttagctgttaggctcaatccgtcgatatgaaataattttttaaatccctaagggcaggaaagcatttcgtggtagtgaaaataagaggaaataagatggcatgaaggtggtgggcggagaaactaggtaggacacaggaaagtgctctcaaaaatctttgaagagctcagctgaaaaaaatggagtagatttggctcatactattccggaaggcaaaaccagggtcagctgatgtcagccccagtttaatacacacggtcccaattatagagctactcactgaaagaatgggtttccttgcattgtggtgagctccctgtcacaagatagaagagtttcagtctaggcttaatggcaaccattggacaaagatgctttcttccacctaacaggccattaacatcttaaaggtatttttgtatctctaattttgtttataataggtgctcaacagaatgagctgaatggctgttacaaagggggtttgtaccttgggtaagagattaaaatataactcaaaatttccttctaacgctgcacctatggaaccatgtgatagaggtgtattaaaattgttatcgaagaatatatagcatatggtaaacaacagtttgcatatggaaaatgtctttgataatttaaccagaactgcattatattcaataacggattttctttataacaaacaacaggggaaaatggagttggcacacagtggatcactttgatatttttaatagtccaagtctggattttatttattcctgagccaacaattttgaacagcatattttccatgtttctgactgtaacaaaacattttcctcattgttccattgtaaatattcctcttgttggaactctttttaatcctgagatttaaacctgtacctttcaattgtctgtgacctttcaatttcactttcaatagttgaagaacttggctttgtaaatctctcagaagcttgaaaatatcttgtctctaccccctcagcccatttcatttgccaataattattttgtaagtagggttgaaatgaactcagctggccttgtgaaatgtttaaacttgcacaaacaactacatttttgttcaacaaatagcagtttactcagccaaaatcactttggatattgccattacaaatactgttaaacttcagaaatcatgtctgtaaattagatgagccaaaataaaggacaattgggttgatgctg

SEQ ID NO: 13867 - DNA, 3089 bp, Homo sapiens
agcagttcctcctaactcctgccagaaacagctctcctcaacatgagagctgcacccctcctcctggccagggcagcaagccttagccttggcttcttgtttctgctttttttctggctagaccgaagtgtactagccaaggagttgaagtttgtgactttggtgtttcggcatggagaccgaagtcccattgacacctttcccactgaccccataaaggaatcctcatggccacaaggatttggccaactcacccagctgggcatggagcagcattatgaacttggagagtatataagaaagagatatagaaaattcttgaatgagtcctataaacatgaacaggtttatattcgaagcacagacgttgaccggactttgatgagtgctatgacaaacctggcagccctgtttcccccagaaggtgtcagcatctggaatcctatcctactctggcagcccatcccggtgcacacagttcctctttctgaagatcagttgctatacctgcctttcaggaactgccctcgttttcaagaacttgagagtgagactttgaaatcagaggaattccagaagaggctgcacccttataaggattttatagctaccttgggaaaactttcaggattacatggccaggacctttttggaatttggagtaaagtctacgaccctttatattgtgagagtgttcacaatttcactttaccctcctgggccactgaggacaccatgactaagttgagagaattgtcagaattgtccctcctgtccctctatggaattcacaagcagaaagagaaatctaggctccaagggggtgtcctggtcaatgaaatcctcaatcacatgaagagagcaactcagataccaagctacaaaaaacttatcatgtattctgcgcatgacactactgtgagtggcctacagatggcgctagatgtttacaacggactccttcctccctatgcttcttgccacttgacggaattgtactttgagaagggggagtactttgtggagatgtactaccggaatgagacgcagcacgagccgtatcccctcatgctacctggctgcagccccagctgtcctctggagaggtttgctgagctggttggccctgtgatccctcaagactggtccacggagtgtatgaccacaaacagccatcaaggtactgaggacagtacagattagtgtgcacagagatctctgtagaaagagtagctgccctttctcagggcagatgatgctttgagaacatactttggccattaccccccagctttgaggaaaatgggctttggatgattattttatgttttagggacccccaacctcaggcaattcctacctcttcacctgaccctgcccccacttgccataaaacttagctaagttttgttttgtttttcagcgttaatgtaaaggggcagcagtgccaaaatataatcagagataaagcttaggtcaaagttcatagagttcccatgaactatatgactggccacacaggatcttttgtatttaaggattctgagattttgcttgagcaggattagataagtctgttctttaaatttctgaaatggaacagatttcaaaaaaaattcccacaatctagggtgggaacaaggaaggaaagatgtgaataggctgatggggaaaaaaccaatttacccatcagttccagccttctctcaaggagaggcaaagaaaggagatacagtggagacatctggaaagttttctccactggaaaactgctactatctgtttttatatttctgttaaaatatatgaggctacagaactaaaaattaaaacctctttgtgtcccttggtcctggaacatttatgttccttttaaagaaacaaaaatcaaactttacagaaagatttgatgtatgtaatacatatagcagctcttgaagtatatatatcatagcaaataagtcatctgatgagaacaagctatttgggcacaacacatcaggaaagagagcaccacgtgatggagtttctccagaagctccagtgataagagatgttgactctaaagttgatttaaggccaggcatggtggtttacgcctataatcccagcattttgggactccgaggtgggcagatcacttgagctcaggagctcaagatcagcctgggcaacatggtgaaaccttgtctctacataaaatacaaaaacttagatgggcatggtgctgtgtgcctatagtccactacttgtggggctaaggcaggaggatcacttgagccccggaggtcgaggctacagtgacccaagagtgcactactgtactccagccagggcaagagagcgagaccctgtctcaataaataaataaataaataaataaataaataaataaaaacaaagttgattaagaaaggaagtataggccaggcacagtggctcacacctgtaatccttgcattttggaaggctgaggcaggaggatcactttaggcctggtgtgttcaagaccagcctggtcaacatagtgagacactgtctctaccaaaaaaaggaaggaagggacacatatcaaactgaaacaaaattagaaatgtaattatgttatgttctaagtgcctccaagttcaaaacttattggaatgttgagagtgtggttacgaaatacgttaggaggacaaaaggaatgtgtaagtctttaatgccgatatcttcagaaaacctaagcaaacttacaggtcctgctgaaactgcccactctgcaagaagaaatcatgatatagctttccatgtggcagatctacatgtctagagaacactgtgctctattaccattatggataaagatgagatggtttctagagatggtttctactggctgccagaatctagagcaaagccatcccccctcctggttggtcacagaatgactgacaaagacatcgattgatatgcttctttgtgttatttccctcccaagtaaatgtttgtccttgggtccattttctatgcttgtaactgtcttctagcagtgagccaaatgtaaaatagtgaataaagtcattattaggaagttcaaaaaaaaaaaa

SEQ ID NO: 13868 - DNA, 1633 bp, Homo sapiens
cccacgtgacgggcgcccgcggaaggcgacatgggctccgctccctgggccccggtcctgctgctggcgctcgggctgcgcggcctccaggcgggggcccgcagggccccggaccccggcttccaggagcgcttcttccagcagcgtctggaccacttcaacttcgagcgcttcggcaacaagaccttccctcagcgcttcctggtgtcggacaggttctgggtccggggcgaggggcccatcttcttctacactgggaacgagggcgacgtgtgggccttcgccaacaactcggccttcgtcgcggagctggcggccgagcggggggctctactggtcttcgcggagcaccgctactacgggaagtcgctgccgttcggtgcgcagtccacgcagcgcgggcacacggagctgctgacggtggagcaggccctggccgacttcgcagagctgctccgcgcgctacgacgcgacctcggggcccaggatgcccccgccatcgccttcggtggaagttatggggggatgctcagtgcctacctgaggatgaagtatccccacctggtggcgggggcgctggcggccagcgcgcccgttctagctgtggcaggcctcggcgactccaaccagttcttccgggacgtcacggcggactttgagggccagagtcccaaatgcacccagggtgtgcgggaagcgttccgacagatcaaggacttgttcctacagggagcctacgacacggtccgctgggagttcggcacctgccagccgctgtcagacgagaaggacctgacccagctcttcatgttcgcccggaatgccttcaccgtgctggccatgatggactacccctaccccactgacttcctgggtcccctccctgccaaccccgtcaaggtgggctgtgatcggctgctgagtgaggcccagaggatcacggggctgcgagcactggcagggctggtctacaacgcctcgggctccgagcactgctacgacatctaccggctctaccacagctgtgctgaccccactggctgcggcaccggccccgacgccagggcctgggactaccaggcctgcaccgagatcaacctgaccttcgccagcaacaatgtgaccgatatgttcccggacctgcccttcactgacgagctccgccagcggtactgcctggacacctggggcgtgtggccccggcccgactggctgctgaccagcttctgggggggtgatctcagagccgccagcaacatcatcttctccaacgggaacctggacccctgggcagggggcgggattcggaggaacctgagtgcctcagtcatcgccgtcaccatccaggggggagcgcaccacctcgacctcagagcctcccacccagaagatcctgcttccgtggttgaggcgcggaagctggaggccaccatcatcggcgagtgggtaaaggcagccaggcgtgagcagcagccagctctgcgtggggggcccagactcagcctctgagcacaggactggaggggtctcaaggctcctcatggagtgggggcttcactcaagcagctggcggcagagggaaggggctgaataaacgcctggaggcctggccatgtaaaaaaaaaaaaaaaaa

SEQ ID NO: 13869 - DNA, 1297 bp, Homo sapiens
gtgagagccaggcgtccctctgcctgcccactcagtggcaacacccgggagctgttttgtcctttgtggagcctcagcagttccctctttcagaactcactgccaagagccctgaacaggagccaccatgcagtgcttcagcttcattaagaccatgatgatcctcttcaatttgctcatctttctgtgtggtgcagccctgttggcagtgggcatctgggtgtcaatcgatggggcatcctttctgaagatcttcgggccactgtcgtccagtgccatgcagtttgtcaacgtgggctacttcctcatcgcagccggcgttgtggtctttgctcttggtttcctgggctgctatggtgctaagactgagagcaagtgtgccctcgtgacgttcttcttcatcctcctcctcatcttcattgctgaggttgcagctgctgtggtcgccttggtgtacaccacaatggctgagcacttcctgacgttgctggtagtgcctgccatcaagaaagattatggttcccaggaagacttcactcaagtgtggaacaccaccatgaaagggctcaagtgctgtggcttcaccaactatacggattttgaggactcaccctacttcaaagagaacagtgcctttcccccattctgttgcaatgacaacgtcaccaacacagccaatgaaacctgcaccaagcaaaaggctcacgaccaaaaagtagagggttgcttcaatcagcttttgtatgacatccgaactaatgcagtcaccgtgggtggtgtggcagctggaattgggggcctcgagctggctgccatgattgtgtccatgtatctgtactgcaatctacaataagtccacttctgcctctgccactactgctgccacatgggaactgtgaagaggcaccctggcaagcagcagtgattgggggaggggacaggatctaacaatgtcacttgggccagaatggacctgccctttctgctccagacttggggctagatagggaccactccttttaggcgatgcctgactttccttccattggtgggtggatgggtggggggcattccagagcctctaaggtagccagttctgttgcccattcccccagtctattaaacccttgatatgccccctaggcctagtggtgatcccagtgctctactgggggatgagagaaaggcattttatagcctgggcataagtgaaatcagcagagcctctgggtggatgtgtagaaggcacttcaaaatgcataaacctgttacaatgttaaaaaaaaaaaaaaaaaaa

SEQ ID NO: 13870 - DNA, 7923 bp, Homo sapiens
gcgcactcgggcacgcgctcggaagtcgggggtcggcgcggagtgcaggctgctcccggggtaggtgagggaagcgcggaggcggggcgcgggggcagtggtcggcgagcagcgcggtcctcgctaggggcgcccacccgtcagtctctccggcgcgagccgccgccaccgcccgcgccggagtcaggcccctgggcccccaggctcaagcagcgaagcggcctccgggggacgccgctaggcgagaggaacgcgccggtgcccttgccttcgccgtgacccagcgtgcgggcggcgggatgagagggagccatcgggccgcgccggccctgcggccccgggggcggctctggcccgtgctggccgtgctggcggcggccgccgcggcgggctgtgcccaggcagccatggacgagtgcacggacgagggcgggcggccgcagcgctgcatgcccgagttcgtcaacgccgctttcaacgtgactgtggtggccaccaacacgtgtgggactccgcccgaggaatactgtgtgcagaccggggtgaccggggtcaccaagtcctgtcacctgtgcgacgccgggcagccccacctgcagcacggggcagccttcctgaccgactacaacaaccaggccgacaccacctggtggcaaagccagaccatgctggccggggtgcagtaccccagctccatcaacctcacgctgcacctgggaaaagcttttgacatcacctatgtgcgtctcaagttccacaccagccgcccggagagctttgccatttacaagcgcacacgggaagacgggccctggattccttaccagtactacagtggttcctgcgagaacacctactccaaggcaaaccgcggcttcatcaggacaggaggggacgagcagcaggccttgtgtactgatgaattcagtgacatttctcccctcactgggggcaacgtggccttttctaccctggaaggaaggcccagcgcctataactttgacaatagccctgtgctgcaggaatgggtaactgccactgacatcagagtaactcttaatcgcctgaacacttttggagatgaagtgtttaacgatcccaaagttctcaagtcctattattatgccatctctgattttgctgtaggtggcagatgtaaatgtaatggacacgcaagcgagtgtatgaagaacgaatttgataagctggtgtgtaattgcaaacataacacatatggagtagactgtgaaaagtgtcttcctttcttcaatgaccggccgtggaggagggcaactgcggaaagtgccagtgaatgcctgccctgtgattgcaatggtcgatcccaggaatgctacttcgaccctgaactctatcgttccactggccatgggggccactgtaccaactgccaggataacacagatggcgcccactgtgagaggtgccgagagaacttcttccgccttggcaacaatgaagcctgctcttcatgccactgtagtcctgtgggctctctaagcacacagtgtgatagttacggcagatgcagctgtaagccaggagtgatgggggacaaatgtgaccgttgccagcctggattccattctctcactgaagcaggatgcaggccatgctcttgtgatccctctggcagcatagatgaatgtaatgttgaaacaggaagatgtgtttgcaaagacaatgtcgaaggcttcaattgtgaaagatgcaaacctggattttttaatctggaatcatctaatcctcggggttgcacaccctgcttctgctttgggcattcttctgtctgtacaaacgctgttggctacagtgtttattctatctcctctacctttcagattgatgaggatgggtggcgtgcggaacagagagatggctctgaagcatctctcgagtggtcctctgagaggcaagatatcgccgtgatctcagacagctactttcctcggtacttcattgctcctgcaaagttcttgggcaagcaggtgttgagttatggtcagaacctctccttctcctttcgagtggacaggcgagatactcgcctctctgccgaagaccttgtgcttgagggagctggcttaagagtatctgtacccttgatcgctcagggcaattcctatccaagtgagaccactgtgaagtatgtcttcaggctccatgaagcaacagattacccttggaggcctgctcttaccccttttgaatttcagaagctcctaaacaacttgacctctatcaagatacgtgggacatacagtgagagaagtgctggatatttggatgatgtcaccctggcaagtgctcgtcctgggcctggagtccctgcaacttgggtggagtcctgcacctgtcctgtgggatatggagggcagttttgtgagatgtgcctctcaggttacagaagagaaactcctaatcttggaccatacagtccatgtgtgctttgcgcctgcaatggacacagcgagacctgtgatcctgagacaggtgtttgtaactgcagagacaatacggctggcccgcactgtgagaagtgcagtgatgggtactatggagattcaactgcaggcacctcctccgattgccaaccctgtccgtgtcctggaggttcaagttgtgctgttgttcccaagacaaaggaggtggtgtgcaccaactgtcctactggcaccactggtaagagatgtgagctctgtgatgatggctactttggagaccccctgggtagaaacggccctgtgagactttgccgcctgtgccagtgcagtgacaacatcgatcccaacgcagttggaaattgcaatcgcttgacgggagaatgcctgaagtgcatctataacactgctggcttctattgtgaccggtgcaaagacggattttttggaaatcccctggctcccaatccagcagacaaatgcaaagcctgcaattgcaatccgtatgggaccatgaagcagcagagcagctgtaaccccgtgacggggcagtgtgaatgtttgcctcacgtgactggccaggactgtggtgcttgtgaccctggattctacaatctgcagagtgggcaaggctgtgagaggtgtgactgccatgccttgggctccaccaatgggcagtgtgacatccgcaccggccagtgtgagtgccagcccggcatcactggtcagcactgtgagcgctgtgaggtcaaccactttgggtttggacctgaaggctgcaaaccctgtgactgtcatcctgagggatctctttcacttcagtgcaaagatgatggtcgctgtgaatgcagagaaggctttgtgggaaatcgctgtgaccagtgtgaagaaaactatttctacaatcggtcttggcctggctgccaggaatgtccagcttgttaccggctggtaaaggataaggttgctgatcatagagtgaagctccaggaattagagagtctcatagcaaaccttggaactggggatgagatggtgacagatcaagccttcgaggatagactaaaggaagcagagagggaagttatggacctccttcgtgaggcccaggatgtcaaagatgttgaccagaatttgatggatcgcctacagagagtgaataacactctgtccagccaaattagccgtttacagaatatccggaataccattgaagagactggaaacttggctgaacaagcgcgtgcccatgtagagaacacagagcggttgattgaaatcgcatccagagaacttgagaaagcaaaagtcgctgctgccaatgtgtcagtcactcagccagaatctacaggggacccaaacaacatgactcttttggcagaagaggctcgaaagcttgctgaacgtcataaacaggaagctgatgacattgttcgagtggcaaagacagccaatgatacgtcaactgaggcatacaacctgcttctgaggacactggcaggagaaaatcaaacagcatttgagattgaagagcttaataggaagtatgaacaagcgaagaacatctcacaggatctggaaaaacaagctgcccgagtacatgaggaggccaaaagggccggtgacaaagctgtggagatctatgccagcgtggctcagctgagccctttggactctgagacactggagaatgaagcaaataacataaagatggaagctgagaatctggaacaactgattgaccagaaattaaaagattatgaggacctcagagaagatatgagagggaaggaacttgaagtcaagaaccttctggagaaaggcaagactgaacagcagaccgcagaccaactcctagcccgagctgatgctgccaaggccctcgctgaagaagctgcaaagaagggacgggataccttacaagaagctaatgacattctcaacaacctgaaagattttgataggcgcgtgaacgataacaagacggccgcagaggaggcactaaggaagattcctgccatcaaccagaccatcactgaagccaatgaaaagaccagagaagcccagcaggccctgggcagtgctgcggcggatgccacagaggccaagaacaaggcccatgaggcggagaggatcgcaagcgctgtccaaaagaatgccaccagcaccaaggcagaagctgaaagaacttttgcagaagttacagatctggataatgaggtgaacaatatgttgaagcaactgcaggaagcagaaaaagagctaaagagaaaacaagatgacgctgaccaggacatgatgatggcagggatggcttcacaggctgctcaagaagccgagatcaatgccagaaaagccaaaaactctgttactagcctcctcagcattattaatgacctcttggagcagctggggcagctggatacagtggacctgaataagctaaacgagattgaaggcaccctaaacaaagccaaagatgaaatgaaggtcagcgatcttgataggaaagtgtctgacctggagaatgaagccaagaagcaggaggctgccatcatggactataaccgagatatcgaggagatcatgaaggacattcgcaatctggaggacatcaggaagaccttaccatctggctgcttcaacaccccgtccattgaaaagccctagtgtctttagggctggaaggcagcatccctctgacaggggggcagttgtgaggccacagagtgccttgacacaaagattacatttttcagacccccactcctctgctgctgtccatcactgtccttttgaaccaggaaaagtcacagagtttaaagagaagcaaattaaacatcctgaatcgggaacaaagggttttatctaataaagtgtctcttccatcacgttgctaccttacccacacttccctctgatttgcgtgaggacgtggcatcctacttacgtacgtggcataacacatcgtgtgagcccatgtatgctggggtagagcaagtagccctcccctgtctcatcgatccagcagaacctcctcagtctcagtactcttgtttctataaggaaaagttttgctactaacagtagcattgtgatggccagtatatccagtccatggataaagaaaatgcatctgcatctcctgcccctcttccttctaagcaaaaggaaataaacatcctgtgccaaaggtattggtcatttagaatgtcggtagccatccatcagtgcttttagctattatgagtgtaggacactgagccatccgtgggtcaggatgcaattatttataaaagtccccaggtgaacatggctgaagatttttctagtatattaataattgactaggaagatgaactttttttcagatctttgggcagctgataatttaaatctggatgggcagcttgcactcaccaatagaccaaaagacatcttttgatattcttataaatggaacttacacagaagaaatagggatatgataaccactaaagttttgttttcaaaatcaaactaattcttacagcttttttattagttagtcttggaactagtgttaagtatctggcagagaacagttaatccctaaggtcttgacaaaacagaagaaaaacaagcctcctcgtcctagtcttttctagcaaagggataaaacttagatggcagcttgtactgtcagaatcccgtgtatccatttgttcttctgttggagagatgagacatttgacccttagctccagttttcttctgatgtttccatcttccagaatccctcaaaaaacattgtttgccaaatcctggtggcaaatacttgcactcagtatttcacacagctgccaacgctatcgagttcctgcactttgtgatttaaatccactctaaaccttccctctaagtgtagagggaagacccttacgtggagtttcctagtgggcttctcaacttttgatcctcagctctgtggttttaagaccacagtgtgacagttccctgccacacacccccttcctcctaccaacccacctttgagattcatatatagcctttaacactatgcaactttgtactttgcgtagcaggggctggggtggggggaaagaaacctattatcatggacacactggtgctattaattatttcaaatttatatttttgtgtgaatgttttgtgttttgtttatccatgctatagaacaaggaatttatgtagatatacttagtcctatttctagaatgacactctgttcactttgctcaatttttcctcttcactggcacaagtatctgaatacctccttccctcccttctagagttctttggattgtactccaaagaattgtgccttgtgtttgcagcatctccattctctaaattaatataattgctttcctccacacccagccacgtaaagaggtaacttgggtcctcttccattgcagtcctgatgatcctaacctgcagcacggtggttttacaatgttccagagcaggaacgccaggttgacaagctatggtaggattaggaaagtttgctgaagaggatctttgacgccacagtgggactagccaggaatgagggagaaatgccctttttggcaattgttggagctggataggtaagttttataagggagtacattttgactgagcacttagggcatcaggaacagtgctacttactggtgggtagactgggagaggtggtgtaacttagttcttgatgatcccacttcctgtttccatctgcttgggatataccagagtttaccacaagtgttttgacgatatactcctgagctttcactctgctggcttctcccaggcctcttctactatggcaggagatgtggtgtgctgttgcaaagttttcacgtcatcgtttcctggctagttcatttcattaagtggctacatcctaacatatgcattggtcaaggttgcagcaagaggactgaagattgactgccaagctagtttgggtgaagttcactccagcaagtctcaggccacaatggggtggtttggtttggtttccttttaactttctttttgttatttgcttttctcctccacctgtgtggtatattttttaagcagaattttattttttaaaataaaaggttctttacaagatgataccttaattacactcccgcaacacagccattattttattgtctagctccagttatctgtattttatgtaatgtaattgacaggatggctgctgcagaatgctggttgacacagggattattatactgctatttttccctgaattcttttccttggaattccaactgtggaccttttatatgtgccttcactttagctgtttgccttactctacagccttgctctccggggtggttaataaaatgcaacacttggcatttttatgttataagaaaaacagtattttatttataataaaatctgaatattttgtaacccttta

SEQ ID NO: 13871 - DNA, 3005 bp, Homo sapiens
ggtctggcacaggcacgcacactctcagtagactctttcactcctctctctcttcctctctcacacgttctccaacccaaggaggccagacagagggacgtggtcactctctgaaaagttcaacttgagagacaaaatgcagtggacctccctcctgctgctggcagggctcttctccctctcccaggcccagtatgaagatgaccctcattggtggttccactacctccgcagccagcagtccacctactacgatccctatgacccttacccgtatgagacctacgagccttacccctatggggtggatgaagggccagcctacacctacggctctccatcccctccagatccccgcgactgcccccaggagtgcgactgcccacccaacttccccacggccatgtactgtgacaatcgcaacctcaagtacctgcccttcgttccctcccgcatgaagtatgtgtacttccagaacaaccagatcacctccatccaggaaggcgtctttgacaatgccacagggctgctctggattgctctccacggcaaccagatcaccagtgataaggtgggcaggaaggtcttctccaagctgaggcacctggagaggctgtacctggaccacaacaacctgacccggatgcccggtcccctgcctcgatccctgagagagctccatctcgaccacaaccagatctcacgggtccccaacaatgctctggaggggctggagaacctcacggccttgtacctccaacacaatgagatccaggaagtgggcagttccatgaggggcctccggtcactgatcttgctggacctgagttataaccaccttcggaaggtgcctgatgggctgccctcagctcttgagcagctgtacatggagcacaacaatgtctacaccgtccccgatagctacttccggggggcgcccaagctgctgtatgtgcggctgtcccacaacagtctaaccaacaatggcctggcctccaacaccttcaattccagcagcctccttgagctagacctctcctacaaccagctgcagaagatccccccagtcaacaccaacctggagaacctctacctccaaggcaataggatcaatgagttctccatcagcagcttctgcaccgtggtggacgtcgtgaacttctccaagctgcaggtgctgcgcctggacgggaacgagatcaagcgcagcgccatgcctgccgacgcgcccctctgcctgcgccttgccagcctcatcgagatctgagcagccctggcaccgggtactgggcggagagcccccgtggcatttggcttgatggtttggtttggcttttgctggaaggtccaggatggaccatgtgacagaagtccacgggcaccctctgtagtcttctttcctgtaggtggggttagggggggcgatcagggacaggcagccttctgctgaggacataggcagaagctcactcttttccagggacagaagtggtggtagatggaaggatccctggatgttccaaccccataaatctcacggctcttaagttcttcccaatgatctgaggtcatggaacttcaaaagtggcatgggcaatagtatataaccatacttttctaacaatccctggctgtctgtgagcagcacttgacagctctccctctgtgctgggctggtcgtgcagttactctgggctcccatttgttgcttctcaaaatatacctcttgcccagctgcctcttctgaaatccacttcacccactccactttcctccacagatgcctcttctgtgccttaagcagagtcaggagaccccaaggcatgtgagcatctgcccagcaacctgtggagacaacccacactgtgtctgagggtgaaaggacaccaggagtcacttctatacctccctaacctcacccctggaaagccaccagattggaggtcaccagcatgatgataatattcatgacctgatgtgggaggagacagccaacctcaggcttagatcaatgtatagggctatattttggcagctgggtagctctttgaaggtggataagacttcagaagaggaaaggccagactttgcttaccatcagcatctgcaatgggccaaacacacctcaaattggctgagttgagaaagcagccccagtagttccattcttgcccagcactttctgcattccaaacagcatcctacctgggtttttatccacaaaggtagcggccacatggtttttaaagtatgagaaacacagtttgtcctctccttttatccaagcaggaagattctatatcctgatggtagagacagactccaggcagccctggacttgctagcccaaagaaggaggatgtggttaatctgtttcacctggtttgtcctaaggccatagttaaaaagtaccagctctggctggggtccgtgaagcccaggccaggcagccaaatcttgcctgtgctgggcatacaaccctctgctttcacatctctgagctatatcctcattagtgaaggtggcttttgctttatagtttggctggggagcacttaattcttcccatttcaaaaggtaatgttgcctggggcttaacccacctgccctttgggcaaggttgggacaaagccatctgggcagtcaggggcaaggactgttggaggagagttagcccaagtataggctctgcccagatgccatcacatccctgatactgtgtatgctttgaagcaccttccctgagaagggaagaggggatctttggactacgttcttggctccagacctggaatccacaaaagccaaaccagctcatttcaacaaaggagctccgatgtgaggggcaaggctgccccctgccccagggctcttcagaaagcatctgcatgtgaacaccatcatgcctttataaaggatccttattacaggaaaagcatgagtggtggctaacctgaccaataaagttattttatgattgcatctaaaaaaaaaaaaaaaaaaaa

SEQ ID NO: 13872 - DNA, 10724 bp, Homo sapiens
ctttccaatatccgtcttcggagcgcacgggaatccgccgagctctgcgtgcaggcccttttttcttttgaggttcacattttttgaaattttacgccagggcttttgtaatttcctcccccgcccgctgacggtcctggagtcgctcggggctttaggccggttatgcaacgtgtaccgctcggggctgccggctgcacctccgccgcgcctcgccgctcactgcgctagacccggcgccccgcgtctcgcttcgcgggcagtcagggggccggcgctctgtcgaggtctccagctagagcagggagcccgagcccgagggagtccccggagccgacgaagggcttattagaccctgactcttttctgaggcgcgcagattttgtctttgatcactccctctccgcgggtctacggccgcgcgctttcggcgccggcgatggggagaagacggaggctgtgtctccagctctacttcctgtggctgggctgtgtggtgctctgggcgcagggcacggccggccagcctcagcctcctccgcccaagccgccccggccccagccgccgccgcaacaggttcggtccgctacagcaggctctgaaggcgggtttctagcgcccgagtatcgcgaggagggtgccgcagtggccagccgcgtccgccggcgaggacagcaggacgtgctccgagggcccaacgtgtgcggctccagattccactcctactgctgccctggatggaagacgctccctggaggaaaccagtgcattgtcccgatttgtagaaatagttgtggagatggattttgttcccgtcctaacatgtgtacttgttccagtgggcaaatatcatcaacctgtggatcaaaatcaattcagcagtgcagtgtgagatgcatgaatggtgggacctgtgcagatgaccactgccagtgccagaaaggatatattggaacttattgtggacaacctgtctgtgaaaatggatgtcagaatggtggacgttgcatcggacccaaccgctgtgcttgtgtttatgggttcactggtccacagtgtgaaagagattacaggacaggcccgtgtttcactcaggtcaacaaccagatgtgccaagggcagctgacaggcattgtctgcacgaagactctgtgctgtgccaccattggacgggcgtggggccatccctgtgagatgtgtccagcccagcctcagccctgccgacggggtttcatccccaacatccgcactggagcttgccaagatgttgatgaatgccaggctatcccagggatatgccaaggaggaaactgtatcaatacagtgggctcttttgaatgcagatgccctgctggtcacaaacagagtgaaactactcagaaatgtgaagacattgatgagtgcagcatcattcctgggatatgtgaaactggtgaatgttccaacaccgtgggaagctatttttgtgtttgtccacgtggatatgtaacctcaacagatggctctcgatgcatcgatcagagaacaggcatgtgtttctcgggcctggtgaatggccgctgtgcacaagagctcccggggagaatgacgaaaatgcagtgctgctgtgagcctggccgctgctggggcatcggaaccattcctgaagcctgtcctgtcagaggttctgaggaatatcgcagactttgcatggatggacttccaatgggaggaattccagggagtgctggttccagacctggaggcactgggggaaatggctttgccccaagtggcaatggcaatggctatggcccaggagggacaggcttcatccccatccctggaggcaatggcttttctcctggcgttgggggagccggtgtgggggccgggggacagggacctatcatcactggactaacaattctgaaccagacaatagatatctgtaagcatcatgctaacctttgtttaaatggacgctgtataccaactgtctcaagctaccgatgtgaatgcaacatgggttataagcaggatgcaaatggagattgtatagatgttgatgaatgcacatcaaatccctgcactaatggagattgtgttaacacacctggttcctattattgtaaatgtcatgctggattccagaggactcctaccaagcaagcatgcattgatattgatgagtgcatccagaatggggttctttgtaaaaacggtcgatgcgtgaacacagatggaagtttccagtgcatttgcaatgccggctttgaattaactacagatggaaaaaactgtgttgatcatgatgaatgtacaactaccaacatgtgtttgaatggaatgtgcatcaatgaagatggcagcttcaagtgcatctgcaaaccaggatttgtcttggctccaaatgggcgttactgtactgatgttgatgaatgccagaccccaggaatctgcatgaatgggcactgcatcaacagtgaagggtccttccgctgtgactgtcccccaggcctggctgtgggcatggatggacgtgtgtgtgttgatactcacatgcgcagtacctgctatggaggaatcaagaaaggagtgtgtgtgcgtcctttccccggtgcagtgaccaagtccgaatgctgctgtgccaatccagactatggttttggagaaccctgccagccatgccctgcaaaaaattcagctgaattccacggcctttgtagtagtggagtaggtatcactgtggatggaagagatatcaatgaatgtgctttggatcctgatatatgtgccaatgggatttgtgaaaacttacgtggtagttaccgttgtaattgcaacagtggctatgaaccagatgcctctggaagaaactgtattgacattgatgaatgtttagtaaacagactgctttgtgataacggattgtgccgaaacacgccaggaagttacagctgtacgtgcccaccagggtatgtgttcaggactgagacagagacctgtgaagatataaatgaatgtgaaagcaacccatgtgtcaatggggcctgcagaaacaaccttggatctttcaattgtgaatgttcgcccggcagcaaactcagctccacaggattgatctgtattgacagcctgaaggggacctgttggctcaacatccaggacagccgctgtgaggtgaatattaatggagccactctgaaatctgaatgctgtgccaccctcggagccgcctgggggagcccctgtgagcggtgtgaactagatacagcttgcccaagagggcttgccaggattaaaggtgttacgtgtgaagatgttaatgagtgtgaggtgttccctggcgtttgtccaaatggacgctgtgtcaacagtaagggatcttttcattgcgagtgccctgaaggccttacgttggatgggactggccgtgtatgtttggatattcgcatggagcagtgttacttgaagtgggatgaagatgaatgcatccaccccgttcctggaaagttccgcatggatgcctgctgctgtgctgtcggggcggcttggggcaccgagtgtgaggagtgccccaaacctggcaccaaggaatacgagacgctgtgcccccgcggggctggctttgctaaccgaggggatgttcttactgggcggccattttacaaagacatcaatgaatgcaaagcatttcctgggatgtgcacttatgggaagtgcagaaatacaatcggaagcttcaaatgccgttgcaatagtggctttgctctagacatggaggaaagaaactgcacggacatcgacgagtgcaggatttctcctgacctctgtggcagtggaatctgcgtcaatacaccgggcagctttgagtgcgagtgcttcgaaggctatgaaagtggcttcatgatgatgaagaactgcatggacattgacgaatgtgaacgtaaccctctcctttgtaggggtggcacctgtgtgaacactgagggcagctttcagtgtgactgcccactgggacacgagctgtcaccatcccgtgaggactgtgtggatattaatgaatgctccctgagtgacaatctctgcagaaatggaaaatgtgtgaacatgattggaacctatcagtgctcttgcaatcctggatatcaggctacgccagaccgccagggctgtacagatattgatgaatgtatgataatgaacggaggctgtgacacccagtgcacaaattcagagggaagctacgaatgcagctgcagtgagggttatgccctgatgccagatgggagatcgtgtgcagacattgatgaatgtgaaaacaatcctgatatctgtgatggcggccagtgtaccaacattcctggagagtatcgctgcctctgctatgatggcttcatggcttccatggacatgaaaacatgcattgatgtcaatgaatgtgacctaaattcaaatatctgcatgtttggggaatgtgagaacacaaagggatccttcatttgccactgtcagctgggttactcagtgaagaaggggaccacaggatgtacagatgtggatgagtgtgaaattggtgctcataactgcgacatgcatgcctcatgtctgaatatcccaggaagcttcaagtgtagctgcagagaaggctggattggaaacggcatcaagtgtattgatctggacgaatgttctaatggaacccaccagtgtagcatcaatgctcagtgtgtaaataccccgggctcataccgctgtgcctgctccgaaggtttcactggtgatggctttacctgctcagatgttgatgagtgtgcagaaaacataaacctctgtgagaacggacagtgccttaatgtcccgggtgcatatcgctgcgagtgtgagatgggcttcactccagcctcagacagcagatcctgccaagatattgatgaatgctccttccaaaacatttgtgtctttggaacatgtaataacctgcctggaatgtttcattgcatctgcgatgatggttatgaattggacagaacaggagggaactgtacagatattgatgagtgtgcagatcctataaactgtgtcaatggcctatgtgtcaacacgcctggtcgctatgagtgtaactgcccacccgattttcagttgaacccaactggtgtgggttgtgttgacaaccgtgtgggcaactgctacctgaagtttggacctcgaggagatgggagtctgtcttgcaacaccgagatcggggtgggcgtcagtcgctcttcatgctgctgctctctgggaaaggcctggggaaacccctgtgagacatgcccccctgtcaatagcactgaatattacaccctgtgtcccggaggtgaaggcttcagacctaaccccatcacaatcattttagaagacattgacgaatgccaggagttaccaggtctctgccagggtggaaactgcatcaacacttttgggagcttccagtgtgagtgcccacaaggctactacctcagcgaggatacccgcatctgtgaagatattgatgagtgttttgcacatcctggtgtgtgtgggcctgggacctgctataacaccctgggaaattacacctgcatttgcccacctgagtacatgcaggtcaatggaggccacaactgcatggacatgagaaaaagcttttgctaccgaagctataatggaaccacttgtgagaatgagttgcctttcaatgtgacaaaaaggatgtgctgctgcacatataatgtgggcaaagcctggaacaaaccttgtgaaccatgcccaactccaggaacagctgactttaaaaccatatgtggaaatattcctggattcacctttgacattcacacaggaaaagctgttgacattgatgaatgtaaagagattccaggcatttgtgcaaatggtgtgtgcattaaccagattggcagtttccgctgtgaatgccctacaggattcagttacaatgacctgctgttggtttgtgaagatatagatgagtgcagcaatggtgataatctctgccagcggaatgcagactgcatcaatagtcctggtagttaccgctgtgaatgtgccgcgggtttcaaactttcacccaatggggcctgtgtagatcgcaatgaatgtttagaaattcctaacgtttgcagtcatggcttgtgtgttgatctgcaaggaagttaccagtgcatctgccacaatggctttaaggcttctcaggaccagaccatgtgcatggatgttgatgagtgcgagcggcatccatgtggaaatggaacttgtaaaaacaccgttggatcctataactgtctgtgctacccagggtttgaactcactcataataatgattgcctggacatagatgagtgcagttccttttttggtcaggtgtgcagaaatggacgttgttttaatgaaattggttctttcaagtgtctatgtaacgaaggttatgaacttaccccagatggcaaaaactgtatagacactaatgagtgtgtcgcccttcccggctcttgctctcctggtacctgtcagaatttggagggatccttcagatgcatctgtcccccagggtatgaagtaaaaagcgagaactgcattgatataaatgaatgtgatgaagatcccaacatttgtctttttggttcctgtactaatactccagggggcttccagtgcctctgcccccctggctttgtactatctgataatggacggagatgctttgatactcgccagagcttctgcttcacaaattttgaaaatggaaagtgttctgtacccaaagctttcaacaccacaaaagcaaaatgctgctgtagtaagatgccaggagagggctggggggacccctgtgagctgtgccccaaagacgatgaagttgcatttcaggatttgtgtccatatggccatggaactgtccctagtcttcatgatacacgtgaagatgtcaatgagtgtcttgagagcccaggcatttgttcaaatggtcaatgtatcaacaccgacggatcttttcgctgtgaatgtccaatgggctacaaccttgactacactggagtacgctgtgtggatactgatgagtgttcaatcggcaatccgtgtggaaatggtacatgcaccaatgttattgggagttttgaatgcaattgcaatgaaggctttgagccagggcccatgatgaattgtgaagatatcaacgaatgtgcccagaacccactgctgtgtgctttccgctgcatgaacacttttgggtcctatgaatgcacgtgcccgattggctatgccctcagggaagatcaaaagatgtgcaaagatctggatgaatgtgctgaagggttacacgactgtgaatctaggggcatgatgtgtaagaatctaatcggcaccttcatgtgcatctgccctcctggaatggcccgaaggcccgatggagaaggctgtgtagatgaaaatgaatgcaggaccaagccaggaatctgtgaaaatggacgttgtgttaacattattggaagctatagatgtgagtgtaatgaaggattccagtcaagttcttcaggcactgaatgccttgacaatcgacagggtctctgctttgcagaggtactgcagacaatatgtcaaatggcatccagtagtcgcaatctcgtcactaagtcagaatgctgctgtgatggtgggcgaggctggggccaccagtgcgagctttgcccacttcctggaactgcccagtacaaaaagatatgtcctcatggcccaggatatacaactgatggaagagatattgatgaatgtaaggtaatgccaaacctctgcaccaatggtcagtgcatcaataccatgggctcattccgatgcttctgcaaggttggctacaccacagacatcagtggaacctcttgtatagaccttgatgaatgctcccagtccccgaaaccatgcaactacatctgcaagaacactgaggggagttatcagtgttcatgtccgagggggtatgtcctgcaagaggatggaaagacatgcaaagaccttgatgaatgtcaaacaaagcagcataactgccagttcctctgtgtcaacaccctgggggggtttacctgtaaatgtccacctggtttcacacagcatcacactgcttgtatcgacaacaacgaatgtgggtctcaaccttcgctttgtggagcaaagggaatctgtcaaaacactccaggcagtttcagctgtgaatgccaaagagggttctctcttgatgccaccggactgaactgtgaagatgttgatgaatgtgatgggaaccacaggtgccaacacggctgccagaacatcctgggtggctacagatgtggctgcccccaaggctacatccagcactaccagtggaatcagtgtgtcgatgagaatgaatgctccaatcccaatgcctgtggctctgcttcctgctacaacaccctggggagttacaagtgcgcctgcccctcggggttctccttcgaccagttctccagtgcctgccacgacgtgaatgagtgctcgtcctccaagaacccctgcaattacggctgctctaacacggaggggggctacctctgtggctgcccccctgggtattacagagtgggacaaggccactgtgtctcaggaatgggatttaacaaggggcagtacctgtcactggatacagaggtcgatgaggaaaatgctctgtccccagaagcatgctacgagtgcaaaatcaacggctattctaagaaagacagcaggcagaagagaagtattcatgaacctgatcccactgctgttgaacagatcagcctagagagtgtcgacatggacagccccgtcaacatgaagttcaacctctcccacctcggctctaaggagcacatcctggaactaaggcccgccatccagcccctcaacaaccacatccgttatgtcatctctcaagggaacgatgacagcgtcttccgcatccaccaaaggaatgggctcagctacttgcacacggccaagaagaagctcatgcccggcacatacacactggaaatcactagcatccctctctacaagaagaaggagcttaagaaactggaagagagcaatgaggatgactacctcctaggggagcttggggaggctctcagaatgaggctgcagattcagctctattaacccttcacagacttgggcccaggctcaaatcctagcacagccagtctgcagaagcatttgaaaagtcaaggactaattttaaagaggaaaaataataataactcttgtttctttcctccctgtcttagactttgaatgttgaccctcacagggagggataatttagactctggtatggccaaagatttgagcacaaaggcaaccgtggttactgtattttttatataacttcattttaaaatatattaaaagaaacctaaatgttcaagatatcagcatatggcactaaatgcacaaaaataatgtgagctttttttttttttcctgttagcagtctgtaacactttgggtattttgctatagttgctaattaaaaaaatatagatgtttatttatttttaatgcagtaatatatggagaaatgaacaaactatgtaaacaaaaagggaaactcacttgtttttctttagatttataaatttgagctattttttttagaggtgctttttaaaaatccaatagatacaagagatgtttcctttggttttctgccagtcatccagctgatacacacctgatgattttaaagaaagccacacagagctgaatgggcagtgtaatcaataatttaaaaaacatgaatgtcattagatcctttataacgtagatcgaagccaaagcagctcatttgtgacaacatttcatatcaccagacacaccaggcaacagaagttgaagcacaaccactgtagcaaaataccttgactgcttgtgagaccattagcattgcaggccaaaccgtactgtatttccttctcataacctcaaggaaccatatgtgctacccacaacacctcattcttacccagggtgcgctgcgtcctcatggtactgtaggcagctgaagaaccgccgttcccttgaaagggaacacctggcattctgtggtgtttcgtgctgtcttaaataatggtgcatttattatgttcaagttatttcaggattgccatatgtgcaaacaaatcatgcaatgcagccaaggaatatatgttgttgttgttgttttaaacccattttttttttagaattttcattaatactgtagttatacaccatatgcctcattttatcatagcctattgtgtatgaaagatgtttgtacaatgaattgatgtttagtttgctttagtcatttaaaaagatattgtaccaggatgtgctattaagagcacgtatccattattcttctcaacccaagaacctgtttcctggaccagtgaccaaacctcatatgtgaaatggccaaagcacatgcaggctcctggttgttcctctcaaacctgtgctgaccaaagattagtaaccagttatacccagtattttgaggttttattgtttttttaataactaaaaagaaaaaaggaacagtgtaaatttgtaatcaagagtttgtgaggaaaaacttatggtttttggttttgtttgtttttgtaggtctgtgtatcaaatatgacacttttcttgcaataaagcttattttggggta

SEQ ID NO: 13873 - DNA, 8967 bp, Homo sapiens
gcagcctccaggggacacgccatgactctggagggtctgtatttggcaaggggccccctggcccggctcctgctggcctggtcggccctgttgtgcatggcaggtggccaaggccgctgggacggggccttggaggctgcaggtcctggacgtgtgcggaggcggggcagcccaggcatcttgcaggggccgaatgtgtgcggctcccggttccatgcctactgctgtccaggctggaggacattccctggcaggagccagtgtgtcgtacccatctgtaggcgcgcctgcggtgaaggcttctgctcccagcccaacctgtgcacctgtgcggatgggacgctggctcccagctgcggggtgagccgagggtcagggtgcagtgtgagctgtatgaatgggggcacctgccggggggcgtcctgtctgtgtcagaagggctacacaggcaccgtgtgtgggcagcccatctgtgaccgcggctgccacaatgggggtcgctgcattgggcccaaccgctgcgcctgtgtgtatggcttcatgggacctcaatgtgagagagattaccggacgggaccctgctttggccaagtaggccccgaggggtgccagcatcagctgacgggcctcgtgtgcaccaaggcactttgctgtgccactgtgggccgtgcctggggccttccatgtgaactttgccctgcacagccacacccctgccgccgcggcttcatccccaatatccacacgggggcctgccaagatgtggatgagtgccaggctgtgccaggcctgtgccagggaggcagctgcgtcaacatggtgggctccttccattgccgctgtccagttggacaccggctcagtgacagcagcgccgcatgtgaagactaccgggccggcgcctgcttctcagtgcttttcgggggccgctgtgctggagacctcgccggccactacactcgcaggcagtgctgctgtgacaggggcaggtgctgggcagctggcccggtccctgagctgtgtcctcctcggggctccaatgaattccagcaactgtgcgcccagcggctgccgctgctacccggccaccctggcctcttccctggcctcctgggcttcggatccaatggcatgggtccccctcttgggccagcgcgactcaacccccatggctctgatgcgcgtgggatccccagcctgggccctggcaactctaatattggcactgctaccctgaaccagaccattgacatctgccgacacttcaccaacctgtgtctgaatggccgctgcctgcccacgccttccagctaccgctgcgagtgtaacgtgggctacacccaggacgtgcgcggcgagtgcattgatgtagacgaatgcaccagcagcccctgccaccacggtgactgcgtcaacatccccggcacctaccactgccggtgctacccgggcttccaggccacgcccaccaggcaggcatgcgtggatgtggacgagtgcattgtcagtggtggcctttgtcacctgggccgctgtgtcaacacagagggcagcttccagtgtgtctgcaatgcaggcttcgagctcagccctgacggcaagaactgtgtggaccacaacgagtgtgccaccagcaccatgtgcgtcaacggcgtgtgtctcaacgaggatggcagcttctcctgcctctgcaaacccggcttcctgctggcgcctggcggccactactgcatggacattgacgagtgccagacgcccggcatctgcgtgaacggccactgtaccaacaccgagggctccttccgctgccagtgcctgggggggctggcggtaggcacggatggccgcgtgtgcgtggacacccacgtgcgcagcacctgctatggggccatcgagaagggctcctgtgcccgccccttccctggcactgtcaccaagtccgagtgctgctgtgccaatccggaccacggttttggggagccctgccagctttgtcctgccaaagactccgctgagttccaggcactgtgcagcagtgggcttggcattaccacggatggtcgagacatcaacgagtgtgctctggatcctgaggtttgtgccaatggcgtgtgcgagaaccttcggggcagctaccgctgtgtctgcaacctgggttatgaggcaggtgcctcaggcaaggactgcacagacgtggatgagtgtgccctcaacagcctcctgtgtgacaacgggtggtgccagaatagccctggcagctacagctgctcctgcccccccggcttccacttctggcaggacacggagatctgcaaagatgtcgacgaatgcctgtccagcccgtgtgtgagtggcgtctgtcggaacctggccggctcctacacctgcaaatgtggccctggcagccggctggacccctctggtaccttctgtctagacagcaccaagggcacctgctggctgaagatccaggagagccgctgtgaggtgaaccttcagggagccagcctgcggtctgagtgctgcgccaccctcggggcagcctgggggagcccctgcgaacgctgcgagatcgaccctgcctgtgcccggggctttgcccggatgacgggtgtcacctgcgatgatgtgaacgagtgtgagtccttcccgggagtctgtcccaacgggcgttgcgtcaacactgctgggtctttccgctgtgagtgtccagagggcctgatgctggacgcctcaggccggctgtgcgtggatgtgagattggaaccatgtttcctgcgatgggatgaggatgagtgtggggtcaccctgcctggcaagtaccggatggacgtctgctgctgctccatcggggccgtgtggggagtcgagtgcgaggcctgcccggatcccgagtctctggagttcgccagcctgtgcccgcgggggctgggcttcgccagccgggacttcctgtctggccgaccattctataaagatgtgaatgaatgcaaggtgttccctggcctctgcacgcacggtacctgcagaaacacggtgggcagcttccactgcgcctgtgcggggggcttcgccctggatgcccaggaacggaactgcacagatatcgacgagtgtcgcatctctcctgacctctgcggccagggcacctgtgtcaacacgccgggcagctttgagtgcgagtgttttcccggctacgagagtggcttcatgctgatgaagaactgcatggacgtggacgagtgtgcaagggacccgctgctctgccggggaggcacttgcaccaacacggatgggagctacaagtgccagtgtccccctgggcatgagctgacggccaagggcactgcctgtgaggacatcgatgagtgctccctgagtgatggcctgtgtccccatggccagtgtgtcaatgtcatcggtgccttccagtgctcctgccatgccggcttccagagcacacctgaccgccagggctgcgtggacatcaacgaatgccgggtccagaatggtgggtgtgacgtgcactgtattaacactgagggcagctaccggtgcagctgtgggcagggctactcgctgatgcccgacggaagggcatgtgcagacgtggacgagtgtgaagagaacccccgcgtttgtgaccaaggccactgcaccaacatgccagggggtcaccgctgcctgtgctatgatggcttcatggccacgccagacatgaggacatgtgttgatgtggatgagtgtgacctgaaccctcacatctgcctccatggggactgcgagaacacgaagggttcctttgtctgccactgtcagctgggctacatggtcaggaagggggccacaggctgctctgatgtggatgaatgcgaggttggaggacacaactgtgacagtcacgcctcctgtctcaacatcccggggagtttcagctgtaggtgcctgccaggctgggtgggggatggcttcgaatgtcacgacctggatgaatgcgtctcccaggagcaccggtgcagcccaagaggtgactgtctcaatgtccctggctcctaccgctgcacctgccgccagggctttgccggggatggcttcttctgcgaagacagggatgaatgtgccgagaacgtggacctctgtgacaacgggcagtgcctcaatgcgcccggcgggtaccgctgtgaatgtgagatgggctttgaccccaccgaggaccaccgggcctgccaggatgtggacgagtgtgcgcaagggaacctctgtgcatttgggagctgtgagaacctgcctggaatgttccgctgcatctgcaatggtggctacgaactggaccgagggggtggcaactgcacagacatcaacgagtgtgcagacccagtaaactgcatcaacggcgtgtgcattaacacccccggcagctacctctgcagctgcccccaggattttgagctgaaccccagcggagtgggctgcgtggacactcgggccgggaactgtttcctggagacgcatgaccgaggggacagtggcatttcctgcagtgccgagatcggagttggtgtcacccgagcttcctgctgttgctccctgggccgggcttggggcaatccctgtgagctgtgccctatggccaacaccactgagtacagaaccctgtgcccgggtggtgagggcttccagcctaaccgcatcactgtcattctggaagacatcgacgagtgccaagagctgccagggctgtgtcaggggggtgactgcgtcaacacgtttggcagtttccagtgtgagtgcccacctggctaccacctcagtgagcacacccgcatctgtgaggatattgacgaatgctccacacactccggcatctgtggccctggcacctgctacaacaccctggggaactacacctgtgtctgccctgcagagtacctccaagtcaatggtggcaacaactgcatggatatgaggaagagtgtctgcttccggcactataacggcacatgtcaaaatgagctggccttcaacgtgacccggaaaatgtgttgctgctcctacaacattggccaggcctggaatagaccctgtgaggcctgccccactcccatcagtcctgactaccagatcctgtgtggaaatcaggccccgggattcctcactgacatccacacggggaagccccttgacattgatgagtgtggggagatccccgccatctgtgccaatggcatctgcataaaccagatcgggagtttccgctgcgagtgccccgcaggcttcaactacaacagcatcctgctggcttgtgaagatgtcgatgagtgtggcagcagggagagtccctgccagcagaatgctgactgcatcaacatccccggtagctaccgctgcaagtgcacccgagggtacaaactgtcgccaggcggggcttgtgtgggacggaatgagtgtcgggagatcccgaatgtctgtagccatggtgactgcatggacacagaaggcagctacatgtgtctgtgtcaccgtggattccaggcctctgcagaccagaccctgtgcatggacattgacgagtgtgaccggcagccttgtggaaatgggacctgcaagaacatcattggctcctacaactgcctctgcttccctggctttgtggtgacacacaatggggattgtgtggattttgatgagtgtactaccctggtggggcaggtgtgccgatttggccattgcctcaacacagctggttccttccactgcctctgccaggatggctttgagctcacagctgatgggaagaactgtgtggacaccaatgagtgcctcagccttgcaggaacctgcctacccggcacttgccagaacctcgagggctccttccgctgcatctgtccccctggcttccaggtgcagagtgaccactgcattgatatcgacgagtgctcagaggagcccaacctctgcctctttggcacctgtaccaacagccctgggagcttccagtgcctctgcccacctggctttgtcctctctgacaatgggcaccgttgctttgacacacggcagagtttctgcttcacccgttttgaggctgggaagtgctcggtgcccaaagctttcaacaccaccaagacccgctgctgctgcagtaagaggcctggggagggctggggagacccctgcgaactgtgtccccaggagggcagcgctgcctttcaggagctctgcccctttggccacggggcagtcccaggcccggatgactcccgagaagacgtgaatgagtgtgcagagaaccctggcgtctgcactaacggcgtctgtgtcaacaccgatggatccttccgctgtgagtgtccctttggctacagcctggacttcactggcatcaactgtgtggacacagacgagtgctctgtcggccacccctgtgggcaagggacatgcaccaatgtcatcggaggcttcgaatgtgcctgtgctgacggctttgagcctggcctcatgatgacctgcgaggacatcgacgaatgctccctgaacccgctgctctgtgccttccgctgccacaataccgagggctcctacctgtgcacctgtccagccggctacaccctgcgggaggatggggccatgtgtcgagatgtggacgagtgtgcagatggtcagcaggactgccacgcccggggcatggagtgcaagaacctcatcggtaccttcgcgtgcgtctgtcccccaggcatgcggcccctgcctggctctggggagggctgcacagatgacaatgaatgccacgctcagcctgacctctgtgtcaacggccgctgtgtcaacaccgcgggcagcttccggtgcgactgtgatgagggattccagcccagccccacccttaccgagtgccacgacatccggcaggggccctgctttgccgaggtgctgcagaccatgtgccggtctctgtccagcagcagtgaggctgtcaccagggccgagtgctgctgtgggggtggccggggctgggggccccgctgcgagctctgtcccctgcccggcacctctgcctacaggaagctgtgcccccatggctcaggctacactgctgagggccgagatgtagatgaatgccgtatgcttgctcacctgtgtgctcatggggagtgcatcaacagccttggctccttccgctgccactgtcaggccgggtacacaccggatgctactgctactacctgcctggatatggatgagtgcagccaggtccccaagccatgtaccttcctctgcaaaaacacgaagggcagtttcctgtgcagctgtccccgaggctacctgctggaggaggatggcaggacctgcaaagacctggacgaatgcacctcccggcagcacaactgtcagttcctctgtgtcaacactgtgggcgccttcacctgccgctgtccgcccggcttcacccagcaccaccaggcctgcttcgacaatgatgagtgctcagcccagcctggcccatgtggtgcccacgggcactgccacaacaccccgggcagcttccgctgtgaatgccaccaaggcttcaccctggtcagctcaggccatggctgtgaagatgtgaatgaatgtgatgggccccaccgctgccagcatggctgtcagaaccagctagggggctaccgctgcagctgcccccagggtttcacccagcactcccagtgggcccagtgtgtggatgagaatgagtgtgccctgtcgccccccacctgcgggagcgcctcctgtcgcaacactcttggtggcttccgctgcgtctgcccctctggctttgactttgatcaggccctcgggggctgccaggaggtggatgagtgcgccggacggcgtggcccctgtagctacagctgtgccaacacgcctggtggcttcctgtgcggctgtcctcaaggctacttccgggctgggcaagggcactgtgtctccggcctgggcttcagccccggaccccaggacaccccggacaaagaggagctgctctcgtctgaagcctgctacgaatgcaagatcaatggcctctcccctcgggaccggccacgacgcagtgcccacagggaccaccaggtgaacctggccacccttgactccgaggccctgctgaccttgggcctgaacctctcacacctgggccgggccgagcgcatcctggagctccggccggccctggagggtctagagggccggatccgctacgtcatcgtccgcggaaacgagcaaggtttctttcgcatgcatcacctccgtggcgtcagctccctgcagctggggcggaggcggccggggcctggaacctaccggctggaggtggtgagccacatggcaggaccctggggtgtccagccagaggggcagccagggccatggggccaggccttgaggctgaaggtgcagctgcagttgctttagttgggaggagcctcagtgggccccagctgtccagagaagggggattctggaactgggaaggactgatccccagaagcgatggctgaccagattgaaccccgaaactcaggaagagtgaaatgctacacgacaacctcaggcaagcccggcctctgcctgggcctctgtgccagccccgggggccccccagttactcagtctttcctggagacagcaagaagctgcaatgtgcaatccccctgcccccacagccaaggtcaggaagaggccctgtggtcaccgtgtctggccaatctcaggctttcacttctgtactgcactgtggcttgccctggcggggggcagggggttggcaggacatggcaatgggcaactggggtgggcacagggcttattcctcggagtagaagggtgtacagggggcccagactccacagtgacttgccacatttgccccccatttggagaatgcttttatatcaaaagtggagacgataataaagttattttgggtta

SEQ ID NO: 13874 - DNA, 7633 bp, Homo sapiens
gggccggggggcggagccttgcgggctggagcgaaagaatgcgggggctgagcgcagaagcggctcgaggctggaagaggatcttgggcgccgccaggttctgtggacaatcacaatgggaatccaaggagggtctgtcctgttcgggctgctgctcgtcctggctgtcttctgccattcaggtcatagcctgcagtgctacaactgtcctaacccaactgctgactgcaaaacagccgtcaattgttcatctgattttgatgcgtgtctcattaccaaagctgggttacaagtgtataacaagtgttggaagtttgagcattgcaatttcaacgacgtcacaacccgcttgagggaaaatgagctaacgtactactgctgcaagaaggacctgtgtaactttaacgaacagcttgaaaatggtgggacatccttatcagagaaaacagttcttctgctggtgactccatttctggcagcagcctggagccttcatccctaagtcaacaccaggagagcttctcccaaactccccgttcctgcgtagtccgctttctcttgctgccacattctaaaggcttgatattttccaaatggatcctgttgggaaagaataaaattagcttgagcaacctggctaagatagaggggctctgggagactttgaagaccagtcctgtttgcagggaagccccacttgaaggaagaagtctaagagtgaagtaggtgtgacttgaactagattgcatgcttcctcctttgctcttgggaagaccagctttgcagtgacagcttgagtgggttctctgcagccctcagattatttttcctctggctccttggatgtagtcagttagcatcattagtacatctttggagggtggggcaggagtatatgagcatcctctctcacatggaacgctttcataaacttcagggatcccgtgttgccatggaggcatgccaaatgttccatatgtgggtgtcagtcagggacaacaagatccttaatgcagagctagaggacttctggcagggaagtggggaagtgttccagatagcagggcatgaaaacttagagaggtacaagtggctgaaaatcgagtttttcctctgtctttaaattttatatgggctttgttatcttccactggaaaagtgtaatagcatacatcaatggtgtgttaaagctatttccttgccttttttttattggaatggtaggatatcttggctttgccacacacagttacagagtgaacactctactacatgtgactggcagtattaagtgtgcttattttaaatgttactggtagaaaggcagttcaggtatgtgtgtatatagtatgaatgcagtggggacaccctttgtggttacagtttgagacttccaaaggtcatccttaataacaacagatctgcaggggtatgttttaccatctgcatccagcctcctgctaactcctagctgactcagcatagattgtataaaatacctttgtaacggctcttagcacactcacagatgtttgaggctttcagaagctcttctaaaaaatgatacacacctttcacaagggcaaactttttccttttccctgtgtattctagtgaatgaatctcaagattcagtagacctaatgacatttgtattttatgatcttggctgtatttaatggcataggctgacttttgcagatggaggaatttcttgattaatgttgaaaaaaaacccttgattatactctgttggacaaaccgagtgcaatgaatgatgcttttctgaaaatgaaatataacaagtgggtgaatgtggttatggccgaaaaggatatgcagtatgcttaatggtagcaactgaaagaagacatcctgagcagtgccagctttcttctgttgatgccgttccctgaacataggaaaatagaaacttgcttatcaaaacttagcattaccttggtgctctgtgttctctgttagctcagtgtctttccttacatcaataggtttttttttttttttttggcctgaggaagtactgaccatgcccacagccaccggctgagcaaagaagctcatttcatgtgagttctaaggaatgagaaacaattttgatgaatttaagcagaaaatgaatttctgggaacttttttgggggcggggggttggggaattcagccacactccagaaagccaggagtcgacagttttggaagcctctctcaggattgagattctaggatgagattggcttactgctatcttgtgtcatgtacccactttttggccagactacactgggaagaaggtagtcctctaaagcaaaatctgagtgccactaaatggggagatggggctgttaagctgtccaaatcaacaagggtcatataaatggccttaaactttggggttgctttctgcaaaaagttgctgtgactcatgccatagacaaggttgagtgcctggacccaaaggcaatactgtaatgtaaagacatttatagtactaggcaaacagcaccccaggtactccaggccctcctggctggagagggctgtggcaatagaaaattagtgccaactgcagtgagtcagcctaggttaaatagagagtgtaagagtgctggacaggaacctccaccctcatgtcacatttcttcaatgtgacccttctggcccctctcctcctgacagcggaacaatgactgccccgataggtgaggctggaggaagaatcagtcctgtccttggcaagctcttcactatgacagtaaaggctctctgcctgctgccaaggcctgtgactttctaacctggcctcacgctgggtaagcttaaggtagaggtgcaggattagcaagcccacctggctaccaggccgacagctacatcctccaactgaccctgatcaacgaagagggattcatgtgtctgtctcagttggttccaaatgaaaccagggagcaggggagttaggaatcgaacaccagtcatgcctactggctctctgctcgagagccaataccctgtgccctccactcatctggatttacaggaactgtcatagtgttcagtattgggtggtgataagcccattggattgtccccttggggggatgagctaggggtgcaaggaacacctgatgagtagataagtggagctcatggtatttcctgaaagatgctaatctatttgccaaacttggtcttgaatgtactgggggcttcaaggtatgggtatatttttcttgtgtccttgcagttagcccccatgtcttatgtgtgtcctgaaaaaataagagcctgcccaagactttgggcctcttgacagaattaaccacttttatacatctgagttctcttggtaagttctttagcagtgttcaaagtctactagctcgcattagtttctgttgctgccaacagatctgaactaatgctaacagatccccctgagggattcttgatgggctgagcagctggctggagctagtactgactgacattcattgtgatgagggcagctttctggtacaggattctaagctctatgttttatatacattttcatctgtacttgcacctcactttacacaagaggaaactatgcaaagttagctggatcgctcaaggtcacttaggtaagttggcaagtccatgcttcccactcagctcctcaggtcagcaagtctacttctctgcctattttgtatactctctttaatatgtgcctagctttggaaagtctagaatgggtccctggtgcctttttactttgaagaaatcagtttctgcctctttttggaaaagaaaacaaagtgcaattgttttttactggaaagttacccaatagcatgaggtgaacaggacgtagttaggccttcctgtaaacagaaaatcatatcaaaacactatcttcccatctgtttctcaatgcctgctacttcttgtagatatttcatttcaggagagcagcagttaaacccgtggattttgtagttaggaacctgggttcaaaccctcttccactaattggctatgtctctggacaagtttttttttttttttttttttaaaccctttctgaactttcactttctatgtctacctcaaagaattgttgtgaggcttgagataatgcatttgtaaagggtctgccagataggaagatgctagttatggatttacaaggttgttaaggctgtaagagtctaaaacctacagtgaatcacaatgcatttacccccactgacttggacataagtgaaaactagccagaagtctctttttcaaattacttacaggttattcaatataaaatttttgtaatggataatcttatttatctaaactaaagcttcctgtttatacacactcctgttattctgggataagataaatgaccacagtaccttaatttctaggtgggtgcctgtgatggttcattgtaggtaaggacattttctctttttcagcagctgtgtaggtccagagcctctgggagaggaggggggtagcatgcacccagcaggggactgaactgggaaactcaaggttctttttactgtggggtagtgagctgcctttctgtgatcggtttccctagggatgttgctgttcccctccttgctattcgcagctacatacaacgtggccaaccccagtaggctgatcctatatatgatcagtgctggtgctgactctcaatagccccacccaagctggctataggtttacagatacattaattaggcaacctaaaatattgatgctggtgttggtgtgacataatgctatggccagaactgaaacttagagttataattcatgtattagggttctccagagggacagaattagtaggatatatgtatatatgaaagggaggttattagggagaactggctcccacagttagaaggcgaagtcgcacaataggccgtctgcaagctgggttagagagaagccagtagtggctcagcctgagttcaaaaacctcaaaactggggaagctgacagtgcagccagccttcagtctgtggccaaaggcccaagagcccctggcaaccaacccactggtgcaagtcctagattccaaaggctgaagaacctggagtctgatgtccaagagcaggaagagtggaagaaagccagaagactcagcaaacaaggtagacagtgtctaccaccatagtggccataccaaagaggctaccgattccttcctgctacctggatccctgaagttgccctggtctctgcaccttctaaacctagttcttaagagctttccattacatgagctgtctcaaagccctccaataaattctcagtgtaagcttctgttgcttgtggacagaaaattctgacagacctaccctataagtgttactgtcaggataacatgagaacgcacaacagtaagtggtcactaagtgttagctacggttattttgcccaaggtagcatggctagttgatgccggttgatggggcttaaacccagctccctcatcttccaggcctctgtactccctattccactaaactacctctcaggtttatttttttaaattcttactctgcaagtacataggaccacatttacctgggaaaacaagaataaaggctgctctgcattttttagaaacttttttgaaagggagatgggaatgcctgcacccccaagtccagaccaacacaatggttaattgagatgaataataaaggaaagactgttctgggcttcccagaatagcttggtccttaaattgtggcacaaacaacctcctgtcagagccagcctcctgccaggaagaggggtaggagactagaggccgtgtgtgcagccttgccctgaaggctagggtgacaatttggaggctgtccaaacaccctggcctctagagctggcctgtctatttgaaatgccggctctgatgctaatcggcgaccctcaggcaagttacttaaccttacatgcctcagttttctcatctggaaaatgagaaccctaggtttagggttgttagaaaagttaaatgagttaagacaagtgcctgggacacagtagcctcttgtgtgtgtttatcattatgtcctcagcaggtcgtagaagcagcttctcaggtgtgaggctggcgcattatctggagtgggttgggttttctaggatggaccccctgctgcattttcctcattcatccaccagggcttaatggggaatcaaggaatccatgtgtaactgtataataactgtagccacactccaatgaccacctactagttgtccctggcactgcttatacatatgtccatcaaatcaatcctatgaagtagatactgtcttcattttatagatcagagacaattggggttcagagagctgatgtgattttcccagggtcacagagagtcccagattcaggcacaactcttgtattccaagacacaaccactacatgtccaaaggctgcccagagccaccgggcacggcaaattgtgacatatccctaaagaggctgagcacctggtcaggatctgatggctgacagtgtgtccagatgcagagctggagtgggggaggggaaggggggctccttgggacagagaaggctttctgtgctttctctgaagggagcagtctgaggaccaagggaacccggcaaacagcacctcaggtactccaggccctcctggctggagagggctgtggcaatggaaaattagtgccaactgcaatgagtcagcctcggttaaatagagagtgaagaatgctggacaggaacctccaccctcatgtcacatttcttcagtgtgacccttctggcccctctcctcctgacagcggaacaatgactgccccgataggtgaggctggaggaagaatcagtcctgtccttggcaagctcttcactatgacagtaaaggctctctgcctgctgccaaggcctgtgactttctaacctggcctcacgctgggtaagcttaaggtagaggtgcaggattagcaagcccacctggctaccaggccgacagctacatctttcaactgaccctgatcaacgaagagggacttgtgtctctcagttggttccaaatgaaaccagggagcaggggcgttaggaagctccaacaggatggtacttaatggggcatttgagtggagaggtaggtgacatagtgctttggagcccagggagggaaaggttctgctgaagttgaattcaagactgttctttcatcacaaacttgagtttcctggacatttgtttgcagaaacaaccgtagggttttgccttaacctcgtgggtttattattacctcatagggactttgcctcctgacagcagtttatgggtgttcattgtggcacttgagttttcttgcatacttgttagagaaaccaagtttgtcatcaacttcttatttaaccccctggctataacttcatggattatgttataattaagccatccagagtaaaatctgtttagattatcttggagtaagggggaaaaaatctgtaattttttctcctcaactagatatatacataaaaaatgattgtattgcttcatttaaaaaatataacgcaaaatctcttttccttctaaaaaaaaaaaaaaaaaa

SEQ ID NO: 13875 - DNA, 2534 bp, Homo sapiens
atggccctgtccactgagcatcctcccgccacacagaaacccgcccagccggggccaccgaccccaccccctgcctggaaacttaaggaggccggagctgtggggagctcagagctgagatcctacaggagtccagggctggagagaaaacctctgcgaggaaagggaaggagcaagccgtgaatttaagggacgctgtgaagcaatcatggatgcaatgaagagagggctctgctgtgtgctgctgctgtgtggagcagtcttcgtttcgcccagccaggaaatccatgcccgattcagaagaggagccagatcttaccaaggttgcagcgagccaaggtgtttcaacgggggcacctgccagcaggccctgtacttctcagatttcgtgtgccagtgccccgaaggatttgctgggaagtgctgtgaaatagataccagggccacgtgctacgaggaccagggcatcagctacaggggcacgtggagcacagcggagagtggcgccgagtgcaccaactggaacagcagcgcgttggcccagaagccctacagcgggcggaggccagacgccatcaggctgggcctggggaaccacaactactgcagaaacccagatcgagactcaaagccctggtgctacgtctttaaggcggggaagtacagctcagagttctgcagcacccctgcctgctctgagggaaacagtgactgctactttgggaatgggtcagcctaccgtggcacgcacagcctcaccgagtcgggtgcctcctgcctcccgtggaattccatgatcctgataggcaaggtttacacagcacagaaccccagtgcccaggcactgggcctgggcaaacataattactgccggaatcctgatggggatgccaagccctggtgccacgtgctgaagaaccgcaggctgacgtgggagtactgtgatgtgccctcctgctccacctgcggcctgagacagtacagccagcctcagtttcgcatcaaaggagggctcttcgccgacatcgcctcccacccctggcaggctgccatctttgccaagcacaggaggtcgcccggagagcggttcctgtgcgggggcatactcatcagctcctgctggattctctctgccgcccactgcttccaggagaggtttccgccccaccacctgacggtgatcttgggcagaacataccgggtggtccctggcgaggaggagcagaaatttgaagtcgaaaaatacattgtccataaggaattcgatgatgacacttacgacaatgacattgcgctgctgcagctgaaatcggattcgtcccgctgtgcccaggagagcagcgtggtccgcactgtgtgccttcccccggcggacctgcagctgccggactggacggagtgtgagctctccggctacggcaagcatgaggccttgtctcctttctattcggagcggctgaaggaggctcatgtcagactgtacccatccagccgctgcacatcacaacatttacttaacagaacagtcaccgacaacatgctgtgtgctggagacactcggagcggcgggccccaggcaaacttgcacgacgcctgccagggcgattcgggaggccccctggtgtgtctgaacgatggccgcatgactttggtgggcatcatcagctggggcctgggctgtggacagaaggatgtcccgggtgtgtacaccaaggttaccaactacctagactggattcgtgacaacatgcgaccgtgaccaggaacacccgactcctcaaaagcaaatgagatcccgcctcttcttcttcagaagacactgcaaaggcgcagtgcttctctacagacttctccagacccaccacaccgcagaagcgggacgagaccctacaggagagggaagagtgcattttcccagatacttcccattttggaagttttcaggacttggtctgatttcaggatactctgtcagatgggaagacatgaatgcacactagcctctccaggaatgcctcctccctgggcagaaagtggccatgccaccctgttttcagctaaagcccaacctcctgacctgtcaccgtgagcagctttggaaacaggaccacaaaaatgaaagcatgtctcaatagtaaaagataacaagatctttcaggaaagacggattgcattagaaatagacagtatatttatagtcacaagagcccagcagggcctcaaagttggggcaggctggctggcccgtcatgttcctcaaaagcacccttgacgtcaagtctccttcccctttccccactccctggctctcagaaggtattccttttgtgtacagtgtgtaaagtgtaaatcctttttctttataaactttagagtagcatgagagaattgtatcatttgaacaactaggcttcagcatatttatagcaatccatgttagtttttactttctgttgccacaaccctgttttatactgtacttaataaattcagatatatttttcacagtttttccaaaaaaaaaaaaaaaaaaa

SEQ ID NO: 13876 - DNA, 2160 bp, Homo sapiens
atggccctgtccactgagcatcctcccgccacacagaaacccgcccagccggggccaccgaccccaccccctgcctggaaacttaaggaggccggagctgtggggagctcagagctgagatcctacaggagtccagggctggagagaaaacctctgcgaggaaagggaaggagcaagccgtgaatttaagggacgctgtgaagcaatcatggatgcaatgaagagagggctctgctgtgtgctgctgctgtgtggagcagtcttcgtttcgcccagccaggaaatccatgcccgattcagaagaggagccagatcttaccaagtgatctgcagagatgaaaaaacgcagatgatataccagcaacatcagtcatggctgcgccctgtgctcagaagcaaccgggtggaatattgctggtgcaacagtggcagggcacagtgccactcagtgcctgtcaaaagttgcagcgagccaaggtgtttcaacgggggcacctgccagcaggccctgtacttctcagatttcgtgtgccagtgccccgaaggatttgctgggaagtgctgtgaaatagataccagggccacgtgctacgaggaccagggcatcagctacaggggcacgtggagcacagcggagagtggcgccgagtgcaccaactggaacagcagcgcgttggcccagaagccctacagcgggcggaggccagacgccatcaggctgggcctggggaaccacaactactgcagaaacccagatcgagactcaaagccctggtgctacgtctttaaggcggggaagtacagctcagagttctgcagcacccctgcctgctctgagggaaacagtgactgctactttgggaatgggtcagcctaccgtggcacgcacagcctcaccgagtcgggtgcctcctgcctcccgtggaattccatgatcctgataggcaaggtttacacagcacagaaccccagtgcccaggcactgggcctgggcaaacataattactgccggactggacggagtgtgagctctccggctacggcaagcatgaggccttgtctcctttctattcggagcggctgaaggaggctcatgtcagactgtacccatccagccgctgcacatcacaacatttacttaacagaacagtcaccgacaacatgctgtgtgctggagacactcggagcggcgggccccaggcaaacttgcacgacgcctgccagggcgattcgggaggccccctggtgtgtctgaacgatggccgcatgactttggtgggcatcatcagctggggcctgggctgtggacagaaggatgtcccgggtgtgtacaccaaggttaccaactacctagactggattcgtgacaacatgcgaccgtgaccaggaacacccgactcctcaaaagcaaatgagatcccgcctcttcttcttcagaagacactgcaaaggcgcagtgcttctctacagacttctccagacccaccacaccgcagaagcgggacgagaccctacaggagagggaagagtgcattttcccagatacttcccattttggaagttttcaggacttggtctgatttcaggatactctgtcagatgggaagacatgaatgcacactagcctctccaggaatgcctcctccctgggcagaaagtggccatgccaccctgttttcagctaaagcccaacctcctgacctgtcaccgtgagcagctttggaaacaggaccacaaaaatgaaagcatgtctcaatagtaaaagataacaagatctttcaggaaagacggattgcattagaaatagacagtatatttatagtcacaagagcccagcagggcctcaaagttggggcaggctggctggcccgtcatgttcctcaaaagcacccttgacgtcaagtctccttcccctttccccactccctggctctcagaaggtattccttttgtgtacagtgtgtaaagtgtaaatcctttttctttataaactttagagtagcatgagagaattgtatcatttgaacaactaggcttcagcatatttatagcaatccatgttagtttttactttctgttgccacaaccctgttttatactgtacttaataaattcagatatatttttcacagtttttccaaaaaaaaaaaaaaaaaaaaa

SEQ ID NO: 13877 - DNA, 2653 bp, Homo sapiens
atggccctgtccactgagcatcctcccgccacacagaaacccgcccagccggggccaccgaccccaccccctgcctggaaacttaaggaggccggagctgtggggagctcagagctgagatcctacaggagtccagggctggagagaaaacctctgcgaggaaagggaaggagcaagccgtgaatttaagggacgctgtgaagcaatcatggatgcaatgaagagagggctctgctgtgtgctgctgctgtgtggagcagtcttcgtttcgcccagccaggaaatccatgcccgattcagaagaggagccagatcttaccaagtgatctgcagagatgaaaaaacgcagatgatataccagcaacatcagtcatggctgcgccctgtgctcagaagcaaccgggtggaatattgctggtgcaacagtggcagggcacagtgccactcagtgcctgtcaaaagttgcagcgagccaaggtgtttcaacgggggcacctgccagcaggccctgtacttctcagatttcgtgtgccagtgccccgaaggatttgctgggaagtgctgtgaaatagataccagggccacgtgctacgaggaccagggcatcagctacaggggcacgtggagcacagcggagagtggcgccgagtgcaccaactggaacagcagcgcgttggcccagaagccctacagcgggcggaggccagacgccatcaggctgggcctggggaaccacaactactgcagaaacccagatcgagactcaaagccctggtgctacgtctttaaggcggggaagtacagctcagagttctgcagcacccctgcctgctctgagggaaacagtgactgctactttgggaatgggtcagcctaccgtggcacgcacagcctcaccgagtcgggtgcctcctgcctcccgtggaattccatgatcctgataggcaaggtttacacagcacagaaccccagtgcccaggcactgggcctgggcaaacataattactgccggaatcctgatggggatgccaagccctggtgccacgtgctgaagaaccgcaggctgacgtgggagtactgtgatgtgccctcctgctccacctgcggcctgagacagtacagccagcctcagtttcgcatcaaaggagggctcttcgccgacatcgcctcccacccctggcaggctgccatctttgccaagcacaggaggtcgcccggagagcggttcctgtgcgggggcatactcatcagctcctgctggattctctctgccgcccactgcttccaggagaggtttccgccccaccacctgacggtgatcttgggcagaacataccgggtggtccctggcgaggaggagcagaaatttgaagtcgaaaaatacattgtccataaggaattcgatgatgacacttacgacaatgacattgcgctgctgcagctgaaatcggattcgtcccgctgtgcccaggagagcagcgtggtccgcactgtgtgccttcccccggcggacctgcagctgccggactggacggagtgtgagctctccggctacggcaagcatgaggccttgtctcctttctattcggagcggctgaaggaggctcatgtcagactgtacccatccagccgctgcacatcacaacatttacttaacagaacagtcaccgacaacatgctgtgtgctggagacactcggagcggcgggccccaggcaaacttgcacgacgcctgccagggcgattcgggaggccccctggtgtgtctgaacgatggccgcatgactttggtgggcatcatcagctggggcctgggctgtggacagaaggatgtcccgggtgtgtacaccaaggttaccaactacctagactggattcgtgacaacatgcgaccgtgaccaggaacacccgactcctcaaaagcaaatgagatcccgcctcttcttcttcagaagacactgcaaaggcgcagtgcttctctacagacttctccagacccaccacaccgcagaagcgggacgagaccctacaggagagggaagagtgcattttcccagatacttcccattttggaagttttcaggacttggtctgatttcaggatactctgtcagatgggaagacatgaatgcacactagcctctccaggaatgcctcctccctgggcagaaagtggccatgccaccctgttttcagctaaagcccaacctcctgacctgtcaccgtgagcagctttggaaacaggaccacaaaaatgaaagcatgtctcaatagtaaaagataacaagatctttcaggaaagacggattgcattagaaatagacagtatatttatagtcacaagagcccagcagggcctcaaagttggggcaggctggctggcccgtcatgttcctcaaaagcacccttgacgtcaagtctccttcccctttccccactccctggctctcagaaggtattccttttgtgtacagtgtgtaaagtgtaaatcctttttctttataaactttagagtagcatgagagaattgtatcatttgaacaactaggcttcagcatatttatagcaatccatgttagtttttactttctgttgccacaaccctgttttatactgtacttaataaattcagatatatttttcacagtttttcc

SEQ ID NO: 13878 - DNA, 2503 bp, Homo sapiens
ggactttgaaatccaacccggtcacctacccgcgcgactgtgtccacggatggcacgaaagccaagcgagtccccctgccgagctactcgcgtccgcctcctcccaagctgagctctgctccgcccacctgagtccttcgccagttaggaggaaacacagccgcttaatgaactgctgcatcgggctgggagagaaagctcgcgggtcccaccgggcctcctacccaagtctcagcgcgcttttcaccgaggcctcaattctgggatttggcagctttgctgtgaaagcccaatggacagaggactgcagaaaatcaacctatcctccttcaggaccaacgtacagaggtgcagttccatggtacaccataaatcttgacttaccaccctacaaaagatggcatgaattgatgcttgacaaggcaccaatgctaaaggttatagtgaattctctgaagaatatgataaatacattcgtgccaagtggaaaagttatgcaggtggtggatgaaaaattgcctggcctacttggcaactttcctggcccttttgaagaggaaatgaagggtattgccgctgttactgatatacctttaggagagattatttcattcaatattttttatgaattatttaccatttgtacttcaatagtagcagaagacaaaaaaggtcatctaatacatgggagaaacatggattttggagtatttcttgggtggaacataaataatgatacctgggtcataactgagcaactaaaacctttaacagtgaatttggatttccaaagaaacaacaaaactgtcttcaaggcttcaagctttgctggctatgtgggcatgttaacaggattcaaaccaggactgttcagtcttacactgaatgaacgtttcagtataaatggtggttatctgggtattctagaatggattctgggaaagaaagatgccatgtggatagggttcctcactagaacagttctggaaaatagcacaagttatgaagaagccaagaatttattgaccaagaccaagatattggccccagcctactttatcctgggaggcaaccagtctggggaaggttgtgtgattacacgagacagaaaggaatcattggatgtatatgaactcgatgctaagcagggtagatggtatgtggtacaaacaaattatgaccgttggaaacatcccttcttccttgatgatcgcagaacgcctgcaaagatgtgtctgaaccgcaccagccaagagaatatctcatttgaaaccatgtatgatgtcctgtcaacaaaacctgtcctcaacaagctgaccgtatacacaaccttgatagatgttaccaaaggtcaattcgaaacttacctgcgggactgccctgacccttgtataggttggtgagcacacgtctggcctacagaatgcggcctctgagacatgaagacaccatctccatgtgaccgaacactgcagctgtctgaccttccaaagactaagactcgcggcaggttctctttgagtcaaaagcttgtcttcgtccatctgttgacaaatgacagacctttttttttcccccatcagttgatttttcttatttacagataacttctttaggggaagtaaaacagtcatctagaattcactgagttttgtttcactttgacatttggggatctggtgggcagtcgaaccatggtgaactccacctccgtggaataaatggagattcagcgtgggtgttgaatccagcacgtctgtgtgagtaacgggacagtaaacactccacattcttcagtttttcacttctacctacatatttgtatgtttttctgtataacagccttttccttctggttctaactgctgttaaaattaatatatcattatctttgctgttattgacagcgatataattttattacatatgattagagggatgagacagacattcacctgtatatttcttttaatgggcacaaaatgggcccttgcctctaaatagcactttttggggttcaagaagtaatcagtatgcaaagcaatcttttatacaataattgaagtgttccctttttcataattactgtacttcccagtaaccctaaggaagttgctaacttaaaaaactgcatcccacgttctgttaatttagtaaataaacaagtcaaagacttgtggaaaataggaagtgaacccatattttaaattctcataagtagcattcatgtaataaacaggtttttagtttgttcttcagattgatagggagttttaaagaaattttagtagttactaaaattatgttactgtatttttcagaaatcaaactgcttatgaaaagtactaatagaacttgttaacctttctaaccttcacgattaactgtgaaatgtacgtcatttgtgcaagaccgtttgtccacttcattttgtataatcacagttgtgttcctgacactcaataaacagtcattggaaagagtgccagtcagcagtcatgca

SEQ ID NO: 13879 - DNA, 2341 bp, Homo sapiens
ggctcttctttgcctctgctggagtccggggagtggcgttggctgctagagcgatgccgggccggagttgcgtcgccttagtcctcctggctgccgccgtcagctgtgccgtcgcgcagcacgcgccgccgtggacagaggactgcagaaaatcaacctatcctccttcaggaccaacgtacagaggtgcagttccatggtacaccataaatcttgacttaccaccctacaaaagatggcatgaattgatgcttgacaaggcaccaatgctaaaggttatagtgaattctctgaagaatatgataaatacattcgtgccaagtggaaaagttatgcaggtggtggatgaaaaattgcctggcctacttggcaactttcctggcccttttgaagaggaaatgaagggtattgccgctgttactgatatacctttaggagagattatttcattcaatattttttatgaattatttaccatttgtacttcaatagtagcagaagacaaaaaaggtcatctaatacatgggagaaacatggattttggagtatttcttgggtggaacataaataatgatacctgggtcataactgagcaactaaaacctttaacagtgaatttggatttccaaagaaacaacaaaactgtcttcaaggcttcaagctttgctggctatgtgggcatgttaacaggattcaaaccaggactgttcagtcttacactgaatgaacgtttcagtataaatggtggttatctgggtattctagaatggattctgggaaagaaagatgccatgtggatagggttcctcactagaacagttctggaaaatagcacaagttatgaagaagccaagaatttattgaccaagaccaagatattggccccagcctactttatcctgggaggcaaccagtctggggaaggttgtgtgattacacgagacagaaaggaatcattggatgtatatgaactcgatgctaagcagggtagatggtatgtggtacaaacaaattatgaccgttggaaacatcccttcttccttgatgatcgcagaacgcctgcaaagatgtgtctgaaccgcaccagccaagagaatatctcatttgaaaccatgtatgatgtcctgtcaacaaaacctgtcctcaacaagctgaccgtatacacaaccttgatagatgttaccaaaggtcaattcgaaacttacctgcgggactgccctgacccttgtataggttggtgagcacacgtctggcctacagaatgcggcctctgagacatgaagacaccatctccatgtgaccgaacactgcagctgtctgaccttccaaagactaagactcgcggcaggttctctttgagtcaaaagcttgtcttcgtccatctgttgacaaatgacagacctttttttttcccccatcagttgatttttcttatttacagataacttctttaggggaagtaaaacagtcatctagaattcactgagttttgtttcactttgacatttggggatctggtgggcagtcgaaccatggtgaactccacctccgtggaataaatggagattcagcgtgggtgttgaatccagcacgtctgtgtgagtaacgggacagtaaacactccacattcttcagtttttcacttctacctacatatttgtatgtttttctgtataacagccttttccttctggttctaactgctgttaaaattaatatatcattatctttgctgttattgacagcgatataattttattacatatgattagagggatgagacagacattcacctgtatatttcttttaatgggcacaaaatgggcccttgcctctaaatagcactttttggggttcaagaagtaatcagtatgcaaagcaatcttttatacaataattgaagtgttccctttttcataattactgtacttcccagtaaccctaaggaagttgctaacttaaaaaactgcatcccacgttctgttaatttagtaaataaacaagtcaaagacttgtggaaaataggaagtgaacccatattttaaattctcataagtagcattcatgtaataaacaggtttttagtttgttcttcagattgatagggagttttaaagaaattttagtagttactaaaattatgttactgtatttttcagaaatcaaactgcttatgaaaagtactaatagaacttgttaacctttctaaccttcacgattaactgtgaaatgtacgtcatttgtgcaagaccgtttgtccacttcattttgtataatcacagttgtgttcctgacactcaataaacagtcattggaaagagtgccagtcagcagtcatgca

SEQ ID NO: 13880 - DNA, 3213 bp, Homo sapiens
agagactcaagatgattccctttttacccatgttttctctactattgctgcttattgttaaccctataaacgccaacaatcattatgacaagatcttggctcatagtcgtatcaggggtcgggaccaaggcccaaatgtctgtgcccttcaacagattttgggcaccaaaaagaaatacttcagcacttgtaagaactggtataaaaagtccatctgtggacagaaaacgactgttttatatgaatgttgccctggttatatgagaatggaaggaatgaaaggctgcccagcagttttgcccattgaccatgtttatggcactctgggcatcgtgggagccaccacaacgcagcgctattctgacgcctcaaaactgagggaggagatcgagggaaagggatccttcacttactttgcaccgagtaatgaggcttgggacaacttggattctgatatccgtagaggtttggagagcaacgtgaatgttgaattactgaatgctttacatagtcacatgattaataagagaatgttgaccaaggacttaaaaaatggcatgattattccttcaatgtataacaatttggggcttttcattaaccattatcctaatggggttgtcactgttaattgtgctcgaatcatccatgggaaccagattgcaacaaatggtgttgtccatgtcattgaccgtgtgcttacacaaattggtacctcaattcaagacttcattgaagcagaagatgacctttcatcttttagagcagctgccatcacatcggacatattggaggcccttggaagagacggtcacttcacactctttgctcccaccaatgaggcttttgagaaacttccacgaggtgtcctagaaaggttcatgggagacaaagtggcttccgaagctcttatgaagtaccacatcttaaatactctccagtgttctgagtctattatgggaggagcagtctttgagacgctggaaggaaatacaattgagataggatgtgacggtgacagtataacagtaaatggaatcaaaatggtgaacaaaaaggatattgtgacaaataatggtgtgatccatttgattgatcaggtcctaattcctgattctgccaaacaagttattgagctggctggaaaacagcaaaccaccttcacggatcttgtggcccaattaggcttggcatctgctctgaggccagatggagaatacactttgctggcacctgtgaataatgcattttctgatgatactctcagcatggttcagcgcctccttaaattaattctgcagaatcacatattgaaagtaaaagttggccttaatgagctttacaacgggcaaatactggaaaccatcggaggcaaacagctcagagtcttcgtatatcgtacagctgtctgcattgaaaattcatgcatggagaaagggagtaagcaagggagaaacggtgcgattcacatattccgcgagatcatcaagccagcagagaaatccctccatgaaaagttaaaacaagataagcgctttagcaccttcctcagcctacttgaagctgcagacttgaaagagctcctgacacaacctggagactggacattatttgtgccaaccaatgatgcttttaagggaatgactagtgaagaaaaagaaattctgatacgggacaaaaatgctcttcaaaacatcattctttatcacctgacaccaggagttttcattggaaaaggatttgaacctggtgttactaacattttaaagaccacacaaggaagcaaaatctttctgaaagaagtaaatgatacacttctggtgaatgaattgaaatcaaaagaatctgacatcatgacaacaaatggtgtaattcatgttgtagataaactcctctatccagcagacacacctgttggaaatgatcaactgctggaaatacttaataaattaatcaaatacatccaaattaagtttgttcgtggtagcaccttcaaagaaatccccgtgactgtctatacaactaaaattataaccaaagttgtggaaccaaaaattaaagtgattgaaggcagtcttcagcctattatcaaaactgaaggacccacactaacaaaagtcaaaattgaaggtgaacctgaattcagactgattaaagaaggtgaaacaataactgaagtgatccatggagagccaattattaaaaaatacaccaaaatcattgatggagtgcctgtggaaataactgaaaaagagacacgagaagaacgaatcattacaggtcctgaaataaaatacactaggatttctactggaggtggagaaacagaagaaactctgaagaaattgttacaagaagaggtcaccaaggtcaccaaattcattgaaggtggtgatggtcatttatttgaagatgaagaaattaaaagactgcttcagggagacacacccgtgaggaagttgcaagccaacaaaaaagttcaaggttctagaagacgattaagggaaggtcgttctcagtgaaaatccaaaaaccagaaaaaaatgtttatacaaccctaagtcaataacctgaccttagaaaattgtgagagccaagttgacttcaggaactgaaacatcagcacaaagaagcaatcatcaaataattctgaacacaaatttaatatttttttttctgaatgagaaacatgagggaaattgtggagttagcctcctgtggtaaaggaattgaagaaaatataacaccttacaccctttttcatcttgacattaaaagttctggctaactttggaatccattagagaaaaatccttgtcaccagattcattacaattcaaatcgaagagttgtgaactgttatcccattgaaaagaccgagccttgtatgtatgttatggatacataaaatgcacgcaagccattatctctccatgggaagctaagttataaaaataggtgcttggtgtacaaaactttttatatcaaaaggctttgcacatttctatatgagtgggtttactggtaaattatgttattttttacaactaattttgtactctcagaatgtttgtcatatgcttcttgcaatgcatattttttaatctcaaacgtttcaataaaaccatttttcagatataaagagaattacttcaaattgagtaattcagaaaaactcaagatttaagttaaaaagtggtttggacttgggaa

SEQ ID NO: 13881 - DNA, 8087 bp, Homo sapiens
gcggccgccaggtgctcctggagtgcagcgcctatcgccggggcgtgtgggggccacaccgagcaccagcttctccgacgccgggaagccgctgtcgccgccgctacctctccctgttgccgccgcctcagatctcttcatgccgctgtaagctcggaggccaaggatgcggagtaggcttcccccagcgcttgccgccctgggcgcggccctgctcctgtcttccattgaggcagaagggatggagtgtctcaccagagctgaggcagacattgtgttgctggtggatggatcatggagcatcggccgggcaaattttagaaccgtgaggagtttcatttctcgtattgtggaagtctttgacattggccccaaaagagtacaaattgctcttgctcagtatagtggggatcccagaacagagtggcagttaaatgcacacagagacaagaagagcttgttgcaagctgtggcaaacttgccgtacaaaggaggcaatactctcacaggcatggctttgaatttcattcgccaacagaacttcaggacccaagctggcatgagacctcgagctcgaaaaattggtgtgctcattactgatggaaaatcacaagacgatgttgaagcaccttcaaagaaactcaaggatgagggagtggagctgtttgctattggtattaaaaatgctgatgaagtcgaattaaagatgattgcaactgatcctgatgatacccatgcatacaatgtggcagattttgagtcactctccaggatagtggatgatctcaccattaatttgtgtaacagtgtcaaaggtccaggtgatttggaagcaccttctaacttagttatttctgagcgaacccatcgttcttttagagtgagctggacaccaccttctgacagtgtggatcgatataaggtggaatactatccagtttctggagggaaacgtcaagaattttatgtgagtcgaatggaaactagcacagtgctgaaagatctgaaacctgaaactgaatatgttgtcaatgtgtattctgtggtagaagatgaatatagtgagcctctgaaggggacagaaaaaaccttgccagtgcctgtagtcagcctgaatatttatgatgttggccctaccaccatgcatgtgcagtggcagcctgtgggaggagctactggctacatcttgtcatacaaacctgttaaggacacagagccaacaagacccaaagaggtgcgtttggggccaacagtgaatgacatgcagctgactgaccttgttcccaacacggagtatgcagtcacagtccaggctgtcctgcacgacctcactagtgaacctgtcactgttcgggaagtcaccttgcctttacccagacctcaggatctgaaactcagagatgtgactcacagcactatgaatgtcttttgggaacctgtgcctggaaaagtgcgtaaatatattgttcgatacaaaacaccagaagaggatgtcaaagaggtagaggtggacagatcagagaccagcacttccctcaaagacctcttctcacagaccttgtacacagtcagcgtttctgcagtacatgacgagggggagtctcctccagtgactgctcaagaaactacccgacccgtgccagccccaacaaacttaaagattactgaagtaacatcagagggtttcagagggacttgggatcatggagcttcagatgtgtctctctacagaataacttgggcaccttttggaagctcagataagatggagaccatcttaaatggagatgaaaacactttggtgttcgaaaacctgaaccccaacaccatctatgaagtttccattactgccatctatcctgatgagtcagaaagtgatgacctgattggcagtgagcgcacactgcctatcttaacaacacaagctcccaaaagtggcccacgaaaccttcaagtgtacaatgcaacatctaacagcctgactgttaagtgggatcctgctagtggtcgtgtgcagaaatataggatcacttatcagccttccacaggggaaggcaatgagcaaacgaccacaataggaggacggcagaacagtgtggtcctgcagaaactgaagccagacactccttacactatcaccgtatcctctctgtatcctgatggtgaaggaggtcggatgacgggaagaggcaagaccaaacctctaaacactgtaaggaacctgagagtgtatgacccttctaccagcaccttgaatgtccgctgggaccatgcagagggaaatcctcgtcagtacaagctcttctatgcaccagcagcaggtggtccagaggaactggtaccaatccccgggaataccaattatgccattcttaggaatctgcagccagatacctcatacactgtgactgtagttcccgtttatactgaaggtgatgggggacgcacatcagatactggaaggacattgatgagaggactggcaagaaatgtccaagtatacaatcctacacctaacagcctcgatgttcgctgggaccctgctccaggacctgtgctgcaatatcgcgttgtgtattctcctgtggatggcacaagaccctcagaatctatagtagtgccaggaaacacgcgcatggtgcatctggagcggctgattccggacacactctattccgtgaaccttgtggctctgtactcggatggagagggaaatcccagccctgcccagggccgaacgctaccacgcagtggaccaaggaacctgagagtctttggtgaaacaaccaatagcctctcggtagcctgggatcatgctgatgggccagttcagcagtacaggatcatctattctcccactgttggtgatccaattgatgaatataccacagtcccaggcagaagaaacaatgtaatactgcagcccctgcaacctgacactccatataaaattactgttattgctgtttatgaagatggagatggtggccatctaacaggaaatggaagaactgtgggactccttcctcctcagaacatacacatctctgacgaatggtatacaagattcagggtgtcctgggatccttcaccttctccagttcttggatataaaatagtatataagccagtgggttccaatgagcccatggaagcctttgttggagaaatgacatcatataccttacacaatctcaatcccagcaccacctacgatgtgaatgtttatgctcaatatgattctggactcagtgtccccttgacagatcaaggcactacattatatttaaatgtaacagatctgaaaacttaccagattgggtgggatacattctgtgtcaaatggtcacctcaccgggcagccacctcctacaggctaaaactaagccctgcagatggaacaaggggacaagaaattacagtgcgtggatcagaaaccagtcactgcttcactggcctttcaccagacactgattatggtgtcactgtttttgtgcagacaccaaatctcgagggaccaggagtctctgttaaagaacataccactgtgaaaccaacagaagcccctacagagccacccacacctcctccccctcccaccattccaccagcccgggatgtatgcaaaggggccaaggcagatattgtgttcttgactgatgcctcctggagcattggggacgataattttaacaaagttgtaaaattcatcttcaatactgtgggaggctttgatgaaatcagtcctgctgggattcaggtttcatttgtgcaatacagcgatgaggtcaagtctgagttcaagctgaacacgtacaatgacaaggccctagcccttggggccctccagaatattaggtacagaggaggaaacacaagaacaggcaaggccctcacgtttatcaaggagaaagtcttgacttgggagagcggcatgaggaagaatgtccctaaggtgttggttgtggtcacggacggtcggtcccaggatgaggtcaagaaggcggctttggtcatccagcagtcagggttcagtgtctttgtagttggtgtggctgatgtcgactacaatgagcttgccaacattgccagcaaaccaagtgaacggcacgtgttcattgtggacgactttgaatcttttgagaagatcgaagacaatcttattacatttgtttgtgaaactgccacttcaagttgtcctctcatttatttggatggctacacctcaccaggttttaaaatgcttgaagcatacaacctgacagaaaagaattttgcttctgtacaaggagtatctttggagtcagggtctttccccagctactcagcatacaggattcagaagaatgcgtttgtgaatcagcctacagcagacctacacccaaatggactccctccttcatacacgattatattattattcagacttctcccagaaactcccagtgacccttttgcaatttggcaaatcacagacagagactacaaaccacaagttggagtgattgcagatccttctagcaagacgttatcattctttaacaaggatacaagaggcgaggtgcaaactgttacatttgacacagaagaagtaaagacattattttatggaagttttcacaaggttcatattgtagtgacctcaaaaagtgttaagatttacattgactgctatgaaattatagaaaaagacatcaaggaagctggaaatataacaactgatggttatgaaattcttggaaaactccttaaaggggaaaggaaatcagccgcattccaaatccagagttttgacattgtctgcagtccagtgtggaccagtagagacagatgctgtgatattccctctaggagagatgagggaaaatgccctgcttttccaaattcttgcacatgtacacaggacagcgttggacctccaggacctccaggccctgcaggaggacctggtgctaaaggtcccagaggtgaaagaggtatcagtggggcaattgggccccctggtcctcgtggagacataggtcctccaggcccccagggtcctccaggccctcagggacccaatggactctctattccgggagagcaaggtcgccaagggatgaaaggtgatgctggagagccaggacttccaggccgaacaggaaccccaggattacctggcccaccaggaccaatgggacctccaggagacagaggcttcactggaaaagacggtgcaatgggacccaggggcccaccagggccgccgggaagcccaggctccccaggagtcacaggaccaagtgggaagccaggaaaacctggagatcatggcagaccaggtccatctgggttgaaaggagaaaaaggtgataggggagacattgcttcccagaacatgatgcgagcagttgcaagacaagtctgtgaacaattgataagtggtcagatgaacagattcaatcagatgctgaatcagattccaaatgattaccagtccagtcgcaaccagccaggcccgccgggtccaccgggacctcctggtagcgcaggagccagaggagaacctgggcctggggggcggccaggcttcccgggcacaccagggatgcagggaccccctggggaacgaggtttgccaggagagaaaggtgaaaggggtactggatcttcaggacctcgggggctgcctggccccccaggtccacaaggagaatccagaacaggtccaccagggtccacaggttcaagaggtccccctggcccccctggccgtcctggaaactcaggtatccgaggacccccaggtcctcctggatactgtgattcttctcagtgtgccagcatcccatacaacgggcaaggctatccaggttccggctaacacattttctaagtcgccagtgctgcttacagtttgaatacatgaaaatcctgtttctgagatgtttgcgcacgtgcttattaggaaatgagtctgtatggaaatctcaccacagataatggttaacgaaccgggtcgacatcacaaaggagggtggagactctttttactaacttgaatgagacaaaagcagtggtgtcagtttataatcctgatgcatttcagtaataatgtagaaaaacattattttaaaaaagttccaacacacagccatgaggagcctcagttttgaaagaggtgcataataaaactactaaccagaggagtctatgccattttaagaaaaacaattaacctggttaaagagaaatgtcttatgtaaataataaactaattgtggcttgtaaatgatttgtatgtgatcctgtcgactaaaatcacttaacaattctacaataagcttctgcatcaaagcctgccgcttgctctatgccggaataacaccaaatggaatctcctcatctcttgcttgttagcgatgtgtctgattcagggcatctgtctttttgttacttttttgtccgtgtcctctcatttgggttttgtaactgcaattttcaaaccaaagtttaaaatcaccttttcttcctgttttgctgtagtcactggtgttcctcacccaccagctgtaactcagtttgtgtgaggtacagccacagaagatgtcatgtactgtatattacctggtgatagttgcttttcaccccccgagttcagtttctaggagccaatgaaacttcccctcacctcctcatctttccaagttgttctttgaattgaggagtttgaaggcataaacagttacttggggatttgcgaaaatcctacttagttactgcgtttacagttctttggcccagtctctgacccttcccaagtatttgtgcaatgattgtgtttactgctggatttttgaaggtttttttttttaagaaagtgccatttcattatttgattatcaccaaattatctggaaataattgggacattgtaacttatctatttatagttatgagattaagactggagtgccatcaccgcgggtgatgatttagcttttgctgtgtgtgtgtgtgtgtgccttccaaatcatgccataattgtaatgttgaatcggacagagccttacgtgcccgagggcggggcctacctgcctgagcgcgagcccttcatcgtgccggtggagcccgagcggacagcggaatacgaggactacggcgcagacgagcctgcagaggagcctcctgagccccaccggcgctggcggcgcgccctgccccacggacccgggcagtgaaccagagatcacgcgccgcgccgcgaggcttgggggaggtgttgaaattctcatttacaggtcagatagagcagtgtacgtcttttctgaggtgtttcttccagcgttgctcatccaggagtaccctttctgattgtagagaaccttgtttctgcaggaagcctagctccaagcacgcagtctgtagacatttttgcctttgcccttgaaatgcttgcaaaatactttgttaacaaaagctgcaaagagagaacatgccgtgtgcctttagttagcacagcgggcagcctcagtgaaactcttaggttaagcagttaagtcctggaacccagagctgctgtgtatttcgagcgggcagtttatcttttgctatacttattttcaattcaattacaccacgattcaaataattcccctcctaaaaccaaaaaggagggaaacgtcaactccattgcaattacttatcttcctcttctatctctgttatacgccggggcatagaatgctcgtatacatctctttaacaaccacaaaccttaagccatgtagatgaagttagtgcatcaacgggatacagttccatattgccttaaacctccttgttttagacacactaacatttataccaaattgcagattattctgcagagagggaattgcatgtttgtgttgtatatttagtatgaacttttttcagaatataatatttcttagttatcaaaagtagttggaaaacatttgcaagactatgaacatagaattgctgcttttatattttaactgcagattgtgaatttcactgccttatattatttatttctgaaacaaaagaggcatttttcaataaaactactgaaaatttga

SEQ ID NO: 13882 - DNA, 11579 bp, Homo sapiens
gcggccgccaggtgctcctggagtgcagcgcctatcgccggggcgtgtgggggccacaccgagcaccagcttctccgacgccgggaagccgctgtcgccgccgctacctctccctgttgccgccgcctcagatctcttcatgccgctgtaagctcggaggccaaggatgcggagtaggcttcccccagcgcttgccgccctgggcgcggccctgctcctgtcttccattgaggcagaagttgacccaccttcagacttgaattttaaaattatagatgaaaatactgttcatatgtcatgggcaaaaccagttgatccaattgtgggttacagaataacggtggaccctacaacggatgggcctactaaagaatttaccctttcagctagtaccactgaaactttattgtcagaacttgtacctgaaacagagtatgtggtgacaataacttcatatgatgaagtagaagaaagtgtaccagttataggacaactaacaattcaaacaggtagttcgacaaagccagtggagaagaaacctggaaaaaccgagatacaaaaatgctctgtcagtgcctggactgatttggttttcctcgtggatggctcttggagtgtgggaagaaataatttcaagtacattttagacttcattgctgctcttgtgtctgcttttgacattggggaagagaagacaagagttggagttgttcaatacagctctgataccaggactgaatttaacttaaatcagtactaccaaagggatgaacttcttgctgcaataaaaaaaattccatataaaggtggcaacacaatgacaggggatgccattgattatttagttaaaaatactttcacggaatctgctggggcaagagttggctttcctaaagtggcaattattattacggatggaaaatcccaggatgaagtggaaattccagcaagagagcttcgtaatgttggagttgaagttttctccttgggcattaaagctgcagatgcaaaagaactcaaacaaattgcctccacaccttcactgaaccatgttttcaatgtggccaactttgatgcaattgtggatattcagaatgagatcatctcccaggtgtgctcaggtgttgatgaacaacttggtgaattggttagtggagaagaagttgttgagcctccttcaaatttgattgccatggaagtctcttcaaaatatgttaagctaaattggaatccatctcctagtccagtgactggctacaaagtcatcctcacaccaatgactgcaggaagccgacagcacgctctgagtgtggggcctcagacaaccacgctcagtgttcgcgacctctcagcagacacagaataccagatcagtgtttccgccatgaagggaatgacatccagtgaacccatttcaataatggagaagactcagccaatgaaagttcaagtggaatgctcacgtggtgtggatataaaagccgatattgtgtttttggttgatggctcctatagcattgggattgcaaactttgttaaagttagagcctttttggaagttcttgtaaaaagttttgaaatttcaccaaatagggtccagattagtcttgtgcaatacagccgggatcctcatactgagttcactttgaaaaaattcaccaaagttgaagatataattgaagcaataaacaccttcccttacagaggaggatctacaaatactggcaaagcaatgacttatgtcagagagaaaatatttgtgcctagcaagggatcaagaagcaatgtgccaaaggtcatgattcttatcacggatgggaaatcatcagatgctttcagagatcctgcgataaaactgaggaattcagatgttgaaatctttgcagttggtgtgaaggatgccgttcgctcagaattggaagctattgcctctcctcctgcagagacccatgtgttcacagtggaagattttgatgcttttcagaggatatcttttgaactcacacagtctatctgccttagaattgagcaagaattggcagctataaagaagaaagcttacgtccctccaaaggatcttagtttttcagaagtgacttcttatggtttcaaaaccaactggtctccagctggagaaaatgttttttcatatcacatcacctacaaggaagcggctggggatgatgaggtcactgtggtggagccagcatcgagcaccagtgttgttctcagcagcctgaagccagagaccttgtatttggtcaatgtgactgcggagtatgaggatggcttcagcattcccttagctggagaggagaccaccgaagaagtaaaaggagcacctcgaaacctaaaggtgacagatgagactacagatagtttcaaaattacttggactcaagctccagggagagttttaagatatcgaattatatatagaccagttgctggtggagagagcagagaagttaccaccccacccaatcagaggaggagaacactggagaacttgattccagacacgaaatatgaagtatctgtaattcctgaatatttctcaggacctggtactccattaactggaaatgcagccactgaagaagttagagggaatccaagagacttaagagtttctgaccctacgacgtctactatgaaattatcttggagtggggcaccaggaaaagtgaaacagtatctcgtcacatataccccagtggcagggggtgaaactcaagaggtcactgtgaggggagatacaaccaatacggtgctgcagggattgaaggaagggacacaatacgccttatctgtgacagccttgtatgcgtctggggctggagacgccctctttggtgaaggaacaacacttgaagaacgtggttctcctcaagatttagttactaaagacatcactgacacatcaattggggcttattggacatctgctccaggaatggttcgcggttacagggtctcatggaaatcactttatgatgatgttgacactggagagaaaaatctgcctgaagatgcaattcatacgatgatagaaaatctgcagccagagaccaaatacagaatttcagtatttgccacttacagcagtggagaaggagaacctttgactggagatgccacaactgaattatctcaagattccaaaaccctgaaagtagatgaagaaacagaaaacacaatgagagttacatggaaaccagcaccagggaaagtcgtcaactaccgtgttgtctatcgccctcatgggagagggaagcaaatggttgctaaggtgccccccacagtcacttcgacagtgttaaagcgacttcagccacagaccacatatgacatcacagttcttcctatttacaagatgggagaaggaaagcttaggcaaggatcaggaacaacagcttctcggtttaagtctcctagaaacctcaaaacatctgacccaaccatgtcaagcttccgagtgacttgggagcctgcccctggggaagtgaagggttataaagtcacattccaccctacgggggatgacagaagactgggggagttagtggttggaccctatgacaacacagttgttttggaggaacttagggctggtaccacctataaagtaaatgtttttggaatgtttgatggaggagaaagctcaccacttgttggacaagaaatgacaaccctttccgacacaactgttatgccaattttatcttctgggatggagtgtctcaccagagctgaggcagacattgtgttgctggtggatggatcatggagcatcggccgggcaaattttagaaccgtgaggagtttcatttctcgtattgtggaagtctttgacattggccccaaaagagtacaaattgctcttgctcagtatagtggggatcccagaacagagtggcagttaaatgcacacagagacaagaagagcttgttgcaagctgtggcaaacttgccgtacaaaggaggcaatactctcacaggcatggctttgaatttcattcgccaacagaacttcaggacccaagctggcatgagacctcgagctcgaaaaattggtgtgctcattactgatggaaaatcacaagacgatgttgaagcaccttcaaagaaactcaaggatgagggagtggagctgtttgctattggtattaaaaatgctgatgaagtcgaattaaagatgattgcaactgatcctgatgatacccatgcatacaatgtggcagattttgagtcactctccaggatagtggatgatctcaccattaatttgtgtaacagtgtcaaaggtccaggtgatttggaagcaccttctaacttagttatttctgagcgaacccatcgttcttttagagtgagctggacaccaccttctgacagtgtggatcgatataaggtggaatactatccagtttctggagggaaacgtcaagaattttatgtgagtcgaatggaaactagcacagtgctgaaagatctgaaacctgaaactgaatatgttgtcaatgtgtattctgtggtagaagatgaatatagtgagcctctgaaggggacagaaaaaaccttgccagtgcctgtagtcagcctgaatatttatgatgttggccctaccaccatgcatgtgcagtggcagcctgtgggaggagctactggctacatcttgtcatacaaacctgttaaggacacagagccaacaagacccaaagaggtgcgtttggggccaacagtgaatgacatgcagctgactgaccttgttcccaacacggagtatgcagtcacagtccaggctgtcctgcacgacctcactagtgaacctgtcactgttcgggaagtcaccttgcctttacccagacctcaggatctgaaactcagagatgtgactcacagcactatgaatgtcttttgggaacctgtgcctggaaaagtgcgtaaatatattgttcgatacaaaacaccagaagaggatgtcaaagaggtagaggtggacagatcagagaccagcacttccctcaaagacctcttctcacagaccttgtacacagtcagcgtttctgcagtacatgacgagggggagtctcctccagtgactgctcaagaaactacccgacccgtgccagccccaacaaacttaaagattactgaagtaacatcagagggtttcagagggacttgggatcatggagcttcagatgtgtctctctacagaataacttgggcaccttttggaagctcagataagatggagaccatcttaaatggagatgaaaacactttggtgttcgaaaacctgaaccccaacaccatctatgaagtttccattactgccatctatcctgatgagtcagaaagtgatgacctgattggcagtgagcgcacactgcctatcttaacaacacaagctcccaaaagtggcccacgaaaccttcaagtgtacaatgcaacatctaacagcctgactgttaagtgggatcctgctagtggtcgtgtgcagaaatataggatcacttatcagccttccacaggggaaggcaatgagcaaacgaccacaataggaggacggcagaacagtgtggtcctgcagaaactgaagccagacactccttacactatcaccgtatcctctctgtatcctgatggtgaaggaggtcggatgacgggaagaggcaagaccaaacctctaaacactgtaaggaacctgagagtgtatgacccttctaccagcaccttgaatgtccgctgggaccatgcagagggaaatcctcgtcagtacaagctcttctatgcaccagcagcaggtggtccagaggaactggtaccaatccccgggaataccaattatgccattcttaggaatctgcagccagatacctcatacactgtgactgtagttcccgtttatactgaaggtgatgggggacgcacatcagatactggaaggacattgatgagaggactggcaagaaatgtccaagtatacaatcctacacctaacagcctcgatgttcgctgggaccctgctccaggacctgtgctgcaatatcgcgttgtgtattctcctgtggatggcacaagaccctcagaatctatagtagtgccaggaaacacgcgcatggtgcatctggagcggctgattccggacacactctattccgtgaaccttgtggctctgtactcggatggagagggaaatcccagccctgcccagggccgaacgctaccacgcagtggaccaaggaacctgagagtctttggtgaaacaaccaatagcctctcggtagcctgggatcatgctgatgggccagttcagcagtacaggatcatctattctcccactgttggtgatccaattgatgaatataccacagtcccaggcagaagaaacaatgtaatactgcagcccctgcaacctgacactccatataaaattactgttattgctgtttatgaagatggagatggtggccatctaacaggaaatggaagaactgtgggactccttcctcctcagaacatacacatctctgacgaatggtatacaagattcagggtgtcctgggatccttcaccttctccagttcttggatataaaatagtatataagccagtgggttccaatgagcccatggaagcctttgttggagaaatgacatcatataccttacacaatctcaatcccagcaccacctacgatgtgaatgtttatgctcaatatgattctggactcagtgtccccttgacagatcaaggcactacattatatttaaatgtaacagatctgaaaacttaccagattgggtgggatacattctgtgtcaaatggtcacctcaccgggcagccacctcctacaggctaaaactaagccctgcagatggaacaaggggacaagaaattacagtgcgtggatcagaaaccagtcactgcttcactggcctttcaccagacactgattatggtgtcactgtttttgtgcagacaccaaatctcgagggaccaggagtctctgttaaagaacataccactgtgaaaccaacagaagcccctacagagccacccacacctcctccccctcccaccattccaccagcccgggatgtatgcaaaggggccaaggcagatattgtgttcttgactgatgcctcctggagcattggggacgataattttaacaaagttgtaaaattcatcttcaatactgtgggaggctttgatgaaatcagtcctgctgggattcaggtttcatttgtgcaatacagcgatgaggtcaagtctgagttcaagctgaacacgtacaatgacaaggccctagcccttggggccctccagaatattaggtacagaggaggaaacacaagaacaggcaaggccctcacgtttatcaaggagaaagtcttgacttgggagagcggcatgaggaagaatgtccctaaggtgttggttgtggtcacggacggtcggtcccaggatgaggtcaagaaggcggctttggtcatccagcagtcagggttcagtgtctttgtagttggtgtggctgatgtcgactacaatgagcttgccaacattgccagcaaaccaagtgaacggcacgtgttcattgtggacgactttgaatcttttgagaagatcgaagacaatcttattacatttgtttgtgaaactgccacttcaagttgtcctctcatttatttggatggctacacctcaccaggttttaaaatgcttgaagcatacaacctgacagaaaagaattttgcttctgtacaaggagtatctttggagtcagggtctttccccagctactcagcatacaggattcagaagaatgcgtttgtgaatcagcctacagcagacctacacccaaatggactccctccttcatacacgattatattattattcagacttctcccagaaactcccagtgacccttttgcaatttggcaaatcacagacagagactacaaaccacaagttggagtgattgcagatccttctagcaagacgttatcattctttaacaaggatacaagaggcgaggtgcaaactgttacatttgacacagaagaagtaaagacattattttatggaagttttcacaaggttcatattgtagtgacctcaaaaagtgttaagatttacattgactgctatgaaattatagaaaaagacatcaaggaagctggaaatataacaactgatggttatgaaattcttggaaaactccttaaaggggaaaggaaatcagccgcattccaaatccagagttttgacattgtctgcagtccagtgtggaccagtagagacagatgctgtgatattccctctaggagagatgagggaaaatgccctgcttttccaaattcttgcacatgtacacaggacagcgttggacctccaggacctccaggccctgcaggaggacctggtgctaaaggtcccagaggtgaaagaggtatcagtggggcaattgggccccctggtcctcgtggagacataggtcctccaggcccccagggtcctccaggccctcagggacccaatggactctctattccgggagagcaaggtcgccaagggatgaaaggtgatgctggagagccaggacttccaggccgaacaggaaccccaggattacctggcccaccaggaccaatgggacctccaggagacagaggcttcactggaaaagacggtgcaatgggacccaggggcccaccagggccgccgggaagcccaggctccccaggagtcacaggaccaagtgggaagccaggaaaacctggagatcatggcagaccaggtccatctgggttgaaaggagaaaaaggtgataggggagacattgcttcccagaacatgatgcgagcagttgcaagacaagtctgtgaacaattgataagtggtcagatgaacagattcaatcagatgctgaatcagattccaaatgattaccagtccagtcgcaaccagccaggcccgccgggtccaccgggacctcctggtagcgcaggagccagaggagaacctgggcctggggggcggccaggcttcccgggcacaccagggatgcagggaccccctggggaacgaggtttgccaggagagaaaggtgaaaggggtactggatcttcaggacctcgggggctgcctggccccccaggtccacaaggagaatccagaacaggtccaccagggtccacaggttcaagaggtccccctggcccccctggccgtcctggaaactcaggtatccgaggacccccaggtcctcctggatactgtgattcttctcagtgtgccagcatcccatacaacgggcaaggctatccaggttccggctaacacattttctaagtcgccagtgctgcttacagtttgaatacatgaaaatcctgtttctgagatgtttgcgcacgtgcttattaggaaatgagtctgtatggaaatctcaccacagataatggttaacgaaccgggtcgacatcacaaaggagggtggagactctttttactaacttgaatgagacaaaagcagtggtgtcagtttataatcctgatgcatttcagtaataatgtagaaaaacattattttaaaaaagttccaacacacagccatgaggagcctcagttttgaaagaggtgcataataaaactactaaccagaggagtctatgccattttaagaaaaacaattaacctggttaaagagaaatgtcttatgtaaataataaactaattgtggcttgtaaatgatttgtatgtgatcctgtcgactaaaatcacttaacaattctacaataagcttctgcatcaaagcctgccgcttgctctatgccggaataacaccaaatggaatctcctcatctcttgcttgttagcgatgtgtctgattcagggcatctgtctttttgttacttttttgtccgtgtcctctcatttgggttttgtaactgcaattttcaaaccaaagtttaaaatcaccttttcttcctgttttgctgtagtcactggtgttcctcacccaccagctgtaactcagtttgtgtgaggtacagccacagaagatgtcatgtactgtatattacctggtgatagttgcttttcaccccccgagttcagtttctaggagccaatgaaacttcccctcacctcctcatctttccaagttgttctttgaattgaggagtttgaaggcataaacagttacttggggatttgcgaaaatcctacttagttactgcgtttacagttctttggcccagtctctgacccttcccaagtatttgtgcaatgattgtgtttactgctggatttttgaaggtttttttttttaagaaagtgccatttcattatttgattatcaccaaattatctggaaataattgggacattgtaacttatctatttatagttatgagattaagactggagtgccatcaccgcgggtgatgatttagcttttgctgtgtgtgtgtgtgtgtgccttccaaatcatgccataattgtaatgttgaatcggacagagccttacgtgcccgagggcggggcctacctgcctgagcgcgagcccttcatcgtgccggtggagcccgagcggacagcggaatacgaggactacggcgcagacgagcctgcagaggagcctcctgagccccaccggcgctggcggcgcgccctgccccacggacccgggcagtgaaccagagatcacgcgccgcgccgcgaggcttgggggaggtgttgaaattctcatttacaggtcagatagagcagtgtacgtcttttctgaggtgtttcttccagcgttgctcatccaggagtaccctttctgattgtagagaaccttgtttctgcaggaagcctagctccaagcacgcagtctgtagacatttttgcctttgcccttgaaatgcttgcaaaatactttgttaacaaaagctgcaaagagagaacatgccgtgtgcctttagttagcacagcgggcagcctcagtgaaactcttaggttaagcagttaagtcctggaacccagagctgctgtgtatttcgagcgggcagtttatcttttgctatacttattttcaattcaattacaccacgattcaaataattcccctcctaaaaccaaaaaggagggaaacgtcaactccattgcaattacttatcttcctcttctatctctgttatacgccggggcatagaatgctcgtatacatctctttaacaaccacaaaccttaagccatgtagatgaagttagtgcatcaacgggatacagttccatattgccttaaacctccttgttttagacacactaacatttataccaaattgcagattattctgcagagagggaattgcatgtttgtgttgtatatttagtatgaacttttttcagaatataatatttcttagttatcaaaagtagttggaaaacatttgcaagactatgaacatagaattgctgcttttatattttaactgcagattgtgaatttcactgccttatattatttatttctgaaacaaaagaggcatttttcaataaaactactgaaaatttga

SEQ ID NO: 13883 - DNA, 921 bp, Homo sapiens
gacaggtcgcctgactgggctcctccccgggcccgccccgacaggtttgtcttgtgaccgcgggcggccgctgcttctttcccgagcttggaacttcgttatccgcgatgcgtttcctggcagctacattcctgctcctggcgctcagcaccgctgcccaggccgaaccggtgcagttcaaggactgcggttctgtggatggagttataaaggaagtgaatgtgagcccatgccccacccaaccctgccagctgagcaaaggacagtcttacagcgtcaatgtcaccttcaccagcaatattcagtctaaaagcagcaaggccgtggtgcatggcatcctgatgggcgtcccagttccctttcccattcctgagcctgatggttgtaagagtggaattaactgccctatccaaaaagacaagacctatagctacctgaataaactaccagtgaaaagcgaatatccctctataaaactggtggtggagtggcaacttcaggatgacaaaaaccaaagtctcttctgctgggaaatcccagtacagatcgtttctcatctctaagtgcctcattgagttcggtgcatctggccaatgagtctgctgagactcttgacagcacctccagctctgctgcttcaacaacagtgacttgctctccaatggtatccagtgattcgttgaagaggaggtgctctgtagcagaaactgagctccgggtggctggttctcagtggttgtctcatgtctctttttctgtcttaggtggtttcattaaatgcagcacttggttagcagatgtttaattttttttttaacaacattaacttgtggcctctttctacacctggaaatttactcttgaataaataaaaactcgtttgtcttgtcttctgcaaaaaaaaaaaaaaaaaaaaaaaaa

SEQ ID NO: 13884 - DNA, 3431 bp, Homo sapiens
atggccccccgcaccctctggagctgctacctctgctgcctgctgacggcagctgcaggggccgccagctaccctcctcgaggtttcagcctctacacaggttccagtggggccctcagccccggggggccccaggcccagattgccccccggccagccagccgccacaggaactggtgtgcctacgtggtgacccggacagtgagctgtgtccttgaggatggagtggagacatatgtcaagtaccagccttgtgcctggggccagccccagtgtccccaaagcatcatgtaccgccgcttcctccgccctcgctaccgtgtggcctacaagacagtgaccgacatggagtggaggtgctgtcagggttatgggggcgatgactgtgctgagagtcccgctccagcgctggggcctgcgtcttccacaccacggcccctggcccggcctgcccgccccaacctctctggctccagtgcaggcagccccctcagtggactggggggagaaggtcctggggagtcagagaaggtgcagcagctggaggaacaggtgcagagcctgaccaaggagctgcaaggcctgcggggcgtcctgcaaggactgagcgggcgcctggcagaggatgtgcagagggctgtggagacggccttcaacgggaggcagcagccagctgacgcggctgcccgccctggggtgcatgaaaccctcaatgagatccagcaccagctgcagctcctggacacccgcgtctccacccacgaccaggagctgggtcacctcaacaaccatcatggcggcagcagcagcagtgggggcagcagggccccagccccagcctcagcccctccgggccccagtgaggagctgctgcggcagctggagcagcggttgcaggagtcctgctccgtgtgcctggccgggctagatggcttccgccggcagcagcaggaggacagggagcggctgcgagcgatggagaagctgctggcctcggtggaggagcggcaacggcacctcgcagggctggcggtgggccgcaggccccctcaggaatgctgctctccagagctgggccggcgactggcagagctggagcgcaggctggatgtcgtggccggctcagtgacagtgctgagtgggcggcgaggcacagagctgggaggagccgcggggcagggaggccaccccccaggctacaccagcttggcctcccgcctgtctcgcctggaggaccgcttcaactccaccctgggcccttcggaggagcaggaggagagctggcctggggctcctggggggctgagccactggctgcctgctgcccggggccgactagagcagttgggggggctgctggccaatgtgagcggggagctgggggggcggttggatctgttggaggagcaggtggcaggggccatgcaggcatgcgggcagctctgctctggggcccctggggagcaggactctcaagtcagcgagatcctcagtgccttggagcgcagggtgctggacagtgaggggcagctgcggctggtgggctccggcctgcacacggtggaagcagcgggggaggcccggcaggccacgctggagggattacaagaggttgtgggccggctccaggatcgtgtggatgcccaggatgagacagctgcagagttcacactacggctgaatctcactgcggcccggctaggccaactggaggggctgctgcaggcccatggggatgagggctgtggggcctgtggcggagtccaagaggaactaggccgccttcgggatggtgtggagcgctgctcctgccccctgttgcctcctcggggtcctggggctggtccaggtgttgggggcccaagccgtgggcccctggacggcttcagcgtgtttgggggcagctcaggctcagccctgcaggccctgcaaggagagctctctgaggttattctcagcttcagctccctcaatgactcactgaatgagctccagaccactgtggagggccagggcgctgatctggctgacctgggggcaaccaaggaccgtatcatttctgagattaacaggctgcagcaggaggccacagagcatgctacagagagtgaagagcgcttccgaggcctagaggagggacaagcacaggccggccagtgccccagcttagaggggcgattgggccgtcttgagggtgtctgtgaacggttggacactgtggctgggggactgcagggcctgcgcgagggcctttccagacacgtggctgggctctgggctgggctccgggaaaccaacaccaccagccagatgcaggcagccctgctggagaagctggtcgggggacaggcgggcctgggcaggcggctgggtgcccttaacagctccctgcagctcctggaggaccgtctgcaccagctcagcctgaaggacctcactgggcctgcaggagaggctgggcccccagggcctcctgggctgcagggacccccaggccctgctggacctccaggatcaccaggcaaggacgggcaagagggccccatcgggccaccaggtcctcaaggggaacagggagtggagggggcaccagcagcccctgtgccccaagtggcattttcagctgctctgagtttgccccggtctgaaccaggcacggtccccttcgacagagtcctgctcaatgatggaggctattatgatccagagacaggcgtgttcacagcgccactggctggacgctacttgctgagcgcggtgctgactgggcaccggcacgagaaagtggaggccgtgctgtcccgctccaaccagggcgtggcccgcgtagactccggtggctacgagcctgagggcctggagaataagccggtggccgagagccagcccagcccgggcaccctgggcgtcttcagcctcatcctgccgctgcaggccggggacacggtctgcgtcgacctggtcatggggcagctggcgcactcggaggagccgctcaccatcttcagcggggccctgctctatggggacccagagcttgaacacgcgtagactggggtcccgcccgacgtgtctacgtcggctgaagagacagcgggggcggcgggctcctggggtctcgcctgagacggggcacctagccctgggcgagcgccgcacccgggcccgcagcggcaccgcgcccagagcggcctctccccacgcccggggcgcgccggctcagggaggctcggggccgcccatgcagacttttggcctggcgcgatcccccaagaacccctccagggccggcctgcggaggagccgatcctcgcaccctccgctccctccactggccctccaggtcgattccctgggctccaggctcccccgcgcgggcgccgcccaccgccatactaaacgatcgaggaataaagacacttggtttttct

SEQ ID NO: 13885 - DNA, 2740 bp, Homo sapiens
gccgccgccgccatgagctgccccgtgcccgcctgctgcgcgctgctgctagtcctggggctctgccgggcgcgtccccggaacgcactgctgctcctcgcggatgacggaggctttgagagtggcgcgtacaacaacagcgccatcgccaccccgcacctggacgccttggcccgccgcagcctcctctttcgcaatgccttcacctcggtcagcagctgctctcccagccgcgccagcctcctcactggcctgccccagcatcagaatgggatgtacgggctgcaccaggacgtgcaccacttcaactccttcgacaaggtgcggagcctgccgctgctgctcagccaagctggtgtgcgcacaggcatcatcgggaagaagcacgtggggccggagaccgtgtacccgtttgactttgcgtacacggaggagaatggctccgtcctccaggtggggcggaacatcactagaattaagctgctcgtccggaaattcctgcagactcaggatgaccggcctttcttcctctacgtcgccttccacgacccccaccgctgtgggcactcccagccccagtacggaaccttctgtgagaagtttggcaacggagagagcggcatgggtcgtatcccagactggaccccccaggcctacgacccactggacgtgctggtgccttacttcgtccccaacaccccggcagcccgagccgacctggccgctcagtacaccaccgtaggccgcatggaccaaggagttggactggtgctccaggagctgcgtgacgccggtgtcctgaacgacacactggtgatcttcacgtccgacaacgggatccccttccccagcggcaggaccaacctgtactggccgggcactgctgaacccttactggtgtcatccccggagcacccaaaacgctggggccaagtcagcgaggcctacgtgagcctcctagacctcacgcccaccatcttggattggttctcgatcccgtaccccagctacgccatctttggctcgaagaccatccacctcactggccggtccctcctgccggcgctggaggccgagcccctctgggccaccgtctttggcagccagagccaccacgaggtcaccatgtcctaccccatgcgctccgtgcagcaccggcacttccgcctcgtgcacaacctcaacttcaagatgccctttcccatcgaccaggacttctacgtctcacccaccttccaggacctcctgaaccgcactacagctggtcagcccacgggctggtacaaggacctccgtcattactactaccgggcgcgctgggagctctacgaccggagccgggacccccacgagacccagaacctggccaccgacccgcgctttgctcagcttctggagatgcttcgggaccagctggccaagtggcagtgggagacccacgacccctgggtgtgcgcccccgacggcgtcctggaggagaagctctctccccagtgccagcccctccacaatgagctgtgaccatcccaggaggcctgtgcacacatcccaggcatgtcccagacacatcccacacgtgtccgtgtggccggccagcctggggagtagtggcaacagcccttccgtccacactcccatccaaggagggttcttccttcctgtggggtcactcttgccattgcctggagggggaccagagcatgtgaccagagcatgtgcccagcccctccaccaccaggggcactgccgtcatggcaggggacacagttgtccttgtgtctgaaccatgtcccagcacgggaattctagacatacgtggtctgcggacagggcagtgcccccagcccaggacaagggagtcttgttttctggcttggtttggggacctgcaaatgggaggcctgaggccctcttcaggctttggcagccacagatacttctgaacccttcacagagagcaggcaggggcttcggtgccgcgtgggcagtacgcaggtcccaccgacactcacctgggagcacggcgcctggctcttaccagcgtctggcctagaggaagcctttgagcgacctttgggcaggtttctgcttcttctgttttgccccatggtcaagtccctgttccccaggcaggtttcagctgattggcagcaggctccctgagtgatgagcttgaacctgtggtgtttctgggcagaagcttatcttttttgagagtgtccgaagatgaaggcatggcgatgcccgtcctctggcttgggttaattcttcggtgacactggcattgctgggtggtgatgcccgtcctctggcttgggttaattcttcggtgacactggcgttgctgggtggcaatgcccgtcctctggcttgggctaattcttcggtgacactggcgttgctgggtggcgatgcccgtcctctggcttgggttaattcttggatgacgtcggcgttgctgggagaatgtgccgttcctgccctgcctccacccacctcgggagcagaagcccggcctggacacccctcggcctggacacccctcgaaggagagggcgcttccttgagtaggtgggctccccttgcccttccctccctatcactccatactggggtgggctggaggaggccacaggccagctattgtaaaagctttttattttagtaaaatatacagaagttaaaaaaaaaaaaaaaaaaaaaaaaaaaaaaaaaaaaaaaaaaaaaaaaaaaaaaaaaa

SEQ ID NO: 13886 - DNA, 6297 bp, Homo sapiens
agaaggtaaaaagggagtggtgagaatgaatgtgagaaggaagccaggacagcgcagtccccagtcccgaacggccagggagaggaggtggcctagcgctggcggggctcaccccaatccgtctgccttttgatgccgtactctgctggttgcgcagccacctcgggatactgcacacggagaggagggaaaataagcgaggcaccgccgcaccacgcgggagacctacggagacccacagcgcccgagccctggaagagcactactggatgtcagcggagaaatggctttgagctcagcctggcgctcggttctgcctctgtggctcctctggagcgctgcctgctcccgcgccgcgtccggggacgacaacgcttttccttttgacattgaagggagctcagcggttggcaggcaagacccgcctgagacgagcgaaccccgcgtggctctgggacgcctgccgcctgcggccgagaaatgcaatgctggattctttcacaccctgtcgggagaatgtgtgccctgcgactgtaatggcaattccaacgagtgtttggacggctcaggatactgtgtgcactgccagcggaacacaacaggagagcactgtgaaaagtgtctggatggttatatcggagattccatcaggggagcaccccaattctgccagccgtgcccctgtcccctgccccacttggccaattttgcagaatcctgctataggaaaaatggagctgttcggtgcatttgtaacgaaaattatgctggacctaactgtgaaagatgtgctcccggttactatggaaaccccttactcattggaagcacctgtaagaaatgtgactgcagtggaaattcagatcccaacctgatctttgaagattgtgatgaagtcactggccagtgtaggaattgcttacgcaacaccaccggattcaagtgtgaacgttgcgctcctggctactatggggacgccaggatagccaagaactgtgcagtgtgcaactgcgggggaggcccatgtgacagtgtaaccggagaatgcttggaagaaggttttgaaccccctacaggctgtgataagtgcgtctgggacctgactgatgacctgcggttagcagcgctctccatcgaggaaggcaaatccggggtgctgagcgtatcctctggggccgccgctcataggcacgtgaatgaaatcaacgccaccatctacctcctcaaaacaaaattgtcagaaagagaaaaccaatacgccctaagaaagatacaaatcaacaatgctgagaacacgatgaaaagccttctgtctgacgtagaggaattagttgaaaaggaaaatcaagcctccagaaaaggacaacttgttcagaaggaaagcatggacaccattaaccacgcaagtcagctggtagagcaagcccatgatatgagggataaaatccaagagatcaacaacaagatgctctattatggggaagagcatgaacttagccccaaggaaatctctgagaagctggtgttggcccagaagatgcttgaagagattagaagccgtcaaccatttttcacccaacgggagctcgtggatgaggaggcagatgaggcttacgaactactgagccaggctgagagctggcagcggctgcacaatgagacccgcactctgtttcctgtcgtcctggagcagctggatgactacaatgctaagttgtcagatctccaggaagcacttgaccaggcccttaaccatgtcagggatgccgaagacatgaacagggccacagcagccaggcagcgggaccatgagaaacaacaggaaagagtgagggaacaaatggaagtggtgaacatgtctctgagcacatctgcggactctctgacaacacctcgtctaactctttcagaacttgatgatataataaagaatgcgtcagggatttatgcagaaatagatggagccaaaagtgaactacaagtaaaactatctaacctaagtaacctcagccatgatttagtccaagaagctattgaccatgcacaggaccttcaacaagaagctaatgaattgagcaggaagttgcacagttcagatatgaacgggctggtacagaaggctttggatgcatcaaatgtctatgaaaatattgttaattatgttagtgaagccaatgaaacagcagaatttgctttgaacaccactgaccgaatttatgatgcggtgagtgggattgatactcaaatcatttaccataaagatgaaagtgagaacctcctcaatcaagccagagaactgcaagcaaaggcagagtctagcagtgatgaagcagtggctgacactagcaggcgtgtgggtggagccctagcaaggaaaagtgcccttaaaaccagactcagtgatgccgttaagcaactacaagcagcagagagaggggatgcccagcagcgcctggggcagtctagactgatcaccgaggaagccaacaggacgacgatggaggtgcagcaggccactgcccccatggccaacaatctaaccaactggtcacagaatcttcaacattttgactcttctgcttacaacactgcagtgaactctgctagggatgcagtaagaaatctgaccgaggttgtccctcagctcctggatcagcttcgtacggttgagcagaagcgacctgcaagcaacgtttctgccagcatccagaggatccgagagctcattgctcagaccagaagtgttgccagcaagatccaagtctccatgatgtttgatggccagtcagctgtggaagtgcactcgagaaccagtatggatgacttaaaggccttcacgtctctgagcctgtacatgaaaccccctgtgaagcggccggaactgaccgagactgcagatcagtttatcctgtacctcggaagcaaaaacgccaaaaaagagtatatgggtcttgcaatcaaaaatgataatctggtatacgtctataatttgggaactaaagatgtggagattcccctggactccaagcccgtcagttcctggcctgcttacttcagcattgtcaagattgaaagggtgggaaaacatggaaaggtgtttttaacagtcccgagtctaagtagcacagcagaggaaaagttcattaaaaagggggaattttcgggagatgactctctgctggacctggaccctgaggacacagtgttttatgttggtggagtgccttccaacttcaagctccctaccagcttaaacctgcctggctttgttggctgcctggaactggccactttgaataatgatgtgatcagcttgtacaactttaagcacatctataatatggacccctccacatcagtgccatgtgcccgagataagctggccttcactcagagtcgggctgccagttacttcttcgatggctccggttatgccgtggtgagagacatcacaaggagagggaaatttggtcaggtgactcgctttgacatagaagttcgaacaccagctgacaacggccttattctcctgatggtcaatggaagtatgtttttcagactggaaatgcgcaatggttacctacatgtgttctatgattttggattcagcagtggccgtgtgcatcttgaagatacgttaaagaaagctcaaattaatgatgcaaaataccatgagatctcaatcatttaccacaatgataagaaaatgatcttggtagttgacagaaggcatgtcaagagcatggataatgaaaagatgaaaataccttttacagatatatacattggaggagctcctccagaaatcttacaatccagggccctcagagcacaccttcccctagatatcaacttcagaggatgcatgaagggcttccagttccaaaagaaggacttcaatttactggagcagacagaaaccctgggagttggttatggatgcccagaagactcacttatatctcgcagagcatatttcaatggacagagcttcattgcttcaattcagaaaatatctttctttgatggctttgaaggaggttttaatttccgaacattacaaccaaatgggttactattctattatgcttcagggtcagacgtgttctccatctcactggataatggtactgtcatcatggatgtaaagggaatcaaagttcagtcagtagataagcagtacaatgatgggctgtcccacttcgtcattagctctgtctcacccacaagatatgaactgatagtagataaaagcagagttgggagtaagaatcctaccaaagggaaaatagaacagacacaagcaagtgaaaagaagttttacttcggtggctcaccaatcagtgctcagtatgctaatttcactggctgcataagtaatgcctactttaccagggtggatagagatgtggaggttgaagatttccaacggtatactgaaaaggtccacacttctctttatgagtgtcccattgagtcttcaccattgtttctcctccataaaaaaggaaaaaatttatccaagcctaaagcaagtcagaataaaaagggagggaaaagtaaagatgcaccttcatgggatcctgttgctctgaaactcccagagcggaatactccaagaaactctcattgccacctttccaacagccctagagcaatagagcacgcctatcaatatggaggaacagccaacagccgccaagagtttgaacacttaaaaggagattttggtgccaaatctcagttttccattcgtctgagaactcgttcctcccatggcatgatcttctatgtctcagatcaagaagagaatgacttcatgactctatttttggcccatggccgcttggtttacatgtttaatgttggtcacaaaaaactgaagattagaagccaggagaaatacaatgatggcctgtggcatgatgtgatatttattcgagaaaggagcagtggccgactggtaattgatggtctccgagtcctagaagaaagtcttcctcctactgaagctacctggaaaatcaagggtcccatttatttgggaggtgtggctcctggaaaggctgtgaaaaatgttcagattaactccatctacagttttagtggctgtctcagcaatctccagctcaatggggcctccatcacctctgcttctcagacattcagtgtgaccccttgctttgaaggccccatggaaacaggaacttacttttcaacagaaggaggatacgtggttctagatgaatctttcaatattggattgaagtttgaaattgcatttgaagtccgtcccagaagcagttccggaaccctggtccacggccacagtgtcaatggggagtacctaaatgttcacatgaaaaatggacaggtcatagtgaaagtcaataatggcatcagagatttttccacctcagtaacacccaagcagagtctctgtgatggcagatggcacagaattacagttattagagattctaatgtggttcagttggatgtggactctgaagtgaaccatgtggttggacccctgaatccaaaaccaattgatcacagggagcctgtgtttgttggaggtgttccagaatctctactgacaccacgcttggcccccagcaaacccttcacaggctgcatacgccactttgtgattgatggacacccagtgagcttcagtaaagcagccctggtcagcggcgccgtaagcatcaactcctgtccagcagcctgacatgacagagcacagctgcccaaatacaaagttctttagagcactgaaagaaacacaaagccagccaggaggaacagtaactcttccttcgggtggaagctttcatcgagttgaacaggacttaaacgaatcatcagggaccggatatttcttatttctcatttggattcttaaccttgaatccaaagtgtctgcaatggacaacaattgaaggagaggcaaacttacttgtattgagagcacacgcaattcctactggtgaaattactgtttctgtttctaataaaatagaagggattccaaataaacacttgcacacatttttgaagtgcggctagattctcagattcacctttcttccagggaagataactttcaatctatataaaaatctctgtcctaaaactacctttctttattttgaagagacttactaacttacatataatctaaattagatgatagatttctttttagcccttttgtttggtctatcagtataagaagaatattttaggtttatagctgaagttatcaaggtttaataaagtaaatttctaaca

SEQ ID NO: 13887 - DNA, 1984 bp, Homo sapiens
ggatccagagatttagattttttataagctttcctgccaccgaaacgggtgtttgggacctcacgaggccctgttcattcttcgtcgctgcgctccccactctgtactggatgcatttactgacgttgttgtctccgtccccagagtatgaacccccaaggtgactcatgcagctgtgggtgcccggcatacagcatggtgactggaatggatgagcacccaataaacatttgttgcaggaatgcaggaggacgggcaggccagcaagcaggctgcctggtttttcccacatgggcttttctgggaaagaagagcttctatttttggaaagggctgctatgattgagaaaagttcatggcagcaaaaaaaggacagacgtcgggagggaaacactcctagttctcccagacaacacattttttaaaaagactccttcatctctttaataataacggtaacgacaatgacaatgatgattacttatgagtgcggctagtgccagccactgtgttgtcactgggcgagtaatgatctcattggatcttcacggtgggcgtgcggggctccagggacagcctgcgttcctgggctggctgggtgcagctctcttttcaggagagaaagctctcttggaggagctggaaaggtgcccgactccagccatgctggcgctactgtgttcctgcctgctcctggcagccggtgcctcggacgcctggacgggcgaggactcggcggagcccaactctgactcggcggagtggatccgagacatgtacgccaaggtcacggagatctggcaggaggtcatgcagcggcgggacgacgacggcacgctccacgccgcctgccaggtgcagccgtcggccacgctggacgccgcgcagccccgggtgaccggcgtcgtcctcttccggcagcttgcgccccgcgccaagctcgacgccttcttcgccctggagggcttcccgaccgagccgaacagctccagccgcgccatccacgtgcaccagttcggggacctgagccagggctgcgagtccaccgggccccactacaacccgctggccgtgccgcacccgcagcacccgggcgacttcggcaacttcgcggtccgcgacggcagcctctggaggtaccgcgccggcctggccgcctcgctcgcgggcccgcactccatcgtgggccgggccgtggtcgtccacgctggcgaggacgacctgggccgcggcggcaaccaggccagcgtggagaacgggaacgcgggccggcggctggcctgctgcgtggtgggcgtgtgcgggcccgggctctgggagcgccaggcgcgggagcactcagagcgcaagaagcggcggcgcgagagcgagtgcaaggccgcctgagcgcggcccccacccggcggcggccagggacccccgaggcccccctctgcctttgagcttctcctctgctccaacagacaccttccactctgaggtctcaccttcgcctctgctgaagtctccccgcagccctctccacccagaggtctccctataccgagacccaccatccttccatcctgaggaccgccccaaccctcggagccccccactcagtaggtctgaaggcctccatttgtaccgaaacaccccgctcacgctgacagcctcctaggctccctgaggtacctttccacccagaccctccttccccaccccataagccctgagactcccgcctttgacctgacgatcttcccccttcccgccttcaggttcctcctaggcgctcagaggccgctctggggggttgcctcgagtccccccacccctccccacccaccaccgctcccgcggcaagccagcccgtgcaacggaagccaggccaactgccccgcgtcttcagctgtttcgcatccaccgccaccccactgagagctgctcctttgggggaatgtttggcaacctttgtgttacagattaaaaattcagcaattca

SEQ ID NO: 13888 - DNA, 2855 bp, Homo sapiens
agccccaaactcaccacctggccgtggacacctgtgtcagcatgtgggacctggttctctccatcgccttgtctgtggggtgcactggtgccgtgcccctcatccagtctcggattgtgggaggctgggagtgtgagaagcattcccaaccctggcaggtggctgtgtacagtcatggatgggcacactgtgggggtgtcctggtgcacccccagtgggtgctcacagctgcccattgcctaaagaagaatagccaggtctggctgggtcggcacaacctgtttgagcctgaagacacaggccagagggtccctgtcagccacagcttcccacacccgctctacaatatgagccttctgaagcatcaaagccttagaccagatgaagactccagccatgacctcatgctgctccgcctgtcagagcctgccaagatcacagatgttgtgaaggtcctgggcctgcccacccaggagccagcactggggaccacctgctacgcctcaggctggggcagcatcgaaccagaggagttcttgcgccccaggagtcttcagtgtgtgagcctccatctcctgtccaatgacatgtgtgctagagcttactctgagaaggtgacagagttcatgttgtgtgctgggctctggacaggtggtaaagacacttgtgggggtgattctgggggtccacttgtctgtaatggtgtgcttcaaggtatcacatcatggggccctgagccatgtgccctgcctgaaaagcctgctgtgtacaccaaggtggtgcattaccggaagtggatcaaggacaccatcgcagccaacccctgagtgcccctgtcccacccctacctctagtaaatttaagtccacctcacgttctggcatcacttggcctttctggatgctggacacctgaagcttggaactcacctggccgaagctcgagcctcctgagtcctactgacctgtgctttctggtgtggagtccagggctgctaggaaaaggaatgggcagacacaggtgtatgccaatgtttctgaaatgggtataatttcgtcctctccttcggaacactggctgtctctgaagacttctcgctcagtttcagtgaggacacacacaaagacgtgggtgaccatgttgtttgtggggtgcagagatgggaggggtggggcccaccctggaagagtggacagtgacacaaggtggacactctctacagatcactgaggataagctggagccacaatgcatgaggcacacacacagcaaggatgacgctgtaaacatagcccacgctgtcctgggggcactgggaagcctagataaggccgtgagcagaaagaaggggaggatcctcctatgttgttgaaggagggactagggggagaaactgaaagctgattaattacaggaggtttgttcaggtcccccaaaccaccgtcagatttgatgatttcctagcaggacttacagaaataaagagctatcatgctgtggtttattatggtttgttacattgatgggatacatactgaaatcagcaaacaaaacagatgtatagattagagtgtggagaaaacagaggaaaacttgcagttacgaagactggcaacttggctttactaagttttcagactggcaggaagtcaaacctattaggctgaggaccttgtggagtgtagctgatccagctgatagaggaactagccaggtgggggcctttccctttggatggggggcatatctgacagttattctctccaagtggagacttacggacagcatataattctccctgcaaggatgtatgataatatgtacaaagtaattccaactgaggaagctcacctgatccttagtgtccaaggtttttactgggggtctgtaggacgagtatggagtacttgaataattgacctgaagtcctcagacctgaggttccctagagttcaaacagatacagcatggtccagagtcccagatgtacaaaaacagggattcatcacaaatcccatctttagcatgaagggtctggcatggcccaaggccccaagtatatcaaggcacttgggcagaacatgccaaggaatcaaatgtcatctcccaggagttattcaagggtgagccctttacttgggatgtacaggctttgagcagtgcagggctgctgagtcaaccttttattgtacaggggatgagggaaagggagaggatgaggaagcccccctggggatttggtttggtcttgtgatcaggtggtctatggggctatccctacaaagaagaatccagaaataggggcacattgaggaatgatactgagcccaaagagcattcaatcattgttttatttgccttcttttcacaccattggtgagggagggattaccaccctggggttatgaagatggttgaacaccccacacatagcaccggagatatgagatcaacagtttcttagccatagagattcacagcccagagcaggaggacgctgcacaccatgcaggatgacatgggggatgcgctcgggattggtgtgaagaagcaaggactgttagaggcaggctttatagtaacaagacggtggggcaaactctgatttccgtgggggaatgtcatggtcttgctttactaagttttgagactggcaggtagtgaaactcattaggctgagaaccttgtggaatgcagctgacccagctgatagaggaagtagccaggtgggagcctttcccagtgggtgtgggacatatctggcaagattttgtggcactcctggttacagatactggggcagcaaataaaactgaatcttgttttcagaccttaaaaaaaaaaaaaaaaaaaaa

SEQ ID NO: 13889 - DNA, 1928 bp, Homo sapiens
agggctgcagtcacggggcggcgcggagggccccagcccagtcaggggtgtggccgccgccaccgtaaggctaggccgcgagcttagtcctgggagccgcctccgtcgccgccgtcagagccgccctatcagattatcttaacaagaaaaccaactggaaaaaaaaatgaaattccttatcttcgcatttttcggtggtgttcaccttttatccctgtgctctgggaaagctatatgcaagaatggcatctctaagaggacttttgaagaaataaaagaagaaatagccagctgtggagatgttgctaaagcaatcatcaacctagctgtttatggtaaagcccagaacagatcctatgagcgattggcacttctggttgatactgttggacccagactgagtggctccaagaacctagaaaaagccatccaaattatgtaccaaaacctgcagcaagatgggctggagaaagttcacctggagccagtgagaataccccactgggagaggggagaagaatcagctgtgatgctggagccaagaattcataagatagccatcctgggtcttggcagcagcattgggactcctccagaaggcattacagcagaagttctggtggtgacctctttcgatgaactgcagagaagggcctcagaagcaagagggaagattgttgtttataaccaaccttacatcaactactcaaggacggtgcaataccgaacgcagggggcggtggaagctgccaaggttggggctttggcatctctcattcgatccgtggcctccttctccatctacagtcctcacacaggtattcaggaataccaggatggcgtgcccaagattccaacagcctgtattacggtggaagatgcagaaatgatgtcaagaatggcttctcatgggatcaaaattgtcattcagctaaagatgggggcaaagacctacccagatactgattccttcaacactgtagcagagatcactgggagcaaatatccagaacaggttgtactggtcagtggacatctggacagctgggatgttgggcagggtgccatggatgatggcggtggagcctttatatcatgggaagcactctcacttattaaagatcttgggctgcgtccaaagaggactctgcggctggtgctctggactgcagaagaacaaggtggagttggtgccttccagtattatcagttacacaaggtaaatatttccaactacagtctggtgatggagtctgacgcaggaaccttcttacccactgggctgcaattcactggcagtgaaaaggccagggccatcatggaggaggttatgagcctgctgcagcccctcaatatcactcaggtcctgagccatggagaagggacagacatcaacttttggatccaagctggagtgcctggagccagtctacttgatgacttatacaagtatttcttcttccatcactcccacggagacaccatgactgtcatggatccaaagcagatgaatgttgctgctgctgtttgggctgttgtttcttatgttgttgcagacatggaagaaatgctgcctaggtcctagaaacagtaagaaagaaacgttttcatgcttctggccaggaatcctgggtctgcaactttggaaaactcctcttcacataacaatttcatccaattcatcttcaaagcacaactctatttcatgctttctgttattatctttcttgatactttccaaattctctgattctagaaaaaggaatcattctcccctccctcccaccacatagaatcaacatatggtagggattacagtgggggcatttctttatatcacctcttaaaaacattgtttccactttaaaagtaaacacttaataaatttttggaagaacaaaaaaaaaaaaaaaaaaaaaaaaaaaaaa

SEQ ID NO: 13890 - DNA, 2177 bp, Homo sapiens
gcgggccagcctgggccccagcccacaccttcaccagggcccaggagccaccatgtggcgatgtccactggggctactgctgttgctgccgctggctggccacttggctctgggtgcccagcagggtcgtgggcgccgggagctagcaccgggtctgcacctgcggggcatccgggacgcgggaggccggtactgccaggagcaggacctgtgctgccgcggccgtgccgacgactgtgccctgccctacctgggcgccatctgttactgtgacctcttctgcaaccgcacggtctccgactgctgccctgacttctgggacttctgcctcggcgtgccacccccttttcccccgatccaaggatgtatgcatggaggtcgtatctatccagtcttgggaacgtactgggacaactgtaaccgttgcacctgccaggagaacaggcagtggcagtgtgaccaagaaccatgcctggtggatccagacatgatcaaagccatcaaccagggcaactatggctggcaggctgggaaccacagcgccttctggggcatgaccctggatgagggcattcgctaccgcctgggcaccatccgcccatcttcctcggtcatgaacatgcatgaaatttatacagtgctgaacccaggggaggtgcttcccacagccttcgaggcctctgagaagtggcccaacctgattcatgagcctcttgaccaaggcaactgtgcaggctcctgggccttctccacagcagctgtggcatccgatcgtgtctcaatccattctctgggacacatgacgcctgtcctgtcgccccagaacctgctgtcttgtgacacccaccagcagcagggctgccgcggtgggcgtctcgatggtgcctggtggttcctgcgtcgccgaggggtggtgtctgaccactgctaccccttctcgggccgtgaacgagacgaggctggccctgcgcccccctgtatgatgcacagccgagccatgggtcggggcaagcgccaggccactgcccactgccccaacagctatgttaataacaatgacatctaccaggtcactcctgtctaccgcctcggctccaacgacaaggagatcatgaaggagctgatggagaatggccctgtccaagccctcatggaggtgcatgaggacttcttcctatacaagggaggcatctacagccacacgccagtgagccttgggaggccagagagataccgccggcatgggacccactcagtcaagatcacaggatggggagaggagacgctgccagatggaaggacgctcaaatactggactgcggccaactcctggggcccagcctggggcgagaggggccacttccgcatcgtgcgcggcgtcaatgagtgcgacatcgagagcttcgtgctgggcgtctggggccgcgtgggcatggaggacatgggtcatcactgaggctgcgggcaccacgcggggtccggcctgggatccaggctaagggccggcggaagaggccccaatggggcggtgaccccagcctcgcccgacagagcccggggcgcaggcgggcgccagggcgctaatcccggcgcgggttccgctgacgcagcgccccgcctgggagccgcgggcaggcgagactggcggagcccccagacctcccagtggggacggggcagggcctggcctgggaagagcacagctgcagatcccaggcctctggcgcccccactcaagactaccaaagccaggacacctcaagtctccagccccactaccccaccccactcctgtattctttttttttttttttagacagggtcttgctccgttgcccaggttggagtgcagtggcccatcagggctcactgtaacctccgactcctgggttcaagtgaccctcccacctcagcctctcaagtagctgggactacaggtgcaccaccacacctggctaatttttgtattttttgtaaagaggggggtctcactgtgttgcccaggctggtctcgaactcctgggctcaagcggtccacctgcctccgcctcccaaagtgctgggattgcaggcatgagccactgcacccagccctgtattcttattcttcagatatttatttttcttttcactgttttaaaataaaaccaaagtattgataaaaaaaaaaaaaaaaa

SEQ ID NO: 13891 - DNA, 5065 bp, Homo sapiens
gccttagaaaagttaacgagaaccagatgtggtggccactgccgaactttctcagagccggtgattggtccccagccgagggcctcagccaattagcttgctgggtgggcctggagtcccgccccgcccaggcgcccgcggagatccaggttcgaggctggcgcggcgcggagagtgggctggaggccggggcgggacgcgttgtgcagcgggtaagcgcacggccgagcgagcatggagggggaccgggtggccgggcggccggtgctgtcgtcgttaccagtgctactgctgctgcagttgctaatgttgcgggccgcggcgctgcacccagacgagctcttcccacacggggagtcgtggggggaccagctcctgcaggaaggcgacgacgaaagctcagccgtggtgaagctggcgaatcccctgcacttctacgaagcccgattcagcaacctctacgtgggcaccaacggcatcatctccactcaggacttccccagggaaacgcagtatgtggactatgatttccccaccgacttcccggccatcgccccttttctggcggacatcgacacgagccacggcagaggccgagtcctgtaccgagaggacacctcccccgcagtgctgggcctggccgcccgctatgtgcgcgctggcttcccgcgctctgcgcgctttacccccacccacgccttcctggccacctgggagcaggtaggcgcttacgaggaggtcaagcgcggggcgctgccctcgggagagctgaacactttccaggcagttttggcatctgatgggtctgatagctacgccctctttctttatcctgccaacggcctgcagttccttggaacccgccccaaagagtcttacaatgtccagcttcagcttccagctcgggtgggcttctgccgaggggaggctgatgatctgaagtcagaaggaccatatttcagcttgactagcactgaacagtctgtgaaaaatctctatcaactaagcaacctggggatccctggagtgtgggctttccatatcggcagcacttccccgttggacaatgtcaggccagctgcagttggagacctttccgctgcccactcttctgttcccctgggacgttccttcagccatgctacagccctggaaagtgactataatgaggacaatttggattactacgatgtgaatgaggaggaagctgaataccttccgggtgaaccagaggaggcattgaatggccacagcagcattgatgtttccttccaatccaaagtggatacaaagcctttagaggaatcttccaccttggatcctcacaccaaagaaggaacatctctgggagaggtagggggcccagatttaaaaggccaagttgagccctgggatgagagagagaccagaagcccagctccaccagaggtagacagagattcactggctccttcctgggaaaccccaccaccgtaccccgaaaacggaagcatccagccctacccagatggagggccagtgccttcggaaatggatgttcccccagctcatcctgaagaagaaattgttcttcgaagttaccctgcttcaggtcacactacacccttaagtcgagggacgtatgaggtgggactggaagacaacataggttccaacaccgaggtcttcacgtataatgctgccaacaaggaaacctgtgaacacaaccacagacaatgctcccggcatgccttctgcacggactatgccactggcttctgctgccactgccaatccaagttttatggaaatgggaagcactgtctgcctgagggggcacctcaccgagtgaatgggaaagtgagtggccacctccacgtgggccatacacccgtgcacttcactgatgtggacctgcatgcgtatatcgtgggcaatgatggcagagcctacacggccatcagccacatcccacagccagcagcccaggccctcctccccctcacaccaattggaggcctgtttggctggctctttgctttagaaaaacctggctctgagaacggcttcagcctcgcaggtgctgcctttacccatgacatggaagttacattctacccgggagaggagacggttcgtatcactcaaactgctgagggacttgacccagagaactacctgagcattaagaccaacattcaaggccaggtgccttacgtcccagcaaatttcacagcccacatctctccctacaaggagctgtaccactactccgactccactgtgacctctacaagttccagagactactctctgacttttggtgcaatcaaccaaacatggtcctaccgcatccaccagaacatcacttaccaggtgtgcaggcacgcccccagacacccgtccttccccaccacccagcagctgaacgtggaccgggtctttgccttgtataatgacgaagaaagagtgcttagatttgctgtgaccaatcaaattggcccggtcaaagaagattcagaccccactccggggaatccttgctatgatgggagccacatgtgtgacacaacagcacggtgccatccagggacaggtgtagattacacctgtgagtgcgcatctgggtaccagggagatggacggaactgtgtggatgaaaatgaatgtgcaactggctttcatcgctgtggccccaactctgtatgtatcaacttgcctggaagctacaggtgtgagtgccggagtggttatgagtttgcagatgaccggcatacttgcatcttgatcaccccacctgccaacccctgtgaggatggcagtcatacctgtgctcctgctgggcaggcccggtgtgttcaccatggaggcagcacgttcagctgtgcctgcctgcctggttatgccggcgatgggcaccagtgcactgatgtagatgaatgctcagaaaacagatgtcaccctgcagctacctgctacaatactcctggttccttctcctgccgttgtcaacccggatattatggggatggatttcagtgcatacctgactccacctcaagcctgacaccctgtgaacaacagcagcgccatgcccaggcccagtatgcctaccctggggcccggttccacatcccccaatgcgacgagcagggcaacttcctgcccctacagtgtcatggcagcactggtttctgctggtgcgtggaccctgatggtcatgaagttcctggtacccagactccacctggctccaccccgcctcactgtggaccatcaccagagcccacccagaggcccccgaccatctgtgagcgctggagggaaaacctgctggagcactacggtggcaccccccgggatgaccagtacgtgccccagtgcgatgacctgggccacttcatccccctgcagtgccacggaaagagcgacttctgctggtgtgtggacaaagatggcagagaggtgcagggcacccgctcccagccaggcaccacccctgcgtgtatacccaccgtcgctccacccatggtccggcccacgccccggccagatgtgacccctccatctgtgggcaccttcctgctctatactcagggccagcagattggctacttacccctcaatggcaccaggcttcagaaggatgcagctaagaccctgctgtctctgcatggctccataatcgtgggaattgattacgactgccgggagaggatggtgtactggacagatgttgctggacggacaatcagccgtgctggtctggaactgggagcagagcctgagacgatcgtgaattcaggtctgataagccctgaaggacttgccatagaccacatccgcagaacaatgtactggacggacagtgtcctggataagatagagagcgccctgctggatggctctgagcgcaaggtcctcttctacacagatctggtgaatccccgtgccatcgctgtggatccaatccgaggcaacttgtactggacagactggaatagagaagctcctaaaattgaaacgtcatctttagatggagaaaacagaagaattctgatcaatacagacattggattgcccaatggcttaacctttgaccctttctctaaactgctctgctgggcagatgcaggaaccaaaaaactggagtgtacactacctgatggaactggacggcgtgtcattcaaaacaacctcaagtaccccttcagcatcgtaagctatgcagatcacttctaccacacagactggaggagggatggtgttgtatcagtaaataaacatagtggccagtttactgatgagtatctcccagaacaacgatctcacctctacgggataactgcagtctacccctactgcccaacaggaagaaagtaagtacagtaatgtaaaggaagacttggagtttacaatcagaacctggaccctaaagaacagtgactgcaaaggcaaagaaagtaaaaaaggaattggccattagacgttcctgagcatccaagatgaacattttgtagtgcaaaaagacttttgtgaaaagctgatacctcaatctttactactgtatttttaaaaatgaaggttgttattgcaagtttaaaaaggtaacagaattttaactgttgcttattaaagcaacttcttgtaaacatttatcattaatatttaaaagatcaaattcattcaactaagaattagagtttaagactctaaacctgatttttgccatggattccttctggccaagaaattaaagcacatgtgatcaatataacaatataatcctaaaccttgacagttggagaagccaatgcagaactgatgggaaaggaccaattatttatagtttcccaacaaaagttctaagattttttacctctgcatcagtgcatttctatttatatcaaaaggtgctaaaatgattcaatttgcattttctgatcctgtagtgcctctatagaagtacccacagaaagtaaagtatcacatttataaataccaaagatgtaacaattttaaaattttctagattactccaataaagtgttttaagttttcctatgaaaaaaaaaaaaaaaaaaaa

SEQ ID NO: 13892 - DNA, 1289 bp, Homo sapiens
ctgccttgctccacacctggtcaggggagagaggggaggaaagccaagggaagggacctaactgaaaacaaacaagctgggagaagcaggaatctgcgctcgggttccgcagatgcagaggttgaggtggctgcgggactggaagtcatcgggcagaggtctcacagcagccaaggaacctggggcccgctcctcccccctccaggccatgaggattctgcagttaatcctgcttgctctggcaacagggcttgtagggggagagaccaggatcatcaaggggttcgagtgcaagcctcactcccagccctggcaggcagccctgttcgagaagacgcggctactctgtggggcgacgctcatcgcccccagatggctcctgacagcagcccactgcctcaagccccgctacatagttcacctggggcagcacaacctccagaaggaggagggctgtgagcagacccggacagccactgagtccttcccccaccccggcttcaacaacagcctccccaacaaagaccaccgcaatgacatcatgctggtgaagatggcatcgccagtctccatcacctgggctgtgcgacccctcaccctctcctcacgctgtgtcactgctggcaccagctgcctcatttccggctggggcagcacgtccagcccccagttacgcctgcctcacaccttgcgatgcgccaacatcaccatcattgagcaccagaagtgtgagaacgcctaccccggcaacatcacagacaccatggtgtgtgccagcgtgcaggaagggggcaaggactcctgccagggtgactccgggggccctctggtctgtaaccagtctcttcaaggcattatctcctggggccaggatccgtgtgcgatcacccgaaagcctggtgtctacacgaaagtctgcaaatatgtggactggatccaggagacgatgaagaacaattagactggacccacccaccacagcccatcaccctccatttccacttggtgtttggttcctgttcactctgttaataagaaaccctaagccaagaccctctacgaacattctttgggcctcctggactacaggagatgctgtcacttaataatcaacctggggttcgaaatcagtgagacctggattcaaattctgccttgaaatattgtgactctgggaatgacaacacctggtttgttctctgttgtatccccagccccaaagacagctcctggccatatatcaaggtttcaataaatatttgctaaatgagtgaaaaaaaaaaaaaaaa

SEQ ID NO: 13893 - DNA, 1207 bp, Homo sapiens
ggagtgcaggcttggaaagcaggagagctcagcctacgtctttaatcctcctgcccaccccttggattctgtctccactgggactcaagagaggaacctggggcccgctcctcccccctccaggccatgaggattctgcagttaatcctgcttgctctggcaacagggcttgtagggggagagaccaggatcatcaaggggttcgagtgcaagcctcactcccagccctggcaggcagccctgttcgagaagacgcggctactctgtggggcgacgctcatcgcccccagatggctcctgacagcagcccactgcctcaagccccgctacatagttcacctggggcagcacaacctccagaaggaggagggctgtgagcagacccggacagccactgagtccttcccccaccccggcttcaacaacagcctccccaacaaagaccaccgcaatgacatcatgctggtgaagatggcatcgccagtctccatcacctgggctgtgcgacccctcaccctctcctcacgctgtgtcactgctggcaccagctgcctcatttccggctggggcagcacgtccagcccccagttacgcctgcctcacaccttgcgatgcgccaacatcaccatcattgagcaccagaagtgtgagaacgcctaccccggcaacatcacagacaccatggtgtgtgccagcgtgcaggaagggggcaaggactcctgccagggtgactccgggggccctctggtctgtaaccagtctcttcaaggcattatctcctggggccaggatccgtgtgcgatcacccgaaagcctggtgtctacacgaaagtctgcaaatatgtggactggatccaggagacgatgaagaacaattagactggacccacccaccacagcccatcaccctccatttccacttggtgtttggttcctgttcactctgttaataagaaaccctaagccaagaccctctacgaacattctttgggcctcctggactacaggagatgctgtcacttaataatcaacctggggttcgaaatcagtgagacctggattcaaattctgccttgaaatattgtgactctgggaatgacaacacctggtttgttctctgttgtatccccagccccaaagacagctcctggccatatatcaaggtttcaataaatatttgctaaatgagtgaaaaaaaaaaaaaaaa

SEQ ID NO: 13894 - DNA, 1051 bp, Homo sapiens
ggaccgccgcctggttaaaggcgcttatttcccaggcagccgctgcagtcgccacacctttgcccctgctgcgatgaccctgtcgccacttctgctgttcctgccaccgctgctgctgctgctggacgtccccacggcggcggtgcaggcgtcccctctgcaagcgttagacttctttgggaatgggccaccagttaactacaagacaggcaatctatacctgcgggggcccctgaagaagtccaatgcaccgcttgtcaatgtgaccctctactatgaagcactgtgcggtggctgccgagccttcctgatccgggagctcttcccaacatggctgttggtcatggagatcctcaatgtcacgctggtgccctacggaaacgcacaggaacaaaatgtcagtggcaggtgggagttcaagtgccagcatggagaagaggagtgcaaattcaacaaggtggaggcctgcgtgttggatgaacttgacatggagctagccttcctgaccattgtctgcatggaagagtttgaggacatggagagaagtctgccactatgcctgcagctctacgccccagggctgtcgccagacactatcatggagtgtgcaatgggggaccgcggcatgcagctcatgcacgccaacgcccagcggacagatgctctccagccaccacacgagtatgtgccctgggtcaccgtcaatgggaaacccttggaagatcagacccagctccttacccttgtctgccagttgtaccagggcaagaagccggatgtctgcccttcctcaaccagctccctcaggagtgtttgcttcaagtgatggccggtgagctgcggagagctcatggaaggcgagtgggaacccggctgcctgcctttttttctgatccagaccctcggcacctgctacttaccaactggaaaattttatgcatcccatgaagcccagatacacaaaattccaccccatgatcaagaatcctgctccactaagaatggtgctaaagtaaaactagtttaataagcaaaaaaaaaaaaaaaaaaa

SEQ ID NO: 13895 - DNA, 3438 bp, Homo sapiens
gcgcccgcgcctcgggccgtcgggagcggagcctcctcgggaccaggacttcagggccacaggtgctgccaagatgctccagggcacctgctccgtgctcctgctctggggaatcctgggggccatccaggcccagcagcaggaggtcatctcgccggacactaccgagagaaacaacaactgcccagagaagaccgactgccccatccacgtgtacttcgtgctggacacctcggagagcgtcaccatgcagtcccccacggacatcctgctcttccacatgaagcagttcgtgccgcagttcatcagccagctgcagaacgagttctacctggaccaggtggcgctgagctggcgctacggcggcctgcacttctctgaccaggtggaggtgttcagcccaccgggcagcgaccgggcctccttcatcaagaacctgcagggcatcagctccttccgccgcggcaccttcaccgactgcgcgctggccaacatgacggagcagatccggcaggaccgcagcaagggcaccgtccacttcgccgtggtcatcaccgacggccacgtcaccggcagcccctgcgggggcatcaagctgcaggccgagcgggcccgcgaggagggcatccggctcttcgccgtggcccccaaccagaacctgaaggagcagggcctgcgggacatcgccagcacgccgcacgagctctaccgcaacgactacgccaccatgctgcccgactccaccgagatcaaccaggacaccatcaaccgcatcatcaaggtcatgaaacacgaagcctacggagagtgctacaaggtgagctgcctggaaatccctgggccctctgggcccaagggctaccgtggacagaagggtgccaagggcaacatgggtgagccgggagagcctggccagaagggaagacagggagacccgggcatcgaaggccccattggattcccaggacccaagggcgttcctggcttcaaaggagagaagggtgaatttggagccgacggtcgcaagggggcccctggcctggctggcaagaacgggaccgatggacagaagggcaagctggggcgcatcggacctcctggctgcaagggagaccctggaaaccggggccccgacggttacccgggggaagcagggagtccaggggagcgaggagaccaaggcggcaagggggaccctggccgcccaggacgcagagggcccccgggagaaatcggggccaagggaagcaaggggtatcaaggcaacaatggagccccaggaagtcctggtgtgaaaggagccaagggcgggcctgggccccgcggacccaaaggcgagccggggcgcaggggagaccccggcaccaagggcagcccaggcagcgatggccccaagggggagaagggggaccctggccctgagggcccccgcggcctggctggagaggttggcaacaaaggagccaagggagaccgaggcttgcctggacccagaggcccccagggagctcttggggagcccggaaagcagggatctcggggagaccccggtgatgcaggaccccgtggagactcaggacagccaggccccaagggagaccccggcaggcctggattcagctacccaggaccccgaggagcacccggagaaaaaggcgagcccggcccacgcggccccgagggaggccgaggcgactttggcttgaaaggagaacctgggaggaaaggagagaaaggagagcctgcggatcctggtccccctggtgagccaggccctcgggggccaagaggagtcccaggacccgagggtgagcccggcccccctggagaccccggtctcacggagtgtgacgtcatgacctacgtgagggagacctgcgggtgctgcgactgtgagaagcgctgtggcgccctggacgtggtcttcgtcatcgacagctccgagagcattgggtacaccaacttcacactggagaagaacttcgtcatcaacgtggtcaacaggctgggtgccatcgctaaggaccccaagtccgagacagggacgcgtgtgggcgtggtgcagtacagccacgagggcacctttgaggccatccagctggacgacgaacatatcgactccctgtcgagcttcaaggaggctgtcaagaacctcgagtggattgcgggcggcacctggacaccctcagccctcaagtttgcctacgaccgcctcatcaaggagagccggcgccagaagacacgtgtgtttgcggtggtcatcacggacgggcgccacgaccctcgggacgatgacctcaacttgcgggcgctgtgcgaccgcgacgtcacagtgacggccatcggcatcggggacatgttccacgagaagcacgagagtgaaaacctctactccatcgcctgcgacaagccacagcaggtgcgcaacatgacgctgttctccgacctggtcgctgagaagttcatcgatgacatggaggacgtcctctgcccggaccctcagatcgtgtgcccagaccttccctgccaaacaggtttggacggagctgttttgtgctgaaaggttttctcggggtccgtggtgtcccccaaaggtgccaccgtgcgggtctcctagctccctgccagcttcctgtccctgtgctcactgcccccacgcctcctgccaaggccgagccacacacccgctccacctgcatttcctctaccgactcgccagcccaaatgccgctcttcactctggcctcgctgagcggctgcccgaggaggagctctaggccgacgcccaccgcaggccttacagtcgtctctggacgctcccttgcagatgcaccgtggcctggcggcgagcccccggtcaccttcctccgcacggaagaggggccggacgccaccttccccaggaccattcccctgatccaacagttgctaaacgccacggagctcacgcaggacccggccgcctactcccagctggtggccgtgctggtctacaccgccgagcgggccaagttcgccaccggggtagagcggcaggactggatggagctgttcattgacacctttaagctggtgcacagggacatcgtgggggaccccgagaccgcgctggccctctgctaaagcccgggcacccgcccagccgggctgggccctccctgccacactagcttcccagggctgcccccgacaggctggctctcagtggaggccgagagatctggaatcggggtcagcggggctacagtccttccaggggctctggggcagctcccagcctcttcccatgctggtggccaccgtgtcccttgctgcggctgcatcttccagtctctcctccgtcttccagtggccgctctctttataagaaccctggtcattgaatttaaggcccaccccaagtccagaatgacctcgcaagacccttaactcactccc

SEQ ID NO: 13896 - DNA, 3145 bp, Homo sapiens
gcgcccgcgcctcgggccgtcgggagcggagcctcctcgggaccaggacttcagggccacaggtgctgccaagatgctccagggcacctgctccgtgctcctgctctggggaatcctgggggccatccaggcccagcagcaggaggtcatctcgccggacactaccgagagaaacaacaactgcccagagaagaccgactgccccatccacgtgtacttcgtgctggacacctcggagagcgtcaccatgcagtcccccacggacatcctgctcttccacatgaagcagttcgtgccgcagttcatcagccagctgcagaacgagttctacctggaccaggtggcgctgagctggcgctacggcggcctgcacttctctgaccaggtggaggtgttcagcccaccgggcagcgaccgggcctccttcatcaagaacctgcagggcatcagctccttccgccgcggcaccttcaccgactgcgcgctggccaacatgacggagcagatccggcaggaccgcagcaagggcaccgtccacttcgccgtggtcatcaccgacggccacgtcaccggcagcccctgcgggggcatcaagctgcaggccgagcgggcccgcgaggagggcatccggctcttcgccgtggcccccaaccagaacctgaaggagcagggcctgcgggacatcgccagcacgccgcacgagctctaccgcaacgactacgccaccatgctgcccgactccaccgagatcaaccaggacaccatcaaccgcatcatcaaggtcatgaaacacgaagcctacggagagtgctacaaggtgagctgcctggaaatccctgggccctctgggcccaagggctaccgtggacagaagggtgccaagggcaacatgggtgagccgggagagcctggccagaagggaagacagggagacccgggcatcgaaggccccattggattcccaggacccaagggcgttcctggcttcaaaggagagaagggtgaatttggagccgacggtcgcaagggggcccctggcctggctggcaagaacgggaccgatggacagaagggcaagctggggcgcatcggacctcctggctgcaagggagaccctggaaaccggggccccgacggttacccgggggaagcagggagtccaggggagcgaggagaccaaggcggcaagggggaccctggccgcccaggacgcagagggcccccgggagaaatcggggccaagggaagcaaggggtatcaaggcaacaatggagccccaggaagtcctggtgtgaaaggagccaagggcgggcctgggccccgcggacccaaaggcgagccggggcgcaggggagaccccggcaccaagggcagcccaggcagcgatggccccaagggggagaagggggaccctggccctgagggcccccgcggcctggctggagaggttggcaacaaaggagccaagggagaccgaggcttgcctggacccagaggcccccagggagctcttggggagcccggaaagcagggatctcggggagaccccggtgatgcaggaccccgtggagactcaggacagccaggccccaagggagaccccggcaggcctggattcagctacccaggaccccgaggagcacccggagaaaaaggcgagcccggcccacgcggccccgagggaggccgaggcgactttggcttgaaaggagaacctgggaggaaaggagagaaaggagagcctgcggatcctggtccccctggtgagccaggccctcgggggccaagaggagtcccaggacccgagggtgagcccggcccccctggagaccccggtctcacggagtgtgacgtcatgacctacgtgagggagacctgcgggtgctgcgactgtgagaagcgctgtggcgccctggacgtggtcttcgtcatcgacagctccgagagcattgggtacaccaacttcacactggagaagaacttcgtcatcaacgtggtcaacaggctgggtgccatcgctaaggaccccaagtccgagacagggacgcgtgtgggcgtggtgcagtacagccacgagggcacctttgaggccatccagctggacgacgaacatatcgactccctgtcgagcttcaaggaggctgtcaagaacctcgagtggattgcgggcggcacctggacaccctcagccctcaagtttgcctacgaccgcctcatcaaggagagccggcgccagaagacacgtgtgtttgcggtggtcatcacggacgggcgccacgaccctcgggacgatgacctcaacttgcgggcgctgtgcgaccgcgacgtcacagtgacggccatcggcatcggggacatgttccacgagaagcacgagagtgaaaacctctactccatcgcctgcgacaagccacagcaggtgcgcaacatgacgctgttctccgacctggtcgctgagaagttcatcgatgacatggaggacgtcctctgcccggaccctcagatcgtgtgcccagaccttccctgccaaacagatgcaccgtggcctggcggcgagcccccggtcaccttcctccgcacggaagaggggccggacgccaccttccccaggaccattcccctgatccaacagttgctaaacgccacggagctcacgcaggacccggccgcctactcccagctggtggccgtgctggtctacaccgccgagcgggccaagttcgccaccggggtagagcggcaggactggatggagctgttcattgacacctttaagctggtgcacagggacatcgtgggggaccccgagaccgcgctggccctctgctaaagcccgggcacccgcccagccgggctgggccctccctgccacactagcttcccagggctgcccccgacaggctggctctcagtggaggccgagagatctggaatcggggtcagcggggctacagtccttccaggggctctggggcagctcccagcctcttcccatgctggtggccaccgtgtcccttgctgcggctgcatcttccagtctctcctccgtcttccagtggccgctctctttataagaaccctggtcattgaatttaaggcccaccccaagtccagaatgacctcgcaagacccttaactcactccc

SEQ ID NO: 13897 - DNA, 3439 bp, Homo sapiens
gcgcccgcgcctcgggccgtcgggagcggagcctcctcgggaccaggacttcagggccacaggtgctgccaagatgctccagggcacctgctccgtgctcctgctctggggaatcctgggggccatccaggcccagcagcaggaggtcatctcgccggacactaccgagagaaacaacaactgcccagagaagaccgactgccccatccacgtgtacttcgtgctggacacctcggagagcgtcaccatgcagtcccccacggacatcctgctcttccacatgaagcagttcgtgccgcagttcatcagccagctgcagaacgagttctacctggaccaggtggcgctgagctggcgctacggcggcctgcacttctctgaccaggtggaggtgttcagcccaccgggcagcgaccgggcctccttcatcaagaacctgcagggcatcagctccttccgccgcggcaccttcaccgactgcgcgctggccaacatgacggagcagatccggcaggaccgcagcaagggcaccgtccacttcgccgtggtcatcaccgacggccacgtcaccggcagcccctgcgggggcatcaagctgcaggccgagcgggcccgcgaggagggcatccggctcttcgccgtggcccccaaccagaacctgaaggagcagggcctgcgggacatcgccagcacgccgcacgagctctaccgcaacgactacgccaccatgctgcccgactccaccgagatcaaccaggacaccatcaaccgcatcatcaaggtcatgaaacacgaagcctacggagagtgctacaaggtgagctgcctggaaatccctgggccctctgggcccaagggctaccgtggacagaagggtgccaagggcaacatgggtgagccgggagagcctggccagaagggaagacagggagacccgggcatcgaaggccccattggattcccaggacccaagggcgttcctggcttcaaaggagagaagggtgaatttggagccgacggtcgcaagggggcccctggcctggctggcaagaacgggaccgatggacagaagggcaagctggggcgcatcggacctcctggctgcaagggagaccctggaaaccggggccccgacggttacccgggggaagcagggagtccaggggagcgaggagaccaaggcggcaagggggaccctggccgcccaggacgcagagggcccccgggagaaatcggggccaagggaagcaaggggtatcaaggcaacaatggagccccaggaagtcctggtgtgaaaggagccaagggcgggcctgggccccgcggacccaaaggcgagccggggcgcaggggagaccccggcaccaagggcagcccaggcagcgatggccccaagggggagaagggggaccctggccctgagggcccccgcggcctggctggagaggttggcaacaaaggagccaagggagaccgaggcttgcctggacccagaggcccccagggagctcttggggagcccggaaagcagggatctcggggagaccccggtgatgcaggaccccgtggagactcaggacagccaggccccaagggagaccccggcaggcctggattcagctacccaggaccccgaggagcacccggagaaaaaggcgagcccggcccacgcggccccgagggaggccgaggcgactttggcttgaaaggagaacctgggaggaaaggagagaaaggagagcctgcggatcctggtccccctggtgagccaggccctcgggggccaagaggagtcccaggacccgagggtgagcccggcccccctggagaccccggtctcacggagtgtgacgtcatgacctacgtgagggagacctgcgggtgctgcgactgtgagaagcgctgtggcgccctggacgtggtcttcgtcatcgacagctccgagagcattgggtacaccaacttcacactggagaagaacttcgtcatcaacgtggtcaacaggctgggtgccatcgctaaggaccccaagtccgagacagggacgcgtgtgggcgtggtgcagtacagccacgagggcacctttgaggccatccagctggacgacgaacatatcgactccctgtcgagcttcaaggaggctgtcaagaacctcgagtggattgcgggcggcacctggacaccctcagccctcaagtttgcctacgaccgcctcatcaaggagagccggcgccagaagacacgtgtgtttgcggtggtcatcacggacgggcgccacgaccctcgggacgatgacctcaacttgcgggcgctgtgcgatcgcgacgtcacagtgacggccatcggcatcggggacatgttccacgagaagcacgagagtgaaaacctctactccatcgcctgcgacaagccacagcaggtgcgcaacatgacgctgttctccgacctggtcgctgagaagttcatcgatgacatggaggacgtcctctgcccggaccctcagatcgtgtgcccagaccttccctgccaaacagagctgtccgtggcacagtgcacgcagcggcccgtggacatcgtcttcctgctggacggctccgagcggctgggtgagcagaacttccacaaggcccggcgcttcgtggagcaggtggcgcggcggctgacgctggcccggagggacgacgaccctctcaacgcacgcgtggcgctgctgcagtttggtggccccggcgagcagcaggtggccttcccgctgagccacaacctcactgccatccacgaggcgctggagaccacacaatacctgaactccttctcgcacgtgggcgcaggcgtggtgcacgccatcaatgccatcgtgcgcagcccgcgtggcggggcccggaggcacgcagagctgtccttcgtgttcctcacggacggcgtcacgggcaacgacagtctgcacgagtcggcgcactccatgcgcaagcagaacgtggtacccaccgtgctggccttgggcagcgacgtggacatggacgtgctcaccacgctcagcctgggtgaccgcgccgccgtgttccacgagaaggactatgacagcctggcgcaacccggcttcttcgaccgcttcatccgctggatctgctagcgccgccgcccgggccccgcagtcgagggtcgtgagcccaccccgtccatggtgctaagcgggcccgggtcccacacggccagcaccgctgctcactcggacgacgccctgggcctgcacctctccagctcctcccacggggtccccgtagccccggcccccgcccagccccaggtctccccaggccctccgcaggctgcccggcctccctccccctgcagccatcccaaggctcctgacctacctggcccctgagctctggagcaagccctgacccaataaaggctttgaacccaaaaaaaaaaa

SEQ ID NO: 13898 - DNA, 3846 bp, Homo sapiens
gcgcctgcgcgggaggccgcgtcacgtgacccaccgcggccccgccccgcgacgagctcccgccggtcacgtgacccgcctctgcgcgcccccgggcacgaccccggagtctccgcgggcggccagggcgcgcgtgcgcggaggtgagccgggccggggctgcggggcttccctgagcgcgggccgggtcggtggggcggtcggctgcccgcgccggcctctcagttgggaaagctgaggttgtcgccggggccgcgggtggaggtcggggatgaggcagcaggtaggacagtgacctcggtgacgcgaaggaccccggccacctctaggttctcctcgtccgcccgttgttcagcgagggaggctctgggcctgccgcagctgacggggaaactgaggcacggagcgggcctgtaggagctgtccaggccatctccaaccatgggagtgaggcacccgccctgctcccaccggctcctggccgtctgcgccctcgtgtccttggcaaccgctgcactcctggggcacatcctactccatgatttcctgctggttccccgagagctgagtggctcctccccagtcctggaggagactcacccagctcaccagcagggagccagcagaccagggccccgggatgcccaggcacaccccggccgtcccagagcagtgcccacacagtgcgacgtcccccccaacagccgcttcgattgcgcccctgacaaggccatcacccaggaacagtgcgaggcccgcggctgctgctacatccctgcaaagcaggggctgcagggagcccagatggggcagccctggtgcttcttcccacccagctaccccagctacaagctggagaacctgagctcctctgaaatgggctacacggccaccctgacccgtaccacccccaccttcttccccaaggacatcctgaccctgcggctggacgtgatgatggagactgagaaccgcctccacttcacgatcaaagatccagctaacaggcgctacgaggtgcccttggagaccccgcgtgtccacagccgggcaccgtccccactctacagcgtggagttctccgaggagcccttcggggtgatcgtgcaccggcagctggacggccgcgtgctgctgaacacgacggtggcgcccctgttctttgcggaccagttccttcagctgtccacctcgctgccctcgcagtatatcacaggcctcgccgagcacctcagtcccctgatgctcagcaccagctggaccaggatcaccctgtggaaccgggaccttgcgcccacgcccggtgcgaacctctacgggtctcaccctttctacctggcgctggaggacggcgggtcggcacacggggtgttcctgctaaacagcaatgccatggatgtggtcctgcagccgagccctgcccttagctggaggtcgacaggtgggatcctggatgtctacatcttcctgggcccagagcccaagagcgtggtgcagcagtacctggacgttgtgggatacccgttcatgccgccatactggggcctgggcttccacctgtgccgctggggctactcctccaccgctatcacccgccaggtggtggagaacatgaccagggcccacttccccctggacgtccaatggaacgacctggactacatggactcccggagggacttcacgttcaacaaggatggcttccgggacttcccggccatggtgcaggagctgcaccagggcggccggcgctacatgatgatcgtggatcctgccatcagcagctcgggccctgccgggagctacaggccctacgacgagggtctgcggaggggggttttcatcaccaacgagaccggccagccgctgattgggaaggtatggcccgggtccactgccttccccgacttcaccaaccccacagccctggcctggtgggaggacatggtggctgagttccatgaccaggtgcccttcgacggcatgtggattgacatgaacgagccttccaacttcatcagaggctctgaggacggctgccccaacaatgagctggagaacccaccctacgtgcctggggtggttggggggaccctccaggcggccaccatctgtgcctccagccaccagtttctctccacacactacaacctgcacaacctctacggcctgaccgaagccatcgcctcccacagggcgctggtgaaggctcgggggacacgcccatttgtgatctcccgctcgacctttgctggccacggccgatacgccggccactggacgggggacgtgtggagctcctgggagcagctcgcctcctccgtgccagaaatcctgcagtttaacctgctgggggtgcctctggtcggggccgacgtctgcggcttcctgggcaacacctcagaggagctgtgtgtgcgctggacccagctgggggccttctaccccttcatgcggaaccacaacagcctgctcagtctgccccaggagccgtacagcttcagcgagccggcccagcaggccatgaggaaggccctcaccctgcgctacgcactcctcccccacctctacacactgttccaccaggcccacgtcgcgggggagaccgtggcccggcccctcttcctggagttccccaaggactctagcacctggactgtggaccaccagctcctgtggggggaggccctgctcatcaccccagtgctccaggccgggaaggccgaagtgactggctacttccccttgggcacatggtacgacctgcagacggtgccaatagaggcccttggcagcctcccacccccacctgcagctccccgtgagccagccatccacagcgaggggcagtgggtgacgctgccggcccccctggacaccatcaacgtccacctccgggctgggtacatcatccccctgcagggccctggcctcacaaccacagagtcccgccagcagcccatggccctggctgtggccctgaccaagggtggagaggcccgaggggagctgttctgggacgatggagagagcctggaagtgctggagcgaggggcctacacacaggtcatcttcctggccaggaataacacgatcgtgaatgagctggtacgtgtgaccagtgagggagctggcctgcagctgcagaaggtgactgtcctgggcgtggccacggcgccccagcaggtcctctccaacggtgtccctgtctccaacttcacctacagccccgacaccaaggtcctggacatctgtgtctcgctgttgatgggagagcagtttctcgtcagctggtgttagccgggcggagtgtgttagtctctccagagggaggctggttccccagggaagcagagcctgtgtgcgggcagcagctgtgtgcgggcctgggggttgcatgtgtcacctggagctgggcactaaccattccaagccgccgcatcgcttgtttccacctcctgggccggggctctggcccccaacgtgtctaggagagctttctccctagatcgcactgtgggccggggcctggagggctgctctgtgttaataagattgtaaggtttgccctcctcacctgttgccggcatgcgggtagtattagccacccccctccatctgttcccagcaccggagaagggggtgctcaggtggaggtgtggggtatgcacctgagctcctgcttcgcgcctgctgctctgccccaacgcgaccgcttcccggctgcccagagggctggatgcctgccggtccccgagcaagcctgggaactcaggaaaattcacaggacttgggagattctaaatcttaagtgcaattattttaataaaaggggcatttggaatc

SEQ ID NO: 13899 - DNA, 2024 bp, Homo sapiens
gtgcgcgcgcccggtccgcgcctccgccgctttttatagcggccgcgggcggcggcggcagcggttggaggttgtaggaccggcgaggaataggaatcatggcggctgcgctgttcgtgctgctgggattcgcgctgctgggcacccacggagcctccggggctgccggcttcgtccaggcgccgctgtcccagcagaggtgggtggggggcagtgtggagctgcactgcgaggccgtgggcagcccggtgcccgagatccagtggtggtttgaagggcagggtcccaacgacacctgctcccagctctgggacggcgcccggctggaccgcgtccacatccacgccacctaccaccagcacgcggccagcaccatctccatcgacacgctcgtggaggaggacacgggcacttacgagtgccgggccagcaacgacccggatcgcaaccacctgacccgggcgcccagggtcaagtgggtccgcgcccaggcagtcgtgctagtcctggaacccggcacagtcttcactaccgtagaagaccttggctccaagatactcctcacctgctccttgaatgacagcgccacagaggtcacagggcaccgctggctgaaggggggcgtggtgctgaaggaggacgcgctgcccggccagaaaacggagttcaaggtggactccgacgaccagtggggagagtactcctgcgtcttcctccccgagcccatgggcacggccaacatccagctccacgggcctcccagagtgaaggctgtgaagtcgtcagaacacatcaacgagggggagacggccatgctggtctgcaagtcagagtccgtgccacctgtcactgactgggcctggtacaagatcactgactctgaggacaaggccctcatgaacggctccgagagcaggttcttcgtgagttcctcgcagggccggtcagagctacacattgagaacctgaacatggaggccgaccccggccagtaccggtgcaacggcaccagctccaagggctccgaccaggccatcatcacgctccgcgtgcgcagccacctggccgccctctggcccttcctgggcatcgtggctgaggtgctggtgctggtcaccatcatcttcatctacgagaagcgccggaagcccgaggacgtcctggatgatgacgacgccggctctgcacccctgaagagcagcgggcagcaccagaatgacaaaggcaagaacgtccgccagaggaactcttcctgaggcaggtggcccgaggacgctccctgctccacgtctgcgccgccgccggagtccactcccagtgcttgcaagattccaagttctcacctcttaaagaaaacccaccccgtagattcccatcatacacttccttcttttttaaaaaagttgggttttctccattcaggattctgttccttaggtttttttccttctgaagtgtttcacgagagcccgggagctgctgccctgcggccccgtctgtggctttcagcctctgggtctgagtcatggccgggtgggcggcacagccttctccactggccggagtcagtgccaggtccttgccctttgtggaaagtcacaggtcacacgaggggccccgtgtcctgcctgtctgaagccaatgctgtctggttgcgccatttttgtgcttttatgtttaattttatgagggccacgggtctgtgttcgactcagcctcagggacgactctgacctcttggccacagaggactcacttgcccacaccgagggcgaccccgtcacagcctcaagtcactcccaagccccctccttgtctgtgcatccgggggcagctctggagggggtttgctggggaactggcgccatcgccgggactccagaaccgcagaagcctccccagctcacccctggaggacggccggctctctatagcaccagggctcacgtgggaacccccctcccacccaccgccacaataaagatcgcccccacctccaccctcaaaaaaaaaaaaaaaaaaaa

SEQ ID NO: 13900 - DNA, 1676 bp, Homo sapiens
gtgcgcgcgcccggtccgcgcctccgccgctttttatagcggccgcgggcggcggcggcagcggttggaggttgtaggaccggcgaggaataggaatcatggcggctgcgctgttcgtgctgctgggattcgcgctgctgggcacccacggagcctccggggctgccggcacagtcttcactaccgtagaagaccttggctccaagatactcctcacctgctccttgaatgacagcgccacagaggtcacagggcaccgctggctgaaggggggcgtggtgctgaaggaggacgcgctgcccggccagaaaacggagttcaaggtggactccgacgaccagtggggagagtactcctgcgtcttcctccccgagcccatgggcacggccaacatccagctccacgggcctcccagagtgaaggctgtgaagtcgtcagaacacatcaacgagggggagacggccatgctggtctgcaagtcagagtccgtgccacctgtcactgactgggcctggtacaagatcactgactctgaggacaaggccctcatgaacggctccgagagcaggttcttcgtgagttcctcgcagggccggtcagagctacacattgagaacctgaacatggaggccgaccccggccagtaccggtgcaacggcaccagctccaagggctccgaccaggccatcatcacgctccgcgtgcgcagccacctggccgccctctggcccttcctgggcatcgtggctgaggtgctggtgctggtcaccatcatcttcatctacgagaagcgccggaagcccgaggacgtcctggatgatgacgacgccggctctgcacccctgaagagcagcgggcagcaccagaatgacaaaggcaagaacgtccgccagaggaactcttcctgaggcaggtggcccgaggacgctccctgctccacgtctgcgccgccgccggagtccactcccagtgcttgcaagattccaagttctcacctcttaaagaaaacccaccccgtagattcccatcatacacttccttcttttttaaaaaagttgggttttctccattcaggattctgttccttaggtttttttccttctgaagtgtttcacgagagcccgggagctgctgccctgcggccccgtctgtggctttcagcctctgggtctgagtcatggccgggtgggcggcacagccttctccactggccggagtcagtgccaggtccttgccctttgtggaaagtcacaggtcacacgaggggccccgtgtcctgcctgtctgaagccaatgctgtctggttgcgccatttttgtgcttttatgtttaattttatgagggccacgggtctgtgttcgactcagcctcagggacgactctgacctcttggccacagaggactcacttgcccacaccgagggcgaccccgtcacagcctcaagtcactcccaagccccctccttgtctgtgcatccgggggcagctctggagggggtttgctggggaactggcgccatcgccgggactccagaaccgcagaagcctccccagctcacccctggaggacggccggctctctatagcaccagggctcacgtgggaacccccctcccacccaccgccacaataaagatcgcccccacctccaccctcaaaaaaaaaaaaaaaaaaaa

SEQ ID NO: 13901 - DNA, 4811 bp, Homo sapiens
ggtcctgccctgcgaaccagcgcggccccctggcgctgaggctgctccggccatggcccctcggccccgcgcccgcccaggggtcgctgtcgcctgctgctggctcctcactgttgttctacgctgctgcgtatcattcaatgttgatgtgaaaaattcaatgactttcagcggcccggtggaagacatgtttggatatactgttcaacaatatgaaaatgaagaaggaaaatgggtgcttattggttctccgttagttggccaacccaaaaacagaactggagatgtctataagtgtccagttgggagaggtgaatcattaccttgtgtaaagttggatctaccagttaatacatcaattcccaatgtcacagaagtaaaggagaacatgacatttggatcaactttagtcaccaacccaaatggaggatttctggcttgtgggcccttatatgcctatagatgtggacatttgcattacacaactggaatctgttctgacgtcagccccacatttcaagtcgtgaattccattgcccctgtacaagaatgcagcactcaactggacatagtcatagtgctggatggttccaacagtatttacccatgggacagtgttacagcttttttaaatgaccttcttgaaagaatggatattggtcctaaacagacacaggttggaattgtacagtatggagaaaacgtgacccatgagttcaacctcaataagtattcttccaccgaagaggtacttgttgcagcaaagaaaatagtccagagaggtggccgccagactatgacagctcttggaatagacacagcaagaaaggaggcattcacggaagcccggggtgcccgaagaggagttaaaaaagtcatggttattgtgacagatggagagtctcatgacaatcatcgactgaagaaggtcatccaagactgtgaagatgaaaacattcaacggttttccatagctattcttggcagctataaccgaggaaatttaagcactgaaaaatttgtggaggaaataaaatcaattgcaagtgaacccactgaaaagcatttcttcaatgtctctgatgaattggctctagtcaccattgttaaaactctgggagaaagaatatttgccctggaagccacagctgaccagtcagcagcttcatttgaaatggaaatgtctcagactggcttcagtgctcattattcacaggactgggtcatgcttggagcagtaggagcctatgattggaatggaacagttgtcatgcagaaggctagtcaaatcataatccctcgaaacacaacctttaatgttgagtctaccaaaaagaatgaaccgcttgcttcttatttaggttacactgtaaactctgctactgcttcttctggagatgtgctctatattgctggacagcctcggtacaatcatacaggccaggtcattatctacaggatggaagatggaaacatcaaaattctccagacgctcagtggagaacagattggttcctactttggcagtattttaacaacaactgacattgacaaggattctaatactgacattcttctagtcggagcccctatgtacatgggaacagagaaggaggagcaaggaaaagtgtatgtgtatgctctcaatcagacaaggtttgaatatcaaatgagcctggaacctattaagcagacgtgctgttcatctcggcagcacaattcatgcacaacagaaaacaaaaatgagccatgcggggctcgttttggaactgcaattgctgctgtaaaagacctcaatcttgatggatttaatgacatcgtgataggagctccgctggaagatgatcacgggggagctgtgtacatttatcatggaagtggcaagactataaggaaagagtatgcacaacgtattccatcaggtggggatggtaagacactgaaattttttggccagtctatccacggagaaatggatttaaatggtgacggtctgacagatgtgactattgggggccttggtggtgctgccctcttctggtcccgagatgtggccgtagttaaagtgaccatgaattttgagccaaataaagtgaatattcaaaagaaaaactgccatatggagggaaaggaaacagtatgcataaatgctacagtgtgttttgatgtgaaattaaagtctaaagaagacacgatttatgaagctgatttgcagtaccgtgtcaccctagattcactaagacaaatatcacgaagttttttctctggaactcaagagagaaaggttcaaaggaacatcacagttcgaaaatcagaatgcactaagcactccttctacatgttggacaagcatgactttcaggactctgtgagaataacgttggactttaatcttaccgatccagaaaatgggcctgttcttgatgattctctaccaaactcagtacatgaatatattccctttgccaaagattgtggaaataaggaaaaatgtatctcagacctcagcctgcatgtcgccaccactgaaaaggacctgctgattgtccgatcccagaatgataagttcaacgttagcctcacagtcaaaaatacaaaggacagtgcctataacaccaggacaatagtgcattattctccaaatctagttttttcaggaattgaggctatccaaaaagacagttgtgaatctaatcataatatcacatgtaaagttggatatcccttcctgagaagaggagagatggtaactttcaaaatattgtttcagtttaacacatcctatctcatggaaaatgtgaccatttatttaagtgcaacaagtgacagcgaagaacctcctgaaaccctttctgataatgtagtaaacatttctatcccggtaaaatatgaagttggactacagttttacagctctgcaagtgaataccacatttcaattgctgccaatgagacagtccctgaagttattaattctactgaggacattggaaatgaaattaatatcttctacttgattagaaaaagtggatcttttccaatgccagagcttaagctgtcaatttcattccccaatatgacatcaaatggttaccctgtgctgtacccaactggattgtcatcttctgagaatgcaaactgcagaccccatatctttgaggatcctttcagtatcaactctggaaagaaaatgactacatcaactgaccatctcaaacgaggcacaattctggactgcaatacatgtaaatttgctaccatcacatgtaatctcacttcttctgacatcagccaagtcaatgtttcgcttatcttgtggaaaccaacttttataaaatcatatttttccagcttaaatcttactataaggggagaacttcggagtgaaaatgcatctctggttttaagtagcagcaatcaaaaaagagagcttgctattcaaatatccaaagatgggctaccgggcagagtgccattatgggtcatcctgctgagtgcttttgccggattgttgctgttaatgctgctcattttagcactgtggaagattggattcttcaaaagaccactgaaaaagaaaatggagaaatgaaatattttatgaaagaaaataataacaattattcaataatctatcctcaggtttgcctcaaatatgtgacaagaaatgtataattcatgacatagtcatgtaactatgtaatccatcagggattcattacttggaaaatgacaggtcatgcattatccaaaaacaataccaaaaagacatattttataaaatgacaaaaaatattttacataattactcatttttgttgagtaagcaaaattacaaagtgtttttaaaaaaacctgtacaaatatgtttatgtattaaatcaccatccaaaatatttaaggaatatataaaaagatttttatgatcatagaaacatctattttcaaaacaatataaattaagcttttccccttgattcctgttggatatccatgttcagcatgacagtcagcactcgtaaatgccaagaaaagaattacctgaaaaagatcatttctccctattcaaatgagaatattttcccttggtagaatccatatacaatatggattgaaaattaagtcaccaagaatacatttagcatctttgtgttgggttctatacctaaaaattttccctccctgcccaaggtgattggaaagtactgcaattgagctaaaattttatctaggatggaaaatcaggatagactcgtttaaaaacaagtatattaaatgggttaaattaagcttttacagaacatgcttaattttgatattgagctctaaatgcaaaactcttttatactgaaaaaacacttaaagtagttttgtgtggcatcacagtgatttgtcatgaaaagccatatatgggggacatgctaaaatggcttctgaatgaaatacgacagcagagaaagatgccactgaaatgctgaaattatctttgctgagcagcttttgaatgctaagggttccagtatgtgacccaaagaaagagttgtctcaactccttggtacagggttcattcaaacccccaagctgtgagagtgtgtttatttttaattttttaaaaggtatttaatttccaaccacacttcttatttttttgaaaagacaattttccatttcagtattacattttaccaagaagtcactgctttttaggtgtgttgcatcaatatttaaataaaatcccagaaatgtattttaaagaatttcaggtttgaaaactcaaaccaacaggaagatatcaaaaaaaaaaaaaaaa

SEQ ID NO: 13902 - DNA, 912 bp, Homo sapiens
acagacctgccccgccatgacccggctgacagtcctggccctgctggctggtctgctggcgtcctcgagggccggctccagcccccttttggacatcgttggcggccggaaggcgaggccccgccagttcccgttcctggcctccattcagaatcaaggcaggcacttctgcgggggtgccctgatccatgcccgcttcgtgatgaccgcggccagctgcttccaaagccagaaccccggggttagcaccgtggtgctgggtgcctatgacctgaggcggcgggagaggcagtcccgccagacgttttccatcagcagcatgagcgagaatggctacgacccccagcagaacctgaacgacctgatgctgcttcagctggaccgtgaggccaacctcaccagcagcgtgacgatactgccactgcctctgcagaacgccacggtggaagccggcaccagatgccaggtggccggctgggggagccagcgcagtggggggcgtctctcccgttttcccaggtttgtcaacgtgactgtgacccccgaggaccagtgtcgccccaacaacgtgtgcaccggtgtgctcacccgccgcggtggcatctgcaatggggacgggggcacccccctcgtctgcgagggcctggcccacggcgtggcctccttttccctggggccctgtggccgaggccctgacttcttcacccgagtggcgctcttccgagactggatcgatggtgttctcaacaacccgggaccggggccagcctaggggggcctgtgacctcccatggagcccagccccgccctccacacctccggcgctccgcacccacctcccacggccccgcccctgcccccgctccggccagaggggccctggctgtaataaagaagccgatctctcctctg

SEQ ID NO: 13903 - DNA, 2646 bp, Homo sapiens
ttctgcccgggcgctcgcagccgagcgcggccggggaagggctctcctcccagcgccgagcactgggccctggcagacgccccaagattgttgtgaggagtctagccagttggtgagcgctgtaatctgaaccagctgtgtccagactgaggccccatttgcattgtttaacatacttagaaaatgaagtgttcatttttaacattcctcctccaattggtttaatgctgaattactgaagagggctaagcaaaaccaggtgcttgcgctgagggctctgcagtggctgggaggaccccggcgctctccccgtgtcctctccacgactcgctcggcccctctggaataaaacacccgcgagccccgagggcccagaggaggccgacgtgcccgagctcctccgggggtcccgcccgcgagctttcttctcgccttcgcatctcctcctcgcgcgtcttggacatgccaggaataaaaaggatactcactgttaccattctggctctctgtcttccaagccctgggaatgcacaggcacagtgcacgaatggctttgacctggatcgccagtcaggacagtgtttagatattgatgaatgccgaaccatccccgaggcctgccgaggagacatgatgtgtgttaaccaaaatggcgggtatttatgcattccccggacaaaccctgtgtatcgagggccctactcgaacccctactcgaccccctactcaggtccgtacccagcagctgccccaccactctcagctccaaactatcccacgatctccaggcctcttatatgccgctttggataccagatggatgaaagcaaccaatgtgtggatgtggacgagtgtgcaacagattcccaccagtgcaaccccacccagatctgcatcaatactgaaggcgggtacacctgctcctgcaccgacggatattggcttctggaaggccagtgcttagacattgatgaatgtcgctatggttactgccagcagctctgtgcgaatgttcctggatcctattcttgtacatgcaaccctggttttaccctcaatgaggatggaaggtcttgccaagatgtgaacgagtgtgccaccgagaacccctgcgtgcaaacctgcgtcaacacctacggctctttcatctgccgctgtgacccaggatatgaacttgaggaagatggcgttcattgcagtgatatggacgagtgcagcttctctgagttcctctgccaacatgagtgtgtgaaccagcccggcacatacttctgctcctgccctccaggctacatcctgctggatgacaaccgaagctgccaagacatcaacgaatgtgagcacaggaaccacacgtgcaacctgcagcagacgtgctacaatttacaagggggcttcaaatgcatcgaccccatccgctgtgaggagccttatctgaggatcagtgataaccgctgtatgtgtcctgctgagaaccctggctgcagagaccagccctttaccatcttgtaccgggacatggacgtggtgtcaggacgctccgttcccgctgacatcttccaaatgcaagccacgacccgctaccctggggcctattacattttccagatcaaatctgggaatgagggcagagaattttacatgcggcaaacgggccccatcagtgccaccctggtgatgacacgccccatcaaagggccccgggaaatccagctggacttggaaatgatcactgtcaacactgtcatcaacttcagaggcagctccgtgatccgactgcggatatatgtgtcgcagtacccattctgagcctcgggctggagcctccgacgctgcctctcattggcaccaagggacaggagaagagaggaaataacagagagaatgagagcgacacagacgttaggcatttcctgctgaacgtttccccgaagagtcagccccgacttcctgactctcacctgtactattgcagacctgtcaccctgcaggacttgccacccccagttcctatgacacagttatcaaaaagtattatcattgctcccctgatagaagattgttggtgaattttcaaggccttcagtttatttccactattttcaaagaaaatagattaggtttgcgggggtctgagtctatgttcaaagactgtgaacagcttgctgtcacttcttcacctcttccactccttctctcactgtgttactgctttgcaaagacccgggagctggcggggaaccctgggagtagctagtttgctttttgcgtacacagagaaggctatgtaaacaaaccacagcaggatcgaagggtttttagagaatgtgtttcaaaaccatgcctggtattttcaaccataaaagaagtttcagttgtccttaaatttgtataacggtttaattctgtcttgttcattttgagtatttttaaaaaatatgtcgtagaattccttcgaaaggccttcagacacatgctatgttctgtcttcccaaacccagtctcctctccattttagcccagtgttttctttgaggaccccttaatcttgctttctttagaatttttacccaattggattggaatgcagaggtctccaaactgattaaatatttgaagagaaaaaaaaaaaaaaaaaaaaaaaaa

SEQ ID NO: 13904 - DNA, 3281 bp, Homo sapiens
gctcgggccacgcccacctgtcctgcagcactggatgctttgtgagttggggattgttgcgtcccatatctggacccagaagggacttccctgctcggctggctctcggtttctctgctttcctccggagaaataacagcgtcttccgcgccgcgcatggagcctcccggccgccgcgagtgtccctttccttcctggcgctttcctgggttgcttctggcggccatggtgttgctgctgtactccttctccgatgcctgtgaggagccaccaacatttgaagctatggagctcattggtaaaccaaaaccctactatgagattggtgaacgagtagattataagtgtaaaaaaggatacttctatatacctcctcttgccacccatactatttgtgatcggaatcatacatggctacctgtctcagatgacgcctgttatagagaaacatgtccatatatacgggatcctttaaatggccaagcagtccctgcaaatgggacttacgagtttggttatcagatgcactttatttgtaatgagggttattacttaattggtgaagaaattctatattgtgaacttaaaggatcagtagcaatttggagcggtaagcccccaatatgtgaaaaggttttgtgtacaccacctccaaaaataaaaaatggaaaacacacctttagtgaagtagaagtatttgagtatcttgatgcagtaacttatagttgtgatcctgcacctggaccagatccattttcacttattggagagagcacgatttattgtggtgacaattcagtgtggagtcgtgctgctccagagtgtaaagtggtcaaatgtcgatttccagtagtcgaaaatggaaaacagatatcaggatttggaaaaaaattttactacaaagcaacagttatgtttgaatgcgataagggtttttacctcgatggcagcgacacaattgtctgtgacagtaacagtacttgggatcccccagttccaaagtgtcttaaaggtcctaggcctacttacaagcctccagtctcaaattatccaggatatcctaaacctgaggaaggaatacttgacagtttggatgtttgggtcattgctgtgattgttattgccatagttgttggagttgcagtaatttgtgttgtcccgtacagatatcttcaaaggaggaagaagaaaggcacatacctaactgatgagacccacagagaagtaaaatttacttctctctgagaaggagagatgagagaaaggtttgcttttatcattaaaaggaaagcagatggtggagctgaatatgccacttaccagactaaatcaaccactccagcagagcagagaggctgaatagattccacaacctggtttgccagttcatcttttgactctattaaaatcttcaatagttgttattctgtagtttcactctcatgagtgcaactgtggcttagctaatattgcaatgtggcttgaatgtaggtagcatcctttgatgcttctttgaaacttgtatgaatttgggtatgaacagattgcctgctttcccttaaataacacttagatttattggaccagtcagcacagcatgcctggttgtattaaagcagggatatgctgtattttataaaattggcaaaattagagaaatatagttcacaatgaaattatattttctttgtaaagaaagtggcttgaaatcttttttgttcaaagattaatgccaactcttaagattattctttcaccaactatagaatgtattttatatatcgttcattgtaaaaagcccttaaaaatatgtgtatactactttggctcttgtgcataaaaacaagaacactgaaaattgggaatatgcacaaacttggcttctttaaccaagaatattattggaaaattctctaaaagttaatagggtaaattctctattttttgtaatgtgttcggtgatttcagaaagctagaaagtgtatgtgtggcatttgttttcactttttaaaacatccctaactgatcgaatatatcagtaatttcagaatcagatgcatcctttcataagaagtgagaggactctgacagccataacaggagtgccacttcatggtgcgaagtgaacactgtagtcttgttgttttcccaaagagaactccgtatgttctcttaggttgagtaacccactctgaattctggttacatgtgtttttctctccctccttaaataaagagaggggttaaacatgccctctaaaagtaggtggttttgaagagaataaattcatcagataacctcaagtcacatgagaatcttagtccatttacattgccttggctagtaaaagccatctatgtatatgtcttacctcatctcctaaaaggcagagtacaaagtaagccatgtatctcaggaaggtaacttcattttgtctatttgctgttgattgtaccaagggatggaagaagtaaatatagctcaggtagcactttatactcaggcagatctcagccctctactgagtcccttagccaagcagtttctttcaaagaagccagcaggcgaaaagcagggactgccactgcatttcatatcacactgttaaaagttgtgttttgaaattttatgtttagttgcacaaattgggccaaagaaacattgccttgaggaagatatgattggaaaatcaagagtgtagaagaataaatactgttttactgtccaaagacatgtttatagtgctctgtaaatgttcctttcctttgtagtctctggcaagatgctttaggaagataaaagtttgaggagaacaaacaggaattctgaattaagcacagagttgaagtttatacccgtttcacatgcttttcaagaatgtcgcaattactaagaagcagataatggtgttttttagaaacctaattgaagtatattcaaccaaatactttaatgtataaaataaatattatacaatatacttgtatagcagtttctgcttcacatttgattttttcaaatttaatatttatattagagatctatatatgtataaatatgtattttgtcaaatttgttacttaaatatatagagaccagttttctctggaagtttgtttaaatgacagaagcgtatatgaattcaagaaaatttaagctgcaaaaatgtatttgctataaaatgagaagtctcactgatagaggttctttattgctcattttttaaaaaatggactcttgaaatctgttaaaataaaattgtacatttggagatgtttca

SEQ ID NO: 13905 - DNA, 3371 bp, Homo sapiens
gctcgggccacgcccacctgtcctgcagcactggatgctttgtgagttggggattgttgcgtcccatatctggacccagaagggacttccctgctcggctggctctcggtttctctgctttcctccggagaaataacagcgtcttccgcgccgcgcatggagcctcccggccgccgcgagtgtccctttccttcctggcgctttcctgggttgcttctggcggccatggtgttgctgctgtactccttctccgatgcctgtgaggagccaccaacatttgaagctatggagctcattggtaaaccaaaaccctactatgagattggtgaacgagtagattataagtgtaaaaaaggatacttctatatacctcctcttgccacccatactatttgtgatcggaatcatacatggctacctgtctcagatgacgcctgttatagagaaacatgtccatatatacgggatcctttaaatggccaagcagtccctgcaaatgggacttacgagtttggttatcagatgcactttatttgtaatgagggttattacttaattggtgaagaaattctatattgtgaacttaaaggatcagtagcaatttggagcggtaagcccccaatatgtgaaaaggttttgtgtacaccacctccaaaaataaaaaatggaaaacacacctttagtgaagtagaagtatttgagtatcttgatgcagtaacttatagttgtgatcctgcacctggaccagatccattttcacttattggagagagcacgatttattgtggtgacaattcagtgtggagtcgtgctgctccagagtgtaaagtggtcaaatgtcgatttccagtagtcgaaaatggaaaacagatatcaggatttggaaaaaaattttactacaaagcaacagttatgtttgaatgcgataagggtttttacctcgatggcagcgacacaattgtctgtgacagtaacagtacttgggatcccccagttccaaagtgtcttaaagtgctgcctccatctagtacaaaacctccagctttgagtcattcagtgtcgacttcttccactacaaaatctccagcgtccagtgcctcaggtcctaggcctacttacaagcctccagtctcaaattatccaggatatcctaaacctgaggaaggaatacttgacagtttggatgtttgggtcattgctgtgattgttattgccatagttgttggagttgcagtaatttgtgttgtcccgtacagatatcttcaaaggaggaagaagaaaggcacatacctaactgatgagacccacagagaagtaaaatttacttctctctgagaaggagagatgagagaaaggtttgcttttatcattaaaaggaaagcagatggtggagctgaatatgccacttaccagactaaatcaaccactccagcagagcagagaggctgaatagattccacaacctggtttgccagttcatcttttgactctattaaaatcttcaatagttgttattctgtagtttcactctcatgagtgcaactgtggcttagctaatattgcaatgtggcttgaatgtaggtagcatcctttgatgcttctttgaaacttgtatgaatttgggtatgaacagattgcctgctttcccttaaataacacttagatttattggaccagtcagcacagcatgcctggttgtattaaagcagggatatgctgtattttataaaattggcaaaattagagaaatatagttcacaatgaaattatattttctttgtaaagaaagtggcttgaaatcttttttgttcaaagattaatgccaactcttaagattattctttcaccaactatagaatgtattttatatatcgttcattgtaaaaagcccttaaaaatatgtgtatactactttggctcttgtgcataaaaacaagaacactgaaaattgggaatatgcacaaacttggcttctttaaccaagaatattattggaaaattctctaaaagttaatagggtaaattctctattttttgtaatgtgttcggtgatttcagaaagctagaaagtgtatgtgtggcatttgttttcactttttaaaacatccctaactgatcgaatatatcagtaatttcagaatcagatgcatcctttcataagaagtgagaggactctgacagccataacaggagtgccacttcatggtgcgaagtgaacactgtagtcttgttgttttcccaaagagaactccgtatgttctcttaggttgagtaacccactctgaattctggttacatgtgtttttctctccctccttaaataaagagaggggttaaacatgccctctaaaagtaggtggttttgaagagaataaattcatcagataacctcaagtcacatgagaatcttagtccatttacattgccttggctagtaaaagccatctatgtatatgtcttacctcatctcctaaaaggcagagtacaaagtaagccatgtatctcaggaaggtaacttcattttgtctatttgctgttgattgtaccaagggatggaagaagtaaatatagctcaggtagcactttatactcaggcagatctcagccctctactgagtcccttagccaagcagtttctttcaaagaagccagcaggcgaaaagcagggactgccactgcatttcatatcacactgttaaaagttgtgttttgaaattttatgtttagttgcacaaattgggccaaagaaacattgccttgaggaagatatgattggaaaatcaagagtgtagaagaataaatactgttttactgtccaaagacatgtttatagtgctctgtaaatgttcctttcctttgtagtctctggcaagatgctttaggaagataaaagtttgaggagaacaaacaggaattctgaattaagcacagagttgaagtttatacccgtttcacatgcttttcaagaatgtcgcaattactaagaagcagataatggtgttttttagaaacctaattgaagtatattcaaccaaatactttaatgtataaaataaatattatacaatatacttgtatagcagtttctgcttcacatttgattttttcaaatttaatatttatattagagatctatatatgtataaatatgtattttgtcaaatttgttacttaaatatatagagaccagttttctctggaagtttgtttaaatgacagaagcgtatatgaattcaagaaaatttaagctgcaaaaatgtatttgctataaaatgagaagtctcactgatagaggttctttattgctcattttttaaaaaatggactcttgaaatctgttaaaataaaattgtacatttggagatgtttca

SEQ ID NO: 13906 - DNA, 3326 bp, Homo sapiens
gctcgggccacgcccacctgtcctgcagcactggatgctttgtgagttggggattgttgcgtcccatatctggacccagaagggacttccctgctcggctggctctcggtttctctgctttcctccggagaaataacagcgtcttccgcgccgcgcatggagcctcccggccgccgcgagtgtccctttccttcctggcgctttcctgggttgcttctggcggccatggtgttgctgctgtactccttctccgatgcctgtgaggagccaccaacatttgaagctatggagctcattggtaaaccaaaaccctactatgagattggtgaacgagtagattataagtgtaaaaaaggatacttctatatacctcctcttgccacccatactatttgtgatcggaatcatacatggctacctgtctcagatgacgcctgttatagagaaacatgtccatatatacgggatcctttaaatggccaagcagtccctgcaaatgggacttacgagtttggttatcagatgcactttatttgtaatgagggttattacttaattggtgaagaaattctatattgtgaacttaaaggatcagtagcaatttggagcggtaagcccccaatatgtgaaaaggttttgtgtacaccacctccaaaaataaaaaatggaaaacacacctttagtgaagtagaagtatttgagtatcttgatgcagtaacttatagttgtgatcctgcacctggaccagatccattttcacttattggagagagcacgatttattgtggtgacaattcagtgtggagtcgtgctgctccagagtgtaaagtggtcaaatgtcgatttccagtagtcgaaaatggaaaacagatatcaggatttggaaaaaaattttactacaaagcaacagttatgtttgaatgcgataagggtttttacctcgatggcagcgacacaattgtctgtgacagtaacagtacttgggatcccccagttccaaagtgtcttaaagtgtcgacttcttccactacaaaatctccagcgtccagtgcctcaggtcctaggcctacttacaagcctccagtctcaaattatccaggatatcctaaacctgaggaaggaatacttgacagtttggatgtttgggtcattgctgtgattgttattgccatagttgttggagttgcagtaatttgtgttgtcccgtacagatatcttcaaaggaggaagaagaaaggcacatacctaactgatgagacccacagagaagtaaaatttacttctctctgagaaggagagatgagagaaaggtttgcttttatcattaaaaggaaagcagatggtggagctgaatatgccacttaccagactaaatcaaccactccagcagagcagagaggctgaatagattccacaacctggtttgccagttcatcttttgactctattaaaatcttcaatagttgttattctgtagtttcactctcatgagtgcaactgtggcttagctaatattgcaatgtggcttgaatgtaggtagcatcctttgatgcttctttgaaacttgtatgaatttgggtatgaacagattgcctgctttcccttaaataacacttagatttattggaccagtcagcacagcatgcctggttgtattaaagcagggatatgctgtattttataaaattggcaaaattagagaaatatagttcacaatgaaattatattttctttgtaaagaaagtggcttgaaatcttttttgttcaaagattaatgccaactcttaagattattctttcaccaactatagaatgtattttatatatcgttcattgtaaaaagcccttaaaaatatgtgtatactactttggctcttgtgcataaaaacaagaacactgaaaattgggaatatgcacaaacttggcttctttaaccaagaatattattggaaaattctctaaaagttaatagggtaaattctctattttttgtaatgtgttcggtgatttcagaaagctagaaagtgtatgtgtggcatttgttttcactttttaaaacatccctaactgatcgaatatatcagtaatttcagaatcagatgcatcctttcataagaagtgagaggactctgacagccataacaggagtgccacttcatggtgcgaagtgaacactgtagtcttgttgttttcccaaagagaactccgtatgttctcttaggttgagtaacccactctgaattctggttacatgtgtttttctctccctccttaaataaagagaggggttaaacatgccctctaaaagtaggtggttttgaagagaataaattcatcagataacctcaagtcacatgagaatcttagtccatttacattgccttggctagtaaaagccatctatgtatatgtcttacctcatctcctaaaaggcagagtacaaagtaagccatgtatctcaggaaggtaacttcattttgtctatttgctgttgattgtaccaagggatggaagaagtaaatatagctcaggtagcactttatactcaggcagatctcagccctctactgagtcccttagccaagcagtttctttcaaagaagccagcaggcgaaaagcagggactgccactgcatttcatatcacactgttaaaagttgtgttttgaaattttatgtttagttgcacaaattgggccaaagaaacattgccttgaggaagatatgattggaaaatcaagagtgtagaagaataaatactgttttactgtccaaagacatgtttatagtgctctgtaaatgttcctttcctttgtagtctctggcaagatgctttaggaagataaaagtttgaggagaacaaacaggaattctgaattaagcacagagttgaagtttatacccgtttcacatgcttttcaagaatgtcgcaattactaagaagcagataatggtgttttttagaaacctaattgaagtatattcaaccaaatactttaatgtataaaataaatattatacaatatacttgtatagcagtttctgcttcacatttgattttttcaaatttaatatttatattagagatctatatatgtataaatatgtattttgtcaaatttgttacttaaatatatagagaccagttttctctggaagtttgtttaaatgacagaagcgtatatgaattcaagaaaatttaagctgcaaaaatgtatttgctataaaatgagaagtctcactgatagaggttctttattgctcattttttaaaaaatggactcttgaaatctgttaaaataaaattgtacatttggagatgtttca

SEQ ID NO: 13907 - DNA, 3191 bp, Homo sapiens
gctcgggccacgcccacctgtcctgcagcactggatgctttgtgagttggggattgttgcgtcccatatctggacccagaagggacttccctgctcggctggctctcggtttctctgctttcctccggagaaataacagcgtcttccgcgccgcgcatggagcctcccggccgccgcgagtgtccctttccttcctggcgctttcctgggttgcttctggcggccatggtgttgctgctgtactccttctccgatgcctgtgaggagccaccaacatttgaagctatggagctcattggtaaaccaaaaccctactatgagattggtgaacgagtagattataagtgtaaaaaaggatacttctatatacctcctcttgccacccatactatttgtgatcggaatcatacatggctacctgtctcagatgacgcctgttatagagaaacatgtccatatatacgggatcctttaaatggccaagcagtccctgcaaatgggacttacgagtttggttatcagatgcactttatttgtaatgagggttattacttaattggtgaagaaattctatattgtgaacttaaaggatcagtagcaatttggagcggtaagcccccaatatgtgaaaaggttttgtgtacaccacctccaaaaataaaaaatggaaaacacacctttagtgaagtagaagtatttgagtatcttgatgcagtaacttatagttgtgatcctgcacctggaccagatccattttcacttattggagagagcacgatttattgtggtgacaattcagtgtggagtcgtgctgctccagagtgtaaagtggtcaaatgtcgatttccagtagtcgaaaatggaaaacagatatcaggatttggaaaaaaattttactacaaagcaacagttatgtttgaatgcgataagggtttttacctcgatggcagcgacacaattgtctgtgacagtaacagtacttgggatcccccagttccaaagtgtcttaaagtgtcgacttcttccactacaaaatctccagcgtccagtgcctcaggatatcctaaacctgaggaaggaatacttgacagtttggatgtttgggtcattgctgtgattgttattgccatagttgttggagttgcagtaatttgtgttgtcccgtacagatatcttcaaaggaggaagaagaaagggaaagcagatggtggagctgaatatgccacttaccagactaaatcaaccactccagcagagcagagaggctgaatagattccacaacctggtttgccagttcatcttttgactctattaaaatcttcaatagttgttattctgtagtttcactctcatgagtgcaactgtggcttagctaatattgcaatgtggcttgaatgtaggtagcatcctttgatgcttctttgaaacttgtatgaatttgggtatgaacagattgcctgctttcccttaaataacacttagatttattggaccagtcagcacagcatgcctggttgtattaaagcagggatatgctgtattttataaaattggcaaaattagagaaatatagttcacaatgaaattatattttctttgtaaagaaagtggcttgaaatcttttttgttcaaagattaatgccaactcttaagattattctttcaccaactatagaatgtattttatatatcgttcattgtaaaaagcccttaaaaatatgtgtatactactttggctcttgtgcataaaaacaagaacactgaaaattgggaatatgcacaaacttggcttctttaaccaagaatattattggaaaattctctaaaagttaatagggtaaattctctattttttgtaatgtgttcggtgatttcagaaagctagaaagtgtatgtgtggcatttgttttcactttttaaaacatccctaactgatcgaatatatcagtaatttcagaatcagatgcatcctttcataagaagtgagaggactctgacagccataacaggagtgccacttcatggtgcgaagtgaacactgtagtcttgttgttttcccaaagagaactccgtatgttctcttaggttgagtaacccactctgaattctggttacatgtgtttttctctccctccttaaataaagagaggggttaaacatgccctctaaaagtaggtggttttgaagagaataaattcatcagataacctcaagtcacatgagaatcttagtccatttacattgccttggctagtaaaagccatctatgtatatgtcttacctcatctcctaaaaggcagagtacaaagtaagccatgtatctcaggaaggtaacttcattttgtctatttgctgttgattgtaccaagggatggaagaagtaaatatagctcaggtagcactttatactcaggcagatctcagccctctactgagtcccttagccaagcagtttctttcaaagaagccagcaggcgaaaagcagggactgccactgcatttcatatcacactgttaaaagttgtgttttgaaattttatgtttagttgcacaaattgggccaaagaaacattgccttgaggaagatatgattggaaaatcaagagtgtagaagaataaatactgttttactgtccaaagacatgtttatagtgctctgtaaatgttcctttcctttgtagtctctggcaagatgctttaggaagataaaagtttgaggagaacaaacaggaattctgaattaagcacagagttgaagtttatacccgtttcacatgcttttcaagaatgtcgcaattactaagaagcagataatggtgttttttagaaacctaattgaagtatattcaaccaaatactttaatgtataaaataaatattatacaatatacttgtatagcagtttctgcttcacatttgattttttcaaatttaatatttatattagagatctatatatgtataaatatgtattttgtcaaatttgttacttaaatatatagagaccagttttctctggaagtttgtttaaatgacagaagcgtatatgaattcaagaaaatttaagctgcaaaaatgtatttgctataaaatgagaagtctcactgatagaggttctttattgctcattttttaaaaaatggactcttgaaatctgttaaaataaaattgtacatttggagatgtttca

SEQ ID NO: 13908 - DNA, 3146 bp, Homo sapiens
gctcgggccacgcccacctgtcctgcagcactggatgctttgtgagttggggattgttgcgtcccatatctggacccagaagggacttccctgctcggctggctctcggtttctctgctttcctccggagaaataacagcgtcttccgcgccgcgcatggagcctcccggccgccgcgagtgtccctttccttcctggcgctttcctgggttgcttctggcggccatggtgttgctgctgtactccttctccgatgcctgtgaggagccaccaacatttgaagctatggagctcattggtaaaccaaaaccctactatgagattggtgaacgagtagattataagtgtaaaaaaggatacttctatatacctcctcttgccacccatactatttgtgatcggaatcatacatggctacctgtctcagatgacgcctgttatagagaaacatgtccatatatacgggatcctttaaatggccaagcagtccctgcaaatgggacttacgagtttggttatcagatgcactttatttgtaatgagggttattacttaattggtgaagaaattctatattgtgaacttaaaggatcagtagcaatttggagcggtaagcccccaatatgtgaaaaggttttgtgtacaccacctccaaaaataaaaaatggaaaacacacctttagtgaagtagaagtatttgagtatcttgatgcagtaacttatagttgtgatcctgcacctggaccagatccattttcacttattggagagagcacgatttattgtggtgacaattcagtgtggagtcgtgctgctccagagtgtaaagtggtcaaatgtcgatttccagtagtcgaaaatggaaaacagatatcaggatttggaaaaaaattttactacaaagcaacagttatgtttgaatgcgataagggtttttacctcgatggcagcgacacaattgtctgtgacagtaacagtacttgggatcccccagttccaaagtgtcttaaaggatatcctaaacctgaggaaggaatacttgacagtttggatgtttgggtcattgctgtgattgttattgccatagttgttggagttgcagtaatttgtgttgtcccgtacagatatcttcaaaggaggaagaagaaagggaaagcagatggtggagctgaatatgccacttaccagactaaatcaaccactccagcagagcagagaggctgaatagattccacaacctggtttgccagttcatcttttgactctattaaaatcttcaatagttgttattctgtagtttcactctcatgagtgcaactgtggcttagctaatattgcaatgtggcttgaatgtaggtagcatcctttgatgcttctttgaaacttgtatgaatttgggtatgaacagattgcctgctttcccttaaataacacttagatttattggaccagtcagcacagcatgcctggttgtattaaagcagggatatgctgtattttataaaattggcaaaattagagaaatatagttcacaatgaaattatattttctttgtaaagaaagtggcttgaaatcttttttgttcaaagattaatgccaactcttaagattattctttcaccaactatagaatgtattttatatatcgttcattgtaaaaagcccttaaaaatatgtgtatactactttggctcttgtgcataaaaacaagaacactgaaaattgggaatatgcacaaacttggcttctttaaccaagaatattattggaaaattctctaaaagttaatagggtaaattctctattttttgtaatgtgttcggtgatttcagaaagctagaaagtgtatgtgtggcatttgttttcactttttaaaacatccctaactgatcgaatatatcagtaatttcagaatcagatgcatcctttcataagaagtgagaggactctgacagccataacaggagtgccacttcatggtgcgaagtgaacactgtagtcttgttgttttcccaaagagaactccgtatgttctcttaggttgagtaacccactctgaattctggttacatgtgtttttctctccctccttaaataaagagaggggttaaacatgccctctaaaagtaggtggttttgaagagaataaattcatcagataacctcaagtcacatgagaatcttagtccatttacattgccttggctagtaaaagccatctatgtatatgtcttacctcatctcctaaaaggcagagtacaaagtaagccatgtatctcaggaaggtaacttcattttgtctatttgctgttgattgtaccaagggatggaagaagtaaatatagctcaggtagcactttatactcaggcagatctcagccctctactgagtcccttagccaagcagtttctttcaaagaagccagcaggcgaaaagcagggactgccactgcatttcatatcacactgttaaaagttgtgttttgaaattttatgtttagttgcacaaattgggccaaagaaacattgccttgaggaagatatgattggaaaatcaagagtgtagaagaataaatactgttttactgtccaaagacatgtttatagtgctctgtaaatgttcctttcctttgtagtctctggcaagatgctttaggaagataaaagtttgaggagaacaaacaggaattctgaattaagcacagagttgaagtttatacccgtttcacatgcttttcaagaatgtcgcaattactaagaagcagataatggtgttttttagaaacctaattgaagtatattcaaccaaatactttaatgtataaaataaatattatacaatatacttgtatagcagtttctgcttcacatttgattttttcaaatttaatatttatattagagatctatatatgtataaatatgtattttgtcaaatttgttacttaaatatatagagaccagttttctctggaagtttgtttaaatgacagaagcgtatatgaattcaagaaaatttaagctgcaaaaatgtatttgctataaaatgagaagtctcactgatagaggttctttattgctcattttttaaaaaatggactcttgaaatctgttaaaataaaattgtacatttggagatgtttca

SEQ ID NO: 13909 - DNA, 3196 bp, Homo sapiens
gctcgggccacgcccacctgtcctgcagcactggatgctttgtgagttggggattgttgcgtcccatatctggacccagaagggacttccctgctcggctggctctcggtttctctgctttcctccggagaaataacagcgtcttccgcgccgcgcatggagcctcccggccgccgcgagtgtccctttccttcctggcgctttcctgggttgcttctggcggccatggtgttgctgctgtactccttctccgatgcctgtgaggagccaccaacatttgaagctatggagctcattggtaaaccaaaaccctactatgagattggtgaacgagtagattataagtgtaaaaaaggatacttctatatacctcctcttgccacccatactatttgtgatcggaatcatacatggctacctgtctcagatgacgcctgttatagagaaacatgtccatatatacgggatcctttaaatggccaagcagtccctgcaaatgggacttacgagtttggttatcagatgcactttatttgtaatgagggttattacttaattggtgaagaaattctatattgtgaacttaaaggatcagtagcaatttggagcggtaagcccccaatatgtgaaaaggttttgtgtacaccacctccaaaaataaaaaatggaaaacacacctttagtgaagtagaagtatttgagtatcttgatgcagtaacttatagttgtgatcctgcacctggaccagatccattttcacttattggagagagcacgatttattgtggtgacaattcagtgtggagtcgtgctgctccagagtgtaaagtggtcaaatgtcgatttccagtagtcgaaaatggaaaacagatatcaggatttggaaaaaaattttactacaaagcaacagttatgtttgaatgcgataagggtttttacctcgatggcagcgacacaattgtctgtgacagtaacagtacttgggatcccccagttccaaagtgtcttaaagtgtcgacttcttccactacaaaatctccagcgtccagtgcctcaggtcctaggcctacttacaagcctccagtctcaaattatccaggatatcctaaacctgaggaaggaatacttgacagtttggatgtttgggtcattgctgtgattgttattgccatagatatcttcaaaggaggaagaagaaagggaaagcagatggtggagctgaatatgccacttaccagactaaatcaaccactccagcagagcagagaggctgaatagattccacaacctggtttgccagttcatcttttgactctattaaaatcttcaatagttgttattctgtagtttcactctcatgagtgcaactgtggcttagctaatattgcaatgtggcttgaatgtaggtagcatcctttgatgcttctttgaaacttgtatgaatttgggtatgaacagattgcctgctttcccttaaataacacttagatttattggaccagtcagcacagcatgcctggttgtattaaagcagggatatgctgtattttataaaattggcaaaattagagaaatatagttcacaatgaaattatattttctttgtaaagaaagtggcttgaaatcttttttgttcaaagattaatgccaactcttaagattattctttcaccaactatagaatgtattttatatatcgttcattgtaaaaagcccttaaaaatatgtgtatactactttggctcttgtgcataaaaacaagaacactgaaaattgggaatatgcacaaacttggcttctttaaccaagaatattattggaaaattctctaaaagttaatagggtaaattctctattttttgtaatgtgttcggtgatttcagaaagctagaaagtgtatgtgtggcatttgttttcactttttaaaacatccctaactgatcgaatatatcagtaatttcagaatcagatgcatcctttcataagaagtgagaggactctgacagccataacaggagtgccacttcatggtgcgaagtgaacactgtagtcttgttgttttcccaaagagaactccgtatgttctcttaggttgagtaacccactctgaattctggttacatgtgtttttctctccctccttaaataaagagaggggttaaacatgccctctaaaagtaggtggttttgaagagaataaattcatcagataacctcaagtcacatgagaatcttagtccatttacattgccttggctagtaaaagccatctatgtatatgtcttacctcatctcctaaaaggcagagtacaaagtaagccatgtatctcaggaaggtaacttcattttgtctatttgctgttgattgtaccaagggatggaagaagtaaatatagctcaggtagcactttatactcaggcagatctcagccctctactgagtcccttagccaagcagtttctttcaaagaagccagcaggcgaaaagcagggactgccactgcatttcatatcacactgttaaaagttgtgttttgaaattttatgtttagttgcacaaattgggccaaagaaacattgccttgaggaagatatgattggaaaatcaagagtgtagaagaataaatactgttttactgtccaaagacatgtttatagtgctctgtaaatgttcctttcctttgtagtctctggcaagatgctttaggaagataaaagtttgaggagaacaaacaggaattctgaattaagcacagagttgaagtttatacccgtttcacatgcttttcaagaatgtcgcaattactaagaagcagataatggtgttttttagaaacctaattgaagtatattcaaccaaatactttaatgtataaaataaatattatacaatatacttgtatagcagtttctgcttcacatttgattttttcaaatttaatatttatattagagatctatatatgtataaatatgtattttgtcaaatttgttacttaaatatatagagaccagttttctctggaagtttgtttaaatgacagaagcgtatatgaattcaagaaaatttaagctgcaaaaatgtatttgctataaaatgagaagtctcactgatagaggttctttattgctcattttttaaaaaatggactcttgaaatctgttaaaataaaattgtacatttggagatgtttca

SEQ ID NO: 13910 - DNA, 3278 bp, Homo sapiens
gctcgggccacgcccacctgtcctgcagcactggatgctttgtgagttggggattgttgcgtcccatatctggacccagaagggacttccctgctcggctggctctcggtttctctgctttcctccggagaaataacagcgtcttccgcgccgcgcatggagcctcccggccgccgcgagtgtccctttccttcctggcgctttcctgggttgcttctggcggccatggtgttgctgctgtactccttctccgatgcctgtgaggagccaccaacatttgaagctatggagctcattggtaaaccaaaaccctactatgagattggtgaacgagtagattataagtgtaaaaaaggatacttctatatacctcctcttgccacccatactatttgtgatcggaatcatacatggctacctgtctcagatgacgcctgttatagagaaacatgtccatatatacgggatcctttaaatggccaagcagtccctgcaaatgggacttacgagtttggttatcagatgcactttatttgtaatgagggttattacttaattggtgaagaaattctatattgtgaacttaaaggatcagtagcaatttggagcggtaagcccccaatatgtgaaaaggttttgtgtacaccacctccaaaaataaaaaatggaaaacacacctttagtgaagtagaagtatttgagtatcttgatgcagtaacttatagttgtgatcctgcacctggaccagatccattttcacttattggagagagcacgatttattgtggtgacaattcagtgtggagtcgtgctgctccagagtgtaaagtggtcaaatgtcgatttccagtagtcgaaaatggaaaacagatatcaggatttggaaaaaaattttactacaaagcaacagttatgtttgaatgcgataagggtttttacctcgatggcagcgacacaattgtctgtgacagtaacagtacttgggatcccccagttccaaagtgtcttaaagtgctgcctccatctagtacaaaacctccagctttgagtcattcagtgtcgacttcttccactacaaaatctccagcgtccagtgcctcaggtcctaggcctacttacaagcctccagtctcaaattatccaggatatcctaaacctgaggaaggaatacttgacagtttggatgtttgggtcattgctgtgattgttattgccatagttgttggagttgcagtaatttgtgttgtcccgtacagatatcttcaaaggaggaagaagaaagggaaagcagatggtggagctgaatatgccacttaccagactaaatcaaccactccagcagagcagagaggctgaatagattccacaacctggtttgccagttcatcttttgactctattaaaatcttcaatagttgttattctgtagtttcactctcatgagtgcaactgtggcttagctaatattgcaatgtggcttgaatgtaggtagcatcctttgatgcttctttgaaacttgtatgaatttgggtatgaacagattgcctgctttcccttaaataacacttagatttattggaccagtcagcacagcatgcctggttgtattaaagcagggatatgctgtattttataaaattggcaaaattagagaaatatagttcacaatgaaattatattttctttgtaaagaaagtggcttgaaatcttttttgttcaaagattaatgccaactcttaagattattctttcaccaactatagaatgtattttatatatcgttcattgtaaaaagcccttaaaaatatgtgtatactactttggctcttgtgcataaaaacaagaacactgaaaattgggaatatgcacaaacttggcttctttaaccaagaatattattggaaaattctctaaaagttaatagggtaaattctctattttttgtaatgtgttcggtgatttcagaaagctagaaagtgtatgtgtggcatttgttttcactttttaaaacatccctaactgatcgaatatatcagtaatttcagaatcagatgcatcctttcataagaagtgagaggactctgacagccataacaggagtgccacttcatggtgcgaagtgaacactgtagtcttgttgttttcccaaagagaactccgtatgttctcttaggttgagtaacccactctgaattctggttacatgtgtttttctctccctccttaaataaagagaggggttaaacatgccctctaaaagtaggtggttttgaagagaataaattcatcagataacctcaagtcacatgagaatcttagtccatttacattgccttggctagtaaaagccatctatgtatatgtcttacctcatctcctaaaaggcagagtacaaagtaagccatgtatctcaggaaggtaacttcattttgtctatttgctgttgattgtaccaagggatggaagaagtaaatatagctcaggtagcactttatactcaggcagatctcagccctctactgagtcccttagccaagcagtttctttcaaagaagccagcaggcgaaaagcagggactgccactgcatttcatatcacactgttaaaagttgtgttttgaaattttatgtttagttgcacaaattgggccaaagaaacattgccttgaggaagatatgattggaaaatcaagagtgtagaagaataaatactgttttactgtccaaagacatgtttatagtgctctgtaaatgttcctttcctttgtagtctctggcaagatgctttaggaagataaaagtttgaggagaacaaacaggaattctgaattaagcacagagttgaagtttatacccgtttcacatgcttttcaagaatgtcgcaattactaagaagcagataatggtgttttttagaaacctaattgaagtatattcaaccaaatactttaatgtataaaataaatattatacaatatacttgtatagcagtttctgcttcacatttgattttttcaaatttaatatttatattagagatctatatatgtataaatatgtattttgtcaaatttgttacttaaatatatagagaccagttttctctggaagtttgtttaaatgacagaagcgtatatgaattcaagaaaatttaagctgcaaaaatgtatttgctataaaatgagaagtctcactgatagaggttctttattgctcattttttaaaaaatggactcttgaaatctgttaaaataaaattgtacatttggagatgtttca

SEQ ID NO: 13911 - DNA, 3239 bp, Homo sapiens
gctcgggccacgcccacctgtcctgcagcactggatgctttgtgagttggggattgttgcgtcccatatctggacccagaagggacttccctgctcggctggctctcggtttctctgctttcctccggagaaataacagcgtcttccgcgccgcgcatggagcctcccggccgccgcgagtgtccctttccttcctggcgctttcctgggttgcttctggcggccatggtgttgctgctgtactccttctccgatgcctgtgaggagccaccaacatttgaagctatggagctcattggtaaaccaaaaccctactatgagattggtgaacgagtagattataagtgtaaaaaaggatacttctatatacctcctcttgccacccatactatttgtgatcggaatcatacatggctacctgtctcagatgacgcctgttatagagaaacatgtccatatatacgggatcctttaaatggccaagcagtccctgcaaatgggacttacgagtttggttatcagatgcactttatttgtaatgagggttattacttaattggtgaagaaattctatattgtgaacttaaaggatcagtagcaatttggagcggtaagcccccaatatgtgaaaaggttttgtgtacaccacctccaaaaataaaaaatggaaaacacacctttagtgaagtagaagtatttgagtatcttgatgcagtaacttatagttgtgatcctgcacctggaccagatccattttcacttattggagagagcacgatttattgtggtgacaattcagtgtggagtcgtgctgctccagagtgtaaagtggtcaaatgtcgatttccagtagtcgaaaatggaaaacagatatcaggatttggaaaaaaattttactacaaagcaacagttatgtttgaatgcgataagggtttttacctcgatggcagcgacacaattgtctgtgacagtaacagtacttgggatcccccagttccaaagtgtcttaaaggatatcctaaacctgaggaaggaatacttgacagtttggatgtttgggtcattgctgtgattgttattgccatagttgttggagttgcagtaatttgtgttgtcccgtacagatatcttcaaaggaggaagaagaaaggcacatacctaactgatgagacccacagagaagtaaaatttacttctctctgagaaggagagatgagagaaaggtttgcttttatcattaaaaggaaagcagatggtggagctgaatatgccacttaccagactaaatcaaccactccagcagagcagagaggctgaatagattccacaacctggtttgccagttcatcttttgactctattaaaatcttcaatagttgttattctgtagtttcactctcatgagtgcaactgtggcttagctaatattgcaatgtggcttgaatgtaggtagcatcctttgatgcttctttgaaacttgtatgaatttgggtatgaacagattgcctgctttcccttaaataacacttagatttattggaccagtcagcacagcatgcctggttgtattaaagcagggatatgctgtattttataaaattggcaaaattagagaaatatagttcacaatgaaattatattttctttgtaaagaaagtggcttgaaatcttttttgttcaaagattaatgccaactcttaagattattctttcaccaactatagaatgtattttatatatcgttcattgtaaaaagcccttaaaaatatgtgtatactactttggctcttgtgcataaaaacaagaacactgaaaattgggaatatgcacaaacttggcttctttaaccaagaatattattggaaaattctctaaaagttaatagggtaaattctctattttttgtaatgtgttcggtgatttcagaaagctagaaagtgtatgtgtggcatttgttttcactttttaaaacatccctaactgatcgaatatatcagtaatttcagaatcagatgcatcctttcataagaagtgagaggactctgacagccataacaggagtgccacttcatggtgcgaagtgaacactgtagtcttgttgttttcccaaagagaactccgtatgttctcttaggttgagtaacccactctgaattctggttacatgtgtttttctctccctccttaaataaagagaggggttaaacatgccctctaaaagtaggtggttttgaagagaataaattcatcagataacctcaagtcacatgagaatcttagtccatttacattgccttggctagtaaaagccatctatgtatatgtcttacctcatctcctaaaaggcagagtacaaagtaagccatgtatctcaggaaggtaacttcattttgtctatttgctgttgattgtaccaagggatggaagaagtaaatatagctcaggtagcactttatactcaggcagatctcagccctctactgagtcccttagccaagcagtttctttcaaagaagccagcaggcgaaaagcagggactgccactgcatttcatatcacactgttaaaagttgtgttttgaaattttatgtttagttgcacaaattgggccaaagaaacattgccttgaggaagatatgattggaaaatcaagagtgtagaagaataaatactgttttactgtccaaagacatgtttatagtgctctgtaaatgttcctttcctttgtagtctctggcaagatgctttaggaagataaaagtttgaggagaacaaacaggaattctgaattaagcacagagttgaagtttatacccgtttcacatgcttttcaagaatgtcgcaattactaagaagcagataatggtgttttttagaaacctaattgaagtatattcaaccaaatactttaatgtataaaataaatattatacaatatacttgtatagcagtttctgcttcacatttgattttttcaaatttaatatttatattagagatctatatatgtataaatatgtattttgtcaaatttgttacttaaatatatagagaccagttttctctggaagtttgtttaaatgacagaagcgtatatgaattcaagaaaatttaagctgcaaaaatgtatttgctataaaatgagaagtctcactgatagaggttctttattgctcattttttaaaaaatggactcttgaaatctgttaaaataaaattgtacatttggagatgtttca

SEQ ID NO: 13912 - DNA, 3233 bp, Homo sapiens
gctcgggccacgcccacctgtcctgcagcactggatgctttgtgagttggggattgttgcgtcccatatctggacccagaagggacttccctgctcggctggctctcggtttctctgctttcctccggagaaataacagcgtcttccgcgccgcgcatggagcctcccggccgccgcgagtgtccctttccttcctggcgctttcctgggttgcttctggcggccatggtgttgctgctgtactccttctccgatgcctgtgaggagccaccaacatttgaagctatggagctcattggtaaaccaaaaccctactatgagattggtgaacgagtagattataagtgtaaaaaaggatacttctatatacctcctcttgccacccatactatttgtgatcggaatcatacatggctacctgtctcagatgacgcctgttatagagaaacatgtccatatatacgggatcctttaaatggccaagcagtccctgcaaatgggacttacgagtttggttatcagatgcactttatttgtaatgagggttattacttaattggtgaagaaattctatattgtgaacttaaaggatcagtagcaatttggagcggtaagcccccaatatgtgaaaaggttttgtgtacaccacctccaaaaataaaaaatggaaaacacacctttagtgaagtagaagtatttgagtatcttgatgcagtaacttatagttgtgatcctgcacctggaccagatccattttcacttattggagagagcacgatttattgtggtgacaattcagtgtggagtcgtgctgctccagagtgtaaagtggtcaaatgtcgatttccagtagtcgaaaatggaaaacagatatcaggatttggaaaaaaattttactacaaagcaacagttatgtttgaatgcgataagggtttttacctcgatggcagcgacacaattgtctgtgacagtaacagtacttgggatcccccagttccaaagtgtcttaaagtgtcgacttcttccactacaaaatctccagcgtccagtgcctcaggtcctaggcctacttacaagcctccagtctcaaattatccaggatatcctaaacctgaggaaggaatacttgacagtttggatgtttgggtcattgctgtgattgttattgccatagttgttggagttgcagtaatttgtgttgtcccgtacagatatcttcaaaggaggaagaagaaagggaaagcagatggtggagctgaatatgccacttaccagactaaatcaaccactccagcagagcagagaggctgaatagattccacaacctggtttgccagttcatcttttgactctattaaaatcttcaatagttgttattctgtagtttcactctcatgagtgcaactgtggcttagctaatattgcaatgtggcttgaatgtaggtagcatcctttgatgcttctttgaaacttgtatgaatttgggtatgaacagattgcctgctttcccttaaataacacttagatttattggaccagtcagcacagcatgcctggttgtattaaagcagggatatgctgtattttataaaattggcaaaattagagaaatatagttcacaatgaaattatattttctttgtaaagaaagtggcttgaaatcttttttgttcaaagattaatgccaactcttaagattattctttcaccaactatagaatgtattttatatatcgttcattgtaaaaagcccttaaaaatatgtgtatactactttggctcttgtgcataaaaacaagaacactgaaaattgggaatatgcacaaacttggcttctttaaccaagaatattattggaaaattctctaaaagttaatagggtaaattctctattttttgtaatgtgttcggtgatttcagaaagctagaaagtgtatgtgtggcatttgttttcactttttaaaacatccctaactgatcgaatatatcagtaatttcagaatcagatgcatcctttcataagaagtgagaggactctgacagccataacaggagtgccacttcatggtgcgaagtgaacactgtagtcttgttgttttcccaaagagaactccgtatgttctcttaggttgagtaacccactctgaattctggttacatgtgtttttctctccctccttaaataaagagaggggttaaacatgccctctaaaagtaggtggttttgaagagaataaattcatcagataacctcaagtcacatgagaatcttagtccatttacattgccttggctagtaaaagccatctatgtatatgtcttacctcatctcctaaaaggcagagtacaaagtaagccatgtatctcaggaaggtaacttcattttgtctatttgctgttgattgtaccaagggatggaagaagtaaatatagctcaggtagcactttatactcaggcagatctcagccctctactgagtcccttagccaagcagtttctttcaaagaagccagcaggcgaaaagcagggactgccactgcatttcatatcacactgttaaaagttgtgttttgaaattttatgtttagttgcacaaattgggccaaagaaacattgccttgaggaagatatgattggaaaatcaagagtgtagaagaataaatactgttttactgtccaaagacatgtttatagtgctctgtaaatgttcctttcctttgtagtctctggcaagatgctttaggaagataaaagtttgaggagaacaaacaggaattctgaattaagcacagagttgaagtttatacccgtttcacatgcttttcaagaatgtcgcaattactaagaagcagataatggtgttttttagaaacctaattgaagtatattcaaccaaatactttaatgtataaaataaatattatacaatatacttgtatagcagtttctgcttcacatttgattttttcaaatttaatatttatattagagatctatatatgtataaatatgtattttgtcaaatttgttacttaaatatatagagaccagttttctctggaagtttgtttaaatgacagaagcgtatatgaattcaagaaaatttaagctgcaaaaatgtatttgctataaaatgagaagtctcactgatagaggttctttattgctcattttttaaaaaatggactcttgaaatctgttaaaataaaattgtacatttggagatgtttca

SEQ ID NO: 13913 - DNA, 3284 bp, Homo sapiens
gctcgggccacgcccacctgtcctgcagcactggatgctttgtgagttggggattgttgcgtcccatatctggacccagaagggacttccctgctcggctggctctcggtttctctgctttcctccggagaaataacagcgtcttccgcgccgcgcatggagcctcccggccgccgcgagtgtccctttccttcctggcgctttcctgggttgcttctggcggccatggtgttgctgctgtactccttctccgatgcctgtgaggagccaccaacatttgaagctatggagctcattggtaaaccaaaaccctactatgagattggtgaacgagtagattataagtgtaaaaaaggatacttctatatacctcctcttgccacccatactatttgtgatcggaatcatacatggctacctgtctcagatgacgcctgttatagagaaacatgtccatatatacgggatcctttaaatggccaagcagtccctgcaaatgggacttacgagtttggttatcagatgcactttatttgtaatgagggttattacttaattggtgaagaaattctatattgtgaacttaaaggatcagtagcaatttggagcggtaagcccccaatatgtgaaaaggttttgtgtacaccacctccaaaaataaaaaatggaaaacacacctttagtgaagtagaagtatttgagtatcttgatgcagtaacttatagttgtgatcctgcacctggaccagatccattttcacttattggagagagcacgatttattgtggtgacaattcagtgtggagtcgtgctgctccagagtgtaaagtggtcaaatgtcgatttccagtagtcgaaaatggaaaacagatatcaggatttggaaaaaaattttactacaaagcaacagttatgtttgaatgcgataagggtttttacctcgatggcagcgacacaattgtctgtgacagtaacagtacttgggatcccccagttccaaagtgtcttaaagtgtcgacttcttccactacaaaatctccagcgtccagtgcctcaggatatcctaaacctgaggaaggaatacttgacagtttggatgtttgggtcattgctgtgattgttattgccatagttgttggagttgcagtaatttgtgttgtcccgtacagatatcttcaaaggaggaagaagaaaggcacatacctaactgatgagacccacagagaagtaaaatttacttctctctgagaaggagagatgagagaaaggtttgcttttatcattaaaaggaaagcagatggtggagctgaatatgccacttaccagactaaatcaaccactccagcagagcagagaggctgaatagattccacaacctggtttgccagttcatcttttgactctattaaaatcttcaatagttgttattctgtagtttcactctcatgagtgcaactgtggcttagctaatattgcaatgtggcttgaatgtaggtagcatcctttgatgcttctttgaaacttgtatgaatttgggtatgaacagattgcctgctttcccttaaataacacttagatttattggaccagtcagcacagcatgcctggttgtattaaagcagggatatgctgtattttataaaattggcaaaattagagaaatatagttcacaatgaaattatattttctttgtaaagaaagtggcttgaaatcttttttgttcaaagattaatgccaactcttaagattattctttcaccaactatagaatgtattttatatatcgttcattgtaaaaagcccttaaaaatatgtgtatactactttggctcttgtgcataaaaacaagaacactgaaaattgggaatatgcacaaacttggcttctttaaccaagaatattattggaaaattctctaaaagttaatagggtaaattctctattttttgtaatgtgttcggtgatttcagaaagctagaaagtgtatgtgtggcatttgttttcactttttaaaacatccctaactgatcgaatatatcagtaatttcagaatcagatgcatcctttcataagaagtgagaggactctgacagccataacaggagtgccacttcatggtgcgaagtgaacactgtagtcttgttgttttcccaaagagaactccgtatgttctcttaggttgagtaacccactctgaattctggttacatgtgtttttctctccctccttaaataaagagaggggttaaacatgccctctaaaagtaggtggttttgaagagaataaattcatcagataacctcaagtcacatgagaatcttagtccatttacattgccttggctagtaaaagccatctatgtatatgtcttacctcatctcctaaaaggcagagtacaaagtaagccatgtatctcaggaaggtaacttcattttgtctatttgctgttgattgtaccaagggatggaagaagtaaatatagctcaggtagcactttatactcaggcagatctcagccctctactgagtcccttagccaagcagtttctttcaaagaagccagcaggcgaaaagcagggactgccactgcatttcatatcacactgttaaaagttgtgttttgaaattttatgtttagttgcacaaattgggccaaagaaacattgccttgaggaagatatgattggaaaatcaagagtgtagaagaataaatactgttttactgtccaaagacatgtttatagtgctctgtaaatgttcctttcctttgtagtctctggcaagatgctttaggaagataaaagtttgaggagaacaaacaggaattctgaattaagcacagagttgaagtttatacccgtttcacatgcttttcaagaatgtcgcaattactaagaagcagataatggtgttttttagaaacctaattgaagtatattcaaccaaatactttaatgtataaaataaatattatacaatatacttgtatagcagtttctgcttcacatttgattttttcaaatttaatatttatattagagatctatatatgtataaatatgtattttgtcaaatttgttacttaaatatatagagaccagttttctctggaagtttgtttaaatgacagaagcgtatatgaattcaagaaaatttaagctgcaaaaatgtatttgctataaaatgagaagtctcactgatagaggttctttattgctcattttttaaaaaatggactcttgaaatctgttaaaataaaattgtacatttggagatgtttca

SEQ ID NO: 13914 - DNA, 3236 bp, Homo sapiens
gctcgggccacgcccacctgtcctgcagcactggatgctttgtgagttggggattgttgcgtcccatatctggacccagaagggacttccctgctcggctggctctcggtttctctgctttcctccggagaaataacagcgtcttccgcgccgcgcatggagcctcccggccgccgcgagtgtccctttccttcctggcgctttcctgggttgcttctggcggccatggtgttgctgctgtactccttctccgatgcctgtgaggagccaccaacatttgaagctatggagctcattggtaaaccaaaaccctactatgagattggtgaacgagtagattataagtgtaaaaaaggatacttctatatacctcctcttgccacccatactatttgtgatcggaatcatacatggctacctgtctcagatgacgcctgttatagagaaacatgtccatatatacgggatcctttaaatggccaagcagtccctgcaaatgggacttacgagtttggttatcagatgcactttatttgtaatgagggttattacttaattggtgaagaaattctatattgtgaacttaaaggatcagtagcaatttggagcggtaagcccccaatatgtgaaaaggttttgtgtacaccacctccaaaaataaaaaatggaaaacacacctttagtgaagtagaagtatttgagtatcttgatgcagtaacttatagttgtgatcctgcacctggaccagatccattttcacttattggagagagcacgatttattgtggtgacaattcagtgtggagtcgtgctgctccagagtgtaaagtggtcaaatgtcgatttccagtagtcgaaaatggaaaacagatatcaggatttggaaaaaaattttactacaaagcaacagttatgtttgaatgcgataagggtttttacctcgatggcagcgacacaattgtctgtgacagtaacagtacttgggatcccccagttccaaagtgtcttaaagtgctgcctccatctagtacaaaacctccagctttgagtcattcagtgtcgacttcttccactacaaaatctccagcgtccagtgcctcaggatatcctaaacctgaggaaggaatacttgacagtttggatgtttgggtcattgctgtgattgttattgccatagttgttggagttgcagtaatttgtgttgtcccgtacagatatcttcaaaggaggaagaagaaagggaaagcagatggtggagctgaatatgccacttaccagactaaatcaaccactccagcagagcagagaggctgaatagattccacaacctggtttgccagttcatcttttgactctattaaaatcttcaatagttgttattctgtagtttcactctcatgagtgcaactgtggcttagctaatattgcaatgtggcttgaatgtaggtagcatcctttgatgcttctttgaaacttgtatgaatttgggtatgaacagattgcctgctttcccttaaataacacttagatttattggaccagtcagcacagcatgcctggttgtattaaagcagggatatgctgtattttataaaattggcaaaattagagaaatatagttcacaatgaaattatattttctttgtaaagaaagtggcttgaaatcttttttgttcaaagattaatgccaactcttaagattattctttcaccaactatagaatgtattttatatatcgttcattgtaaaaagcccttaaaaatatgtgtatactactttggctcttgtgcataaaaacaagaacactgaaaattgggaatatgcacaaacttggcttctttaaccaagaatattattggaaaattctctaaaagttaatagggtaaattctctattttttgtaatgtgttcggtgatttcagaaagctagaaagtgtatgtgtggcatttgttttcactttttaaaacatccctaactgatcgaatatatcagtaatttcagaatcagatgcatcctttcataagaagtgagaggactctgacagccataacaggagtgccacttcatggtgcgaagtgaacactgtagtcttgttgttttcccaaagagaactccgtatgttctcttaggttgagtaacccactctgaattctggttacatgtgtttttctctccctccttaaataaagagaggggttaaacatgccctctaaaagtaggtggttttgaagagaataaattcatcagataacctcaagtcacatgagaatcttagtccatttacattgccttggctagtaaaagccatctatgtatatgtcttacctcatctcctaaaaggcagagtacaaagtaagccatgtatctcaggaaggtaacttcattttgtctatttgctgttgattgtaccaagggatggaagaagtaaatatagctcaggtagcactttatactcaggcagatctcagccctctactgagtcccttagccaagcagtttctttcaaagaagccagcaggcgaaaagcagggactgccactgcatttcatatcacactgttaaaagttgtgttttgaaattttatgtttagttgcacaaattgggccaaagaaacattgccttgaggaagatatgattggaaaatcaagagtgtagaagaataaatactgttttactgtccaaagacatgtttatagtgctctgtaaatgttcctttcctttgtagtctctggcaagatgctttaggaagataaaagtttgaggagaacaaacaggaattctgaattaagcacagagttgaagtttatacccgtttcacatgcttttcaagaatgtcgcaattactaagaagcagataatggtgttttttagaaacctaattgaagtatattcaaccaaatactttaatgtataaaataaatattatacaatatacttgtatagcagtttctgcttcacatttgattttttcaaatttaatatttatattagagatctatatatgtataaatatgtattttgtcaaatttgttacttaaatatatagagaccagttttctctggaagtttgtttaaatgacagaagcgtatatgaattcaagaaaatttaagctgcaaaaatgtatttgctataaaatgagaagtctcactgatagaggttctttattgctcattttttaaaaaatggactcttgaaatctgttaaaataaaattgtacatttggagatgtttca

SEQ ID NO: 13915 - DNA, 3124 bp, Homo sapiens
gctcgggccacgcccacctgtcctgcagcactggatgctttgtgagttggggattgttgcgtcccatatctggacccagaagggacttccctgctcggctggctctcggtttctctgctttcctccggagaaataacagcgtcttccgcgccgcgcatggagcctcccggccgccgcgagtgtccctttccttcctggcgctttcctgggttgcttctggcggccatggtgttgctgctgtactccttctccgatgcctgtgaggagccaccaacatttgaagctatggagctcattggtaaaccaaaaccctactatgagattggtgaacgagtagattataagtgtaaaaaaggatacttctatatacctcctcttgccacccatactatttgtgatcggaatcatacatggctacctgtctcagatgacgcctgttatagagaaacatgtccatatatacgggatcctttaaatggccaagcagtccctgcaaatgggacttacgagtttggttatcagatgcactttatttgtaatgagggttattacttaattggtgaagaaattctatattgtgaacttaaaggatcagtagcaatttggagcggtaagcccccaatatgtgaaaaggttttgtgtacaccacctccaaaaataaaaaatggaaaacacacctttagtgaagtagaagtatttgagtatcttgatgcagtaacttatagttgtgatcctgcacctggaccagatccattttcacttattggagagagcacgatttattgtggtgacaattcagtgtggagtcgtgctgctccagagtgtaaagtggtcaaatgtcgatttccagtagtcgaaaatggaaaacagatatcaggatttggaaaaaaattttactacaaagcaacagttatgtttgaatgcgataagggtttttacctcgatggcagcgacacaattgtctgtgacagtaacagtacttgggatcccccagttccaaagtgtcttaaaggtcctaggcctacttacaagcctccagtctcaaattatccaggatatcctaaacctgaggaaggaatacttgacagtttggatgtttgggtcattgctgtgattgttattgccataggaaagcagatggtggagctgaatatgccacttaccagactaaatcaaccactccagcagagcagagaggctgaatagattccacaacctggtttgccagttcatcttttgactctattaaaatcttcaatagttgttattctgtagtttcactctcatgagtgcaactgtggcttagctaatattgcaatgtggcttgaatgtaggtagcatcctttgatgcttctttgaaacttgtatgaatttgggtatgaacagattgcctgctttcccttaaataacacttagatttattggaccagtcagcacagcatgcctggttgtattaaagcagggatatgctgtattttataaaattggcaaaattagagaaatatagttcacaatgaaattatattttctttgtaaagaaagtggcttgaaatcttttttgttcaaagattaatgccaactcttaagattattctttcaccaactatagaatgtattttatatatcgttcattgtaaaaagcccttaaaaatatgtgtatactactttggctcttgtgcataaaaacaagaacactgaaaattgggaatatgcacaaacttggcttctttaaccaagaatattattggaaaattctctaaaagttaatagggtaaattctctattttttgtaatgtgttcggtgatttcagaaagctagaaagtgtatgtgtggcatttgttttcactttttaaaacatccctaactgatcgaatatatcagtaatttcagaatcagatgcatcctttcataagaagtgagaggactctgacagccataacaggagtgccacttcatggtgcgaagtgaacactgtagtcttgttgttttcccaaagagaactccgtatgttctcttaggttgagtaacccactctgaattctggttacatgtgtttttctctccctccttaaataaagagaggggttaaacatgccctctaaaagtaggtggttttgaagagaataaattcatcagataacctcaagtcacatgagaatcttagtccatttacattgccttggctagtaaaagccatctatgtatatgtcttacctcatctcctaaaaggcagagtacaaagtaagccatgtatctcaggaaggtaacttcattttgtctatttgctgttgattgtaccaagggatggaagaagtaaatatagctcaggtagcactttatactcaggcagatctcagccctctactgagtcccttagccaagcagtttctttcaaagaagccagcaggcgaaaagcagggactgccactgcatttcatatcacactgttaaaagttgtgttttgaaattttatgtttagttgcacaaattgggccaaagaaacattgccttgaggaagatatgattggaaaatcaagagtgtagaagaataaatactgttttactgtccaaagacatgtttatagtgctctgtaaatgttcctttcctttgtagtctctggcaagatgctttaggaagataaaagtttgaggagaacaaacaggaattctgaattaagcacagagttgaagtttatacccgtttcacatgcttttcaagaatgtcgcaattactaagaagcagataatggtgttttttagaaacctaattgaagtatattcaaccaaatactttaatgtataaaataaatattatacaatatacttgtatagcagtttctgcttcacatttgattttttcaaatttaatatttatattagagatctatatatgtataaatatgtattttgtcaaatttgttacttaaatatatagagaccagttttctctggaagtttgtttaaatgacagaagcgtatatgaattcaagaaaatttaagctgcaaaaatgtatttgctataaaatgagaagtctcactgatagaggttctttattgctcattttttaaaaaatggactcttgaaatctgttaaaataaaattgtacatttggagatgtttca

SEQ ID NO: 13916 - DNA, 3188 bp, Homo sapiens
gctcgggccacgcccacctgtcctgcagcactggatgctttgtgagttggggattgttgcgtcccatatctggacccagaagggacttccctgctcggctggctctcggtttctctgctttcctccggagaaataacagcgtcttccgcgccgcgcatggagcctcccggccgccgcgagtgtccctttccttcctggcgctttcctgggttgcttctggcggccatggtgttgctgctgtactccttctccgatgcctgtgaggagccaccaacatttgaagctatggagctcattggtaaaccaaaaccctactatgagattggtgaacgagtagattataagtgtaaaaaaggatacttctatatacctcctcttgccacccatactatttgtgatcggaatcatacatggctacctgtctcagatgacgcctgttatagagaaacatgtccatatatacgggatcctttaaatggccaagcagtccctgcaaatgggacttacgagtttggttatcagatgcactttatttgtaatgagggttattacttaattggtgaagaaattctatattgtgaacttaaaggatcagtagcaatttggagcggtaagcccccaatatgtgaaaaggttttgtgtacaccacctccaaaaataaaaaatggaaaacacacctttagtgaagtagaagtatttgagtatcttgatgcagtaacttatagttgtgatcctgcacctggaccagatccattttcacttattggagagagcacgatttattgtggtgacaattcagtgtggagtcgtgctgctccagagtgtaaagtggtcaaatgtcgatttccagtagtcgaaaatggaaaacagatatcaggatttggaaaaaaattttactacaaagcaacagttatgtttgaatgcgataagggtttttacctcgatggcagcgacacaattgtctgtgacagtaacagtacttgggatcccccagttccaaagtgtcttaaaggtcctaggcctacttacaagcctccagtctcaaattatccaggatatcctaaacctgaggaaggaatacttgacagtttggatgtttgggtcattgctgtgattgttattgccatagttgttggagttgcagtaatttgtgttgtcccgtacagatatcttcaaaggaggaagaagaaagggaaagcagatggtggagctgaatatgccacttaccagactaaatcaaccactccagcagagcagagaggctgaatagattccacaacctggtttgccagttcatcttttgactctattaaaatcttcaatagttgttattctgtagtttcactctcatgagtgcaactgtggcttagctaatattgcaatgtggcttgaatgtaggtagcatcctttgatgcttctttgaaacttgtatgaatttgggtatgaacagattgcctgctttcccttaaataacacttagatttattggaccagtcagcacagcatgcctggttgtattaaagcagggatatgctgtattttataaaattggcaaaattagagaaatatagttcacaatgaaattatattttctttgtaaagaaagtggcttgaaatcttttttgttcaaagattaatgccaactcttaagattattctttcaccaactatagaatgtattttatatatcgttcattgtaaaaagcccttaaaaatatgtgtatactactttggctcttgtgcataaaaacaagaacactgaaaattgggaatatgcacaaacttggcttctttaaccaagaatattattggaaaattctctaaaagttaatagggtaaattctctattttttgtaatgtgttcggtgatttcagaaagctagaaagtgtatgtgtggcatttgttttcactttttaaaacatccctaactgatcgaatatatcagtaatttcagaatcagatgcatcctttcataagaagtgagaggactctgacagccataacaggagtgccacttcatggtgcgaagtgaacactgtagtcttgttgttttcccaaagagaactccgtatgttctcttaggttgagtaacccactctgaattctggttacatgtgtttttctctccctccttaaataaagagaggggttaaacatgccctctaaaagtaggtggttttgaagagaataaattcatcagataacctcaagtcacatgagaatcttagtccatttacattgccttggctagtaaaagccatctatgtatatgtcttacctcatctcctaaaaggcagagtacaaagtaagccatgtatctcaggaaggtaacttcattttgtctatttgctgttgattgtaccaagggatggaagaagtaaatatagctcaggtagcactttatactcaggcagatctcagccctctactgagtcccttagccaagcagtttctttcaaagaagccagcaggcgaaaagcagggactgccactgcatttcatatcacactgttaaaagttgtgttttgaaattttatgtttagttgcacaaattgggccaaagaaacattgccttgaggaagatatgattggaaaatcaagagtgtagaagaataaatactgttttactgtccaaagacatgtttatagtgctctgtaaatgttcctttcctttgtagtctctggcaagatgctttaggaagataaaagtttgaggagaacaaacaggaattctgaattaagcacagagttgaagtttatacccgtttcacatgcttttcaagaatgtcgcaattactaagaagcagataatggtgttttttagaaacctaattgaagtatattcaaccaaatactttaatgtataaaataaatattatacaatatacttgtatagcagtttctgcttcacatttgattttttcaaatttaatatttatattagagatctatatatgtataaatatgtattttgtcaaatttgttacttaaatatatagagaccagttttctctggaagtttgtttaaatgacagaagcgtatatgaattcaagaaaatttaagctgcaaaaatgtatttgctataaaatgagaagtctcactgatagaggttctttattgctcattttttaaaaaatggactcttgaaatctgttaaaataaaattgtacatttggagatgtttca

SEQ ID NO: 13917 - DNA, 3329 bp, Homo sapiens
gctcgggccacgcccacctgtcctgcagcactggatgctttgtgagttggggattgttgcgtcccatatctggacccagaagggacttccctgctcggctggctctcggtttctctgctttcctccggagaaataacagcgtcttccgcgccgcgcatggagcctcccggccgccgcgagtgtccctttccttcctggcgctttcctgggttgcttctggcggccatggtgttgctgctgtactccttctccgatgcctgtgaggagccaccaacatttgaagctatggagctcattggtaaaccaaaaccctactatgagattggtgaacgagtagattataagtgtaaaaaaggatacttctatatacctcctcttgccacccatactatttgtgatcggaatcatacatggctacctgtctcagatgacgcctgttatagagaaacatgtccatatatacgggatcctttaaatggccaagcagtccctgcaaatgggacttacgagtttggttatcagatgcactttatttgtaatgagggttattacttaattggtgaagaaattctatattgtgaacttaaaggatcagtagcaatttggagcggtaagcccccaatatgtgaaaaggttttgtgtacaccacctccaaaaataaaaaatggaaaacacacctttagtgaagtagaagtatttgagtatcttgatgcagtaacttatagttgtgatcctgcacctggaccagatccattttcacttattggagagagcacgatttattgtggtgacaattcagtgtggagtcgtgctgctccagagtgtaaagtggtcaaatgtcgatttccagtagtcgaaaatggaaaacagatatcaggatttggaaaaaaattttactacaaagcaacagttatgtttgaatgcgataagggtttttacctcgatggcagcgacacaattgtctgtgacagtaacagtacttgggatcccccagttccaaagtgtcttaaagtgctgcctccatctagtacaaaacctccagctttgagtcattcagtgtcgacttcttccactacaaaatctccagcgtccagtgcctcaggatatcctaaacctgaggaaggaatacttgacagtttggatgtttgggtcattgctgtgattgttattgccatagttgttggagttgcagtaatttgtgttgtcccgtacagatatcttcaaaggaggaagaagaaaggcacatacctaactgatgagacccacagagaagtaaaatttacttctctctgagaaggagagatgagagaaaggtttgcttttatcattaaaaggaaagcagatggtggagctgaatatgccacttaccagactaaatcaaccactccagcagagcagagaggctgaatagattccacaacctggtttgccagttcatcttttgactctattaaaatcttcaatagttgttattctgtagtttcactctcatgagtgcaactgtggcttagctaatattgcaatgtggcttgaatgtaggtagcatcctttgatgcttctttgaaacttgtatgaatttgggtatgaacagattgcctgctttcccttaaataacacttagatttattggaccagtcagcacagcatgcctggttgtattaaagcagggatatgctgtattttataaaattggcaaaattagagaaatatagttcacaatgaaattatattttctttgtaaagaaagtggcttgaaatcttttttgttcaaagattaatgccaactcttaagattattctttcaccaactatagaatgtattttatatatcgttcattgtaaaaagcccttaaaaatatgtgtatactactttggctcttgtgcataaaaacaagaacactgaaaattgggaatatgcacaaacttggcttctttaaccaagaatattattggaaaattctctaaaagttaatagggtaaattctctattttttgtaatgtgttcggtgatttcagaaagctagaaagtgtatgtgtggcatttgttttcactttttaaaacatccctaactgatcgaatatatcagtaatttcagaatcagatgcatcctttcataagaagtgagaggactctgacagccataacaggagtgccacttcatggtgcgaagtgaacactgtagtcttgttgttttcccaaagagaactccgtatgttctcttaggttgagtaacccactctgaattctggttacatgtgtttttctctccctccttaaataaagagaggggttaaacatgccctctaaaagtaggtggttttgaagagaataaattcatcagataacctcaagtcacatgagaatcttagtccatttacattgccttggctagtaaaagccatctatgtatatgtcttacctcatctcctaaaaggcagagtacaaagtaagccatgtatctcaggaaggtaacttcattttgtctatttgctgttgattgtaccaagggatggaagaagtaaatatagctcaggtagcactttatactcaggcagatctcagccctctactgagtcccttagccaagcagtttctttcaaagaagccagcaggcgaaaagcagggactgccactgcatttcatatcacactgttaaaagttgtgttttgaaattttatgtttagttgcacaaattgggccaaagaaacattgccttgaggaagatatgattggaaaatcaagagtgtagaagaataaatactgttttactgtccaaagacatgtttatagtgctctgtaaatgttcctttcctttgtagtctctggcaagatgctttaggaagataaaagtttgaggagaacaaacaggaattctgaattaagcacagagttgaagtttatacccgtttcacatgcttttcaagaatgtcgcaattactaagaagcagataatggtgttttttagaaacctaattgaagtatattcaaccaaatactttaatgtataaaataaatattatacaatatacttgtatagcagtttctgcttcacatttgattttttcaaatttaatatttatattagagatctatatatgtataaatatgtattttgtcaaatttgttacttaaatatatagagaccagttttctctggaagtttgtttaaatgacagaagcgtatatgaattcaagaaaatttaagctgcaaaaatgtatttgctataaaatgagaagtctcactgatagaggttctttattgctcattttttaaaaaatggactcttgaaatctgttaaaataaaattgtacatttggagatgtttca

SEQ ID NO: 13918 - DNA, 5831 bp, Homo sapiens
gggacctggaagcgccccagccccgcagcgatcgcagattcggctttcaaacaaaagaggcgccccggggggtgggaccgggacctcacccggtcctcgcagagttgcggccgcccgccccttcagccccggctctccgtatgcgcatgagcagaggcgcctccctctgttcctcccaaggctaaactttctaattcccttctttgggctcgggggctcccggagcagggcgagagctcgcgtcgccggaaaggaagacgggaagaaagggcaggcggctcggcgggcgtcttctccactcctctgccgcgtccccgtggctgcagggagccggcatggggcttctccagttgctagctttcagtttcttagccctgtgcagagcccgagtgcgcgctcaggaacccgagttcagctacggctgcgcagaaggcagctgctatcccgccacgggcgaccttctcatcggccgagcacagaagctttcggtgacctcgacgtgcgggctgcacaagcccgaaccctactgtatcgtcagccacttgcaggaggacaaaaaatgcttcatatgcaattcccaagatccttatcatgagaccctgaatcctgacagccatctcattgaaaatgtggtcactacatttgctccaaaccgccttaagatttggtggcaatctgaaaatggtgtggaaaatgtaactatccaactggatttggaagcagaattccattttactcatctcataatgactttcaagacattccgtccagctgctatgctgatagaacgatcgtccgactttgggaaaacctggggtgtgtatagatacttcgcctatgactgtgaggcctcgtttccaggcatttcaactggccccatgaaaaaagtcgatgacataatttgtgattctcgatattctgacattgaaccctcaactgaaggagaggtgatatttcgtgctttagatcctgctttcaaaatagaagatccttatagcccaaggatacagaatttattaaaaattaccaacttgagaatcaagtttgtgaaactgcatactttgggagataaccttctggattccaggatggaaatcagagaaaagtattattatgcagtttatgatatggtggttcgaggaaattgcttctgctatggtcatgccagcgaatgtgcccctgtggatggattcaatgaagaagtggaaggaatggttcacggacactgcatgtgcaggcataacaccaagggcttaaactgtgaactctgcatggatttctaccatgatttaccttggagacctgctgaaggccgaaacagcaacgcctgtaaaaaatgtaactgcaatgaacattccatctcttgtcactttgacatggctgtttacctggccacggggaacgtcagcggaggcgtgtgtgatgactgtcagcacaacaccatggggcgcaactgtgagcagtgcaagccgttttactaccagcacccagagagggacatccgagatcctaatttctgtgaacgatgtacgtgtgacccagctggctctcaaaatgagggaatttgtgacagctatactgatttttctactggtctcattgctggccagtgtcggtgtaaattaaatgtggaaggagaacattgtgatgtttgcaaagaaggcttctatgatttaagcagtgaagatccatttggttgtaaatcttgtgcttgcaatcctctgggaacaattcctggagggaatccttgtgattccgagacaggtcactgctactgcaagcgtctggtgacaggacagcattgtgaccagtgcctgccagagcactggggcttaagcaatgatttggatggatgtcgaccatgtgactgtgaccttgggggagccttaaacaacagttgctttgcggagtcaggccagtgctcatgccggcctcacatgattggacgtcagtgcaacgaagtggaacctggttactactttgccaccctggatcactacctctatgaagcggaggaagccaacttggggcctggggttagcatagtggagcggcaatatatccaggaccggattccctcctggactggagccggcttcgtccgagtgcctgaaggggcttatttggagtttttcattgacaacataccatattccatggagtacgacatcctaattcgctacgagccacagctacccgaccactgggaaaaagctgtcatcacagtgcagcgacctggaaggattccaaccagcagccgatgtggtaataccatccccgatgatgacaaccaggtggtgtcattatcaccaggctcaagatatgtcgtccttcctcggccggtgtgctttgagaagggaacaaactacacggtgaggttggagctgcctcagtacacctcctctgatagcgacgtggagagcccctacacgctgatcgattctcttgttctcatgccatactgtaaatcactggacatcttcaccgtgggaggttcaggagatggggtggtcaccaacagtgcctgggaaacctttcagagataccgatgtctagagaacagcagaagcgttgtgaaaacaccgatgacagatgtttgcagaaacatcatctttagcatttctgccctgttacaccagacaggcctggcttgtgaatgcgaccctcagggttcgttaagttccgtgtgtgatcccaacggaggccagtgccagtgccggcccaacgtggttggaagaacctgcaacagatgtgcacctggaacttttggctttggccccagtggatgcaaaccttgtgagtgccatctgcaaggatctgtcaatgccttctgcaatcccgtcactggccagtgccactgtttccagggagtgtatgctcggcagtgtgatcggtgcttacctgggcactggggctttccaagttgccagccctgccagtgcaatggccacgccgatgactgcgacccagtgactggggagtgcttgaactgccaggactacaccatgggtcataactgtgaaaggtgcttggctggttactatggcgaccccatcattgggtcaggtgatcactgccgcccttgcccttgcccagatggtcccgacagtggacgccagtttgccaggagctgctaccaagatcctgttactttacagcttgcctgtgtttgtgatcctggatacattggttccagatgtgacgactgtgcctcaggatactttggcaatccatcagaagttggggggtcgtgtcagccttgccagtgtcacaacaacattgacacgacagacccagaagcctgtgacaaggagactgggaggtgtctcaagtgcctgtaccacacggaaggggaacactgtcagttctgccggtttggatactatggtgatgccctccggcaggactgtcgaaagtgtgtctgtaattacctgggcaccgtgcaagagcactgtaacggctctgactgccagtgcgacaaagccactggtcagtgcttgtgtcttcctaatgtgatcgggcagaactgtgaccgctgtgcgcccaatacctggcagctggccagtggcactggctgtgacccatgcaactgcaatgctgctcattccttcgggccatcttgcaatgagttcacggggcagtgccagtgcatgcctgggtttggaggccgcacctgcagcgagtgccaggaactcttctggggagaccccgacgtggagtgccgagcctgtgactgtgaccccaggggcattgagacgccacagtgtgaccagtccacgggccagtgtgtctgcgttgagggtgttgagggtccacgctgtgacaagtgcacgcgagggtactcgggggtcttccctgactgcacaccctgccaccagtgctttgctctctgggatgtgatcattgccgagctgaccaacaggacacacagattcctggagaaagccaaggccttgaagatcagtggtgtgatcgggccttaccgtgagactgtggactcggtggagaggaaagtcagcgagataaaagacatcctggcgcagagccccgcagcagagccactgaaaaacattgggaatctctttgaggaagcagagaaactgattaaagatgttacagaaatgatggctcaagtagaagtgaaattatctgacacaacttcccaaagcaacagcacagccaaagaactggattctctacagacagaagccgaaagcctagacaacactgtgaaagaacttgctgaacaactggaatttatcaaaaactcagatattcggggtgccttggatagcattaccaagtatttccagatgtctcttgaggcagaggagagggtgaatgcctccaccacagaacccaacagcactgtggagcagtcagccctcatgagagacagagtagaagacgtgatgatggagcgagaatcccagttcaaggaaaaacaagaggagcaggctcgcctccttgatgaactggcaggcaagctacaaagcctagacctttcagccgctgccgaaatgacctgtggaacacccccaggggcctcctgttccgagactgaatgtggcgggccaaactgcagaactgacgaaggagagaggaagtgtggggggcctggctgtggtggtctggttactgttgcacacaacgcctggcagaaagccatggacttggaccaagatgtcctgagtgccctggctgaagtggaacagctctccaagatggtctctgaagcaaaactgagggcagatgaggcaaaacaaagtgctgaagacattctgttgaagacaaatgctaccaaagaaaaaatggacaagagcaatgaggagctgagaaatctaatcaagcaaatcagaaactttttgacccaggatagtgctgatttggacagcattgaagcagttgctaatgaagtattgaaaatggagatgcctagcaccccacagcagttacagaacttgacagaagatatacgtgaacgagttgaaagcctttctcaagtagaggttattcttcagcatagtgctgctgacattgccagagctgagatgttgttagaagaagctaaaagagcaagcaaaagtgcaacagatgttaaagtcactgcagatatggtaaaggaagctctggaagaagcagaaaaggcccaggtcgcagcagagaaggcaattaaacaagcagatgaagacattcaaggaacccagaacctgttaacttcgattgagtctgaaacagcagcttctgaggaaaccttgttcaacgcgtcccagcgcatcagcgagttagagaggaatgtggaagaacttaagcggaaagctgcccaaaactccggggaggcagaatatattgaaaaagtagtatatactgtgaagcaaagtgcagaagatgttaagaagactttagatggtgaacttgatgaaaagtataaaaaagtagaaaatttaattgccaaaaaaactgaagagtcagctgatgccagaaggaaagccgaaatgctacaaaatgaagcaaaaactcttttagctcaagcaaatagcaagctgcaactgctcaaagatttagaaagaaaatatgaagacaatcaaagatacttagaagataaagctcaagaattagcaagactggaaggagaagtccgttcactcctaaaggatataagccagaaagttgctgtgtatagcacatgcttgtaacagaggagaataaaaaatggctgaggtgaacaaggtaaaacaactacattttaaaaactgacttaatgctcttcaaaataaaacatcacctatttaatgtttttaatcacattttgtatgagttaaataaagccc

SEQ ID NO: 13919 - DNA, 5130 bp, Homo sapiens
cacgtgatcgcgcctagggagaaaacgtctgactccagccaccggccttcaaggcacggctttttattccttcggctggtcggcctctcgcccttcagctacctgtgcgtccctccgtcccgtcccgtcccggggtcaccccggagcctgtccgctatgcggctcctgcctctagccccaggtcggctccggcggggcagcccccgccacctgccctcctgcagcccagcgctgctactgctggtgctgggcggctgcctgggggtcttcggggtggctgcgggaacccggaggcccaacgtggtgctgctcctcacggacgaccaggacgaagtgctcggcggcatgacaccgctaaagaaaaccaaagctctcatcggagagatggggatgactttttccagtgcttatgtgccaagtgctctctgctgccccagcagagccagtatcctgacaggaaagtacccacataatcatcacgttgtgaacaacactctggaggggaactgcagtagtaagtcctggcagaagatccaagaaccaaatactttcccagcaattctcagatcaatgtgtggttatcagaccttttttgcagggaaatatttaaatgagtacggagccccagatgcaggtggactagaacacgttcctctgggttggagttactggtatgccttggaaaagaattctaagtattataattacaccctgtctatcaatgggaaggcacggaagcatggtgaaaactatagtgtggactacctgacagatgttttggctaatgtctccttggactttctggactacaagtccaactttgagcccttcttcatgatgatcgccactccagcgcctcattcgccttggacagctgcacctcagtaccagaaggctttccagaatgtctttgcaccaagaaacaagaacttcaacatccatggaacgaacaagcactggttaattaggcaagccaagactccaatgactaattcttcaatacagtttttagataatgcatttaggaaaaggtggcaaactctcctctcagttgatgaccttgtggagaaactggtcaagaggctggagttcactggggagctcaacaacacttacatcttctatacctcagacaatggctatcacacaggacagttttccttgccaatagacaagagacagctgtatgagtttgatatcaaagttccactgttggttcgaggacctgggatcaaaccaaatcagacaagcaagatgctggttgccaacattgacttgggtcctactattttggacattgctggctacgacctaaataagacacagatggatgggatgtccttattgcccattttgagaggtgccagtaacttgacctggcgatcagatgtcctggtggaataccaaggagaaggccgtaacgtcactgacccaacatgcccttccctgagtcctggcgtatctcaatgcttcccagactgtgtatgtgaagatgcttataacaatacctatgcctgtgtgaggacaatgtcagcattgtggaatttgcagtattgcgagtttgatgaccaggaggtgtttgtagaagtctataatctgactgcagacccagaccagatcactaacattgctaaaaccatagacccagagcttttaggaaagatgaactatcggttaatgatgttacagtcctgttctgggccaacctgtcgcactccaggggtttttgaccccggatacaggtttgacccccgtctcatgttcagcaatcgcggcagtgtcaggactcgaagattttccaaacatcttctgtagcgacctcacacagcctctgcagatggatccctgcacgcctctttctgatgaagtgattgtagtaggtgtctgtagctagtcttcaagaccacacctggaagagtttctgggctggctttaagtcctgtttgaaaaagcaacccagtcagctgacttcctcgtgcaatgtgttaaactgtgaactctgcccatgtgtcaggagtggctgtctctggtctcttcctttagctgacaaggacactcctgaggtctttgttctcactgtattctttttatcctggggccacagttcttgattattcctcttgtggttaaagactgaatttgtaaacccattcagataaatggcagtactttaggacacacacaaacacacagacacaccttttgatatgtaagcttgacctaaagtcaaaggacctgtgtagcatttcagattgagcacttcactatcaaaaatactaacatcacatggcttgaagagtaaccatcagagctgaatcatccaagtaagaacaagtaccattgttgattgataagtagagatacattttttatgatgttcatcacagtgtggtaaggttgcaaattcaaaacatgtcacccaagctctgttcatgtttttgtgaattctaggctggtgctgcactgaaatagagcagtaagcttgtgataaaggccaattccaggtagctcttgaaggtgatagccatctactttccagtggctgccaaccacagggagtgccagttaacactggaaggattaaggcaaggtcccttctcttgagactcccctctgagatctgaaaaatgaagtggcttaggaacatcagcagtgaagaactgccaagagttggtgaaggttgtctcttccgagggccttctgaagacagggctcttgaacagacaagtggaagggctgtaccagggataaaggaaagaagtgcctgtccagcagggagcttgaatttaagttccatgtatgaagtcattggctctatctgcatttttctgtcattctcttcatttgttttaaggtggaaaattttcttacagttgatgcaaagtatcaactactttaccctaccttctccccttttagatgggttcttcctgagttttggagtcttgtatgattatcagtattcccctgtcaaaatcaaatctattcaggtttcttcactgttgagaacacctaaatgtttttatttttgagaagtggggacagagtctcactatgtcacccaggctggagtgcaatggcatgatctcagctcactgcaaccttcgcctcctgggttcaagcgattctcctgcctccgcctcctgagtagctgggattataggcacgcaccaccacgcccagctaattttttgtatttttagtagagacagagtttcaccatgttggccaggctggtcttgaactcctgaccttgtgatccacccacctcggcctcccagagtgctgggattacaggcatgagccaccacgcttggctaagaacacctaaatttttatgtttcttggctcaaaaaccagttccatttctaatgttgtcctcacaagaaggctaattggtggtgagacagcaggggaggaggaagagctgtggtttgtaacttgttcaactcaggcaataagcgattttagctttatttaaagtcttctgtccagctttaagcactttgtaagacatggctgaaagtagcttttctatcagaattgcagatagtcatgttgggctaacagtcaattggatatattcctttacctcacatgaccccagcaactgtggtggtatctagaggtgaaacaggcaagtgaaatggacacctctgctgtgaatgttttagagaaggaaattcaaaaaatgttgtaactgaaagcactgttgaatatgggtatcggctttctttttcactttgactcttaacattatcagtcaacttccacattaatgaaagttgaccatagttatttccaaataaaaagaaaccaactcttaccaggtcttggactgtgatgtcatattattcagttttatgcttgttcctgagcagaactcataagagtgacatagtcagctgctgacggcacctcagccacgccactcttactcagttcagtgggtgtgcttgcgtggtaggatgtggtgcagccctctctacgctcttctatttttggtatatttcctatctaaccttcaaatagcttccaattctttttttcttggactggcttcattctgaatttgtgctaaaataatctttcataaagagacctcagtttatagcgtaacagactacacaatgcactgatgttttcataatgtttaagggacccactgcaagaagcttgctgcctccttttaattgtattcatttagattttgattttccatgttaagaaggtgaggtccatgttggtgcccttcagagtagagaaccatgtaaacattaggaatgaacagaggccttaggaatgaatagagagtttgccttatacaatttcctgttacaaagctctccctctcatgcaaagtagggaacaccttttgagcatctttgaatttgacaaatggtgctgttgcaaacactttttttttgagatgaagtctcgcggttgtcacccgggctggagtgcagtggcgtgatctcggctcactgcaacttccacctcctgggttccagcagttctcctgcctcagcctcccaagtagctgagattacaggcgcctgccaccccacctggctgatttttgtaattttagtagagacggggtttcaccatgttggccaggctgattaactcctgacctcaggtgatccacctttctcggcctcccaaagtgctgggattacgggtgtgagccaccgtgcccggcctgcaaacacattttaattgacaacactagggctgttgtacaaaatagtaatgatagccatggaagttttaccttattctgtgagaagtgttcttaaacttattaagtgtctaaactaaggtttagtgcttttttaaaggaaagttgtcccaggattcatcctaaagaaagcaaaagttaattcaactgatccaccaatggaattagatgggtagagttgggttcttgagttttaccaccacttagttcccactgaattttgtaacttcctgtgtttgcatcctctgttcctattctgcccttgctctgtgtcatctcagtcatttgacttagaaagtgcccttcaaaaggaccctgttcactgctgcacttttcaatgaattaaaatttatttctgttctagtgggaaaaaaaaaaaaaaaaaa

SEQ ID NO: 13920 - DNA, 1031 bp, Homo sapiens
cagctgttaccgcgtcacatgagggaggccggcggccactcggcgggggaggggaccgtggctggagcccggggcggggccgcgcggcaggcggggcgggagccggggggcgcagctagagagccccggagccgcggcgggagaggaacgcgcagccagccttgggaagcccaggcccggcagccatggcggtggaaggaggaatgaaatgtgtgaagttcttgctctacgtcctcctgctggccttttgcgcctgtgcagtgggactgattgccgtgggtgtcggggcacagcttgtcctgagtcagaccataatccagggggctacccctggctctctgttgccagtggtcatcatcgcagtgggtgtcttcctcttcctggtggcttttgtgggctgctgcggggcctgcaaggagaactattgtcttatgatcacgtttgccatctttctgtctcttatcatgttggtggaggtggccgcagccattgctggctatgtgtttagagataaggtgatgtcagagtttaataacaacttccggcagcagatggagaattacccgaaaaacaaccacactgcttcgatcctggacaggatgcaggcagattttaagtgctgtggggctgctaactacacagattgggagaaaatcccttccatgtcgaagaaccgagtccccgactcctgctgcattaatgttactgtgggctgtgggattaatttcaacgagaaggcgatccataaggagggctgtgtggagaagattgggggctggctgaggaaaaatgtgctggtggtagctgcagcagcccttggaattgcttttgtcgaggttttgggaattgtctttgcctgctgcctcgtgaagagtatcagaagtggctacgaggtgatgtaggggtctggtctcctcagcctcctcatctgggggagtggaatagtatcctccaggtttttcaattaaacggattattttttcagaccgaaaagagatggtctgagtttgtcttagaaaaaaaaaaaaaaa

SEQ ID NO: 13921 - DNA, 2390 bp, Homo sapiens
gtggccgtccaggccccgccccgcagcccagccggaagggccggcggacgctcgctaggtcggctcgctggccggggctccgcggctcccgtggttgccatggcggcggttgtcgcggcgacgaggtggtggcagctgttgctggtgctcagcgccgcggggatgggggcctcgggcgccccgcagccccccaacatcctgctcctgctcatggacgacatgggatggggtgacctcggggtgtatggagagccctccagagagaccccgaatttggaccggatggctgcagaagggctgcttttcccaaacttctattctgccaaccctctgtgctcgccatcgagggcggcactgctcacaggacggctacccatccgcaatggcttctacaccaccaacgcccatgccagaaacgcctacacaccgcaggagattgtgggcggcatcccagactcggagcagctcctgccggagcttctgaagaaggccggctacgtcagcaagattgtcggcaagtggcatctgggtcacaggccccagttccaccccctgaagcacggatttgatgagtggtttggatcccccaactgccactttggaccttatgacaacaaggccaggcccaacatccctgtgtacagggactgggagatggttggcagatattatgaagaatttcctattaatctgaagacgggggaagccaacctcacccagatctacctgcaggaagccctggacttcattaagagacaggcacggcaccacccctttttcctctactgggctgtcgacgccacgcacgcacccgtctatgcctccaaacccttcttgggcaccagtcagcgagggcggtatggagacgccgtccgggagattgatgacagcattgggaagatactggagctcctccaagacctgcacgtcgcggacaacaccttcgtcttcttcacgtcggacaacggcgctgccctcatttccgcccccgaacaaggtggcagcaacggcccctttctgtgtgggaagcagaccacgtttgaaggagggatgagggagcctgccctcgcatggtggccagggcacgtcactgcaggccaggtgagccaccagctgggcagcatcatggacctcttcaccaccagcctggcccttgcgggcctgacgccgcccagcgacagggccattgatggcctcaacctcctccccaccctcctgcagggccggctgatggacaggcctatcttctattaccgtggcgacacgctgatggcggccaccctcgggcagcacaaggctcacttctggacctggaccaactcctgggagaacttcagacagggcattgatttctgccctgggcagaacgtttcaggggtcacaactcacaatctggaagaccacacgaagctgcccctgatcttccacctgggacgggacccaggggagaggttccccctcagctttgccagcgccgagtaccaggaggccctcagcaggatcacctcggtcgtccagcagcaccaggaggccttggtccccgcgcagccccagctcaacgtgtgcaactgggcggtcatgaactgggcacctccgggctgtgaaaagttagggaagtgtctgacacctccagaatccattcccaagaagtgcctctggtcccactagcacctgcgcagactcaggccaggcctagaatctccggttggccctgcaagtgcctggaggaaggatggctctggcctcggtcctcccccaaccctgcccaagccagacagacagcacctgcagacgcagggggactgcacaattccacctgcccaggacctgaccctggcgtgtgcttggccctcctcctcgcccacggcgcctcagatttcaggaccctcctcctcgcccacggcgcctcagacctcaggaccctgccgtctcacgcctttgtgaaccccaaatatctgagaccagtctcagtttattttgccaaggttaaggatgcacctgtgacagcctcaggaggtcctgacaacaggtgcctgaggtggctggggatacagtttgcctttatacatcttagggagacacaagatcagtatgtgtatggcgtacattggttcagtcagccttccactgaatacacgattgagtctggcccagtgaatccgcatttttatgtaaacagtaagggaacggggcaatcatataagcgtttgtctcaggggagccccagagggatgacttccagttccgtctgtcctttgtccacaaggaatttccctggacgctaattatgagggaggcgtgtagcttcttatcattgtaactatgttatttagaaataaaacgggaggcaggtttgcctaattcccagcttgaaaaaaaaaaaaaaaaaa

SEQ ID NO: 13922 - DNA, 4065 bp, Homo sapiens
gcgagcgaagggagcgctctgggatgggacttggagcaagcggcggcggcggagacagaggcagaggcagaagctggggctccgtcctcgcctcccacgagcgatccccgaggagagccgcggccctcggcgaggcgaagaggccgacgaggaagacccgggtggctgcgcccctgcctcgcttcccaggcgccggcggctgcagccttgcccctcttgctcgccttgaaaatggaaaagatgctcgcaggctgctttctgctgatcctcggacagatcgtcctcctccctgccgaggccagggagcggtcacgtgggaggtccatctctaggggcagacacgctcggacccacccgcagacggcccttctggagagttcctgtgagaacaagcgggcagacctggttttcatcattgacagctctcgcagtgtcaacacccatgactatgcaaaggtcaaggagttcatcgtggacatcttgcaattcttggacattggtcctgatgtcacccgagtgggcctgctccaatatggcagcactgtcaagaatgagttctccctcaagaccttcaagaggaagtccgaggtggagcgtgctgtcaagaggatgcggcatctgtccacgggcaccatgactgggctggccatccagtatgccctgaacatcgcattctcagaagcagagggggcccggcccctgagggagaatgtgccacgggtcataatgatcgtgacagatgggagacctcaggactccgtggccgaggtggctgctaaggcacgggacacgggcatcctaatctttgccattggtgtgggccaggtagacttcaacaccttgaagtccattgggagtgagccccatgaggaccatgtcttccttgtggccaatttcagccagattgagacgctgacctccgtgttccagaagaagttgtgcacggcccacatgtgcagcaccctggagcataactgtgcccacttctgcatcaacatccctggctcatacgtctgcaggtgcaaacaaggctacattctcaactcggatcagacgacttgcagaatccaggatctgtgtgccatggaggaccacaactgtgagcagctctgtgtgaatgtgccgggctccttcgtctgccagtgctacagtggctacgccctggctgaggatgggaagaggtgtgtggctgtggactactgtgcctcagaaaaccacggatgtgaacatgagtgtgtaaatgctgatggctcctacctttgccagtgccatgaaggatttgctcttaacccagataaaaaaacgtgcacaaagatagactactgtgcctcatctaatcacggatgtcagcacgagtgtgttaacacagatgattcctattcctgccactgcctgaaaggctttaccctgaatccagataagaaaacctgcagaaggatcaactactgtgcactgaacaaaccgggctgtgagcatgagtgcgtcaacatggaggagagctactactgccgctgccaccgtggctacactctggaccccaatggcaaaacctgcagccgagtggaccactgtgcacagcaggaccatggctgtgagcagctgtgtctgaacacggaggattccttcgtctgccagtgctcagaaggcttcctcatcaacgaggacctcaagacctgctcccgggtggattactgcctgctgagtgaccatggttgtgaatactcctgtgtcaacatggacagatcctttgcctgtcagtgtcctgagggacacgtgctccgcagcgatgggaagacgtgtgcaaaattggactcttgtgctctgggggaccacggttgtgaacattcgtgtgtaagcagtgaagattcgtttgtgtgccagtgctttgaaggttatatactccgtgaagatggaaaaacctgcagaaggaaagatgtctgccaagctatagaccatggctgtgaacacatttgtgtgaacagtgatgactcatacacgtgcgagtgcttggagggattccggctcgctgaggatgggaaacgctgccgaaggaaggatgtctgcaaatcaacccaccatggctgcgaacacatttgtgttaataatgggaattcctacatctgcaaatgctcagagggatttgttctagctgaggacggaagacggtgcaagaaatgcactgaaggcccaattgacctggtctttgtgatcgatggatccaagagtcttggagaagagaattttgaggtcgtgaagcagtttgtcactggaattatagattccttgacaatttcccccaaagccgctcgagtggggctgctccagtattccacacaggtccacacagagttcactctgagaaacttcaactcagccaaagacatgaaaaaagccgtggcccacatgaaatacatgggaaagggctctatgactgggctggccctgaaacacatgtttgagagaagttttacccaaggagaaggggccaggcccctttccacaagggtgcccagagcagccattgtgttcaccgacggacgggctcaggatgacgtctccgagtgggccagtaaagccaaggccaatggtatcactatgtatgctgttggggtaggaaaagccattgaggaggaactacaagagattgcctctgagcccacaaacaagcatctcttctatgccgaagacttcagcacaatggatgagataagtgaaaaactcaagaaaggcatctgtgaagctctagaagactccgatggaagacaggactctccagcaggggaactgccaaaaacggtccaacagccaacagtgcaacacagatatctgtttgaagaagacaatcttttacggtctacacaaaagctttcccattcaacaaaaccttcaggaagccctttggaagaaaaacacgatcaatgcaaatgtgaaaaccttataatgttccagaaccttgcaaacgaagaagtaagaaaattaacacagcgcttagaagaaatgacacagagaatggaagccctggaaaatcgcctgagatacagatgaagattagaaatcgcgacacatttgtagtcattgtatcacggattacaatgaacgcagtgcagagccccaaagctcaggctattgttaaatcaataatgttgtgaagtaaaacaatcagtactgagaaacctggtttgccacagaacaaagacaagaagtatacactaacttgtataaatttatctaggaaaaaaatccttcagaattctaagatgaatttaccaggtgagaatgaataagctatgcaaggtattttgtaatatactgtggacacaacttgcttctgcctcatcctgccttagtgtgcaatctcatttgactatacgataaagtttgcacagtcttacttctgtagaacactggccataggaaatgctgtttttttgtactggactttaccttgatatatgtatatggatgtatgcataaaatcataggacatatgtacttgtggaacaagttggattttttatacaatattaaaattcaccacttcagagaatggtattcagtgcaaaaattcttagtttaactttaaatggaagatatgtatgtatgagaaatggccaacatgcctatgaaaaaaatgctgaatctcatcagtaatcaggaaaatgcaggttaaaacaataccatttttcacccatcagcttagcaaaaatgagtatattttttaacaagtgttggtaaggatgtggaaatgtgaggttcttgtagtaagaatgcaaatggcactctttgtagagtaagtctgttgacatctcataaaactgaaaatgcacacaaccctgtaaatctagcaactgcactcagttgatttcagcccatacatacaaagagacctgcataagaatgttactaggctttgtaaaagcaaaaaataaggaacaacttaaacatcatcagaaggggaactgataaactctggtgtaatccataccacagaaatacaacaccgcatgtacaggaatgtgctacatctatacaaataaatggtcaaactcaaaaaaaaaaaaaaaa

SEQ ID NO: 13923 - DNA, 4122 bp, Homo sapiens
gcgagcgaagggagcgctctgggatgggacttggagcaagcggcggcggcggagacagaggcagaggcagaagctggggctccgtcctcgcctcccacgagcgatccccgaggagagccgcggccctcggcgaggcgaagaggccgacgaggaagacccgggtggctgcgcccctgcctcgcttcccaggcgccggcggctgcagccttgcccctcttgctcgccttgaaaatggaaaagatgctcgcaggctgctttctgctgatcctcggacagatcgtcctcctccctgccgaggccagggagcggtcacgtgggaggtccatctctaggggcagacacgctcggacccacccgcagacggcccttctggagagttcctgtgagaacaagcgggcagacctggttttcatcattgacagctctcgcagtgtcaacacccatgactatgcaaaggtcaaggagttcatcgtggacatcttgcaattcttggacattggtcctgatgtcacccgagtgggcctgctccaatatggcagcactgtcaagaatgagttctccctcaagaccttcaagaggaagtccgaggtggagcgtgctgtcaagaggatgcggcatctgtccacgggcaccatgactgggctggccatccagtatgccctgaacatcgcattctcagaagcagagggggcccggcccctgagggagaatgtgccacgggtcataatgatcgtgacagatgggagacctcaggactccgtggccgaggtggctgctaaggcacgggacacgggcatcctaatctttgccattggtgtgggccaggtagacttcaacaccttgaagtccattgggagtgagccccatgaggaccatgtcttccttgtggccaatttcagccagattgagacgctgacctccgtgttccagaagaagttgtgcacggcccacatgtgcagcaccctggagcataactgtgcccacttctgcatcaacatccctggctcatacgtctgcaggtgcaaacaaggctacattctcaactcggatcagacgacttgcagaatccaggatctgtgtgccatggaggaccacaactgtgagcagctctgtgtgaatgtgccgggctccttcgtctgccagtgctacagtggctacgccctggctgaggatgggaagaggtgtgtggctgtggactactgtgcctcagaaaaccacggatgtgaacatgagtgtgtaaatgctgatggctcctacctttgccagtgccatgaaggatttgctcttaacccagataaaaaaacgtgcacaaagatagactactgtgcctcatctaatcacggatgtcagcacgagtgtgttaacacagatgattcctattcctgccactgcctgaaaggctttaccctgaatccagataagaaaacctgcagaaggatcaactactgtgcactgaacaaaccgggctgtgagcatgagtgcgtcaacatggaggagagctactactgccgctgccaccgtggctacactctggaccccaatggcaaaacctgcagccgagtggaccactgtgcacagcaggaccatggctgtgagcagctgtgtctgaacacggaggattccttcgtctgccagtgctcagaaggcttcctcatcaacgaggacctcaagacctgctcccgggtggattactgcctgctgagtgaccatggttgtgaatactcctgtgtcaacatggacagatcctttgcctgtcagtgtcctgagggacacgtgctccgcagcgatgggaagacgtgtgcaaaattggactcttgtgctctgggggaccacggttgtgaacattcgtgtgtaagcagtgaagattcgtttgtgtgccagtgctttgaaggttatatactccgtgaagatggaaaaacctgcagaaggaaagatgtctgccaagctatagaccatggctgtgaacacatttgtgtgaacagtgatgactcatacacgtgcgagtgcttggagggattccggctcgctgaggatgggaaacgctgccgaaggaaggatgtctgcaaatcaacccaccatggctgcgaacacatttgtgttaataatgggaattcctacatctgcaaatgctcagagggatttgttctagctgaggacggaagacggtgcaagaaatgcactgaaggcccaattgacctggtctttgtgatcgatggatccaagagtcttggagaagagaattttgaggtcgtgaagcagtttgtcactggaattatagattccttgacaatttcccccaaagccgctcgagtggggctgctccagtattccacacaggtccacacagagttcactctgagaaacttcaactcagccaaagacatgaaaaaagccgtggcccacatgaaatacatgggaaagggctctatgactgggctggccctgaaacacatgtttgagagaagttttacccaaggagaaggggccaggcccctttccacaagggtgcccagagcagccattgtgttcaccgacggacgggctcaggatgacgtctccgagtgggccagtaaagccaaggccaatggtatcactatgtatgctgttggggtaggaaaagccattgaggaggaactacaagagattgcctctgagcccacaaacaagcatctcttctatgccgaagacttcagcacaatggatgagataagtgaaaaactcaagaaaggcatctgtgaagctctagaagactccgatggaagacaggactctccagcaggggaactgccaaaaacggtccaacagccaacagaatctgagccagtcaccataaatatccaagacctactttcctgttctaattttgcagtgcaacacagatatctgtttgaagaagacaatcttttacggtctacacaaaagctttcccattcaacaaaaccttcaggaagccctttggaagaaaaacacgatcaatgcaaatgtgaaaaccttataatgttccagaaccttgcaaacgaagaagtaagaaaattaacacagcgcttagaagaaatgacacagagaatggaagccctggaaaatcgcctgagatacagatgaagattagaaatcgcgacacatttgtagtcattgtatcacggattacaatgaacgcagtgcagagccccaaagctcaggctattgttaaatcaataatgttgtgaagtaaaacaatcagtactgagaaacctggtttgccacagaacaaagacaagaagtatacactaacttgtataaatttatctaggaaaaaaatccttcagaattctaagatgaatttaccaggtgagaatgaataagctatgcaaggtattttgtaatatactgtggacacaacttgcttctgcctcatcctgccttagtgtgcaatctcatttgactatacgataaagtttgcacagtcttacttctgtagaacactggccataggaaatgctgtttttttgtactggactttaccttgatatatgtatatggatgtatgcataaaatcataggacatatgtacttgtggaacaagttggattttttatacaatattaaaattcaccacttcagagaatggtattcagtgcaaaaattcttagtttaactttaaatggaagatatgtatgtatgagaaatggccaacatgcctatgaaaaaaatgctgaatctcatcagtaatcaggaaaatgcaggttaaaacaataccatttttcacccatcagcttagcaaaaatgagtatattttttaacaagtgttggtaaggatgtggaaatgtgaggttcttgtagtaagaatgcaaatggcactctttgtagagtaagtctgttgacatctcataaaactgaaaatgcacacaaccctgtaaatctagcaactgcactcagttgatttcagcccatacatacaaagagacctgcataagaatgttactaggctttgtaaaagcaaaaaataaggaacaacttaaacatcatcagaaggggaactgataaactctggtgtaatccataccacagaaatacaacaccgcatgtacaggaatgtgctacatctatacaaataaatggtcaaactcaaaaaaaaaaaaaaaa

SEQ ID NO: 13924 - DNA, 1464 bp, Homo sapiens
agccccaagcttaccacctgcacccggagagctgtgtcaccatgtgggtcccggttgtcttcctcaccctgtccgtgacgtggattggtgctgcacccctcatcctgtctcggattgtgggaggctgggagtgcgagaagcattcccaaccctggcaggtgcttgtggcctctcgtggcagggcagtctgcggcggtgttctggtgcacccccagtgggtcctcacagctgcccactgcatcaggaacaaaagcgtgatcttgctgggtcggcacagcctgtttcatcctgaagacacaggccaggtatttcaggtcagccacagcttcccacacccgctctacgatatgagcctcctgaagaatcgattcctcaggccaggtgatgactccagccacgacctcatgctgctccgcctgtcagagcctgccgagctcacggatgctgtgaaggtcatggacctgcccacccaggagccagcactggggaccacctgctacgcctcaggctggggcagcattgaaccagaggagttcttgaccccaaagaaacttcagtgtgtggacctccatgttatttccaatgacgtgtgtgcgcaagttcaccctcagaaggtgaccaagttcatgctgtgtgctggacgctggacagggggcaaaagcacctgctcgggtgattctgggggcccacttgtctgtaatggtgtgcttcaaggtatcacgtcatggggcagtgaaccatgtgccctgcccgaaaggccttccctgtacaccaaggtggtgcattaccggaagtggatcaaggacaccatcgtggccaacccctgagcacccctatcaaccccctattgtagtaaacttggaaccttggaaatgaccaggccaagactcaagcctccccagttctactgacctttgtccttaggtgtgaggtccagggttgctaggaaaagaaatcagcagacacaggtgtagaccagagtgtttcttaaatggtgtaattttgtcctctctgtgtcctggggaatactggccatgcctggagacatatcactcaatttctctgaggacacagataggatggggtgtctgtgttatttgtggggtacagagatgaaagaggggtgggatccacactgagagagtggagagtgacatgtgctggacactgtccatgaagcactgagcagaagctggaggcacaacgcaccagacactcacagcaaggatggagctgaaaacataacccactctgtcctggaggcactgggaagcctagagaaggctgtgagccaaggagggagggtcttcctttggcatgggatggggatgaagtaaggagagggactggaccccctggaagctgattcactatggggggaggtgtattgaagtcctccagacaaccctcagatttgatgatttcctagtagaactcacagaaataaagagctgttatactgtg

SEQ ID NO: 13925 - DNA, 3700 bp, Homo sapiens
agccgccgccacccgccgcgcccgacacccgggaggccccgccagcccgcgggagaggcccagcgggagtcgcggaacagcaggcccgagcccaccgcgccgggccccggacgccgcgcggaaaagatgaatttacaaccaattttctggattggactgatcagttcagtttgctgtgtgtttgctcaaacagatgaaaatagatgtttaaaagcaaatgccaaatcatgtggagaatgtatacaagcagggccaaattgtgggtggtgcacaaattcaacatttttacaggaaggaatgcctacttctgcacgatgtgatgatttagaagccttaaaaaagaagggttgccctccagatgacatagaaaatcccagaggctccaaagatataaagaaaaataaaaatgtaaccaaccgtagcaaaggaacagcagagaagctcaagccagaggatattactcagatccaaccacagcagttggttttgcgattaagatcaggggagccacagacatttacattaaaattcaagagagctgaagactatcccattgacctctactaccttatggacctgtcttactcaatgaaagacgatttggagaatgtaaaaagtcttggaacagatctgatgaatgaaatgaggaggattacttcggacttcagaattggatttggctcatttgtggaaaagactgtgatgccttacattagcacaacaccagctaagctcaggaacccttgcacaagtgaacagaactgcaccagcccatttagctacaaaaatgtgctcagtcttactaataaaggagaagtatttaatgaacttgttggaaaacagcgcatatctggaaatttggattctccagaaggtggtttcgatgccatcatgcaagttgcagtttgtggatcactgattggctggaggaatgttacacggctgctggtgttttccacagatgccgggtttcactttgctggagatgggaaacttggtggcattgttttaccaaatgatggacaatgtcacctggaaaataatatgtacacaatgagccattattatgattatccttctattgctcaccttgtccagaaactgagtgaaaataatattcagacaatttttgcagttactgaagaatttcagcctgtttacaaggagctgaaaaacttgatccctaagtcagcagtaggaacattatctgcaaattctagcaatgtaattcagttgatcattgatgcatacaattccctttcctcagaagtcattttggaaaacggcaaattgtcagaaggagtaacaataagttacaaatcttactgcaagaacggggtgaatggaacaggggaaaatggaagaaaatgttccaatatttccattggagatgaggttcaatttgaaattagcataacttcaaataagtgtccaaaaaaggattctgacagctttaaaattaggcctctgggctttacggaggaagtagaggttattcttcagtacatctgtgaatgtgaatgccaaagcgaaggcatccctgaaagtcccaagtgtcatgaaggaaatgggacatttgagtgtggcgcgtgcaggtgcaatgaagggcgtgttggtagacattgtgaatgcagcacagatgaagttaacagtgaagacatggatgcttactgcaggaaagaaaacagttcagaaatctgcagtaacaatggagagtgcgtctgcggacagtgtgtttgtaggaagagggataatacaaatgaaatttattctggcaaattctgcgagtgtgataatttcaactgtgatagatccaatggcttaatttgtggaggaaatggtgtttgcaagtgtcgtgtgtgtgagtgcaaccccaactacactggcagtgcatgtgactgttctttggatactagtacttgtgaagccagcaacggacagatctgcaatggccggggcatctgcgagtgtggtgtctgtaagtgtacagatccgaagtttcaagggcaaacgtgtgagatgtgtcagacctgccttggtgtctgtgctgagcataaagaatgtgttcagtgcagagccttcaataaaggagaaaagaaagacacatgcacacaggaatgttcctattttaacattaccaaggtagaaagtcgggacaaattaccccagccggtccaacctgatcctgtgtcccattgtaaggagaaggatgttgacgactgttggttctattttacgtattcagtgaatgggaacaacgaggtcatggttcatgttgtggagaatccagagtgtcccactggtccagacatcattccaattgtagctggtgtggttgctggaattgttcttattggccttgcattactgctgatatggaagcttttaatgataattcatgacagaagggagtttgctaaatttgaaaaggagaaaatgaatgccaaatgggacacgggtgaaaatcctatttataagagtgccgtaacaactgtggtcaatccgaagtatgagggaaaatgagtactgcccgtgcaaatcccacaacactgaatgcaaagtagcaatttccatagtcacagttaggtagctttagggcaatattgccatggttttactcatgtgcaggttttgaaaatgtacaatatgtataatttttaaaatgttttattattttgaaaataatgttgtaattcatgccagggactgacaaaagacttgagacaggatggttattcttgtcagctaaggtcacattgtgcctttttgaccttttcttcctggactattgaaatcaagcttattggattaagtgatatttctatagcgattgaaagggcaatagttaaagtaatgagcatgatgagagtttctgttaatcatgtattaaaactgatttttagctttacaaatatgtcagtttgcagttatgcagaatccaaagtaaatgtcctgctagctagttaaggattgttttaaatctgttattttgctatttgcctgttagacatgactgatgacatatctgaaagacaagtatgttgagagttgctggtgtaaaatacgtttgaaatagttgatctacaaaggccatgggaaaaattcagagagttaggaaggaaaaaccaatagctttaaaacctgtgtgccattttaagagttacttaatgtttggtaacttttatgccttcactttacaaattcaagccttagataaaagaaccgagcaattttctgctaaaaagtccttgatttagcactatttacatacaggccatactttacaaagtatttgctgaatggggaccttttgagttgaatttattttattatttttattttgtttaatgtctggtgctttctatcacctcttctaatcttttaatgtatttgtttgcaattttggggtaagacttttttatgagtactttttctttgaagttttagcggtcaatttgcctttttaatgaacatgtgaagttatactgtggctatgcaacagctctcacctacgcgagtcttactttgagttagtgccataacagaccactgtatgtttacttctcaccatttgagttgcccatcttgtttcacactagtcacattcttgttttaagtgcctttagttttaacagttcactttttacagtgctatttactgaagttatttattaaatatgcctaaaatacttaaatcgga

SEQ ID NO: 13926 - DNA, 2533 bp, Homo sapiens
gagccagcccagccgcgttccgaacgcgagggtcgccggcctgggcgctgtcacgtcggggctgccggagctgcgggggaccgggcccgaacggcccctgacacctgcggtctcccgccgggctgggcaagcgcagatgaatttacaaccaattttctggattggactgatcagttcagtttgctgtgtgtttgctcaaacagatgaaaatagatgtttaaaagcaaatgccaaatcatgtggagaatgtatacaagcagggccaaattgtgggtggtgcacaaattcaacatttttacaggaaggaatgcctacttctgcacgatgtgatgatttagaagccttaaaaaagaagggttgccctccagatgacatagaaaatcccagaggctccaaagatataaagaaaaataaaaatgtaaccaaccgtagcaaaggaacagcagagaagctcaagccagaggatattactcagatccaaccacagcagttggttttgcgattaagatcaggggagccacagacatttacattaaaattcaagagagctgaagactatcccattgacctctactaccttatggacctgtcttactcaatgaaagacgatttggagaatgtaaaaagtcttggaacagatctgatgaatgaaatgaggaggattacttcggacttcagaattggatttggctcatttgtggaaaagactgtgatgccttacattagcacaacaccagctaagctcaggaacccttgcacaagtgaacagaactgcaccagcccatttagctacaaaaatgtgctcagtcttactaataaaggagaagtatttaatgaacttgttggaaaacagcgcatatctggaaatttggattctccagaaggtggtttcgatgccatcatgcaagttgcagtttgtggatcactgattggctggaggaatgttacacggctgctggtgttttccacagatgccgggtttcactttgctggagatgggaaacttggtggcattgttttaccaaatgatggacaatgtcacctggaaaataatatgtacacaatgagccattattatgattatccttctattgctcaccttgtccagaaactgagtgaaaataatattcagacaatttttgcagttactgaagaatttcagcctgtttacaaggagctgaaaaacttgatccctaagtcagcagtaggaacattatctgcaaattctagcaatgtaattcagttgatcattgatgcatacaattccctttcctcagaagtcattttggaaaacggcaaattgtcagaaggagtaacaataagttacaaatcttactgcaagaacggggtgaatggaacaggggaaaatggaagaaaatgttccaatatttccattggagatgaggttcaatttgaaattagcataacttcaaataagtgtccaaaaaaggattctgacagctttaaaattaggcctctgggctttacggaggaagtagaggttattcttcagtacatctgtgaatgtgaatgccaaagcgaaggcatccctgaaagtcccaagtgtcatgaaggaaatgggacatttgagtgtggcgcgtgcaggtgcaatgaagggcgtgttggtagacattgtgaatgcagcacagatgaagttaacagtgaagacatggatgcttactgcaggaaagaaaacagttcagaaatctgcagtaacaatggagagtgcgtctgcggacagtgtgtttgtaggaagagggataatacaaatgaaatttattctggcaaattctgcgagtgtgataatttcaactgtgatagatccaatggcttaatttgtggaggaaatggtgtttgcaagtgtcgtgtgtgtgagtgcaaccccaactacactggcagtgcatgtgactgttctttggatactagtacttgtgaagccagcaacggacagatctgcaatggccggggcatctgcgagtgtggtgtctgtaagtgtacagatccgaagtttcaagggcaaacgtgtgagatgtgtcagacctgccttggtgtctgtgctgagcataaagaatgtgttcagtgcagagccttcaataaaggagaaaagaaagacacatgcacacaggaatgttcctattttaacattaccaaggtagaaagtcgggacaaattaccccagccggtccaacctgatcctgtgtcccattgtaaggagaaggatgttgacgactgttggttctattttacgtattcagtgaatgggaacaacgaggtcatggttcatgttgtggagaatccagagtgtcccactggtccagacatcattccaattgtagctggtgtggttgctggaattgttcttattggccttgcattactgctgatatggaagcttttaatgataattcatgacagaagggagtttgctaaatttgaaaaggagaaaatgaatgccaaatgggacacgggtgaaaatcctatttataagagtgccgtaacaactgtggtcaatccgaagtatgagggaaaatga

SEQ ID NO: 13927 - DNA, 2868 bp, Homo sapiens
cgggaggctgcgaggactgcaaaagggtggagtcggcctcgcccccgcccaggccccgcccctgccgggaacccactttcccagtcctaggcggcggtcagatccttgcaagcatggtcgcgccggggcttgtactcgggctggtgctgccattaatcctgtgggccgacagaagtgcaggtattggttttcgctttgcttcatacatcaataatgatatggtgctgcagaaggagcctgctggggcagtgatatggggcttcggtacacctggagccacagtgaccgtgaccctgcgccaaggtcaggaaaccatcatgaagaaagtgaccagtgtgaaagctcactctgatacgtggatggtggtactggatcctatgaagcctggaggacctttcgaagtgatggcacaacagactttggagaaaataaacttcaccctgagagttcatgacgtcctgtttggagatgtctggctctgtagtgggcagagtaacatgcagatgactgtgttacagatatttaatgctacaagggagttgtctaacactgcggcatatcagtctgtccgcatcctctctgtctctcccattcaagcagagcaggagctggaggaccttgttgcggttgacttgcagtggtctaagcccacctcagaaaacttaggccatggatatttcaagtacatgtcagcagtgtgctggctctttggacgtcacctttatgacactctgcagtatcccatcgggctgatcgcctccagctggggcgggacacccattgaagcctggtcatctggacggtcactgaaagcctgtggggtccctaaacaagggtccattccatacgattctgtaactggtcccagtaagcactctgttctctggaatgccatgatccatccactgtgcaatatgactctgaaaggggtagtatggtaccagggggagtccaatataaattataacacggatctgtacaattgcacattccctgcactcatcgaagactggcgtgaaaccttccaccgtggttcccaggggcagacggagcgtttcttcccatttggacttgtccagttatcttcagatttgtctaagaagagctcagacgatggatttccccagatccgttggcatcaaacagcagacttcggctatgtccccaacccaaagatgcccaatactttcatggctgtagctatggatctctgtgatagagactcgccttttggcagcatccaccctcgagataaacagactgtggcttatcggctgcatttgggggcccgtgctctggcttatggtgagaagaatttgacctttgaaggaccactgcctgagaagatagaactcttggctcacaaggggctgctcaatctcacatattaccagcaaatccaggtgcagaaaaaggacaacaagatatttgagatctcctgttgcagtgaccatcgatgcaagtggcttccagcttctatgaacaccgtctccacccagtccctgaccctggcgatcgattcttgtcatggcactgtggttgctctccgctatgcttggaccacgtggccttgtgaatataagcagtgtcccctataccaccccagtagtgccctgccagcccctcccttcattgctttcattacagaccagggtcctggacatcagagcaatgttgctaaatgactgtttcagtatgatcagaacttagatataaggatgggtccttcagattttagcatttaggagtttcaataataaccattgcttttaaaggaaattaatagaaagcctcattgaatggctttcagctagcacatggctgtttctatattctgatgagcccaggcttataggtaacttgaaatgcttgctttttgttccctagttggtctaagggtctgtattggactaattctgaactacagacaaattggacctcaatgtcatttacttccctcatattaatgggagtgaaatgtctaatacttttgcccctttttatccagagttgtgggaatctcaggattggaagagattttaaaggccacataggccagctagtgttcatgtgttctttataaaatttctcccatccaagtactaaccaggcccgaccctgcttagcttccgagatcagatgagatcaggcgcgttcagggtgatatggccgtagacgtctttacaaaattcctgacaggtggttactgaatctctctatgaactttccattcaaaactttccaagtttttccttatgtggaaccgaaatctttctttctcccgtgaaactttactactatcagataattgaagacagatctctttgtattctcttcaagcccaaaccaattctgttccttcaatctaaatagtggtaatatgaatgtttaagaaatgaaataagaaacatgtgcaggcactttggaaggtgctaagtgactgccctaaggaatgaaaagcaagggccaggtgggagtagcccagcgaaggcacttgggctgccaggaacaggaggcgtgggaaactctggcttaggaaaacatgaacacaggggcaacagaggcaaactgttgttcgagttaaatataaatctcaggctctttaaaggtaaaaggtttaaggataatccatttggaagaagaaaagagtgaggctgaaagtaaagccacatgacaagcatataaaaaaaaatgcagatgatacaaatatgaaagaggccttcagtgtttgtttattaagaatcttaatgcagtttactgatggattaaaaacagctaacattgtctgaaaattatgttacctataagaagttggaaataaataaaagcataatcactaaaaaaaaaaaaaaaaaaaaaaaaaaaaaa

SEQ ID NO: 13928 - DNA, 1504 bp, Homo sapiens
ccacgctcgtgccgccccccccgcgctcccagttgacgctctgggccgccacctccgcggaccctgagcgcaagagccaagccgccagcgctgcgatgtgggccacgctgccgctgctctgcgccggggcctggctcctgggagtccccgtctgcggtgccgccgaactgtgcgtgaactccttagagaagtttcacttcaagtcatggatgtctaagcaccgtaagacctacagtacggaggagtaccaccacaggctgcagacgtttgccagcaactggaggaagataaacgcccacaacaatgggaaccacacatttaaaatggcactgaaccaattttcagacatgagctttgctgaaataaaacacaagtatctctggtcagagcctcagaattgctcagccaccaaaagtaactaccttcgaggtactggtccctacccaccttccgtggactggcggaaaaaaggaaattttgtctcacctgtgaaaaatcagggtgcctgcggcagttgctggactttctccaccactggggccctggagtctgcgatcgccatcgcaaccggaaagatgctgtccttggcggaacagcagctggtggactgcgcccaggacttcaataatcacggctgccaagggggtctccccagccaggctttcgagtatatcctgtacaacaaggggatcatgggtgaagacacctacccctaccagggcaaggatggttattgcaagttccaacctggaaaggccatcggctttgtcaaggatgtagccaacatcacaatctatgacgaggaagcgatggtggaggctgtggccctctacaaccctgtgagctttgcctttgaggtgactcaggacttcatgatgtatagaacgggcatctactccagtacttcctgccataaaactccagataaagtaaaccatgcagtactggctgttgggtatggagaaaaaaatgggatcccttactggatcgtgaaaaactcttggggtccccagtggggaatgaacgggtacttcctcatcgagcgcggaaagaacatgtgtggcctggctgcctgcgcctcctaccccatccctctggtgtgagccgtggcagccgcagcgcagactggcggagaaggagaggaacgggcagcctgggcctgggtggaaatcctgccctggaggaagttgtggggagatccactgggacccccaacattctgccctcacctctgtgcccagcctggaaacctacagacaaggaggagttccaccatgagctcacccgtgtctatgacgcaaagatcaccagccatgtgccttagtgtccttcttaacagactcaaaccacatggaccacgaatattctttctgtccagaagggctactttccacatatagagctccagggactgtcttttctgtattcgctgttcaataaacattgagtgagcacctccccagatggaaaaaaaaaaaaaaaaaaaaaaaaaaaaaaaaaaaaa

SEQ ID NO: 13929 - DNA, 1432 bp, Homo sapiens
ccacgctcgtgccgccccccccgcgctcccagttgacgctctgggccgccacctccgcggaccctgagcgcaagagccaagccgccagcgctgcgatgtgggccacgctgccgctgctctgcgccgccgaactgtgcgtgaactccttagagaagtttcacttcaagtcatggatgtctaagcaccgtaagacctacagtacggaggagtaccaccacaggctgcagacgtttgccagcaactggaggaagataaacgcccacaacaatgggaaccacacatttaaaatggcactgaaccaattttcagacatgagctttgctgaaataaaacacaagtatctctggtcagagcctcagaattgctcagccaccaaaagtaactaccttcgaggtactggtccctacccaccttccgtggactggcggaaaaaaggaaattttgtctcacctgtgaaaaatcagggtgcctgcggcagttgctggactttctccaccactggggccctggagtctgcgatcgccatcgcaaccggaaagatgctgtccttggcggaacagcagctggtggactgcgcccaggacttcaataatcacggctgccaagggggtctccccagccaggctttcgagtatatcctgtacaacaaggggatcatgggtgaagacacctacccctaccagggcaaggatggttattgcaagttccaacctggaaaggccatcggctttgtcaaggatgtagccaacatcacaatctatgacgaggaagcgatggtggaggctgtggccctctacaaccctgtgagctttgcctttgaggtgactcaggacttcatgatgtatagaacgggcatctactccagtacttcctgccataaaactccagataaagtaaaccatgcagtactggctgttgggtatggagaaaaaaatgggatcccttactggatcgtgaaaaactcttggggtccccagtggggaatgaacgggtacttcctcatcgagcgcggaaagaacatgtgtggcctggctgcctgcgcctcctaccccatccctctggtgtgagccgtggcagccgcagcgcagactggcggagaaggagaggaacgggcagcctgggcctgggtggaaatcctgccctggaggaagttgtggggagatccactgggacccccaacattctgccctcacctctgtgcccagcctggaaacctacagacaaggaggagttccaccatgagctcacccgtgtctatgacgcaaagatcaccagccatgtgccttagtgtccttcttaacagactcaaaccacatggaccacgaatattctttctgtccagaagggctactttccacatatagagctccagggactgtcttttctgtattcgctgttcaataaacattgagtgagcacctccccagatgga

SEQ ID NO: 13930 - DNA, 2584 bp, Homo sapiens
ggggtgcggggcgcagcattgtgcggtcatggtgggccagatgtactgctaccccggcagccacctggcccgggcgctgacgcgggcgctggcgctggccctggtgctggccctgctggtcgggccgttcctgagcggcctggcgggggcgatcccagcgccggggggccgctgggcgcgcgatgggcaggtccctccagcctcccgcagccgctcggtgctcctggacgtctcggcgggccagctgcttatggtggacggacgccaccctgacgccgtggcctgggccaacctcaccaacgccatccgcgagactgggtgggccttcctggagctgggcacaagtggccaatacaatgacagcttgcaggcctatgcagccggtgtggtggaggctgctgtgtcggaggagctcatctacatgcactggatgaacacggtggtgaattactgcggccccttcgagtatgaagtcggctactgcgagaggctgaagagcttcctggaggccaacctagagtggatgcaggaagagatggagtcaaacccagactcaccttactggcaccaggtgcggctgaccctcctgcagctgaaaggcctggaggacagctacgaaggccgtgtgagcttcccagctgggaagttcaccatcaaacccttggggttcctcctgctgcagctctctggggacctggaagacctggagctggccctgaacaagaccaagatcaaaccttctctgggctctggctcctgttctgccctcatcaagctgctccctggccagagtgacctcctggttgcccacaacacctggaacaactaccagcacatgctgcgtgtcatcaagaagtactggctccagttccgggaaggcccctggggggactacccgctggttcccggcaacaagctggtcttctcctcctaccccggcaccatcttctcctgcgacgacttctacatcctgggcagtgggctggtgacactggagaccaccattggcaacaagaacccagccctgtggaagtatgtgcggcccaggggctgtgtgctggagtgggtacgcaacatcgtggccaaccgcctggcctcggatggggccacctgggcagacatcttcaagaggttcaacagcggcacgtataacaaccagtggatgatcgtggactacaaggcgttcatcccgggtgggcccagccccgggagccgggtgcttaccatcctggagcagatccccggcatggtggtggtggctgacaagacctcggagctctaccagaagacctactgggccagctacaacataccgtccttcgagactgtgttcaatgccagtgggctgcaggccctagtggcccagtatggggactggttttcttatgacgggagcccccgggcccagatcttccggcggaaccagtcactggtacaagacatggactccatggtcaggctgatgaggtacaatgacttcctccatgaccctctgtcactgtgcaaagcctgcaacccccagcccaatggggagaatgctatctccgcccgctccgacctcaacccggccaatggctcctaccccttcaaggccctgcgtcagcgctcccatgggggtatcgatgtgaaggtgaccagcatgtcactggccaggatcctgagcctgctggcggccagcggtcccacgtgggaccaggtgcccccgttccagtggagcacctcgcccttcagcggcctgctgcacatgggccagccagacctctggaagttcgcgcctgtcaaggtttcatgggactgaagttctgtccctgctctgctgctttcgcccctgctgaccctcgtcagggtcacccccgtcccaaggccaccggacttctaactccagcccctcctgggggcttcgttctctgatctggggtctgagtcatctcctcctagagtgggtcacgaacctgatggggctcagaactgaccccctctctcccccgaggtgggtgggcaccgtggcgtctcttctgccctgccctaaatctcccactctctgtttctgtctgtttcctactgctgctctctcaacctcattcccacctctggggccccttcctcgtgcttctccttcctgagggtttgggaaggtcctggggcagactctggggctcccatggggtggaaggagcctgttccagcacccttctcccagctgcattcccacgggtggccctggagctggtgagctttgtctgggcgttgtcttcggctggcattgctcctcccagctctggcccctctgctccctcaggaagcagtcccctcgtctccctttctgggcagcttccttgaggacagaaacttgaaaacaaacacaaaccaaagtttctggccatctgtggctggagggttctgaatgtcctctctccatgtcaggcagagggtcagcccccatgcttctgcctcaggccccaccccaccccaccccaggcctgcccctcacctcagggccatacccacagcgccctgatggaggaaccagaccgcaggctgtgccaccattaaacaagagcggctgtgaaaaaaaaaaaaaaaa

SEQ ID NO: 13931 - DNA, 2255 bp, Homo sapiens
cctccgagaggggagaccagcgggccatgacaagctccaggctttggttttcgctgctgctggcggcagcgttcgcaggacgggcgacggccctctggccctggcctcagaacttccaaacctccgaccagcgctacgtcctttacccgaacaactttcaattccagtacgatgtcagctcggccgcgcagcccggctgctcagtcctcgacgaggccttccagcgctatcgtgacctgcttttcggttccgggtcttggccccgtccttacctcacagggaaacggcatacactggagaagaatgtgttggttgtctctgtagtcacacctggatgtaaccagcttcctactttggagtcagtggagaattataccctgaccataaatgatgaccagtgtttactcctctctgagactgtctggggagctctccgaggtctggagacttttagccagcttgtttggaaatctgctgagggcacattctttatcaacaagactgagattgaggactttccccgctttcctcaccggggcttgctgttggatacatctcgccattacctgccactctctagcatcctggacactctggatgtcatggcgtacaataaattgaacgtgttccactggcatctggtagatgatccttccttcccatatgagagcttcacttttccagagctcatgagaaaggggtcctacaaccctgtcacccacatctacacagcacaggatgtgaaggaggtcattgaatacgcacggctccggggtatccgtgtgcttgcagagtttgacactcctggccacactttgtcctggggaccaggtatccctggattactgactccttgctactctgggtctgagccctctggcacctttggaccagtgaatcccagtctcaataatacctatgagttcatgagcacattcttcttagaagtcagctctgtcttcccagatttttatcttcatcttggaggagatgaggttgatttcacctgctggaagtccaacccagagatccaggactttatgaggaagaaaggcttcggtgaggacttcaagcagctggagtccttctacatccagacgctgctggacatcgtctcttcttatggcaagggctatgtggtgtggcaggaggtgtttgataataaagtaaagattcagccagacacaatcatacaggtgtggcgagaggatattccagtgaactatatgaaggagctggaactggtcaccaaggccggcttccgggcccttctctctgccccctggtacctgaaccgtatatcctatggccctgactggaaggatttctacgtagtggaacccctggcatttgaaggtacccctgagcagaaggctctggtgattggtggagaggcttgtatgtggggagaatatgtggacaacacaaacctggtccccaggctctggcccagagcaggggctgttgccgaaaggctgtggagcaacaagttgacatctgacctgacatttgcctatgaacgtttgtcacacttccgctgtgagttgctgaggcgaggtgtccaggcccaacccctcaatgtaggcttctgtgagcaggagtttgaacagacctgagccccaggcaccgaggagggtgctggctgtaggtgaatggtagtggagccaggcttccactgcatcctggccaggggacggagccccttgccttcgtgccccttgcctgcgtgcccctgtgcttggagagaaaggggccggtgctggcgctcgcattcaataaagagtaatgtggcatttttctataataaacatggattacctgtgtttaaaaaaaaaagtgtgaatggcgttagggtaagggcacagccaggctggagtcagtgtctgcccctgaggtcttttaagttgagggctgggaatgaaacctatagcctttgtgctgttctgccttgcctgtgagctatgtcactcccctcccactcctgaccatattccagacacctgccctaatcctcagcctgctcacttcacttctgcattatatctccaaggcgttggtatatggaaaaagatgtaggggcttggaggtgttctggacagtggggagggctccagacccaacctggtcacaaaagagcctctcccccatgcatactcatccacctccctcccctagagctattctcctttgggtttcttgctgctgcaattttatacaaccattatttaaatattattaaacacatattgttctct

SEQ ID NO: 13932 - DNA, 7560 bp, Homo sapiens
accggccacagcctgcctactgtcacccgcctctcccgcgcgcagatacacgcccccgcctccgtgggcacaaaggcagcgctgctggggaactcgggggaacgcgcacgtgggaaccgccgcagctccacactccaggtacttcttccaaggacctaggtctctcgcccatcggaaagaaaataattctttcaagaagatcagggacaactgatttgaagtctactctgtgcttctaaatccccaattctgctgaaagtgaatccctagagccctagagccccagcagcacccagccaaacccacctccaccatgggggccatgactcagctgttggcaggtgtctttcttgctttccttgccctcgctaccgaaggtggggtcctcaagaaagtcatccggcacaagcgacagagtggggtgaacgccaccctgccagaagagaaccagccagtggtgtttaaccacgtttacaacatcaagctgccagtgggatcccagtgttcggtggatctggagtcagccagtggggagaaagacctggcaccgccttcagagcccagcgaaagctttcaggagcacacagtagatggggaaaaccagattgtcttcacacatcgcatcaacatcccccgccgggcctgtggctgtgccgcagcccctgatgttaaggagctgctgagcagactggaggagctggagaacctggtgtcttccctgagggagcaatgtactgcaggagcaggctgctgtctccagcctgccacaggccgcttggacaccaggcccttctgtagcggtcggggcaacttcagcactgaaggatgtggctgtgtctgcgaacctggctggaaaggccccaactgctctgagcccgaatgtccaggcaactgtcaccttcgaggccggtgcattgatgggcagtgcatctgtgacgacggcttcacgggcgaggactgcagccagctggcttgccccagcgactgcaatgaccagggcaagtgcgtgaatggagtctgcatctgtttcgaaggctacgccggggctgactgcagccgtgaaatctgcccagtgccctgcagtgaggagcacggcacatgtgtagatggcttgtgtgtgtgccacgatggctttgcaggcgatgactgcaacaagcctctgtgtctcaacaattgctacaaccgtggacgatgcgtggagaatgagtgcgtgtgtgatgagggtttcacgggcgaagactgcagtgagctcatctgccccaatgactgcttcgaccggggccgctgcatcaatggcacctgctactgcgaagaaggcttcacaggtgaagactgcgggaaacccacctgcccacatgcctgccacacccagggccggtgtgaggaggggcagtgtgtatgtgatgagggctttgccggtttggactgcagcgagaagaggtgtcctgctgactgtcacaatcgtggccgctgtgtagacgggcggtgtgagtgtgatgatggtttcactggagctgactgtggggagctcaagtgtcccaatggctgcagtggccatggccgctgtgtcaatgggcagtgtgtgtgtgatgagggctatactggggaggactgcagccagctacggtgccccaatgactgtcacagtcggggccgctgtgtcgagggcaaatgtgtatgtgagcaaggcttcaagggctatgactgcagtgacatgagctgccctaatgactgtcaccagcacggccgctgtgtgaatggcatgtgtgtttgtgatgacggctacacaggggaagactgccgggatcgccaatgccccagggactgcagcaacaggggcctctgtgtggacggacagtgcgtctgtgaggacggcttcaccggccctgactgtgcagaactctcctgtccaaatgactgccatggccagggtcgctgtgtgaatgggcagtgcgtgtgccatgaaggatttatgggcaaagactgcaaggagcaaagatgtcccagtgactgtcatggccagggccgctgcgtggacggccagtgcatctgccacgagggcttcacaggcctggactgtggccagcactcctgccccagtgactgcaacaacttaggacaatgcgtctcgggccgctgcatctgcaacgagggctacagcggagaagactgctcagaggtgtctcctcccaaagacctcgttgtgacagaagtgacggaagagacggtcaacctggcctgggacaatgagatgcgggtcacagagtaccttgtcgtgtacacgcccacccacgagggtggtctggaaatgcagttccgtgtgcctggggaccagacgtccaccatcatccaggagctggagcctggtgtggagtactttatccgtgtatttgccatcctggagaacaagaagagcattcctgtcagcgccagggtggccacgtacttacctgcacctgaaggcctgaaattcaagtccatcaaggagacatctgtggaagtggagtgggatcctctagacattgcttttgaaacctgggagatcatcttccggaatatgaataaagaagatgagggagagatcaccaaaagcctgaggaggccagagacctcttaccggcaaactggtctagctcctgggcaagagtatgagatatctctgcacatagtgaaaaacaatacccggggccctggcctgaagagggtgaccaccacacgcttggatgcccccagccagatcgaggtgaaagatgtcacagacaccactgccttgatcacctggttcaagcccctggctgagatcgatggcattgagctgacctacggcatcaaagacgtgccaggagaccgtaccaccatcgatctcacagaggacgagaaccagtactccatcgggaacctgaagcctgacactgagtacgaggtgtccctcatctcccgcagaggtgacatgtcaagcaacccagccaaagagaccttcacaacaggcctcgatgctcccaggaatcttcgacgtgtttcccagacagataacagcatcaccctggaatggaggaatggcaaggcagctattgacagttacagaattaagtatgcccccatctctggaggggaccacgctgaggttgatgttccaaagagccaacaagccacaaccaaaaccacactcacaggtctgaggccgggaactgaatatgggattggagtttctgctgtgaaggaagacaaggagagcaatccagcgaccatcaacgcagccacagagttggacacgcccaaggaccttcaggtttctgaaactgcagagaccagcctgaccctgctctggaagacaccgttggccaaatttgaccgctaccgcctcaattacagtctccccacaggccagtgggtgggagtgcagcttccaagaaacaccacttcctatgtcctgagaggcctggaaccaggacaggagtacaatgtcctcctgacagccgagaaaggcagacacaagagcaagcccgcacgtgtgaaggcatccactgaacaagcccctgagctggaaaacctcaccgtgactgaggttggctgggatggcctcagactcaactggaccgcggctgaccaggcctatgagcactttatcattcaggtgcaggaggccaacaaggtggaggcagctcggaacctcaccgtgcctggcagccttcgggctgtggacataccgggcctcaaggctgctacgccttatacagtctccatctatggggtgatccagggctatagaacaccagtgctctctgctgaggcctccacaggggaaactcccaatttgggagaggtcgtggtggccgaggtgggctgggatgccctcaaactcaactggactgctccagaaggggcctatgagtactttttcattcaggtgcaggaggctgacacagtagaggcagcccagaacctcaccgtcccaggaggactgaggtccacagacctgcctgggctcaaagcagccactcattataccatcaccatccgcggggtcactcaggacttcagcacaacccctctctctgttgaagtcttgacagaggaggttccagatatgggaaacctcacagtgaccgaggttagctgggatgctctcagactgaactggaccacgccagatggaacctatgaccagtttactattcaggtccaggaggctgaccaggtggaagaggctcacaatctcacggttcctggcagcctgcgttccatggaaatcccaggcctcagggctggcactccttacacagtcaccctgcacggcgaggtcaggggccacagcactcgaccccttgctgtagaggtcgtcacagaggatctcccacagctgggagatttagccgtgtctgaggttggctgggatggcctcagactcaactggaccgcagctgacaatgcctatgagcactttgtcattcaggtgcaggaggtcaacaaagtggaggcagcccagaacctcacgttgcctggcagcctcagggctgtggacatcccgggcctcgaggctgccacgccttatagagtctccatctatggggtgatccggggctatagaacaccagtactctctgctgaggcctccacagccaaagaacctgaaattggaaacttaaatgtttctgacataactcccgagagcttcaatctctcctggatggctaccgatgggatcttcgagacctttaccattgaaattattgattccaataggttgctggagactgtggaatataatatctctggtgctgaacgaactgcccatatctcagggctaccccctagtactgattttattgtctacctctctggacttgctcccagcatccggaccaaaaccatcagtgccacagccacgacagaggccctgccccttctggaaaacctaaccatttccgacattaatccctacgggttcacagtttcctggatggcatcggagaatgcctttgacagctttctagtaacggtggtggattctgggaagctgctggacccccaggaattcacactttcaggaacccagaggaagctggagcttagaggcctcataactggcattggctatgaggttatggtctctggcttcacccaagggcatcaaaccaagcccttgagggctgagattgttacagaagccgaaccggaagttgacaaccttctggtttcagatgccaccccagacggtttccgtctgtcctggacagctgatgaaggggtcttcgacaattttgttctcaaaatcagagataccaaaaagcagtctgagccactggaaataaccctacttgcccccgaacgtaccagggacttaacaggtctcagagaggctactgaatacgaaattgaactctatggaataagcaaaggaaggcgatcccagacagtcagtgctatagcaacaacagccatgggctccccaaaggaagtcattttctcagacatcactgaaaattcggctactgtcagctggagggcacccacggcccaagtggagagcttccggattacctatgtgcccattacaggaggtacaccctccatggtaactgtggacggaaccaagactcagaccaggctggtgaaactcatacctggcgtggagtaccttgtcagcatcatcgccatgaagggctttgaggaaagtgaacctgtctcagggtcattcaccacagctctggatggcccatctggcctggtgacagccaacatcactgactcagaagccttggccaggtggcagccagccattgccactgtggacagttatgtcatctcctacacaggcgagaaagtgccagaaattacacgcacggtgtccgggaacacagtggagtatgctctgaccgacctcgagcctgccacggaatacacactgagaatctttgcagagaaagggccccagaagagctcaaccatcactgccaagttcacaacagacctcgattctccaagagacttgactgctactgaggttcagtcggaaactgccctccttacctggcgacccccccgggcatcagtcaccggttacctgctggtctatgaatcagtggatggcacagtcaaggaagtcattgtgggtccagataccacctcctacagcctggcagacctgagcccatccacccactacacagccaagatccaggcactcaatgggcccctgaggagcaatatgatccagaccatcttcaccacaattggactcctgtaccccttccccaaggactgctcccaagcaatgctgaatggagacacgacctctggcctctacaccatttatctgaatggtgataaggctcaggcgctggaagtcttctgtgacatgacctctgatgggggtggatggattgtgttcctgagacgcaaaaacggacgcgagaacttctaccaaaactggaaggcatatgctgctggatttggggaccgcagagaagaattctggcttgggctggacaacctgaacaaaatcacagcccaggggcagtacgagctccgggtggacctgcgggaccatggggagacagcctttgctgtctatgacaagttcagcgtgggagatgccaagactcgctacaagctgaaggtggaggggtacagtgggacagcaggtgactccatggcctaccacaatggcagatccttctccacctttgacaaggacacagattcagccatcaccaactgtgctctgtcctacaaaggggctttctggtacaggaactgtcaccgtgtcaacctgatggggagatatggggacaataaccacagtcagggcgttaactggttccactggaagggccacgaacactcaatccagtttgctgagatgaagctgagaccaagcaacttcagaaatcttgaaggcaggcgcaaacgggcataaattggagggaccactgggtgagagaggaataaggcggcccagagcgaggaaaggattttaccaaagcatcaatacaaccagcccaaccatcggtccacacctgggcatttggtgagaatcaaagctgaccatggatccctggggccaacggcaacagcatgggcctcacctcctctgtgatttctttctttgcaccaaagacatcagtctccaacatgtttctgttttgttgtttgattcagcaaaaatctcccagtgacaacatcgcaatagttttttacttctcttaggtggctctgggatgggagaggggtaggatgtacaggggtagtttgttttagaaccagccgtattttacatgaagctgtataattaattgtcattatttttgttagcaaagattaaatgtgtcattggaagccatccctttttttacatttcatacaacagaaaccagaaaagcaatactgtttccattttaaggatatgattaatattattaatataataatgatgatgatgatgatgaaaactaaggatttttcaagagatctttctttccaaaacatttctggacagtacctgattgtattttttttttaaataaaagcacaagtacttttgaaaaaaaaccggaattc

SEQ ID NO: 13933 - DNA, 3399 bp, Homo sapiens
atgaatttacaaccaattttctggattggactgatcagttcagtttgctgtgtgtttgctcaaacagatgaaaatagatgtttaaaagcaaatgccaaatcatgtggagaatgtatacaagcagggccaaattgtgggtggtgcacaaattcaacatttttacaggaaggaatgcctacttctgcacgatgtgatgatttagaagccttaaaaaagaagggttgccctccagatgacatagaaaatcccagaggctccaaagatataaagaaaaataaaaatgtaaccaaccgtagcaaaggaacagcagagaagctcaagccagaggatattactcagatccaaccacagcagttggttttgcgattaagatcaggggagccacagacatttacattaaaattcaagagagctgaagactatcccattgacctctactaccttatggacctgtcttactcaatgaaagacgatttggagaatgtaaaaagtcttggaacagatctgatgaatgaaatgaggaggattacttcggacttcagaattggatttggctcatttgtggaaaagactgtgatgccttacattagcacaacaccagctaagctcaggaacccttgcacaagtgaacagaactgcaccagcccatttagctacaaaaatgtgctcagtcttactaataaaggagaagtatttaatgaacttgttggaaaacagcgcatatctggaaatttggattctccagaaggtggtttcgatgccatcatgcaagttgcagtttgtggatcactgattggctggaggaatgttacacggctgctggtgttttccacagatgccgggtttcactttgctggagatgggaaacttggtggcattgttttaccaaatgatggacaatgtcacctggaaaataatatgtacacaatgagccattattatgattatccttctattgctcaccttgtccagaaactgagtgaaaataatattcagacaatttttgcagttactgaagaatttcagcctgtttacaaggagctgaaaaacttgatccctaagtcagcagtaggaacattatctgcaaattctagcaatgtaattcagttgatcattgatgcatacaattccctttcctcagaagtcattttggaaaacggcaaattgtcagaaggagtaacaataagttacaaatcttactgcaagaacggggtgaatggaacaggggaaaatggaagaaaatgttccaatatttccattggagatgaggttcaatttgaaattagcataacttcaaataagtgtccaaaaaaggattctgacagctttaaaattaggcctctgggctttacggaggaagtagaggttattcttcagtacatctgtgaatgtgaatgccaaagcgaaggcatccctgaaagtcccaagtgtcatgaaggaaatgggacatttgagtgtggcgcgtgcaggtgcaatgaagggcgtgttggtagacattgtgaatgcagcacagatgaagttaacagtgaagacatggatgcttactgcaggaaagaaaacagttcagaaatctgcagtaacaatggagagtgcgtctgcggacagtgtgtttgtaggaagagggataatacaaatgaaatttattctggcaaattctgcgagtgtgataatttcaactgtgatagatccaatggcttaatttgtggaggaaatggtgtttgcaagtgtcgtgtgtgtgagtgcaaccccaactacactggcagtgcatgtgactgttctttggatactagtacttgtgaagccagcaacggacagatctgcaatggccggggcatctgcgagtgtggtgtctgtaagtgtacagatccgaagtttcaagggcaaacgtgtgagatgtgtcagacctgccttggtgtctgtgctgagcataaagaatgtgttcagtgcagagccttcaataaaggagaaaagaaagacacatgcacacaggaatgttcctattttaacattaccaaggtagaaagtcgggacaaattaccccagccggtccaacctgatcctgtgtcccattgtaaggagaaggatgttgacgactgttggttctattttacgtattcagtgaatgggaacaacgaggtcatggttcatgttgtggagaatccagagtgtcccactggtccagacatcattccaattgtagctggtgtggttgctggaattgttcttattggccttgcattactgctgatatggaagcttttaatgataattcatgacagaagggagtttgctaaatttgaaaaggagaaaatgaatgccaaatgggacacggtaagttacaaaacatccaaaaagcaaagtggcttataaagtaaatgtaatactcctaagacttatgtattagctgtcaggctgattattaaagtcctttctaagtattttattcccccaaaagtttcttactcaaggaatttgcatttagtgaaaaacagaaagcatcctaaatatatcccattgaaacaaaacattgattataagcatgtatattctggttcatgtggccgatatttttatttctttaatgattttgatcctaaatctgccttttcatctaatgtgaagtagaatcctaaataatgttatctgtgtagcaagctattcaatgggaaagctgcttctttctttaaaacaaacaaacaaaaaaaaccttcagtggaaagccaaattccaaaaggttatataccaagcttgtccaactcgcagctcgtcggccaggacatgcagcccagaatagctttgaatgtggccccaacacaaatttgtaaactttcttagaaattgtaattattattattatttttttttggtaactttttttaaagctcatcagctatcgttagtgtattttatgtgtggcccaagacagttcttcttcttgccagtgtggcccagggaagccaaaagattggacacccctgctatatactatatgattccatttagaggacattctggaaaagcaaaactgtaggggcaaaaatcagtggttgctaggggctggaatgggggaaagtgttgaccacagaggggcgtaagggatcttccttgggatgacttgattgtgggtggatttatgtatttgaaaactcacagaactatgtactttaaaaagatgtatgttcctctatgaaaattatatctcagtaaactttggcttataaaaatcttaaaagccctaagtgaccgaaaggttatgttagcattgagtgctttgaaatatggagtcagagggtggggtaaccaaatgttggcctttgtgtattcatcttttgatacaagaaagcaatgccaatcttcagtatttttaaattgtaaatgaattttgtagttcccgaattc

SEQ ID NO: 13934 - DNA, 2498 bp, Homo sapiens
atgaatttacaaccaattttctggattggactgatcagttcagtttgctgtgtgtttgctcaaacagatgaaaatagatgtttaaaagcaaatgccaaatcatgtggagaatgtatacaagcagggccaaattgtgggtggtgcacaaattcaacatttttacaggaaggaatgcctacttctgcacgatgtgatgatttagaagccttaaaaaagaagggttgccctccagatgacatagaaaatcccagaggctccaaagatataaagaaaaataaaaatgtaaccaaccgtagcaaaggaacagcagagaagctcaagccagaggatattactcagatccaaccacagcagttggttttgcgattaagatcaggggagccacagacatttacattaaaattcaagagagctgaagactatcccattgacctctactaccttatggacctgtcttactcaatgaaagacgatttggagaatgtaaaaagtcttggaacagatctgatgaatgaaatgaggaggattacttcggacttcagaattggatttggctcatttgtggaaaagactgtgatgccttacattagcacaacaccagctaagctcaggaacccttgcacaagtgaacagaactgcaccagcccatttagctacaaaaatgtgctcagtcttactaataaaggagaagtatttaatgaacttgttggaaaacagcgcatatctggaaatttggattctccagaaggtggtttcgatgccatcatgcaagttgcagtttgtggatcactgattggctggaggaatgttacacggctgctggtgttttccacagatgccgggtttcactttgctggagatgggaaacttggtggcattgttttaccaaatgatggacaatgtcacctggaaaataatatgtacacaatgagccattattatgattatccttctattgctcaccttgtccagaaactgagtgaaaataatattcagacaatttttgcagttactgaagaatttcagcctgtttacaaggagctgaaaaacttgatccctaagtcagcagtaggaacattatctgcaaattctagcaatgtaattcagttgatcattgatgcatacaattccctttcctcagaagtcattttggaaaacggcaaattgtcagaaggagtaacaataagttacaaatcttactgcaagaacggggtgaatggaacaggggaaaatggaagaaaatgttccaatatttccattggagatgaggttcaatttgaaattagcataacttcaaataagtgtccaaaaaaggattctgacagctttaaaattaggcctctgggctttacggaggaagtagaggttattcttcagtacatctgtgaatgtgaatgccaaagcgaaggcatccctgaaagtcccaagtgtcatgaaggaaatgggacatttgagtgtggcgcgtgcaggtgcaatgaagggcgtgttggtagacattgtgaatgcagcacagatgaagttaacagtgaagacatggatgcttactgcaggaaagaaaacagttcagaaatctgcagtaacaatggagagtgcgtctgcggacagtgtgtttgtaggaagagggataatacaaatgaaatttattctggcaaattctgcgagtgtgataatttcaactgtgatagatccaatggcttaatttgtggaggaaatggtgtttgcaagtgtcgtgtgtgtgagtgcaaccccaactacactggcagtgcatgtgactgttctttggatactagtacttgtgaagccagcaacggacagatctgcaatggccggggcatctgcgagtgtggtgtctgtaagtgtacagatccgaagtttcaagggcaaacgtgtgagatgtgtcagacctgccttggtgtctgtgctgagcataaagaatgtgttcagtgcagagccttcaataaaggagaaaagaaagacacatgcacacaggaatgttcctattttaacattaccaaggtagaaagtcgggacaaattaccccagccggtccaacctgatcctgtgtcccattgtaaggagaaggatgttgacgactgttggttctattttacgtattcagtgaatgggaacaacgaggtcatggttcatgttgtggagaatccagagtgtcccactggtccagacatcattccaattgtagctggtgtggttgctggaattgttcttattggccttgcattactgctgatatggaagcttttaatgataattcatgacagaagggagtttgctaaatttgaaaaggagaaaatgaatgccaaatgggacacgcctggagtgcagtggtgtgatatcagctcactgcaacctctgacttccagattccagcaattctcctgcctcagcctcccgagtacctgggattacagggtgaaaatcctatttataagagtgccgtaacaactgtggtcaatccgaagtatgagggaaaatgagta

SEQ ID NO: 13935 - DNA, 2516 bp, Homo sapiens
atgaatttacaaccaattttctggattggactgatcagttcagtttgctgtgtgtttgctcaaacagatgaaaatagatgtttaaaagcaaatgccaaatcatgtggagaatgtatacaagcagggccaaattgtgggtggtgcacaaattcaacatttttacaggaaggaatgcctacttctgcacgatgtgatgatttagaagccttaaaaaagaagggttgccctccagatgacatagaaaatcccagaggctccaaagatataaagaaaaataaaaatgtaaccaaccgtagcaaaggaacagcagagaagctcaagccagaggatattactcagatccaaccacagcagttggttttgcgattaagatcaggggagccacagacatttacattaaaattcaagagagctgaagactatcccattgacctctactaccttatggacctgtcttactcaatgaaagacgatttggagaatgtaaaaagtcttggaacagatctgatgaatgaaatgaggaggattacttcggacttcagaattggatttggctcatttgtggaaaagactgtgatgccttacattagcacaacaccagctaagctcaggaacccttgcacaagtgaacagaactgcaccagcccatttagctacaaaaatgtgctcagtcttactaataaaggagaagtatttaatgaacttgttggaaaacagcgcatatctggaaatttggattctccagaaggtggtttcgatgccatcatgcaagttgcagtttgtggatcactgattggctggaggaatgttacacggctgctggtgttttccacagatgccgggtttcactttgctggagatgggaaacttggtggcattgttttaccaaatgatggacaatgtcacctggaaaataatatgtacacaatgagccattattatgattatccttctattgctcaccttgtccagaaactgagtgaaaataatattcagacaatttttgcagttactgaagaatttcagcctgtttacaaggagctgaaaaacttgatccctaagtcagcagtaggaacattatctgcaaattctagcaatgtaattcagttgatcattgatgcatacaattccctttcctcagaagtcattttggaaaacggcaaattgtcagaaggagtaacaataagttacaaatcttactgcaagaacggggtgaatggaacaggggaaaatggaagaaaatgttccaatatttccattggagatgaggttcaatttgaaattagcataacttcaaataagtgtccaaaaaaggattctgacagctttaaaattaggcctctgggctttacggaggaagtagaggttattcttcagtacatctgtgaatgtgaatgccaaagcgaaggcatccctgaaagtcccaagtgtcatgaaggaaatgggacatttgagtgtggcgcgtgcaggtgcaatgaagggcgtgttggtagacattgtgaatgcagcacagatgaagttaacagtgaagacatggatgcttactgcaggaaagaaaacagttcagaaatctgcagtaacaatggagagtgcgtctgcggacagtgtgtttgtaggaagagggataatacaaatgaaatttattctggcaaattctgcgagtgtgataatttcaactgtgatagatccaatggcttaatttgtggaggaaatggtgtttgcaagtgtcgtgtgtgtgagtgcaaccccaactacactggcagtgcatgtgactgttctttggatactagtacttgtgaagccagcaacggacagatctgcaatggccggggcatctgcgagtgtggtgtctgtaagtgtacagatccgaagtttcaagggcaaacgtgtgagatgtgtcagacctgccttggtgtctgtgctgagcataaagaatgtgttcagtgcagagccttcaataaaggagaaaagaaagacacatgcacacaggaatgttcctattttaacattaccaaggtagaaagtcgggacaaattaccccagccggtccaacctgatcctgtgtcccattgtaaggagaaggatgttgacgactgttggttctattttacgtattcagtgaatgggaacaacgaggtcatggttcatgttgtggagaatccagagtgtcccactggtccagacatcattccaattgtagctggtgtggttgctggaattgttcttattggccttgcattactgctgatatggaagcttttaatgataattcatgacagaagggagtttgctaaatttgaaaaggagaaaatgaatgccaaatgggacacgtctctctctgtcgcccagcctggagtgcagtggtgtgatatcagctcactgcaacctctgacttccagattccagcaattctcctgcctcagcctcccgagtacctgggattacagggtgaaaatcctatttataagagtgccgtaacaactgtggtcaatccgaagtatgagggaaaatgagta

SEQ ID NO: 13936 - DNA, 2481 bp, Homo sapiens
atgaatttacaaccaattttctggattggactgatcagttcagtttgctgtgtgtttgctcaaacagatgaaaatagatgtttaaaagcaaatgccaaatcatgtggagaatgtatacaagcagggccaaattgtgggtggtgcacaaattcaacatttttacaggaaggaatgcctacttctgcacgatgtgatgatttagaagccttaaaaaagaagggttgccctccagatgacatagaaaatcccagaggctccaaagatataaagaaaaataaaaatgtaaccaaccgtagcaaaggaacagcagagaagctcaagccagaggatattactcagatccaaccacagcagttggttttgcgattaagatcaggggagccacagacatttacattaaaattcaagagagctgaagactatcccattgacctctactaccttatggacctgtcttactcaatgaaagacgatttggagaatgtaaaaagtcttggaacagatctgatgaatgaaatgaggaggattacttcggacttcagaattggatttggctcatttgtggaaaagactgtgatgccttacattagcacaacaccagctaagctcaggaacccttgcacaagtgaacagaactgcaccagcccatttagctacaaaaatgtgctcagtcttactaataaaggagaagtatttaatgaacttgttggaaaacagcgcatatctggaaatttggattctccagaaggtggtttcgatgccatcatgcaagttgcagtttgtggatcactgattggctggaggaatgttacacggctgctggtgttttccacagatgccgggtttcactttgctggagatgggaaacttggtggcattgttttaccaaatgatggacaatgtcacctggaaaataatatgtacacaatgagccattattatgattatccttctattgctcaccttgtccagaaactgagtgaaaataatattcagacaatttttgcagttactgaagaatttcagcctgtttacaaggagctgaaaaacttgatccctaagtcagcagtaggaacattatctgcaaattctagcaatgtaattcagttgatcattgatgcatacaattccctttcctcagaagtcattttggaaaacggcaaattgtcagaaggagtaacaataagttacaaatcttactgcaagaacggggtgaatggaacaggggaaaatggaagaaaatgttccaatatttccattggagatgaggttcaatttgaaattagcataacttcaaataagtgtccaaaaaaggattctgacagctttaaaattaggcctctgggctttacggaggaagtagaggttattcttcagtacatctgtgaatgtgaatgccaaagcgaaggcatccctgaaagtcccaagtgtcatgaaggaaatgggacatttgagtgtggcgcgtgcaggtgcaatgaagggcgtgttggtagacattgtgaatgcagcacagatgaagttaacagtgaagacatggatgcttactgcaggaaagaaaacagttcagaaatctgcagtaacaatggagagtgcgtctgcggacagtgtgtttgtaggaagagggataatacaaatgaaatttattctggcaaattctgcgagtgtgataatttcaactgtgatagatccaatggcttaatttgtggaggaaatggtgtttgcaagtgtcgtgtgtgtgagtgcaaccccaactacactggcagtgcatgtgactgttctttggatactagtacttgtgaagccagcaacggacagatctgcaatggccggggcatctgcgagtgtggtgtctgtaagtgtacagatccgaagtttcaagggcaaacgtgtgagatgtgtcagacctgccttggtgtctgtgctgagcataaagaatgtgttcagtgcagagccttcaataaaggagaaaagaaagacacatgcacacaggaatgttcctattttaacattaccaaggtagaaagtcgggacaaattaccccagccggtccaacctgatcctgtgtcccattgtaaggagaaggatgttgacgactgttggttctattttacgtattcagtgaatgggaacaacgaggtcatggttcatgttgtggagaatccagagtgtcccactggtccagacatcattccaattgtagctggtgtggttgctggaattgttcttattggccttgcattactgctgatatggaagcttttaatgataattcatgacagaagggagtttgctaaatttgaaaaggagaaaatgaatgccaaatgggacacgcaagaaaatccgatttacaagagtcctattaataatttcaagaatccaaactacggacgtaaagctggtctctaaattgccggtgaaaatcctatttataagagtgccgtaacaactgtggtcaatccgaagtatgagggaaaatgagta

SEQ ID NO: 13937 - DNA, 2305 bp, Homo sapiens
gaatctacaataagacaaatttcaaatcaagttgctccactatactgcataagcagtttagaatcttaagcagatgcaaaaagaataaagcaaatgggaggaaaaaaaaggccgataaagtttctggctacaatacaagagacatatcattaccatatgatctaatgtgggtgtcagccggattgtgttcattgagggaaaccttattttttaactgtgctatggagtagaagcaggaggttttcaacctagtcacagagcagcacctaccccctcctcctttccacacctgcaaactcttttacttgggctgaatatttagtgtaattacatctcagctttgagggctcctgtggcaaattcccggattaaaaggttccctggttgtgaaaatacatgagataaatcatgaaggccactatcatcctccttctgcttgcacaagtttcctgggctggaccgtttcaacagagaggcttatttgactttatgctagaagatgaggcttctgggataggcccagaagttcctgatgaccgcgacttcgagccctccctaggcccagtgtgccccttccgctgtcaatgccatcttcgagtggtccagtgttctgatttgggtctggacaaagtgccaaaggatcttccccctgacacaactctgctagacctgcaaaacaacaaaataaccgaaatcaaagatggagactttaagaacctgaagaaccttcacgcattgattcttgtcaacaataaaattagcaaagttagtcctggagcatttacacctttggtgaagttggaacgactttatctgtccaagaatcagctgaaggaattgccagaaaaaatgcccaaaactcttcaggagctgcgtgcccatgagaatgagatcaccaaagtgcgaaaagttactttcaatggactgaaccagatgattgtcatagaactgggcaccaatccgctgaagagctcaggaattgaaaatggggctttccagggaatgaagaagctctcctacatccgcattgctgataccaatatcaccagcattcctcaaggtcttcctccttcccttacggaattacatcttgatggcaacaaaatcagcagagttgatgcagctagcctgaaaggactgaataatttggctaagttgggattgagtttcaacagcatctctgctgttgacaatggctctctggccaacacgcctcatctgagggagcttcacttggacaacaacaagcttaccagagtacctggtgggctggcagagcataagtacatccaggttgtctaccttcataacaacaatatctctgtagttggatcaagtgacttctgcccacctggacacaacaccaaaaaggcttcttattcgggtgtgagtcttttcagcaacccggtccagtactgggagatacagccatccaccttcagatgtgtctacgtgcgctctgccattcaactcggaaactataagtaattctcaagaaagccctcatttttataacctggcaaaatcttgttaatgtcattgctaaaaaataaataaaagctagatactggaaacctaactgcaatgtggatgttttacccacatgacttattatgcataaagccaaatttccagtttaagtaattgcctacaataaaaagaaattttgcctgccattttcagaatcatcttttgaagctttctgttgatgttaactgagctactagagatattcttatttcactaaatgtaaaatttggagtaaatatatatgtcaatatttagtaaagcttttcttttttaatttccaggaaaaaataaaaagagtatgagtcttctgtaattcattgagcagttagctcatttgagataaagtcaaatgccaaacactagctctgtattaatccccatcattactggtaaagcctcatttgaatgtgtgaattcaatacaggctatgtaaaatttttactaatgtcattattttgaaaaaataaatttaaaaatacattcaaaattactattgtatacaagcttaattgttaatattccctaaacacaattttatgaagggagaagacattggtttgttgacaataacagtacatcttttcaagttctcagctatttcttctacctctccctatcttacatttgagtatggtaacttatgtcatctatgttgaatgtaagcttataaagcacaaagcatacatttcctgactggtctagagaactgatgtttcaatttacccctctgctaaataaatattaaaactatcatgtgaaaaaaaaaaaaaaaaaa

SEQ ID NO: 13938 - DNA, 2151 bp, Homo sapiens
ggaataataagacacgccctgaaggagtacatcgtctagtgagggacagaccaagcacgcaaaacaaattgcaatataatgtgataagttctttaaaagaggtaagagcaacgtgctttgggagcagagaagagggagaaagcagcatcttgcctggatgagccaggggacacagaagagaagcccactatctcatttaatctttacaactctcttgcaaggttccctggttgtgaaaatacatgagataaatcatgaaggccactatcatcctccttctgcttgcacaagtttcctgggctggaccgtttcaacagagaggcttatttgactttatgctagaagatgaggcttctgggataggcccagaagttcctgatgaccgcgacttcgagccctccctaggcccagtgtgccccttccgctgtcaatgccatcttcgagtggtccagtgttctgatttgggtctggacaaagtgccaaaggatcttccccctgacacaactctgctagacctgcaaaacaacaaaataaccgaaatcaaagatggagactttaagaacctgaagaaccttcacgcattgattcttgtcaacaataaaattagcaaagttagtcctggagcatttacacctttggtgaagttggaacgactttatctgtccaagaatcagctgaaggaattgccagaaaaaatgcccaaaactcttcaggagctgcgtgcccatgagaatgagatcaccaaagtgcgaaaagttactttcaatggactgaaccagatgattgtcatagaactgggcaccaatccgctgaagagctcaggaattgaaaatggggctttccagggaatgaagaagctctcctacatccgcattgctgataccaatatcaccagcattcctcaaggtcttcctccttcccttacggaattacatcttgatggcaacaaaatcagcagagttgatgcagctagcctgaaaggactgaataatttggctaagttgggattgagtttcaacagcatctctgctgttgacaatggctctctggccaacacgcctcatctgagggagcttcacttggacaacaacaagcttaccagagtacctggtgggctggcagagcataagtacatccaggttgtctaccttcataacaacaatatctctgtagttggatcaagtgacttctgcccacctggacacaacaccaaaaaggcttcttattcgggtgtgagtcttttcagcaacccggtccagtactgggagatacagccatccaccttcagatgtgtctacgtgcgctctgccattcaactcggaaactataagtaattctcaagaaagccctcatttttataacctggcaaaatcttgttaatgtcattgctaaaaaataaataaaagctagatactggaaacctaactgcaatgtggatgttttacccacatgacttattatgcataaagccaaatttccagtttaagtaattgcctacaataaaaagaaattttgcctgccattttcagaatcatcttttgaagctttctgttgatgttaactgagctactagagatattcttatttcactaaatgtaaaatttggagtaaatatatatgtcaatatttagtaaagcttttcttttttaatttccaggaaaaaataaaaagagtatgagtcttctgtaattcattgagcagttagctcatttgagataaagtcaaatgccaaacactagctctgtattaatccccatcattactggtaaagcctcatttgaatgtgtgaattcaatacaggctatgtaaaatttttactaatgtcattattttgaaaaaataaatttaaaaatacattcaaaattactattgtatacaagcttaattgttaatattccctaaacacaattttatgaagggagaagacattggtttgttgacaataacagtacatcttttcaagttctcagctatttcttctacctctccctatcttacatttgagtatggtaacttatgtcatctatgttgaatgtaagcttataaagcacaaagcatacatttcctgactggtctagagaactgatgtttcaatttacccctctgctaaataaatattaaaactatcatgtgaaaaaaaaaaaaaaaaaa

SEQ ID NO: 13939 - DNA, 1570 bp, Homo sapiens
atgaaggccactatcatcctccttctgcttgcacaagtttcctgggctggaccgtttcaacagagaggcttatttgactttatgctagaagatgaggcttctgggataggcccagaagttcctgatgaccgcgacttcgagccctccctaggcccagtgtgccccttccgctgtcaatgccatcttcgagtggtccagtgttctgatttggaactgggcaccaatccgctgaagagctcaggaattgaaaatggggctttccagggaatgaagaagctctcctacatccgcattgctgataccaatatcaccagcattcctcaaggtcttcctccttcccttacggaattacatcttgatggcaacaaaatcagcagagttgatgcagctagcctgaaaggactgaataatttggctaagttgggattgagtttcaacagcatctctgctgttgacaatggctctctggccaacacgcctcatctgagggagcttcacttggacaacaacaagcttaccagagtacctggtgggctggcagagcataagtacatccaggttgtctaccttcataacaacaatatctctgtagttggatcaagtgacttctgcccacctggacacaacaccaaaaaggcttcttattcgggtgtgagtcttttcagcaacccggtccagtactgggagatacagccatccaccttcagatgtgtctacgtgcgctctgccattcaactcggaaactataagtaattctcaagaaagccctcatttttataacctggcaaaatcttgttaatgtcattgctaaaaaataaataaaagctagatactggaaacctaactgcaatgtggatgttttacccacatgacttattatgcataaagccaaatttccagtttaagtaattgcctacaataaaaagaaattttgcctgccattttcagaatcatcttttgaagctttctgttgatgttaactgagctactagagatattcttatttcactaaatgtaaaatttggagtaaatatatatgtcaatatttagtaaagcttttcttttttaatttccaggaaaaaataaaaagagtatgagtcttctgtaattcattgagcagttagctcatttgagataaagtcaaatgccaaacactagctctgtattaatccccatcattactggtaaagcctcatttgaatgtgtgaattcaatacaggctatgtaaaatttttactaatgtcattattttgaaaaaataaatttaaaaatacattcaaaattactattgtatacaagcttaattgttaatattccctaaacacaattttatgaagggagaagacattggtttgttgacaataacagtacatcttttcaagttctcagctatttcttctacctctccctatcttacatttgagtatggtaacttatgtcatctatgttgaatgtaagcttataaagcacaaagcatacatttcctgactggtctagagaactgatgtttcaatttacccctctgctaaataaatattaaaactatcatgtgaaaaaaaaaaaaaaaaaa

SEQ ID NO: 13940 - DNA, 1165 bp, Homo sapiens
agaaggaacagggagcggccaggatgctgaatctgctgctgctggcgctgcccgtcctggcgagccgcgcctacgcggcccctgccccaggccaggccctgcagcgagtgggcatcgttgggggtcaggaggcccccaggagcaagtggccctggcaggtgagcctgagagtccgcgaccgatactggatgcacttctgcgggggctccctcatccacccccagtgggtgctgaccgcagcgcactgcgtgggaccggacgtcaaggatctggccgccctcagggtgcaactgcgggagcagcacctctactaccaggaccagctgctgccggtcagcaggatcatcgtgcacccacagttctacaccgcccagatcggagcggacatcgccctgctggagctggaggagccggtgaacgtctccagccacgtccacacggtcaccctgccccctgcctcagagaccttccccccggggatgccgtgctgggtcactggctggggcgatgtggacaatgatgagcgcctcccaccgccatttcctctgaagcaggtgaaggtccccataatggaaaaccacatttgtgacgcaaaataccaccttggcgcctacacgggagacgacgtccgcatcgtccgtgacgacatgctgtgtgccgggaacacccggagggactcatgccagggcgactccggagggcccctggtgtgcaaggtgaatggcacctggctgcaggcgggcgtggtcagctggggcgagggctgtgcccagcccaaccggcctggcatctacacccgtgtcacctactacttggactggatccaccactatgtccccaaaaagccgtgagtcaggcctggggtgtccacctgggtcactggagagccagcccctcctgtccaaaacaccactgcttcctacccaggtggcgactgccccccacaccttccctgccccgtcctgagtgccccttcctgtcctaagccccctgctctcttctgagccccttcccctgtcctgaggacccttccccatcctgagcccccttccctgtcctaagcctgacgcctgcaccgggccctccggccctcccctgcccaggcagctggtggtgggcgctaatcctcctgagtgctggacctcattaaagtgcatggaaatca

SEQ ID NO: 13941 - DNA, 1194 bp, Homo sapiens
ataaatggggaggggagagcccactgggtagaaggaacagggagcggccaggatgctgaatctgctgctgctggcgctgcccgtcctggcgagccgcgcctacgcggcccctgccccaggccaggccctgcagcgagtgggcatcgtcgggggtcaggaggcccccaggagcaagtggccctggcaggtgagcctgagagtccacggcccatactggatgcacttctgcgggggctccctcatccacccccagtgggtgctgaccgcagcgcactgcgtgggaccggacgtcaaggatctggccgccctcagggtgcaactgcgggagcagcacctctactaccaggaccagctgctgccggtcagcaggatcatcgtgcacccacagttctacaccgcccagatcggagcggacatcgccctgctggagctggaggagccggtgaacgtctccagccacgtccacacggtcaccctgccccctgcctcagagaccttccccccggggatgccgtgctgggtcactggctggggcgatgtggacaatgatgagcgcctcccaccgccatttcctctgaagcaggtgaaggtccccataatggaaaaccacatttgtgacgcaaaataccaccttggcgcctacacgggagacgacgtccgcatcgtccgtgacgacatgctgtgtgccgggaacacccggagggactcatgccagggcgactccggagggcccctggtgtgcaaggtgaatggcacctggctgcaggcgggcgtggtcagctggggcgagggctgtgcccagcccaaccggcctggcatctacacccgtgtcacctactacttggactggatccaccactatgtccccaaaaagccgtgagtcaggcctgggttggccacctgggtcactggaggaccaacccctgctgtccaaaacaccactgcttcctacccaggtggcgactgccccccacaccttccctgccccgtcctgagtgccccttcctgtcctaagccccctgctctcttctgagccccttcccctgtcctgaggacccttccctatcctgagcccccttccctgtcctaagcctgacgcctgcaccgggccctccagccctcccctgcccagatagctggtggtgggcgctaatcctcctgagtgctggacctcattaaagtgcatggaaatca

SEQ ID NO: 13942 - DNA, 3080 bp, Homo sapiens
gggggcggggccttgccgctgcggaggccggagacgcggcggcgctggacgcggaggcgctgggcgcacggcgcggagccggccggagctcgaggccggcggcggcgggagagcgacccgggcggcctcgtagcggggccccggatccccgagtggcggccggagcctcgaaaagagattctcagcgctgattttgagatgatgggcttgggaaacgggcgtcgcagcatgaagtcgccgcccctcgtgctggccgccctggtggcctgcatcatcgtcttgggcttcaactactggattgcgagctcccggagcgtggacctccagacacggatcatggagctggaaggcagggtccgcagggcggctgcagagagaggcgccgtggagctgaagaagaacgagttccagggagagctggagaagcagcgggagcagcttgacaaaatccagtccagccacaacttccagctggagagcgtcaacaagctgtaccaggacgaaaaggcggttttggtgaataacatcaccacaggtgagaggctcatccgagtgctgcaagaccagttaaagaccctgcagaggaattacggcaggctgcagcaggatgtcctccagtttcagaagaaccagaccaacctggagaggaagttctcctacgacctgagccagtgcatcaatcagatgaaggaggtgaaggaacagtgtgaggagcgaatagaagaggtcaccaaaaaggggaatgaagctgtagcttccagagacctgagtgaaaacaacgaccagagacagcagctccaagccctcagtgagcctcagcccaggctgcaggcagcaggcctgccacacacagaggtgccacaagggaagggaaacgtgcttggtaacagcaagtcccagacaccagcccccagttccgaagtggttttggattcaaagagacaagttgagaaagaggaaaccaatgagatccaggtggtgaatgaggagcctcagagggacaggctgccgcaggagccaggccgggagcaggtggtggaagacagacctgtaggtggaagaggcttcgggggagccggagaactgggccagaccccacaggtgcaggctgccctgtcagtgagccaggaaaatccagagatggagggccctgagcgagaccagcttgtcatccccgacggacaggaggaggagcaggaagctgccggggaagggagaaaccagcagaaactgagaggagaagatgactacaacatggatgaaaatgaagcagaatctgagacagacaagcaagcagccctggcagggaatgacagaaacatagatgtttttaatgttgaagatcagaaaagagacaccataaatttacttgatcagcgtgaaaagcggaatcatacactctgaattgaactggaatcacatatttcacaacagggccgaagagatgactataaaatgttcatgagggactgaatactgaaaactgtgaaatgtactaaataaaatgtacatctgaagatgattattgtgaaattttagtatgcactttgtgtaggaaaaaatggaatggtcttttaaacagcttttggggggtactttggaagtgtctaataaggtgtcacaatttttggtagtaggtatttcgtgagaagttcaacaccaaaactggaacatagttctccttcaagtgttggcgacagcggggcttcctgattctggaatataactttgtgtaaattaacagccacctatagaagagtccatctgctgtgaaggagagacagagaactctgggttccgtcgtcctgtccacgtgctgtaccaagtgctggtgccagcctgttacctgttctcactgaaaagtctggctaatgctcttgtgtagtcacttctgattctgacaatcaatcaatcaatggcctagagcactgactgttaacacaaacgtcactagcaaagtagcaacagctttaagtctaaatacaaagctgttctgtgtgagaattttttaaaaggctacttgtataataacccttgtcatttttaatgtacaaaacgctattaagtggcttagaatttgaacatttgtggtctttatttactttgcttcgtgtgtgggcaaagcaacatcttccctaaatatatattaccaagaaaagcaagaagcagattaggtttttgacaaaacaaacaggccaaaagggggctgacctggagcagagcatggtgagaggcaaggcatgagagggcaagtttgttgtggacagatctgtgcctactttattactggagtaaaagaaaacaaagttcattgatgtcgaaggatatatacagtgttagaaattaggactgtttagaaaaacaggaatacaatggttgtttttatcatagtgtacacatttagcttgtggtaaatgactcacaaaactgattttaaaatcaagttaatgtgaattttgaaaattactacttaatcctaattcacaataacaatggcattaaggtttgacttgagttggttcttagtattatttatggtaaataggctcttaccacttgcaaataactggccacatcattaatgactgacttcccagtaaggctctctaaggggtaagtaggaggatccacaggatttgagatgctaaggccccagagatcgtttgatccaaccctcttattttcagaggggaaaatggggcctagaagttacagagcatctagctggtgcgctggcacccctggcctcacacagactcccgagtagctgggactacaggcacacagtcactgaagcaggccctgtttgcaattcacgttgccacctccaacttaaacattcttcatatgtgatgtccttagtcactaaggttaaactttcccacccagaaaaggcaacttagataaaatcttagagtactttcatactcttctaagtcctcttccagcctcactttgagtcctccttggggttgataggaattttctcttgctttctcaataaagtctctattcatctcatgtttaatttgtacgcatagaattgctgagaaataaaatgttctgttcaacttataaaa

SEQ ID NO: 13943 - DNA, 3047 bp, Homo sapiens
cacccgaaggcgtccgggaatcttcactttttccgttgctagcagtggaagggtcacagaccaaacactaaggcctgagcggtgacaaccgaggcgagatgatggtcaacagggaatgcctcgtgggagaaaaaagacaattttattctcagcgctgattttgagatgatgggcttgggaaacgggcgtcgcagcatgaagtcgccgcccctcgtgctggccgccctggtggcctgcatcatcgtcttgggcttcaactactggattgcgagctcccggagcgtggacctccagacacggatcatggagctggaaggcagggtccgcagggcggctgcagagagaggcgccgtggagctgaagaagaacgagttccagggagagctggagaagcagcgggagcagcttgacaaaatccagtccagccacaacttccagctggagagcgtcaacaagctgtaccaggacgaaaaggcggttttggtgaataacatcaccacaggtgagaggctcatccgagtgctgcaagaccagttaaagaccctgcagaggaattacggcaggctgcagcaggatgtcctccagtttcagaagaaccagaccaacctggagaggaagttctcctacgacctgagccagtgcatcaatcagatgaaggaggtgaaggaacagtgtgaggagcgaatagaagaggtcaccaaaaaggggaatgaagctgtagcttccagagacctgagtgaaaacaacgaccagagacagcagctccaagccctcagtgagcctcagcccaggctgcaggcagcaggcctgccacacacagaggtgccacaagggaagggaaacgtgcttggtaacagcaagtcccagacaccagcccccagttccgaagtggttttggattcaaagagacaagttgagaaagaggaaaccaatgagatccaggtggtgaatgaggagcctcagagggacaggctgccgcaggagccaggccgggagcaggtggtggaagacagacctgtaggtggaagaggcttcgggggagccggagaactgggccagaccccacaggtgcaggctgccctgtcagtgagccaggaaaatccagagatggagggccctgagcgagaccagcttgtcatccccgacggacaggaggaggagcaggaagctgccggggaagggagaaaccagcagaaactgagaggagaagatgactacaacatggatgaaaatgaagcagaatctgagacagacaagcaagcagccctggcagggaatgacagaaacatagatgtttttaatgttgaagatcagaaaagagacaccataaatttacttgatcagcgtgaaaagcggaatcatacactctgaattgaactggaatcacatatttcacaacagggccgaagagatgactataaaatgttcatgagggactgaatactgaaaactgtgaaatgtactaaataaaatgtacatctgaagatgattattgtgaaattttagtatgcactttgtgtaggaaaaaatggaatggtcttttaaacagcttttggggggtactttggaagtgtctaataaggtgtcacaatttttggtagtaggtatttcgtgagaagttcaacaccaaaactggaacatagttctccttcaagtgttggcgacagcggggcttcctgattctggaatataactttgtgtaaattaacagccacctatagaagagtccatctgctgtgaaggagagacagagaactctgggttccgtcgtcctgtccacgtgctgtaccaagtgctggtgccagcctgttacctgttctcactgaaaagtctggctaatgctcttgtgtagtcacttctgattctgacaatcaatcaatcaatggcctagagcactgactgttaacacaaacgtcactagcaaagtagcaacagctttaagtctaaatacaaagctgttctgtgtgagaattttttaaaaggctacttgtataataacccttgtcatttttaatgtacaaaacgctattaagtggcttagaatttgaacatttgtggtctttatttactttgcttcgtgtgtgggcaaagcaacatcttccctaaatatatattaccaagaaaagcaagaagcagattaggtttttgacaaaacaaacaggccaaaagggggctgacctggagcagagcatggtgagaggcaaggcatgagagggcaagtttgttgtggacagatctgtgcctactttattactggagtaaaagaaaacaaagttcattgatgtcgaaggatatatacagtgttagaaattaggactgtttagaaaaacaggaatacaatggttgtttttatcatagtgtacacatttagcttgtggtaaatgactcacaaaactgattttaaaatcaagttaatgtgaattttgaaaattactacttaatcctaattcacaataacaatggcattaaggtttgacttgagttggttcttagtattatttatggtaaataggctcttaccacttgcaaataactggccacatcattaatgactgacttcccagtaaggctctctaaggggtaagtaggaggatccacaggatttgagatgctaaggccccagagatcgtttgatccaaccctcttattttcagaggggaaaatggggcctagaagttacagagcatctagctggtgcgctggcacccctggcctcacacagactcccgagtagctgggactacaggcacacagtcactgaagcaggccctgtttgcaattcacgttgccacctccaacttaaacattcttcatatgtgatgtccttagtcactaaggttaaactttcccacccagaaaaggcaacttagataaaatcttagagtactttcatactcttctaagtcctcttccagcctcactttgagtcctccttggggttgataggaattttctcttgctttctcaataaagtctctattcatctcatgtttaatttgtacgcatagaattgctgagaaataaaatgttctgttcaacttataaaa

SEQ ID NO: 13944 - DNA, 1815 bp, Homo sapiens
ggggagatgatccgagccgcgccgccgccgctgttcctgctgctgctgctgctgctgctgctagtgtcctgggcgtcccgaggcgaggcagcccccgaccaggacgagatccagcgcctccccgggctggccaagcagccgtctttccgccagtactccggctacctcaaaagctccggctccaagcacctccactactggtttgtggagtcccagaaggatcccgagaacagccctgtggtgctttggctcaatgggggtcccggctgcagctcactagatgggctcctcacagagcatggccccttcctggtccagccagatggtgtcaccctggagtacaacccctattcttggaatctgattgccaatgtgttatacctggagtccccagctggggtgggcttctcctactccgatgacaagttttatgcaactaatgacactgaggtcgcccagagcaattttgaggcccttcaagatttcttccgcctctttccggagtacaagaacaacaaacttttcctgaccggggagagctatgctggcatctacatccccaccctggccgtgctggtcatgcaggatcccagcatgaaccttcaggggctggctgtgggcaatggactctcctcctatgagcagaatgacaactccctggtctactttgcctactaccatggccttctggggaacaggctttggtcttctctccagacccactgctgctctcaaaacaagtgtaacttctatgacaacaaagacctggaatgcgtgaccaatcttcaggaagtggcccgcatcgtgggcaactctggcctcaacatctacaatctctatgccccgtgtgctggaggggtgcccagccattttaggtatgagaaggacactgttgtggtccaggatttgggcaacatcttcactcgcctgccactcaagcggatgtggcatcaggcactgctgcgctcaggggataaagtgcgcatggaccccccctgcaccaacacaacagctgcttccacctacctcaacaacccgtacgtgcggaaggccctcaacatcccggagcagctgccacaatgggacatgtgcaactttctggtaaacttacagtaccgccgtctctaccgaagcatgaactcccagtatctgaagctgcttagctcacagaaataccagatcctattatataatggagatgtagacatggcctgcaatttcatgggggatgagtggtttgtggattccctcaaccagaagatggaggtgcagcgccggccctggttagtgaagtacggggacagcggggagcagattgccggcttcgtgaaggagttctcccacatcgcctttctcacgatcaagggcgccggccacatggttcccaccgacaagcccctcgctgccttcaccatgttctcccgcttcctgaacaagcagccatactgatgaccacagcaaccagctccacggcctgatgcagcccctcccagcctctcccgctaggagagtcctcttctaagcaaagtgcccctgcaggcgggttctgccgccaggactgcccccttcccagagccctgtacatcccagactgggcccagggtctcccatagacagcctgggggcaagttagcactttattcccgcagcagttcctgaatggggtggcctggccccttctctgcttaaagaatgccctttatgatgcactgattccatcccaggaacccaacagagctcaggacagcccacagggaggtggtggacggactgtaattgatagattgattatggaattaaattgggtacagcttc

SEQ ID NO: 13945 - DNA, 1904 bp, Homo sapiens
agctatttcaaggcgcgcgcctcgtggtggactcaccgctagcccgcagcgctcggcttcctggtaattcttcacctcttttctcagctccctgcagcatgggtgctgggccctccttgctgctcgccgccctcctgctgcttctctccggcgacggcgccgtgcgctgcgacacacctgccaactgcacctatcttgacctgctgggcacctgggtcttccaggtgggctccagcggttcccagcgcgatgtcaactgctcggttatgggaccacaagaaaaaaaagtagtggtgtaccttcagaagctggatacagcatatgatgaccttggcaattctggccatttcaccatcatttacaaccaaggctttgagattgtgttgaatgactacaagtggtttgccttttttaagtataaagaagagggcagcaaggtgaccacttactgcaacgagacaatgactgggtgggtgcatgatgtgttgggccggaactgggcttgtttcaccggaaagaaggtgggaactgcctctgagaatgtgtatgtcaacacagcacaccttaagaattctcaggaaaagtattctaataggctctacaagtatgatcacaactttgtgaaagctatcaatgccattcagaagtcttggactgcaactacatacatggaatatgagactcttaccctgggagatatgattaggagaagtggtggccacagtcgaaaaatcccaaggcccaaacctgcaccactgactgctgaaatacagcaaaagattttgcatttgccaacatcttgggactggagaaatgttcatggtatcaattttgtcagtcctgttcgaaaccaagcatcctgtggcagctgctactcatttgcttctatgggtatgctagaagcgagaatccgtatactaaccaacaattctcagaccccaatcctaagccctcaggaggttgtgtcttgtagccagtatgctcaaggctgtgaaggcggcttcccataccttattgcaggaaagtacgcccaagattttgggctggtggaagaagcttgcttcccctacacaggcactgattctccatgcaaaatgaaggaagactgctttcgttattactcctctgagtaccactatgtaggaggtttctatggaggctgcaatgaagccctgatgaagcttgagttggtccatcatgggcccatggcagttgcttttgaagtatatgatgacttcctccactacaaaaaggggatctaccaccacactggtctaagagaccctttcaacccctttgagctgactaatcatgctgttctgcttgtgggctatggcactgactcagcctctgggatggattactggattgttaaaaacagctggggcaccggctggggtgagaatggctacttccggatccgcagaggaactgatgagtgtgcaattgagagcatagcagtggcagccacaccaattcctaaattgtagggtatgccttccagtatttcataatgatctgcatcagttgtaaaggggaattggtatattcacagactgtagactttcagcagcaatctcagaagcttacaaatagatttccatgaagatatttgtcttcagaattaaaactgcccttaattttaatatacctttcaatcggccactggccatttttttctaagtattcaattaagtgggaattttctggaagatggtcagctatgaagtaatagagtttgcttaatcatttgtaattcaaacatgctatattttttaaaatcaatgtgaaaacatagacttatttttaaattgtaccaatcacaagaaaataatggcaataattatcaaaacttttaaaatagatgctcatatttttaaaataaagttttaaaaataactgca

SEQ ID NO: 13946 - DNA, 3598 bp, Homo sapiens
cgcttcggtagcataagtgcggtgggagggggctctgcggttttggggacccagggcgggaacccggacccggctggaagtccggagcctgccgcagccccgcccctccgctctttcttggtgaccttaagccagtggctgcctttttctgagcccgggcggggccgaaggcgcccgtaggccctcgggactcccagcactgcagagggtgtgaggtctgacatccaagacacgttgtttcgtatttctgaaggaagaactcaagctccgggaagtgatggctggggatggggcgggcaacttggggaccgagtgtacgatccacgcctaaggttgagggcggccgagctagccaggcagccgtgaccccagtgcttttcagacgtttcttagcttccagagcccaacacatacagctgatacacgcagaccagatctggtcaggtcctcggaagctgagtccagagcgatgctgctgaagacagtgctcttgctgggacatgtggcccaggtgctgatgctggacaatgggctcctgcagacaccacccatgggctggctggcctgggaacgcttccgctgcaacattaactgtgatgaggacccaaagaactgcataagtgaacagctcttcatggagatggctgaccggatggcacaggatggatggcgggacatgggctacacatacctaaacattgatgactgctggatcggcggtcgcgatgccagtggccgcctgatgccagatcccaagcgcttccctcatggcattcctttcctggctgactacgttcactccctgggcctgaagttgggtatctacgcggacatgggcaacttcacctgcatgggttacccaggcaccacactggacaaggtggtccaggatgctcagaccttcgccgagtggaaggtagacatgctcaagctggatggctgcttctccacccccgaggagcgggcccaggggtaccccaagatggctgctgccctgaatgccacaggccgccccatcgccttctcctgcagctggccagcctatgaaggcggcctccccccaagggtgaactacagtctgctggcggacatctgcaacctctggcgtaactatgatgacatccaggactcctggtggagcgtgctctccatcctgaattggttcgtggagcaccaggacatactgcagccagtggccggccctgggcactggaatgaccctgacatgctgctcattgggaactttggtctcagcttagagcaatcccgggcccagatggccctgtggacggtgctggcagcccccctcttgatgtccacagacctgcgtaccatctccgcccagaacatggacattctgcagaatccactcatgatcaaaatcaaccaggatcccttaggcatccagggacgcaggattcacaaggaaaaatctctcatcgaagtgtacatgcggcctctgtccaacaaggctagcgccttagtcttcttcagctgcaggaccgatatgccttatcgctaccactcctcccttggccagctgaacttcaccgggtctgtgatatatgaggcccaggacgtctactcaggtgacatcatcagtggcctccgagatgaaaccaacttcacagtgatcatcaacccttcaggggtagtgatgtggtacctgtatcccatcaagaacctggagatgtcccagcagtgaggagctgggacatgtgacaggctgtggtggcaccactgagcctagaccatggagccttggcatgcccagggcaagtggggaggttctctgctccccaggcctgctcggtgactgaccccatcatacccaaagtgcaatctcacggccaggttctatgccctgtccaagcgtaaaccctcttggaaacttcttttggggcaattttcctgtggccttcctggcctctacttccatgtgcgcagccccacagacgttgctgagcaactcgccagcctcctgagctccatgcccatcaggactctagcctctgaccttgctgttgactctgaaatcaggatttggaagttttcgaattaggagtagagagatctgacctcttgccaggaatgcccatggatcatgtgattggcttttctacccatagagggccttgcagcctgataccactgggagtgagggtcacaaaggagaccttggctccctcaggtcaccaataaacctgttctttaatcaagtagttgtaatatggacctggggtacctttagttagggactctggtggcactacacggggtgctggattcaaatctcacctctatggatgatgtctggcatcgtctggcccctccttttccaaagtgaccagaagattgtacttcctagagatgccagacttgcctcacacccaggagctgcccctgctgtgcctggtatgctggcagtggtgatggtgacaacacaatgaggccaagtagcaatgctcccaggtcctgcagcttgtgctctgcccagcagtcccctggccagcacctcagcctgctcttctctctggtggctccaccccaacccctacttcttttcctttatttctctcccaacctggctgcaaaggaggttcatatccccagatgtgtccacaaacctgtccaggagttgtgtcttaaaattgatttcctgtccctcttcctaaggacaggggtaacagtcaaagtgaaggaatgatgggttcttgcctgtcttgctttggtccgtatttcccaagccctcctcttttagccaaggctacagggcacttgtcttccctggtggctctcccctttggagagagctagtggcagagaacctagctaggtctccttgggctttgaatgcaggagcacccagtgccccaggccttgcactgtgctgcccaaggagtattttctgggtggatctcccatactcctcagggttctgaggtccttgtatttagggtatggtgtaaaaacttacatatgcacattttgttacatcatttaagatgattgaagctttactggttaagtacagggtcaccagagaaagttcctttccccagttgatgtcttgaggctgttgagaaacttaggacagaagcctacctcatcccaggcctgcccctccgtgcatagctctgcctttgggtcttgttcatagtgctgttcaggcaaaatggaatagtctcaggagggaacaccttctcttgctagctccaggaaggctttgtgggaaatgagttgagaccatggacttgggagttgggggccagagttgagcctggacttgaccaattaattcccttacctttcagcccaagatagctacatgtctttacttgctgtataagttttccttttgtcctgggggtgcctgattgatcctatctcttcacccttcattctttcaacaaacatgccatctatctcccaggacatttattcccttctattcaaggccagttaggaatgcaattattttttttttcagttaaatacagacttgtttggacgcaaggtaccctttctctttttaaaaactttttatcatgaaaactttcaaatacaaaaataaaatggtagagagtgaacctccatg

SEQ ID NO: 13947 - DNA, 2443 bp, Homo sapiens
aaatggcgtgcccgtctctccgccggccccctgcctcgcagtggtttctcctgcagctcccctgggctccgcggccagtagtgcagcccgtggagccgcggctttgcccgtctcctctgggtggccccagtgcgcgggctgacactcattcagccggggaaggtgaggcgagtagaggctggtgcggaacttgccgcccccagcagcgccggcgggctaagcccagggccgggcagacaaaagaggccgcccgcgtaggaaggcacggccggcggcggcggagcgcagcgatggccgggcgagggggcagcgcgctgctggctctgtgcggggcactggctgcctgcgggtggctcctgggcgccgaagcccaggagcccggggcgcccgcggcgggcatgaggcggcgccggcggctgcagcaagaggacggcatctccttcgagtaccaccgctaccccgagctgcgcgaggcgctcgtgtccgtgtggctgcagtgcaccgccatcagcaggatttacacggtggggcgcagcttcgagggccgggagctcctggtcatcgagctgtccgacaaccctggcgtccatgagcctggtgagcctgaatttaaatacattgggaatatgcatgggaatgaggctgttggacgagaactgctcattttcttggcccagtacctatgcaacgaataccagaaggggaacgagacaattgtcaacctgatccacagtacccgcattcacatcatgccttccctgaacccagatggctttgagaaggcagcgtctcagcctggtgaactcaaggactggtttgtgggtcgaagcaatgcccagggaatagatctgaaccggaactttccagacctggataggatagtgtacgtgaatgagaaagaaggtggtccaaataatcatctgttgaaaaatatgaagaaaattgtggatcaaaacacaaagcttgctcctgagaccaaggctgtcattcattggattatggatattccttttgtgctttctgccaatctccatggaggagaccttgtggccaattatccatatgatgagacgcggagtggtagtgctcacgaatacagctcctccccagatgacgccattttccaaagcttggcccgggcatactcttctttcaacccggccatgtctgaccccaatcggccaccatgtcgcaagaatgatgatgacagcagctttgtagatggaaccaccaacggtggtgcttggtacagcgtacctggagggatgcaagacttcaattaccttagcagcaactgttttgagatcaccgtggagcttagctgtgagaagttcccacctgaagagactctgaagacctactgggaggataacaaaaactccctcattagctaccttgagcagatacaccgaggagttaaaggatttgtccgagaccttcaaggtaacccaattgcgaatgccaccatctccgtggaaggaatagaccacgatgttacatccgcaaaggatggtgattactggagattgcttatacctggaaactataaacttacagcctcagctccaggctatctggcaataacaaagaaagtggcagttccttacagccctgctgctggggttgattttgaactggagtcattttctgaaaggaaagaagaggagaaggaagaattgatggaatggtggaaaatgatgtcagaaactttaaatttttaaaaaggcttctagttagctgctttaaatctatctatataatgtagtatgatgtaatgtggtcttttttttagattttgtgcagttaatacttaacattgatttattttttaatcatttaaatattaatcaactttccttaaaataaatagcctcttaggtaaaaatataagaacttgatatatttcattctcttatatagtattcattttcctacctatattacacaaaaaagtatagaaaagatttaagtaattttgccatcctaggcttaaatgcaatattcctggtattatttacaatgcagaattttttgagtaattctagctttcaaaaattagtgaagttcttttactgtaattggtgacaatgtcacataatgaatgctattgaaaaggttaacagatacagctcggagttgtgagcactctactgcaagacttaaatagttcagtataaattgtcgtttttttcttgtgctgactaactataagcatgatcttgttaatgcatttttgatgggaagaaaaggtacatgtttacaaagaggttttatgaaaagaataaaaattgacttcttgcttgtacatataggagcaatactattatattatgtagtccgttaacactacttaaaagtttagggttttctcttggttgtagagtggcccagaattgcattctgaatgaataaaggttaaaaaaaaatccccagtgaaaaaaaa

SEQ ID NO: 13948 - DNA, 3468 bp, Homo sapiens
ggaaaagcacttctgctcctaccggcattaagaggcattccgtcttggaattccggcattaagaggcattccgtcttcatagcccgtgagacgccagtgtcacctttagcccaaccagtgccctgagggtggcattttcctaccttcctgtaacgacccccgggattgcccagggctacagcctctctcccgtgagcctccagaccgcgccctggccccgccccccaccccgattggcccggccgggtctgggggcggggcgtttgcccggcctttccagggccggggaaccccaggaggaagctgctgagccatgggcgcctacgcgcgggcttcgggggtctgcgctcgcggctgcctggactcagcaggcccctggaccatgtcccgcgccctgcggccaccgctcccgcctctctgctttttccttttgttgctggcggctgccggtgctcgggccgggggatacgagacatgccccacagtgcagccgaacatgctgaacgtgcacctgctgcctcacacacatgatgacgtgggctggctcaaaaccgtggaccagtacttttatggaatcaagaatgacatccagcacgccggtgtgcagtacatcctggactcggtcatctctgccttgctggcagatcccacccgtcgcttcatttacgtggagattgccttcttctcccgttggtggcaccagcagacaaatgccacacaggaagtcgtgcgagaccttgtgcgccaggggcgcctggagttcgccaatggtggctgggtgatgaacgatgaggcagccacccactacggtgccatcgtggaccagatgacacttgggctgcgctttctggaggacacatttggcaatgatgggcgaccccgtgtggcctggcacattgaccccttcggccactctcgggagcaggcctcgctgtttgcgcagatgggcttcgacggcttcttctttgggcgccttgattatcaagataagtgggtacggatgcagaagctggagatggagcaggtgtggcgggccagcaccagcctgaagcccccgaccgcggacctcttcactggtgtgcttcccaatggttacaacccgccaaggaatctgtgctgggatgtgctgtgtgtcgatcagccgctggtggaggaccctcgcagccccgagtacaacgccaaggagctggtcgattacttcctaaatgtggccactgcccagggccggtattaccgcaccaaccacactgtgatgaccatgggctcggacttccaatatgagaatgccaacatgtggttcaagaaccttgacaagctcatccggctggtaaatgcgcagcaggcaaaaggaagcagtgtccatgttctctactccacccccgcttgttacctctgggagctgaacaaggccaacctcacctggtcagtgaaacatgacgacttcttcccttacgcggatggcccccaccagttctggaccggttacttttccagtcggccggccctcaaacgctacgagcgcctcagctacaacttcctgcaggtgtgcaaccagctggaggcgctggtgggcctggcggccaacgtgggaccctatggctccggagacagtgcacccctcaatgaggcgatggctgtgctccagcatcacgacgccgtcagcggcacctcccgccagcacgtggccaacgactacgcgcgccagcttgcggcaggctgggggccttgcgaggttcttctgagcaacgcgctggcgcggctcagaggcttcaaagatcacttcaccttttgccaacagctaaacatcagcatctgcccgctcagccagacggcggcgcgcttccaggtcatcgtttataatcccctggggcggaaggtgaattggatggtacggctgccggtcagcgaaggcgttttcgttgtgaaggaccccaatggcaggacagtgcccagcgatgtggtaatatttcccagctcagacagccaggcgcaccctccggagctgctgttctcagcctcactgcccgccctgggcttcagcacctattcagtagcccaggtgcctcgctggaagccccaggcccgcgcaccacagcccatccccagaagatcctggtcccctgctttaaccatcgaaaatgagcacatccgggcaacgtttgatcctgacacagggctgttgatggagattatgaacatgaatcagcaactcctgctgcctgttcgccagaccttcttctggtacaacgccagtataggtgacaacgaaagtgaccaggcctcaggtgcctacatcttcagacccaaccaacagaaaccgctgcctgtgagccgctgggctcagatccacctggtgaagacacccttggtgcaggaggtgcaccagaacttctcagcttggtgttcccaggtggttcgcctgtacccaggacagcggcacctggagctagagtggtcggtggggccgatacctgtgggcgacacctgggggaaggaggtcatcagccgttttgacacaccgctggagacaaagggacgcttctacacagacagcaatggccgggagatcctggagaggaggcgggattatcgacccacctggaaactgaaccagacggagcccgtggcaggaaactactatccagtcaacacccggatttacatcacggatggaaacatgcagctgactgtgctgactgaccgctcccaggggggcagcagcctgagagatggctcgctggagctcatggtgcaccgaaggctgctgaaggacgatggacgcggagtatcggagccactaatggagaacgggtcgggggcgtgggtgcgagggcgccacctggtgctgctggacacagcccaggctgcagccgccggacaccggctcctggcggagcaggaggtcctggcccctcaggtggtgctggccccgggtggcggcgccgcctacaatctcggggctcctccgcgcacgcagttctcagggctgcgcagggacctgccgccctcggtgcacctgctcacgctggccagctggggccccgaaatggtgctgctgcgcttggagcaccagtttgccgtaggagaggattccggacgtaacctgagcgcccccgttaccttgaacttgagggacctgttctccaccttcaccatcacccgcctgcaggagaccacgctggtggccaaccagctccgcgaggcagcctccaggctcaagtggacaacaaacacaggccccacaccccaccaaactccgtaccagctggacccggccaacatcacgctggaacccatggaaatccgcactttcctggcctcagttcaatggaaggaggtggatggttaggtctgctgggatgggccctccaagcccaagcctcctgctccgggggcagaccagactctgactctcctcttggggctgctgccattaaaacgctactactaagactcaggtcaaaaaaa

SEQ ID NO: 13949 - DNA, 2503 bp, Homo sapiens
cgctcttattggccaggggacggtagctgcaggactctgctctcctgcggccatgggccagggttgggctactgcaggacttcccagcctcctcttcctgctgctctgctacgggcaccctctgctggtccccagccaggaggcatcccaacaggtgacagtcacccatgggacaagcagccaggcaacaaccagcagccagacaaccacccaccaggcgacggcccaccagacatcagcccagagcccaaacctggtgactgatgaggctgaggccagcaagtttgtggaggaatatgaccggacatcccaggtggtgtggaacgagtatgccgaggccaactggaactacaacaccaacatcaccacagagaccagcaagattctgctgcagaagaacatgcaaatagccaaccacaccctgaagtacggcacccaggccaggaagtttgatgtgaaccagttgcagaacaccactatcaagcggatcataaagaaggttcaggacctagaacgggcagcactgcctgcccaggagctggaggagtacaacaagatcctgttggatatggaaaccacctacagcgtggccactgtgtgccacccgaatggcagctgcctgcagctcgagccagatctgacgaatgtgatggccacgtcccggaaatatgaagacctgttatgggcatgggagggctggcgagacaaggcggggagagccatcctccagttttacccgaaatacgtggaactcatcaaccaggctgcccggctcaatggctatgtagatgcaggggactcgtggaggtctatgtacgagacaccatccctggagcaagacctggagcggctcttccaggagctgcagccactctacctcaacctgcatgcctacgtgcgccgggccctgcaccgtcactacggggcccagcacatcaacctggaggggcccattcctgctcacctgctggggaacatgtgggcgcagacctggtccaacatctatgacttggtggtgcccttcccttcagccccctcgatggacaccacagaggctatgctaaagcagggctggacgcccaggaggatgtttaaggaggctgatgatttcttcacctccctggggctgctgcccgtgcctcctgagttctggaacaagtcgatgctggagaagccaaccgacgggcgggaggtggtctgccacgcctcggcctgggacttctacaacggcaaggacttccggatcaagcagtgcaccaccgtgaacttggaggacctggtggtggcccaccacgaaatgggccacatccagtatttcatgcagtacaaagacttacctgtggccttgagggagggtgccaaccccggcttccatgaggccattggggacgtgctagccctctcagtgtctacgcccaagcacctgcacagtctcaacctgctgagcagtgagggtggcagcgacgagcatgacatcaactttctgatgaagatggcccttgacaagatcgcctttatccccttcagctacctcgtcgatcagtggcgctggagggtatttgatggaagcatcaccaaggagaactataaccaggagtggtggagcctcaggctgaagtaccagggcctctgccccccagtgcccaggactcaaggtgactttgacccaggggccaagttccacattccttctagcgtgccttacatcaggtactttgtcagcttcatcatccagttccagttccacgaggcactgtgccaggcagctggccacacgggccccctgcacaagtgtgacatctaccagtccaaggaggccgggcagcgcctggcgaccgccatgaagctgggcttcagtaggccgtggccggaagccatgcagctgatcacgggccagcccaacatgagcgcctcggccatgttgagctacttcaagccgctgctggactggctccgcacggagaacgagctgcatggggagaagctgggctggccgcagtacaactggacgccgaactccgctcgctcagaagggcccctcccagacagcggccgcgtcagcttcctgggcctggacctggatgcgcagcaggcccgcgtgggccagtggctgctgctcttcctgggcatcgccctgctggtagccaccctgggcctcagccagcggctcttcagcatccgccaccgcagcctccaccggcactcccacgggccccagttcggctccgaggtggagctgagacactcctgaggtgacccggctgggtcggccctgcccaagggcctcccaccagagactgggatgggaacactggtgggcagctgaggacacaccccacaccccagcccaccctgctcctcctgccctgtccctgtccccctcccctcccagtcctccagaccaccagccgccccagccccttctcccagcacacggctgcctgacactgagccccacctctccaagtctctctgtgaatacaattaaaggtcctgccctccc

SEQ ID NO: 13950 - DNA, 4863 bp, Homo sapiens
cgctcttattggccaggggacggtagctgcaggactctgctctcctgcggccatgggccagggttgggctactgcaggacttcccagcctcctcttcctgctgctctgctacgggcaccctctgctggtccccagccaggaggcatcccaacaggtgacagtcacccatgggacaagcagccaggcaacaaccagcagccagacaaccacccaccaggcgacggcccaccagacatcagcccagagcccaaacctggtgactgatgaggctgaggccagcaagtttgtggaggaatatgaccggacatcccaggtggtgtggaacgagtatgccgaggccaactggaactacaacaccaacatcaccacagagaccagcaagattctgctgcagaagaacatgcaaatagccaaccacaccctgaagtacggcacccaggccaggaagtttgatgtgaaccagttgcagaacaccactatcaagcggatcataaagaaggttcaggacctagaacgggcagcactgcctgcccaggagctggaggagtacaacaagatcctgttggatatggaaaccacctacagcgtggccactgtgtgccacccgaatggcagctgcctgcagctcgagccagatctgacgaatgtgatggccacgtcccggaaatatgaagacctgttatgggcatgggagggctggcgagacaaggcggggagagccatcctccagttttacccgaaatacgtggaactcatcaaccaggctgcccggctcaatggctatgtagatgcaggggactcgtggaggtctatgtacgagacaccatccctggagcaagacctggagcggctcttccaggagctgcagccactctacctcaacctgcatgcctacgtgcgccgggccctgcaccgtcactacggggcccagcacatcaacctggaggggcccattcctgctcacctgctggggaacatgtgggcgcagacctggtccaacatctatgacttggtggtgcccttcccttcagccccctcgatggacaccacagaggctatgctaaagcagggctggacgcccaggaggatgtttaaggaggctgatgatttcttcacctccctggggctgctgcccgtgcctcctgagttctggaacaagtcgatgctggagaagccaaccgacgggcgggaggtggtctgccacgcctcggcctgggacttctacaacggcaaggacttccggatcaagcagtgcaccaccgtgaacttggaggacctggtggtggcccaccacgaaatgggccacatccagtatttcatgcagtacaaagacttacctgtggccttgagggagggtgccaaccccggcttccatgaggccattggggacgtgctagccctctcagtgtctacgcccaagcacctgcacagtctcaacctgctgagcagtgagggtggcagcgacgagcatgacatcaactttctgatgaagatggcccttgacaagatcgcctttatccccttcagctacctcgtcgatcagtggcgctggagggtatttgatggaagcatcaccaaggagaactataaccaggagtggtggagcctcaggctgaagtaccagggcctctgccccccagtgcccaggactcaaggtgactttgacccaggggccaagttccacattccttctagcgtgccttacatcaggtactttgtcagcttcatcatccagttccagttccacgaggcactgtgccaggcagctggccacacgggccccctgcacaagtgtgacatctaccagtccaaggaggccgggcagcgcctggcgaccgccatgaagctgggcttcagtaggccgtggccggaagccatgcagctgatcacgggccagcccaacatgagcgcctcggccatgttgagctacttcaagccgctgctggactggctccgcacggagaacgagctgcatggggagaagctgggctggccgcagtacaactggacgccgaactccgatgacttctacaatgagaccgagaccaagatcttcctgcagttttatgaccaaacagggatttgggaccatggggcaccacatctcctgcccccatcccaagcaagaggaacaagggaagccccagtgtacatgtcaaagagggctgcaagctctgggcctcctggaagccctaaacttcctccagctgcacaaggacatggagaggtcccagttcatgatttactttggcacccaggcccacctgtttaaagtcacccagttcaaggacccggatgtgaatggcatgctgaaactcgaagtcatggccacctccagggacaaagaggagctgctgtgggcctggcagggctggcaggatgccgtgggccgccagatctgcaccaccttcgagcactatgtggagctcagcaacaaggctgcacagctcaacggaagaggctgctgagaaagagaatgagaagaggctgctgcagacaagtggacagggaaggcctctgacatttatccaagacctgaaagatgggcaaaagacgggaagcaagatgtgaaagaagagcagcctaggcagaggctccgcggcaggaggagccggtgctctggaagacctgaaagaagcccaggttacaaagacatgggggccttgtggcactccaagtatgagtcggataccctggagcaagacctggagcggctattccaggagctgcggccactctacctgaacctgcacacctacgtgcgcagggccctccaccgccactatgggcccgagctcatcgacctgagggggcccatccctgcccacctcctggagaacacgttggctcagtcctgggtcaacatcttagacccggtcctgcccttcctgaagaagatcccagaggatgtcacaaagatcatgaaagtccagcactggaagccagagaaaatgttggaagaggctgagacattcttcacctccttggcgctgccacctgccccacccagtttctggaaaaagttgatgctaatgaggccaaccgatgggcgagaggtggagtgtcacatctctgcctggaacttctaccaggacgacgatttcagctaggaggctgaggcaggagaatcactggaacctgggagccggaggctgcagtgagccaagatcgcaccattgcactccagctgggagacacagcaagactccgtctcaaaagaaaaaaaaaaaaaagaacaactgccaagaataaagaagtgcgcggaagtgaccacagaagacccgctctccatcttccacgaaatgggccattccagtacttcctgcagtacaagaacctctccatcatcttccgcgcaggtgccaacccagcctttgaagaggctgtggggtctgtgatcaccctctcggcctcctcccacaagcacctgctcaacataggcctgctcagcctctagcaccaggactcagaggatgaggtcaatttcctgatgcatattgccctggagaagatcgccttcatcccctttggctacctgatggacctccttcgctggaaggtctttgacggcaccatctggaaggacatctacaatcaggagtggtggaacctcaggttgaaataccagggcttgtgccccgctattcctcactcagaggaagactttgatccaggtgccaagttccacttttctgcaggtacttcctcagtctggtgctccagttccagttccacgaaacactgtgcaaagcctcgggccacatgggtccactgcaccagtgtgacatctacaactccaagattgccgggaagctcctgggggatgctctaaagctgggctcaagcaagccctggccagaggtcctaaagatgctgactggggagtctgaggtgtctacaaatgtcttcatgacctacttcaaacccctactgacctggctggtgacagaacatgcagcaaggggacatcttaggctggccagacttcagctgttcctttgaagaaaaagacacagacaaagtgacattcctgagtctgaagctggaccccaaccaggctaaatttgggtactgggtgctgttggccctgggctttgtcatgtctctggtggtgctggggctggcctgcaggctgcagtccctggaaaaacagtcactgactcaagacactgagatattcagcccactgcccaatgcctgcttcctgggcatagccatggaaccctgccaggctgctaaaggacagtggatgctgctgggcctctgccttgtcctgatgctgtgctcaatcagcctggccatctggattttcacacagtaaagcaggaagcctccaaggtaacccggctatgggactgcagtgcccaaggaatttctgctctggttagaaaaaggactctgcttcagtccacttctgctctggttagaaaaaggactctgcttcagtccacagtacataaaatgtactcagctatcagctctataagagctggatgcacatcaggagtgtgcccctctgtaacaactctagtcagcacaggccatggtgcacaaaagggacttggaaaatgatggaatgaccagcctgtccaacagaggggcagccaggacatctctgccctcttctcatcccccagccacagtggccaaagaggcccccactaggcactgtggctctgcatgacaaacacacatccagcccaggactctaagcctctcacctggactccagtaaaaaccttgctgagcctccttgtctatccttcctcccccacccaccattgtaaagtttatgtcaccagaatatttctttcatgtctaattgcttaagaacttggttgttcatcaattaaatctagatgt

SEQ ID NO: 13951 - DNA, 5595 bp, Homo sapiens
gcggagatgtgcaagtggcgaagcttgaccgagagcaggctggagcagccgcccaactcctggcgcgggatctgctgaggggtcacggattttaggtgatgggcaagtcagaaagtcagatggatataactgatatcaacactccaaagccaaagaagaaacagcgatggactcgactggagatcagcctctcggtccttgtcctgctcctcaccatcatagctgtgagaatgatcgcactctatgcaacctacgatgatggtatttgcaagtcatcagactgcataaaatcagctgctcgactgatccaaaacatggatgccaccactgagccttgtagagactttttcaaatatgcttgcggaggctggttgaaacgtaatgtcattcccgagaccagctcccgttacggcaactttgacattttaagagatgaactagaagtcgttttgaaagatgtccttcaagaacccaaaactgaagatatagtagcagtgcagaaagcaaaagcattgtacaggtcttgtataaatgaatctgctattgatagcagaggtggagaacctctactcaaactgttaccagacatatatgggtggccagtagcaacagaaaactgggagcaaaaatatggtgcttcttggacagctgaaaaagctattgcacaactgaattctaaatatgggaaaaaagtccttattaatttgtttgttggcactgatgataagaattctgtgaatcatgtaattcatattgaccaacctcgacttggcctcccttctagagattactatgaatgcactggaatctataaagaggcttgtacagcatatgtggattttatgatttctgtggccagattgattcgtcaggaagaaagattgcccatcgatgaaaaccagcttgctttggaaatgaataaagttatggaattggaaaaagaaattgccaatgctacggctaaacctgaagatcgaaatgatccaatgcttctgtataacaagatgagattggcccagatccaaaataacttttcactagagatcaatgggaagccattcagctggttgaatttcacaaatgaaatcatgtcaactgtgaatattagtattacaaatgaggaagatgtggttgtttatgctccagaatatttaaccaaacttaagcccattcttaccaaatattctgccagagatcttcaaaatttaatgtcctggagattcataatggatcttgtaagcagcctcagccgaacctacaaggagtccagaaatgctttccgcaaggccctttatggtacaacctcagaaacagcaacttggagacgttgtgcaaactatgtcaatgggaatatggaaaatgctgtggggaggctttatgtggaagcagcatttgctggagagagtaaacatgtggtcgaggatttgattgcacagatccgagaagtttttattcagactttagatgacctcacttggatggatgccgagacaaaaaagagagctgaagaaaaggccttagcaattaaagaaaggatcggctatcctgatgacattgtttcaaatgataacaaactgaataatgagtacctcgagttgaactacaaagaagatgaatacttcgagaacataattcaaaatttgaaattcagccaaagtaaacaactgaagaagctccgagaaaaggtggacaaagatgagtggataagtggagcagctgtagtcaatgcattttactcttcaggaagaaatcagatagtcttcccagccggcattctgcagccccccttctttagtgcccagcagtccaactcattgaactatgggggcatcggcatggtcataggacacgaaatcacccatggcttcgatgacaatggcagaaactttaacaaagatggagacctcgttgactggtggactcaacagtctgcaagtaactttaaggagcaatcccagtgcatggtgtatcagtatggaaacttttcctgggacctggcaggtggacagcaccttaatggaattaatacactgggagaaaacattgctgataatggaggtcttggtcaagcatacagagcctatcagaattatattaaaaagaatggcgaagaaaaattacttcctggacttgacctaaatcacaaacaactatttttcttgaactttgcacaggtgtggtgtggaacctataggccagagtatgcggttaactccattaaaacagatgtgcacagtccaggcaatttcaggattattgggactttgcagaactctgcagagttttcagaagcctttcactgccgcaagaattcatacatgaatccagaaaagaagtgccgggtttggtgatcttcaaaagaagcattgcagcccttggctagacttgccaacaccacagaaatggggaattctctaatcgaaagaaaatgggccctaggggtcactgtactgacttgagggtgattaacagagagggcaccatcacaatacagataacattaggttgtcctagaaagggtgtggagggaggaagggggtctaaggtctatcaagtcaatcatttctcactgtgtacataatgcttaatttctaaagataatattactgtttatttctgtttctcatatggtctaccagtttgctgatgtccctagaaaacaatgcaaaacctttgaggtagaccaggatttctaatcaaaagggaaaagaagatgttgaagaatagagttaggcaccagaagaagagtaggtgacactatagtttaaaacacattgcctaactactagtttttacttttatttgcaacatttacagtccttcaaaatccttccaaagaattcttatacacattggggccttggagcttacatagttttaaactcatttttgccatacatcagttattcattctgtgatcatttattttaagcactcttaaagcaaaaaatgaatgtctaaaattgttttttgttgtacctgctttgactgatgctgagattcttcaggcttcctgcaattttctaagcaatttcttgctctatctctcaaaacttggtatttttcagagatttatataaatgtaaaaataataatttttatatttaattattaactacatttatgagtaactattattataggtaatcaatgaatattgaagtttcagcttaaaataaacagttgtgaaccaagatctataaagcgatatacagatgaaaatttgagactatttaaacttataaatcatattgatgaaaagatttaagcacaaactttagggtaaaaattgcgattggacagttgtctagagatatatatacttgtggttttcaaattggactttcaaaattaaatctgtccctgagagtgtctctgataaaagggcaaatctgcacctatgtagctctgcatctcctgtcttttcaggtttgtcatcagatggaaatattttgataataaattgaaattgtgaactcattgctccctaagactgtgacaactgtctaactttagaagtgcatttctgaatagaaatgggaggcctctgatggaccttctagaattataagtcacaaagagttctggaaaagaactgtttactgcttgataggaattcatcttttgaggcttctgttcctctcttttcctgttgtattgactattttcgttcattacttgattaagattttacaaaagaggagcacttccaaaattcttatttttcctaacaaaagatgaaagcagggaatttctatctaaatgatgagtattagttccctgtctcttgaaaaatgcccatttgcctttaaaaaaaaaagttacagaaatactataacatatgtacataaattgcataaagcataagtatacagttcaataaacttaactttaactgaacaatggccctgtagccagcacctgtaagaaacagagcagtaccagcgctctaaaagcacctccttgtcactttattactcccagaacaacaactatcctgacttctaatatcattcactagctttgcctggttttgtcttttatgcagatagaatcaatcagtatgtattcttttgtgcctggcttctttctctcagccttacatttgtgagattcctctgtattgtgctgattgtggatcttttcattctcattgcagaataatgttctattgtgggacttattacaatttgttcatcctattgttgatgggcacttgagaactttccattttggcgctattacaaatagtgcaactatgaatgtactgcatgttaccatcttacttgagcctttaatggacttatttcttcaaatccttccaaaaattattataagcattgaaattatagtttcaagccaactgtggatacccttaccctttcctcctttatcacaaccaccgttacaagtatacttatatttccctaaaatacatttaaaacttacctaagtgacatttgtagttggagtaataggagcttccagctctaataaaacagctgtctctaacttattttatttccatcatgtcagagcaggtgaagagccagaagtgaagagtgactagtacaaattataaaaagccactagactcttcactgttagctttttaaaacattaggctcccatccctatggaggaacaactctccagtgcctggatcccctctgtctacaaatataagattttctgggcctaaaggatagatcaaagtcaaaaatagcaatgcctccctatccctcacacatccagacatcatgaattttacatggtactcttgttgagttctatagagccttctgatgtctctaaagcactaccgattctttggagttgtcacatcagataagacatatctctaattccatccataaatccagttctactatggctgagttctggtcaaagaaagaaagtttagaagctgagacacaaagggttgggagctgatgaaactcacaaatgatggtaggaagaagctctcgacaatacccgttggcaaggagtctgcctccatgctgcagtgttcgagtggattgtaggtgcaagatggaaaggattgtaggtgcaagctgtccagagaaaagagtccttgttccagccctattctgccactcctgacagggtgaccttgggtatttgcaatattcctttgggcctctgcttctctcacctaaaaaaagagaattagattatattggtggttctcagcaagagaaggagtatgtgtccaatgctgccttcccatgaatctgtctcccagttatgaatcagtgggcaggataaactgaaaactcccatttaagtgtctgaatcgagtgagacaaaattttagtccaaataacaagtaccaaagttttatcaagtttgggtctgtgctgctgttactgttaaccatttaagtggggcaaaaccttgctaattttctcaaaagcatttatcattcttgttgccacagctggagctctcaaactaaaagacatttgttattttggaaagaagaaagactctattctcaaagtttcctaatcagaaatttttatcagtttccagtctcaaaaatacaaaataaaaacaaacgtttttaatact

SEQ ID NO: 13952 - DNA, 5665 bp, Homo sapiens
agtccggcctcagcctggagcccgcgcgccttgggcggatgcacggactgagaggcgcttggctgggctctcagcccgccactgccacccggccccgtgcgctcattggtcgggatgtgtcggctcagcagcctccaacttctcccgaatcccactggattttaggtgatgggcaagtcagaaagtcagatggatataactgatatcaacactccaaagccaaagaagaaacagcgatggactcgactggagatcagcctctcggtccttgtcctgctcctcaccatcatagctgtgagaatgatcgcactctatgcaacctacgatgatggtatttgcaagtcatcagactgcataaaatcagctgctcgactgatccaaaacatggatgccaccactgagccttgtagagactttttcaaatatgcttgcggaggctggttgaaacgtaatgtcattcccgagaccagctcccgttacggcaactttgacattttaagagatgaactagaagtcgttttgaaagatgtccttcaagaacccaaaactgaagatatagtagcagtgcagaaagcaaaagcattgtacaggtcttgtataaatgaatctgctattgatagcagaggtggagaacctctactcaaactgttaccagacatatatgggtggccagtagcaacagaaaactgggagcaaaaatatggtgcttcttggacagctgaaaaagctattgcacaactgaattctaaatatgggaaaaaagtccttattaatttgtttgttggcactgatgataagaattctgtgaatcatgtaattcatattgaccaacctcgacttggcctcccttctagagattactatgaatgcactggaatctataaagaggcttgtacagcatatgtggattttatgatttctgtggccagattgattcgtcaggaagaaagattgcccatcgatgaaaaccagcttgctttggaaatgaataaagttatggaattggaaaaagaaattgccaatgctacggctaaacctgaagatcgaaatgatccaatgcttctgtataacaagatgagattggcccagatccaaaataacttttcactagagatcaatgggaagccattcagctggttgaatttcacaaatgaaatcatgtcaactgtgaatattagtattacaaatgaggaagatgtggttgtttatgctccagaatatttaaccaaacttaagcccattcttaccaaatattctgccagagatcttcaaaatttaatgtcctggagattcataatggatcttgtaagcagcctcagccgaacctacaaggagtccagaaatgctttccgcaaggccctttatggtacaacctcagaaacagcaacttggagacgttgtgcaaactatgtcaatgggaatatggaaaatgctgtggggaggctttatgtggaagcagcatttgctggagagagtaaacatgtggtcgaggatttgattgcacagatccgagaagtttttattcagactttagatgacctcacttggatggatgccgagacaaaaaagagagctgaagaaaaggccttagcaattaaagaaaggatcggctatcctgatgacattgtttcaaatgataacaaactgaataatgagtacctcgagttgaactacaaagaagatgaatacttcgagaacataattcaaaatttgaaattcagccaaagtaaacaactgaagaagctccgagaaaaggtggacaaagatgagtggataagtggagcagctgtagtcaatgcattttactcttcaggaagaaatcagatagtcttcccagccggcattctgcagccccccttctttagtgcccagcagtccaactcattgaactatgggggcatcggcatggtcataggacacgaaatcacccatggcttcgatgacaatggcagaaactttaacaaagatggagacctcgttgactggtggactcaacagtctgcaagtaactttaaggagcaatcccagtgcatggtgtatcagtatggaaacttttcctgggacctggcaggtggacagcaccttaatggaattaatacactgggagaaaacattgctgataatggaggtcttggtcaagcatacagagcctatcagaattatattaaaaagaatggcgaagaaaaattacttcctggacttgacctaaatcacaaacaactatttttcttgaactttgcacaggtgtggtgtggaacctataggccagagtatgcggttaactccattaaaacagatgtgcacagtccaggcaatttcaggattattgggactttgcagaactctgcagagttttcagaagcctttcactgccgcaagaattcatacatgaatccagaaaagaagtgccgggtttggtgatcttcaaaagaagcattgcagcccttggctagacttgccaacaccacagaaatggggaattctctaatcgaaagaaaatgggccctaggggtcactgtactgacttgagggtgattaacagagagggcaccatcacaatacagataacattaggttgtcctagaaagggtgtggagggaggaagggggtctaaggtctatcaagtcaatcatttctcactgtgtacataatgcttaatttctaaagataatattactgtttatttctgtttctcatatggtctaccagtttgctgatgtccctagaaaacaatgcaaaacctttgaggtagaccaggatttctaatcaaaagggaaaagaagatgttgaagaatagagttaggcaccagaagaagagtaggtgacactatagtttaaaacacattgcctaactactagtttttacttttatttgcaacatttacagtccttcaaaatccttccaaagaattcttatacacattggggccttggagcttacatagttttaaactcatttttgccatacatcagttattcattctgtgatcatttattttaagcactcttaaagcaaaaaatgaatgtctaaaattgttttttgttgtacctgctttgactgatgctgagattcttcaggcttcctgcaattttctaagcaatttcttgctctatctctcaaaacttggtatttttcagagatttatataaatgtaaaaataataatttttatatttaattattaactacatttatgagtaactattattataggtaatcaatgaatattgaagtttcagcttaaaataaacagttgtgaaccaagatctataaagcgatatacagatgaaaatttgagactatttaaacttataaatcatattgatgaaaagatttaagcacaaactttagggtaaaaattgcgattggacagttgtctagagatatatatacttgtggttttcaaattggactttcaaaattaaatctgtccctgagagtgtctctgataaaagggcaaatctgcacctatgtagctctgcatctcctgtcttttcaggtttgtcatcagatggaaatattttgataataaattgaaattgtgaactcattgctccctaagactgtgacaactgtctaactttagaagtgcatttctgaatagaaatgggaggcctctgatggaccttctagaattataagtcacaaagagttctggaaaagaactgtttactgcttgataggaattcatcttttgaggcttctgttcctctcttttcctgttgtattgactattttcgttcattacttgattaagattttacaaaagaggagcacttccaaaattcttatttttcctaacaaaagatgaaagcagggaatttctatctaaatgatgagtattagttccctgtctcttgaaaaatgcccatttgcctttaaaaaaaaaagttacagaaatactataacatatgtacataaattgcataaagcataagtatacagttcaataaacttaactttaactgaacaatggccctgtagccagcacctgtaagaaacagagcagtaccagcgctctaaaagcacctccttgtcactttattactcccagaacaacaactatcctgacttctaatatcattcactagctttgcctggttttgtcttttatgcagatagaatcaatcagtatgtattcttttgtgcctggcttctttctctcagccttacatttgtgagattcctctgtattgtgctgattgtggatcttttcattctcattgcagaataatgttctattgtgggacttattacaatttgttcatcctattgttgatgggcacttgagaactttccattttggcgctattacaaatagtgcaactatgaatgtactgcatgttaccatcttacttgagcctttaatggacttatttcttcaaatccttccaaaaattattataagcattgaaattatagtttcaagccaactgtggatacccttaccctttcctcctttatcacaaccaccgttacaagtatacttatatttccctaaaatacatttaaaacttacctaagtgacatttgtagttggagtaataggagcttccagctctaataaaacagctgtctctaacttattttatttccatcatgtcagagcaggtgaagagccagaagtgaagagtgactagtacaaattataaaaagccactagactcttcactgttagctttttaaaacattaggctcccatccctatggaggaacaactctccagtgcctggatcccctctgtctacaaatataagattttctgggcctaaaggatagatcaaagtcaaaaatagcaatgcctccctatccctcacacatccagacatcatgaattttacatggtactcttgttgagttctatagagccttctgatgtctctaaagcactaccgattctttggagttgtcacatcagataagacatatctctaattccatccataaatccagttctactatggctgagttctggtcaaagaaagaaagtttagaagctgagacacaaagggttgggagctgatgaaactcacaaatgatggtaggaagaagctctcgacaatacccgttggcaaggagtctgcctccatgctgcagtgttcgagtggattgtaggtgcaagatggaaaggattgtaggtgcaagctgtccagagaaaagagtccttgttccagccctattctgccactcctgacagggtgaccttgggtatttgcaatattcctttgggcctctgcttctctcacctaaaaaaagagaattagattatattggtggttctcagcaagagaaggagtatgtgtccaatgctgccttcccatgaatctgtctcccagttatgaatcagtgggcaggataaactgaaaactcccatttaagtgtctgaatcgagtgagacaaaattttagtccaaataacaagtaccaaagttttatcaagtttgggtctgtgctgctgttactgttaaccatttaagtggggcaaaaccttgctaattttctcaaaagcatttatcattcttgttgccacagctggagctctcaaactaaaagacatttgttattttggaaagaagaaagactctattctcaaagtttcctaatcagaaatttttatcagtttccagtctcaaaaatacaaaataaaaacaaacgtttttaatact

SEQ ID NO: 13953 - DNA, 5538 bp, Homo sapiens
cctggaggagggctctggaagtcacgtcaggattttaggtgatgggcaagtcagaaagtcagatggatataactgatatcaacactccaaagccaaagaagaaacagcgatggactcgactggagatcagcctctcggtccttgtcctgctcctcaccatcatagctgtgagaatgatcgcactctatgcaacctacgatgatggtatttgcaagtcatcagactgcataaaatcagctgctcgactgatccaaaacatggatgccaccactgagccttgtagagactttttcaaatatgcttgcggaggctggttgaaacgtaatgtcattcccgagaccagctcccgttacggcaactttgacattttaagagatgaactagaagtcgttttgaaagatgtccttcaagaacccaaaactgaagatatagtagcagtgcagaaagcaaaagcattgtacaggtcttgtataaatgaatctgctattgatagcagaggtggagaacctctactcaaactgttaccagacatatatgggtggccagtagcaacagaaaactgggagcaaaaatatggtgcttcttggacagctgaaaaagctattgcacaactgaattctaaatatgggaaaaaagtccttattaatttgtttgttggcactgatgataagaattctgtgaatcatgtaattcatattgaccaacctcgacttggcctcccttctagagattactatgaatgcactggaatctataaagaggcttgtacagcatatgtggattttatgatttctgtggccagattgattcgtcaggaagaaagattgcccatcgatgaaaaccagcttgctttggaaatgaataaagttatggaattggaaaaagaaattgccaatgctacggctaaacctgaagatcgaaatgatccaatgcttctgtataacaagatgagattggcccagatccaaaataacttttcactagagatcaatgggaagccattcagctggttgaatttcacaaatgaaatcatgtcaactgtgaatattagtattacaaatgaggaagatgtggttgtttatgctccagaatatttaaccaaacttaagcccattcttaccaaatattctgccagagatcttcaaaatttaatgtcctggagattcataatggatcttgtaagcagcctcagccgaacctacaaggagtccagaaatgctttccgcaaggccctttatggtacaacctcagaaacagcaacttggagacgttgtgcaaactatgtcaatgggaatatggaaaatgctgtggggaggctttatgtggaagcagcatttgctggagagagtaaacatgtggtcgaggatttgattgcacagatccgagaagtttttattcagactttagatgacctcacttggatggatgccgagacaaaaaagagagctgaagaaaaggccttagcaattaaagaaaggatcggctatcctgatgacattgtttcaaatgataacaaactgaataatgagtacctcgagttgaactacaaagaagatgaatacttcgagaacataattcaaaatttgaaattcagccaaagtaaacaactgaagaagctccgagaaaaggtggacaaagatgagtggataagtggagcagctgtagtcaatgcattttactcttcaggaagaaatcagatagtcttcccagccggcattctgcagccccccttctttagtgcccagcagtccaactcattgaactatgggggcatcggcatggtcataggacacgaaatcacccatggcttcgatgacaatggcagaaactttaacaaagatggagacctcgttgactggtggactcaacagtctgcaagtaactttaaggagcaatcccagtgcatggtgtatcagtatggaaacttttcctgggacctggcaggtggacagcaccttaatggaattaatacactgggagaaaacattgctgataatggaggtcttggtcaagcatacagagcctatcagaattatattaaaaagaatggcgaagaaaaattacttcctggacttgacctaaatcacaaacaactatttttcttgaactttgcacaggtgtggtgtggaacctataggccagagtatgcggttaactccattaaaacagatgtgcacagtccaggcaatttcaggattattgggactttgcagaactctgcagagttttcagaagcctttcactgccgcaagaattcatacatgaatccagaaaagaagtgccgggtttggtgatcttcaaaagaagcattgcagcccttggctagacttgccaacaccacagaaatggggaattctctaatcgaaagaaaatgggccctaggggtcactgtactgacttgagggtgattaacagagagggcaccatcacaatacagataacattaggttgtcctagaaagggtgtggagggaggaagggggtctaaggtctatcaagtcaatcatttctcactgtgtacataatgcttaatttctaaagataatattactgtttatttctgtttctcatatggtctaccagtttgctgatgtccctagaaaacaatgcaaaacctttgaggtagaccaggatttctaatcaaaagggaaaagaagatgttgaagaatagagttaggcaccagaagaagagtaggtgacactatagtttaaaacacattgcctaactactagtttttacttttatttgcaacatttacagtccttcaaaatccttccaaagaattcttatacacattggggccttggagcttacatagttttaaactcatttttgccatacatcagttattcattctgtgatcatttattttaagcactcttaaagcaaaaaatgaatgtctaaaattgttttttgttgtacctgctttgactgatgctgagattcttcaggcttcctgcaattttctaagcaatttcttgctctatctctcaaaacttggtatttttcagagatttatataaatgtaaaaataataatttttatatttaattattaactacatttatgagtaactattattataggtaatcaatgaatattgaagtttcagcttaaaataaacagttgtgaaccaagatctataaagcgatatacagatgaaaatttgagactatttaaacttataaatcatattgatgaaaagatttaagcacaaactttagggtaaaaattgcgattggacagttgtctagagatatatatacttgtggttttcaaattggactttcaaaattaaatctgtccctgagagtgtctctgataaaagggcaaatctgcacctatgtagctctgcatctcctgtcttttcaggtttgtcatcagatggaaatattttgataataaattgaaattgtgaactcattgctccctaagactgtgacaactgtctaactttagaagtgcatttctgaatagaaatgggaggcctctgatggaccttctagaattataagtcacaaagagttctggaaaagaactgtttactgcttgataggaattcatcttttgaggcttctgttcctctcttttcctgttgtattgactattttcgttcattacttgattaagattttacaaaagaggagcacttccaaaattcttatttttcctaacaaaagatgaaagcagggaatttctatctaaatgatgagtattagttccctgtctcttgaaaaatgcccatttgcctttaaaaaaaaaagttacagaaatactataacatatgtacataaattgcataaagcataagtatacagttcaataaacttaactttaactgaacaatggccctgtagccagcacctgtaagaaacagagcagtaccagcgctctaaaagcacctccttgtcactttattactcccagaacaacaactatcctgacttctaatatcattcactagctttgcctggttttgtcttttatgcagatagaatcaatcagtatgtattcttttgtgcctggcttctttctctcagccttacatttgtgagattcctctgtattgtgctgattgtggatcttttcattctcattgcagaataatgttctattgtgggacttattacaatttgttcatcctattgttgatgggcacttgagaactttccattttggcgctattacaaatagtgcaactatgaatgtactgcatgttaccatcttacttgagcctttaatggacttatttcttcaaatccttccaaaaattattataagcattgaaattatagtttcaagccaactgtggatacccttaccctttcctcctttatcacaaccaccgttacaagtatacttatatttccctaaaatacatttaaaacttacctaagtgacatttgtagttggagtaataggagcttccagctctaataaaacagctgtctctaacttattttatttccatcatgtcagagcaggtgaagagccagaagtgaagagtgactagtacaaattataaaaagccactagactcttcactgttagctttttaaaacattaggctcccatccctatggaggaacaactctccagtgcctggatcccctctgtctacaaatataagattttctgggcctaaaggatagatcaaagtcaaaaatagcaatgcctccctatccctcacacatccagacatcatgaattttacatggtactcttgttgagttctatagagccttctgatgtctctaaagcactaccgattctttggagttgtcacatcagataagacatatctctaattccatccataaatccagttctactatggctgagttctggtcaaagaaagaaagtttagaagctgagacacaaagggttgggagctgatgaaactcacaaatgatggtaggaagaagctctcgacaatacccgttggcaaggagtctgcctccatgctgcagtgttcgagtggattgtaggtgcaagatggaaaggattgtaggtgcaagctgtccagagaaaagagtccttgttccagccctattctgccactcctgacagggtgaccttgggtatttgcaatattcctttgggcctctgcttctctcacctaaaaaaagagaattagattatattggtggttctcagcaagagaaggagtatgtgtccaatgctgccttcccatgaatctgtctcccagttatgaatcagtgggcaggataaactgaaaactcccatttaagtgtctgaatcgagtgagacaaaattttagtccaaataacaagtaccaaagttttatcaagtttgggtctgtgctgctgttactgttaaccatttaagtggggcaaaaccttgctaattttctcaaaagcatttatcattcttgttgccacagctggagctctcaaactaaaagacatttgttattttggaaagaagaaagactctattctcaaagtttcctaatcagaaatttttatcagtttccagtctcaaaaatacaaaataaaaacaaacgtttttaatact

SEQ ID NO: 13954 - DNA, 5725 bp, Homo sapiens
cctggaggagggctctggaagtcacgtcaggttggctcttcaggttcatttccatagttccctgcggcctctgccttggggagttatgttttgttaccgagatccgcgctaccagattgcaccggggctgatttgggggctgggaatttgccattctgctgtacagacactgatttttttttcttctttttaaaaagcaaggtttgttttcattttggattttaggtgatgggcaagtcagaaagtcagatggatataactgatatcaacactccaaagccaaagaagaaacagcgatggactcgactggagatcagcctctcggtccttgtcctgctcctcaccatcatagctgtgagaatgatcgcactctatgcaacctacgatgatggtatttgcaagtcatcagactgcataaaatcagctgctcgactgatccaaaacatggatgccaccactgagccttgtagagactttttcaaatatgcttgcggaggctggttgaaacgtaatgtcattcccgagaccagctcccgttacggcaactttgacattttaagagatgaactagaagtcgttttgaaagatgtccttcaagaacccaaaactgaagatatagtagcagtgcagaaagcaaaagcattgtacaggtcttgtataaatgaatctgctattgatagcagaggtggagaacctctactcaaactgttaccagacatatatgggtggccagtagcaacagaaaactgggagcaaaaatatggtgcttcttggacagctgaaaaagctattgcacaactgaattctaaatatgggaaaaaagtccttattaatttgtttgttggcactgatgataagaattctgtgaatcatgtaattcatattgaccaacctcgacttggcctcccttctagagattactatgaatgcactggaatctataaagaggcttgtacagcatatgtggattttatgatttctgtggccagattgattcgtcaggaagaaagattgcccatcgatgaaaaccagcttgctttggaaatgaataaagttatggaattggaaaaagaaattgccaatgctacggctaaacctgaagatcgaaatgatccaatgcttctgtataacaagatgagattggcccagatccaaaataacttttcactagagatcaatgggaagccattcagctggttgaatttcacaaatgaaatcatgtcaactgtgaatattagtattacaaatgaggaagatgtggttgtttatgctccagaatatttaaccaaacttaagcccattcttaccaaatattctgccagagatcttcaaaatttaatgtcctggagattcataatggatcttgtaagcagcctcagccgaacctacaaggagtccagaaatgctttccgcaaggccctttatggtacaacctcagaaacagcaacttggagacgttgtgcaaactatgtcaatgggaatatggaaaatgctgtggggaggctttatgtggaagcagcatttgctggagagagtaaacatgtggtcgaggatttgattgcacagatccgagaagtttttattcagactttagatgacctcacttggatggatgccgagacaaaaaagagagctgaagaaaaggccttagcaattaaagaaaggatcggctatcctgatgacattgtttcaaatgataacaaactgaataatgagtacctcgagttgaactacaaagaagatgaatacttcgagaacataattcaaaatttgaaattcagccaaagtaaacaactgaagaagctccgagaaaaggtggacaaagatgagtggataagtggagcagctgtagtcaatgcattttactcttcaggaagaaatcagatagtcttcccagccggcattctgcagccccccttctttagtgcccagcagtccaactcattgaactatgggggcatcggcatggtcataggacacgaaatcacccatggcttcgatgacaatggcagaaactttaacaaagatggagacctcgttgactggtggactcaacagtctgcaagtaactttaaggagcaatcccagtgcatggtgtatcagtatggaaacttttcctgggacctggcaggtggacagcaccttaatggaattaatacactgggagaaaacattgctgataatggaggtcttggtcaagcatacagagcctatcagaattatattaaaaagaatggcgaagaaaaattacttcctggacttgacctaaatcacaaacaactatttttcttgaactttgcacaggtgtggtgtggaacctataggccagagtatgcggttaactccattaaaacagatgtgcacagtccaggcaatttcaggattattgggactttgcagaactctgcagagttttcagaagcctttcactgccgcaagaattcatacatgaatccagaaaagaagtgccgggtttggtgatcttcaaaagaagcattgcagcccttggctagacttgccaacaccacagaaatggggaattctctaatcgaaagaaaatgggccctaggggtcactgtactgacttgagggtgattaacagagagggcaccatcacaatacagataacattaggttgtcctagaaagggtgtggagggaggaagggggtctaaggtctatcaagtcaatcatttctcactgtgtacataatgcttaatttctaaagataatattactgtttatttctgtttctcatatggtctaccagtttgctgatgtccctagaaaacaatgcaaaacctttgaggtagaccaggatttctaatcaaaagggaaaagaagatgttgaagaatagagttaggcaccagaagaagagtaggtgacactatagtttaaaacacattgcctaactactagtttttacttttatttgcaacatttacagtccttcaaaatccttccaaagaattcttatacacattggggccttggagcttacatagttttaaactcatttttgccatacatcagttattcattctgtgatcatttattttaagcactcttaaagcaaaaaatgaatgtctaaaattgttttttgttgtacctgctttgactgatgctgagattcttcaggcttcctgcaattttctaagcaatttcttgctctatctctcaaaacttggtatttttcagagatttatataaatgtaaaaataataatttttatatttaattattaactacatttatgagtaactattattataggtaatcaatgaatattgaagtttcagcttaaaataaacagttgtgaaccaagatctataaagcgatatacagatgaaaatttgagactatttaaacttataaatcatattgatgaaaagatttaagcacaaactttagggtaaaaattgcgattggacagttgtctagagatatatatacttgtggttttcaaattggactttcaaaattaaatctgtccctgagagtgtctctgataaaagggcaaatctgcacctatgtagctctgcatctcctgtcttttcaggtttgtcatcagatggaaatattttgataataaattgaaattgtgaactcattgctccctaagactgtgacaactgtctaactttagaagtgcatttctgaatagaaatgggaggcctctgatggaccttctagaattataagtcacaaagagttctggaaaagaactgtttactgcttgataggaattcatcttttgaggcttctgttcctctcttttcctgttgtattgactattttcgttcattacttgattaagattttacaaaagaggagcacttccaaaattcttatttttcctaacaaaagatgaaagcagggaatttctatctaaatgatgagtattagttccctgtctcttgaaaaatgcccatttgcctttaaaaaaaaaagttacagaaatactataacatatgtacataaattgcataaagcataagtatacagttcaataaacttaactttaactgaacaatggccctgtagccagcacctgtaagaaacagagcagtaccagcgctctaaaagcacctccttgtcactttattactcccagaacaacaactatcctgacttctaatatcattcactagctttgcctggttttgtcttttatgcagatagaatcaatcagtatgtattcttttgtgcctggcttctttctctcagccttacatttgtgagattcctctgtattgtgctgattgtggatcttttcattctcattgcagaataatgttctattgtgggacttattacaatttgttcatcctattgttgatgggcacttgagaactttccattttggcgctattacaaatagtgcaactatgaatgtactgcatgttaccatcttacttgagcctttaatggacttatttcttcaaatccttccaaaaattattataagcattgaaattatagtttcaagccaactgtggatacccttaccctttcctcctttatcacaaccaccgttacaagtatacttatatttccctaaaatacatttaaaacttacctaagtgacatttgtagttggagtaataggagcttccagctctaataaaacagctgtctctaacttattttatttccatcatgtcagagcaggtgaagagccagaagtgaagagtgactagtacaaattataaaaagccactagactcttcactgttagctttttaaaacattaggctcccatccctatggaggaacaactctccagtgcctggatcccctctgtctacaaatataagattttctgggcctaaaggatagatcaaagtcaaaaatagcaatgcctccctatccctcacacatccagacatcatgaattttacatggtactcttgttgagttctatagagccttctgatgtctctaaagcactaccgattctttggagttgtcacatcagataagacatatctctaattccatccataaatccagttctactatggctgagttctggtcaaagaaagaaagtttagaagctgagacacaaagggttgggagctgatgaaactcacaaatgatggtaggaagaagctctcgacaatacccgttggcaaggagtctgcctccatgctgcagtgttcgagtggattgtaggtgcaagatggaaaggattgtaggtgcaagctgtccagagaaaagagtccttgttccagccctattctgccactcctgacagggtgaccttgggtatttgcaatattcctttgggcctctgcttctctcacctaaaaaaagagaattagattatattggtggttctcagcaagagaaggagtatgtgtccaatgctgccttcccatgaatctgtctcccagttatgaatcagtgggcaggataaactgaaaactcccatttaagtgtctgaatcgagtgagacaaaattttagtccaaataacaagtaccaaagttttatcaagtttgggtctgtgctgctgttactgttaaccatttaagtggggcaaaaccttgctaattttctcaaaagcatttatcattcttgttgccacagctggagctctcaaactaaaagacatttgttattttggaaagaagaaagactctattctcaaagtttcctaatcagaaatttttatcagtttccagtctcaaaaatacaaaataaaaacaaacgtttttaatact

SEQ ID NO: 13955 - DNA, 2308 bp, Homo sapiens
cccggggcgtatgacgccggagccctctgaccgcacctctgaccacaacaaacccctactccacccgtcttgtttgtcccacccttggtgacgcagagccccagcccagaccccgcccaaagcactcatttaactggtattgcggagccacgaggcttctgcttactgcaactcgctccggccgctgggcgtagctgcgactcggcggagtcccggcggcgcgtccttgttctaacccggcgcgccatgaccgtcgcgcggccgagcgtgcccgcggcgctgcccctcctcggggagctgccccggctgctgctgctggtgctgttgtgcctgccggccgtgtggggtgactgtggccttcccccagatgtacctaatgcccagccagctttggaaggccgtacaagttttcccgaggatactgtaataacgtacaaatgtgaagaaagctttgtgaaaattcctggcgagaaggactcagtgatctgccttaagggcagtcaatggtcagatattgaagagttctgcaatcgtagctgcgaggtgccaacaaggctaaattctgcatccctcaaacagccttatatcactcagaattattttccagtcggtactgttgtggaatatgagtgccgtccaggttacagaagagaaccttctctatcaccaaaactaacttgccttcagaatttaaaatggtccacagcagtcgaattttgtaaaaagaaatcatgccctaatccgggagaaatacgaaatggtcagattgatgtaccaggtggcatattatttggtgcaaccatctccttctcatgtaacacagggtacaaattatttggctcgacttctagtttttgtcttatttcaggcagctctgtccagtggagtgacccgttgccagagtgcagagaaatttattgtccagcaccaccacaaattgacaatggaataattcaaggggaacgtgaccattatggatatagacagtctgtaacgtatgcatgtaataaaggattcaccatgattggagagcactctatttattgtactgtgaataatgatgaaggagagtggagtggcccaccacctgaatgcagaggaaaatctctaacttccaaggtcccaccaacagttcagaaacctaccacagtaaatgttccaactacagaagtctcaccaacttctcagaaaaccaccacaaaaaccaccacaccaaatgctcaagcaacacggagtacacctgtttccaggacaaccaagcattttcatgaaacaaccccaaataaaggaagtggaaccacttcaggtactacccgtcttctatctgggcacacgtgtttcacgttgacaggtttgcttgggacgctagtaaccatgggcttgctgacttagccaaagaagagttaagaagaaaatacacacaagtatacagactgttcctagtttcttagacttatctgcatattggataaaataaatgcaattgtgctcttcatttaggatgctttcattgtctttaagatgtgttaggaatgtcaacagagcaaggagaaaaaaggcagtcctggaatcacattcttagcacacctacacctcttgaaaatagaacaacttgcagaattgagagtgattcctttcctaaaagtgtaagaaagcatagagatttgttcgtatttagaatgggatcacgaggaaaagagaaggaaagtgatttttttccacaagatctgtaatgttatttccacttataaaggaaataaaaaatgaaaaacattatttggatatcaaaagcaaataaaaacccaattcagtctcttctaagcaaaattgctaaagagagatgaaccacattataaagtaatctttggctgtaaggcattttcatctttccttcgggttggcaaaatattttaaaggtaaaacatgctggtgaaccaggggtgttgatggtgataagggaggaatatagaatgaaagactgaatcttcctttgttgcacaaatagagtttggaaaaagcctgtgaaaggtgtcttctttgacttaatgtctttaaaagtatccagagatactacaatattaacataagaaaagattatatattatttctgaatcgagatgtccatagtcaaatttgtaaatcttattcttttgtaatatttatttatatttatttatgacagtgaacattctgattttacatgtaaaacaagaaaagttgaagaagatatgtgaagaaaaatgtatttttcctaaatagaaataaatgatcccattttttggtaaaaaaaaaaaaaaaaaaaaaaaaa

SEQ ID NO: 13956 - DNA, 1853 bp, Homo sapiens
ggcgcggcgcggcgcagtcggctcgagtactccccgtaacgaggaggtgttctcggccgtcccacccttcactgccgtctccgggctgcgccgccggagccgggacgcgcctccgcagccctcgccgcctccatccccgcggccgcagctcctctcgccgtccgcgcgcacaccatgacgaagaacgagaagaagtccctcaaccagagcctggccgagtggaagctcttcatctacaacccgaccaccggagaattcctggggcgcaccgccaagagctggggtttgatcttgctcttctacctagttttttatgggttcctggctgcactcttctcattcacgatgtgggttatgcttcagactctcaacgatgaggttccaaaataccgtgaccagattcctagcccaggactcatggtttttccaaaaccagtgaccgcattggaatatacattcagtaggtctgatccaacttcgtatgcagggtacattgaagaccttaagaagtttctaaaaccatatactttagaagaacagaagaacctcacagtctgtcctgatggagcactttttgaacagaagggtccagtttatgttgcatgtcagtttcctatttcattacttcaagcatgcagtggtatgaatgatcctgattttggctattctcaaggaaacccttgtattcttgtgaaaatgaacagaataattggattaaagcctgaaggagtgccaaggatagattgtgtttcaaagaatgaagatataccaaatgtagcagtttatcctcataatggaatgatagacttaaaatatttcccatattatgggaaaaaactgcatgttgggtatctacagccattggttgctgttcaggtcagctttgctcctaacaacactgggaaagaagtaacagttgagtgcaagattgatggatcagccaacctaaaaagtcaggatgatcgtgacaagtttttgggacgagttatgttcaaaatcacagcacgtgcatagtatgagtaggatatctccacagagtaaatgttgtgttgtctgtcttcattttgtaacagctggaccttccattctagaattatgagaccaccttggagaaaggtgtgtggtacatgacattgggttacatcataacgtgcttccagatcatagtgttcagtgtcctctgaagtaactgcctgttgcctctgctgccctttgaaccagtgtacagtcgccagatagggaccggtgaacacctgattccaaacatgtaggatgggggtcttgtcctctttttatgtggtttaattgccaagtgtctaaagcttaatatgccgtgctatgtaaatattttatggatataacaactgtcatattttgatgtcaacagagttttagggataaaatggtacccggccaacatcaagtgactttatagctgcaagaaatgtggtatgtggagaagttctgtatgtgaggaaggaaaaaaagaaaataaaagtgtgtttgaaaaatattatcttgggttctttgtaaaatttattttttacatgctgaattagcctcgatctttttgattaagagcacaaacttttttttgtaaaacatgtaaaaaaaaaaactgggattaatttttagtgttggaactgcctcttattttaggctgtagataaaatagcatttttaggttagccagtgtgactatgcacctaattttttatgagattaaattcataagacttaatttgtacaatagtttgtgaaatatcttgttactgcttttatttagcagactgtggactgtaataaagtatataaattgtgaaatataaaaacttggaacttattcaaagctt

SEQ ID NO: 13957 - DNA, 5601 bp, Homo sapiens
gggatgcctccagcagtgaggcggtcagcctgcagcatgggatggctgtggatctttggggcagccctggggcagtgtctgggctacagttcacagcagcaaagggtgccatttcttcagcctcccggtcaaagtcaactgcaagcgagttatgtggagtttagacccagccagggttgtagccctggatactatcgggatcataaaggcttgtataccggacggtgtgttccctgcaattgcaacggacattcaaatcaatgccaggatggctcaggcatatgtgttaactgtcagcacaacaccgcgggagagcactgtgaacgctgccaggagggctactatggcaacgccgtccacggatcctgcagggcctgcccatgtcctcacactaacagctttgccactggctgtgtggtgaatgggggagacgtgcggtgctcctgcaaagctgggtacacaggaacacagtgtgaaaggtgtgcaccgggatatttcgggaatccccagaaattcggaggtagctgccaaccatgcagttgtaacagcaatggccagctgggcagctgtcatcccctgactggagactgcataaaccaagaacccaaagatagcagccctgcagaagaatgtgatgattgcgacagctgtgtgatgaccctcctgaacgacctggccaccatgggcgagcagctccgcctggtcaagtctcagctgcagggcctgagtgccagcgcagggcttctggagcagatgaggcacatggagacccaggccaaggacctgaggaatcagttgctcaactaccgttctgccatttcaaatcatggatcaaaaatagaaggcctggaaagagaactgactgatttgaatcaagaatttgagactttgcaagaaaaggctcaagtaaattccagaaaagcacaaacattaaacaacaatgttaatcgggcaacacaaagcgcaaaagaactggatgtgaagattaaaaatgtcatccggaatgtgcacattcttttaaagcagatctctgggacagatggagagggaaacaacgtgccttcaggtgacttttccagagagtgggctgaagcccagcgcatgatgagggaactgcggaacaggaactttggaaagcacctcagagaagcagaagctgataaaagggagtcgcagctcttgctgaaccggataaggacctggcagaaaacccaccagggggagaacaatgggcttgctaacagtatccgggattctttaaatgaatacgaagccaaactcagtgaccttcgtgctcggctgcaggaggcagctgcccaagccaagcaggcaaatggcttgaaccaagaaaacgagagagctttgggagccattcagagacaagtgaaagaaataaattccctgcagagtgatttcaccaagtatctaaccactgcagactcatctttgttgcaaaccaacattgcgctgcagctgatggagaaaagccagaaggaatatgaaaaattagctgccagtttaaatgaagcaagacaagaactaagtgacaaagtaagagaactttccagatctgctggcaaaacatcccttgtggaggaggcagaaaagcacgcgcggtccttacaagagctggcaaagcagctggaagagatcaagagaaacgccagcggggatgagctggtgcgctgtgctgtggatgccgccaccgcctacgagaacatcctcaatgccatcaaagcggccgaggacgcagccaacagggctgccagtgcatctgaatctgccctccagacagtgataaaggaagatctgccaagaaaagctaaaaccctgagttccaacagtgataaactgttaaatgaagccaagatgacacaaaagaagctaaagcaagaagtcagtccagctctcaacaacctacagcaaaccctgaatattgtgacagttcagaaagaagtgatagacaccaatctcacaactctccgagatggtcttcatgggatacagagaggtgatattgatgctatgatcagtagtgcaaagagcatggtcagaaaggccaacgacatcacagatgaggttctggatgggctcaaccccatccagacagatgtggaaagaattaaggacacctatgggaggacacagaacgaagacttcaaaaaggctctgactgatgcagataactcggtgaataagttaaccaacaaactacctgatctttggcgcaagattgaaagtatcaaccaacagctgttgcccttgggaaacatctctgacaacatggacagaatacgagaactaattcagcaggccagagatgctgccagtaaggttgctgtccccatgaggttcaatggtaaatctggagtcgaagtccgactgccaaatgacctggaagatttgaaaggatatacatctctgtccttgtttctccaaaggcccaactcaagagaaaatgggggtactgagaatatgtttgtgatgtaccttggaaataaagatgcctcccgggactacatcggcatggcagttgtggatggccagctcacctgtgtctacaacctgggggaccgtgaggctgaactccaagtggaccagatcttgaccaagagtgagactaaggaggcagttatggatcgggtgaaatttcagagaatttatcagtttgcaaggcttaattacaccaaaggagccacatccagtaaaccagaaacacccggagtctatgacatggatggtagaaatagcaatacactccttaatttggatcctgaaaatgttgtattttatgttggaggttacccacctgattttaaacttcccagtcgactaagtttccctccatacaaaggttgtattgaattagatgacctcaatgaaaatgttctgagcttgtacaacttcaaaaaaacattcaatctcaacacaactgaagtggagccttgtagaaggaggaaggaagagtcagacaaaaattattttgaaggtacgggctatgctcgagttccaactcaaccacatgctcccatcccaacctttggacagacaattcagaccaccgtggatagaggcttgctgttctttgcagaaaacggggatcgcttcatatctctaaatatagaagatggcaagctcatggtgagatacaaactgaattcagagctaccaaaagagagaggagttggagacgccataaacaacggcagagaccattcgattcagatcaaaattggaaaactccaaaagcgtatgtggataaatgtggacgttcaaaacactataattgatggtgaagtatttgatttcagcacatattatctgggaggaattccaattgcaatcagggaaagatttaacatttctacgcctgctttccgaggctgcatgaaaaatttgaagaaaaccagtggtgtcgttagattgaatgatactgtgggagtaaccaaaaagtgctcggaagactggaagcttgtgcgatctgcctcattctccagaggaggacaattgagtttcactgatttgggcttaccacctactgaccacctccaggcctcatttggatttcagacctttcaacccagtggcatattattagatcatcagacatggacaaggaacctgcaggtcactctggaagatggttacattgaattgagcaccagcgatagcggcagcccaatttttaaatctccacagacgtatatggatggtttactgcattatgtatctgtaataagcgacaactctggactacggcttctcatcgatgaccagcttctgagaaatagcaaaaggctaaaacacatttcaagttcccggcagtctctgcgtctgggcgggagcaattttgagggttgtattagcaatgtttttgtccagaggttatcactgagtcctgaagtcctagatttgaccagtaactctctcaagagagatgtgtccctgggaggctgcagtttaaacaaaccaccttttctaatgttgcttaaaggttctaccaggtttaacaagaccaagacttttcgtatcaaccagctgttgcaggacacaccagtggcctccccaaggagcgtgaaggtgtggcaagatgcttgctcaccacttcccaagacccaggccaatcatggagccctccagtttggggacattcccaccagccacttgctattcaagcttcctcaggagctgctgaaacccaggtcacagtttgctgtggacatgcagacaacatcctccagaggactggtgtttcacacgggcactaagaactcctttatggctctttatctttcaaaaggacgtctggtctttgcactggggacagatgggaaaaaattgaggatcaaaagcaaggagaaatgcaatgatgggaaatggcacacggtggtgtttggccatgatggggaaaaggggcgcttggttgtggatggactgagggcccgggagggaagtttgcctggaaactccaccatcagcatcagagcgccagtttacctgggatcacctccatcagggaaaccaaagagcctccccacaaacagctttgtgggatgcctgaagaactttcagctggattcaaaacccttgtataccccttcttcaagcttcggggtgtcttcctgcttgggtggtcctttggagaaaggcatttatttctctgaagaaggaggtcatgtcgtcttggctcactctgtattgttggggccagaatttaagcttgttttcagcatccgcccaagaagtctcactgggatcctaatacacatcggaagtcagcccgggaagcacttatgtgtttacctggaggcaggaaaggtcacggcctctatggacagtggggcaggtgggacctcaacgtcggtcacaccaaagcagtctctgtgtgatggacagtggcactcggtggcagtcaccataaaacaacacatcctgcacctggaactggacacagacagtagctacacagctggacagatccccttcccacctgccagcactcaagagccactacaccttggaggtgctccagccaatttgacgacactgaggatccctgtgtggaaatcattctttggctgtctgaggaatattcatgtcaatcacatccctgtccctgtcactgaagccttggaagtccaggggcctgtcagtctgaatggttgtcctgaccagtaacccaagcctatttcacagcaaggaaattcaccttcaaaagcactgattacccaatgcacctccctccccagctcgagatcattcttcactcaggacacaaaccagacaggtttaatagcgaatctaattttgaattctgaccatggatacccatcactttggcattcagtgctacatgtgtattttatataaaaatcccatttcttgaagataaaaaaattgttattcaaattgttatgcacagaatgtttttggtaatattaatttccactaaaaaattaaatgtcttttaagaaacattcttttccacttgttaaaaaaattaaatatattttaaagcactttaagaatatgaaactttcatatatgttaaaggattataatttatggaattaaaaaatgcagtgtagtccttaaaaaaaa

SEQ ID NO: 13958 - DNA, 10511 bp, Homo sapiens
gcaggtccgggaggcgcaggcggagagcggcggtgcccccgagcccctctgcggacggctcaggcgggaggaccccgcgcggctggatggcggcggccgcgcggcctcggggtcgggcactggggccagtactgccgccgacgccgctgctcctgctggtactgcgggtgctgccagcctgcggggcgaccgctcgggatcccggggccgcggccgggctcagccttcacccgacttacttcaacctggccgaggcggcgaggatttgggccaccgccacctgcggggagaggggacccggcgaggggaggccccagcccgagctctactgcaagttggtcgggggccccaccgccccaggcagcggccacaccatccagggccagttctgtgactattgcaattctgaagaccccaggaaagcacatcctgtcaccaatgccatcgatggatctgaacgttggtggcaaagccctcccctgtcctcaggcacacagtacaacagagtcaacctcaccttggatctggggcagctcttccatgtggcctatattttaatcaaatttgcaaattctcctcgccctgatctttgggtcttggaaagatctgtagactttggaagcacctactcaccatggcaatattttgctcattctaaagtagactgtttaaaagaatttgggcgggaggcaaatatggctgtcacccgggatgatgatgtactttgtgttactgaatattcccgtattgtacctttggaaaatggtgaggttgtggtgtccttgataaacggtcgtccaggtgcaaaaaattttactttctctcacaccctgagggagtttaccaaggcaacaaacatccgcttgcgttttcttagaaccaatacgcttcttggacacctcatctccaaagcccagcgagatccaactgtcactcggcggtattattacagcataaaggacatcagcattggtgggcagtgtgtttgcaatggccatgctgaagtgtgcaatataaacaatcctgaaaaactgtttcggtgtgaatgccagcaccacacctgtggggagacgtgtgatcgctgctgcacagggtacaatcagaggcgctggcggcccgccgcttgggagcagagccacgagtgtgaagcatgcaactgccacggccatgccagcaactgttactatgatccagatgttgagcggcagcaggcaagcttgaatacccagggcatctatgctggtggaggggtctgcattaactgtcagcacaacacagctggagtaaactgtgaacagtgtgctaagggctattaccgcccttatggggttccagtggatgcccctgatggctgcatcccctgcagctgtgaccctgagcatgcggatggctgtgaacagggttcaggccgctgtcactgcaagccaaatttccacggagacaactgtgagaagtgtgcaattggatactacaatttcccattttgcttgagaattcccatttttcctgtttctacaccaagttcagaagatccagtagctggagatataaaagggtgtgactgtaatctggaaggtgttctccctgaaatatgtgatgcccacggacggtgcctgtgccgccctggggttgagggccctcgatgtgatacctgccgctctggtttctactcattccctatttgccaagcctgctggtgttcagcccttggatcctaccagatgccctgcagctcagtgactggacagtgtgaatgtcggccaggagttacaggacagcggtgtgacaggtgtctctcaggagcttatgatttcccccactgccaaggttccagcagtgcttgtgacccagctggtaccatcaactccaatttggggtattgccaatgcaagcttcatgttgaaggtcctacttgtagccgctgcaaactgttatattggaatctggacaaagaaaaccccagtggatgttcagaatgcaagtgccataaggcgggaacagtgagtggaactggagagtgtaggcagggagatggtgactgtcactgcaagtcccatgtgggtggcgattcctgcgacacctgtgaagatggatattttgctttggaaaagagcaattactttgggtgtcaagggtgtcagtgtgacattggtggggcattgtcctccatgtgcagtgggccctcgggagtgtgccagtgccgagagcatgtcgtgggaaaggtgtgccagcggcctgaaaacaactactatttcccagatttgcatcatatgaagtatgagattgaagacggcagcacacctaatgggagagaccttcgatttggatttgatccgctggcatttcctgagtttagctggagaggatatgcccaaatgacctcagtacagaatgatgtaagaataacattgaatgtagggaagtcaagtggctccttgtttcgtgttattctgagatacgttaaccctggaactgaagcagtatctggccatataactatttatccatcctggggtgctgctcaaagcaaagagatcatcttcctgccgagtaaggagccagcctttgtcactgtccctggaaatggttttgcagacccattttcaatcacaccaggaatatgggttgcttgtattaaggcagaaggagtccttctggattacctggtgctgctccccagggactactatgaagcctctgtactgcagctgccagtcacagaaccatgtgcctacgcaggacctccccaagaaaattgcttactctaccagcatttgccagtgaccagattcccctgtaccctggcttgtgaggccagacacttcctgcttgatggggagccaagacccgtggcagtgaggcagcccacacctgcacaccctgtcatggtggacctcagcgggagagaggtggaattgcatctgcggctgcgcatcccacaggttggccactacgtggttgtggtcgagtattccacggaggcagctcagctgtttgtggttgatgtgaatgtgaagagctccgggtctgttctggcaggccaggtgaacatttacagctgcaactacagtgttctctgccggagtgctgtgattgatcacatgagccgcatcgccatgtatgagctattggcagatgcagacattcagctcaagggacacatggcccgattccttctgcatcaagtttgtatcatacctattgaagaattctcagctgagtatgtgagaccacaagtccactgcattgccagttatgggcgatttgtcaatcaaagtgccacctgtgtctccttggcccatgaaactcctccaacagcattaattttggatgttctaagtggcaggcctttccctcacctgccccagcagtcgtcaccttctgttgatgttcttcctggggtcaccttgaaggcaccgcagaatcaagtgaccctgagaggacgtgtaccacacctgggccgatacgtctttgtcatccatttttaccaagcagcgcacccgacgtttcccgcgcaggtgtcggtggatggcgggtggccacgggcaggctccttccatgcctctttttgcccccatgtgcttggctgccgggatcaagtgattgccgaaggccagattgagtttgacatctcagagcctgaagtggccgcaactgtgaaggttccagaaggaaagtccttggttttggtccgtgttctagtggtgcctgcagaaaactatgactaccaaatacttcacaaaaaatccatggacaagtcactcgagtttatcaccaattgtggaaaaaacagcttttaccttgacccccagacagcctccagattctgtaagaattccgccaggtccctggtggccttttaccacaagggcgccctgccttgtgagtgccaccccactggggccaccggccctcactgcagccctgagggtgggcagtgcccatgccagcccaacgtcatcgggcggcagtgcacccgctgtgcaacaggccactacggattcccacgctgcaagccgtgcagctgtggtcggcgcctttgtgaagagatgacggggcagtgccgctgccctccccgcacggtcaggccccagtgtgaggtgtgtgagacacactcattcagcttccaccccatggccggctgcgaaggctgcaactgttccaggaggggcaccatcgaggctgccatgccggagtgtgaccgggacagcgggcagtgcagatgcaagcccagaatcacagggcggcagtgtgaccgatgtgcttccgggttttaccgctttcctgagtgtgttccctgcaattgcaacagagatgggactgagccaggagtgtgtgacccagggaccggggcttgcctctgcaaggaaaatgtagaaggcacagagtgtaatgtgtgtcgagaaggctcattccatttggacccagccaatctcaagggttgtaccagctgtttctgttttggagtaaataatcaatgtcacagctcacataagcgaaggactaagtttgtggatatgctgggctggcacctggagacagcagacagagtggacatccctgtctctttcaacccaggcagcaacagtatggtggcggatctccaggagctgcccgcaaccatccacagcgcgtcctgggtcgcacccacctcctacctgggggacaaggtttcttcatatggtggttacctcacttaccaagccaagtcctttggcttgcctggcgacatggttcttctggaaaagaagccggatgtacagctcactggtcagcacatgtccatcatctatgaggagacaaacaccccacggccagaccggctgcatcatggacgagtgcacgtggtcgagggaaacttcagacatgccagcagccgtgccccagtgtctagggaggagctgatgacagtgctgtctagactggcagatgtgcgcatccaaggcctctacttcacagagactcaaaggctcaccctgagcgaggtggggctagaggaagcctctgacacaggaagtgggcgcatagcacttgctgtggaaatctgtgcctgcccccctgcctacgctggtgactcttgtcagggttgtagccctggatactatcgggatcataaaggcttgtataccggacggtgtgttccctgcaattgcaacggacattcaaatcaatgccaggatggctcaggcatatgtgttaactgtcagcacaacaccgcgggagagcactgtgaacgctgccaggagggctactatggcaacgccgtccacggatcctgcagggcctgcccatgtcctcacactaacagctttgccactggctgtgtggtgaatgggggagacgtgcggtgctcctgcaaagctgggtacacaggaacacagtgtgaaaggtgtgcaccgggatatttcgggaatccccagaaattcggaggtagctgccaaccatgcagttgtaacagcaatggccagctgggcagctgtcatcccctgactggagactgcataaaccaagaacccaaagatagcagccctgcagaagaatgtgatgattgcgacagctgtgtgatgaccctcctgaacgacctggccaccatgggcgagcagctccgcctggtcaagtctcagctgcagggcctgagtgccagcgcagggcttctggagcagatgaggcacatggagacccaggccaaggacctgaggaatcagttgctcaactaccgttctgccatttcaaatcatggatcaaaaatagaaggcctggaaagagaactgactgatttgaatcaagaatttgagactttgcaagaaaaggctcaagtaaattccagaaaagcacaaacattaaacaacaatgttaatcgggcaacacaaagcgcaaaagaactggatgtgaagattaaaaatgtcatccggaatgtgcacattcttttaaagcagatctctgggacagatggagagggaaacaacgtgccttcaggtgacttttccagagagtgggctgaagcccagcgcatgatgagggaactgcggaacaggaactttggaaagcacctcagagaagcagaagctgataaaagggagtcgcagctcttgctgaaccggataaggacctggcagaaaacccaccagggggagaacaatgggcttgctaacagtatccgggattctttaaatgaatacgaagccaaactcagtgaccttcgtgctcggctgcaggaggcagctgcccaagccaagcaggcaaatggcttgaaccaagaaaacgagagagctttgggagccattcagagacaagtgaaagaaataaattccctgcagagtgatttcaccaagtatctaaccactgcagactcatctttgttgcaaaccaacattgcgctgcagctgatggagaaaagccagaaggaatatgaaaaattagctgccagtttaaatgaagcaagacaagaactaagtgacaaagtaagagaactttccagatctgctggcaaaacatcccttgtggaggaggcagaaaagcacgcgcggtccttacaagagctggcaaagcagctggaagagatcaagagaaacgccagcggggatgagctggtgcgctgtgctgtggatgccgccaccgcctacgagaacatcctcaatgccatcaaagcggccgaggacgcagccaacagggctgccagtgcatctgaatctgccctccagacagtgataaaggaagatctgccaagaaaagctaaaaccctgagttccaacagtgataaactgttaaatgaagccaagatgacacaaaagaagctaaagcaagaagtcagtccagctctcaacaacctacagcaaaccctgaatattgtgacagttcagaaagaagtgatagacaccaatctcacaactctccgagatggtcttcatgggatacagagaggtgatattgatgctatgatcagtagtgcaaagagcatggtcagaaaggccaacgacatcacagatgaggttctggatgggctcaaccccatccagacagatgtggaaagaattaaggacacctatgggaggacacagaacgaagacttcaaaaaggctctgactgatgcagataactcggtgaataagttaaccaacaaactacctgatctttggcgcaagattgaaagtatcaaccaacagctgttgcccttgggaaacatctctgacaacatggacagaatacgagaactaattcagcaggccagagatgctgccagtaaggttgctgtccccatgaggttcaatggtaaatctggagtcgaagtccgactgccaaatgacctggaagatttgaaaggatatacatctctgtccttgtttctccaaaggcccaactcaagagaaaatgggggtactgagaatatgtttgtgatgtaccttggaaataaagatgcctcccgggactacatcggcatggcagttgtggatggccagctcacctgtgtctacaacctgggggaccgtgaggctgaactccaagtggaccagatcttgaccaagagtgagactaaggaggcagttatggatcgggtgaaatttcagagaatttatcagtttgcaaggcttaattacaccaaaggagccacatccagtaaaccagaaacacccggagtctatgacatggatggtagaaatagcaatacactccttaatttggatcctgaaaatgttgtattttatgttggaggttacccacctgattttaaacttcccagtcgactaagtttccctccatacaaaggttgtattgaattagatgacctcaatgaaaatgttctgagcttgtacaacttcaaaaaaacattcaatctcaacacaactgaagtggagccttgtagaaggaggaaggaagagtcagacaaaaattattttgaaggtacgggctatgctcgagttccaactcaaccacatgctcccatcccaacctttggacagacaattcagaccaccgtggatagaggcttgctgttctttgcagaaaacggggatcgcttcatatctctaaatatagaagatggcaagctcatggtgagatacaaactgaattcagagctaccaaaagagagaggagttggagacgccataaacaacggcagagaccattcgattcagatcaaaattggaaaactccaaaagcgtatgtggataaatgtggacgttcaaaacactataattgatggtgaagtatttgatttcagcacatattatctgggaggaattccaattgcaatcagggaaagatttaacatttctacgcctgctttccgaggctgcatgaaaaatttgaagaaaaccagtggtgtcgttagattgaatgatactgtgggagtaaccaaaaagtgctcggaagactggaagcttgtgcgatctgcctcattctccagaggaggacaattgagtttcactgatttgggcttaccacctactgaccacctccaggcctcatttggatttcagacctttcaacccagtggcatattattagatcatcagacatggacaaggaacctgcaggtcactctggaagatggttacattgaattgagcaccagcgatagcggcagcccaatttttaaatctccacagacgtatatggatggtttactgcattatgtatctgtaataagcgacaactctggactacggcttctcatcgatgaccagcttctgagaaatagcaaaaggctaaaacacatttcaagttcccggcagtctctgcgtctgggcgggagcaattttgagggttgtattagcaatgtttttgtccagaggttatcactgagtcctgaagtcctagatttgaccagtaactctctcaagagagatgtgtccctgggaggctgcagtttaaacaaaccaccttttctaatgttgcttaaaggttctaccaggtttaacaagaccaagacttttcgtatcaaccagctgttgcaggacacaccagtggcctccccaaggagcgtgaaggtgtggcaagatgcttgctcaccacttcccaagacccaggccaatcatggagccctccagtttggggacattcccaccagccacttgctattcaagcttcctcaggagctgctgaaacccaggtcacagtttgctgtggacatgcagacaacatcctccagaggactggtgtttcacacgggcactaagaactcctttatggctctttatctttcaaaaggacgtctggtctttgcactggggacagatgggaaaaaattgaggatcaaaagcaaggagaaatgcaatgatgggaaatggcacacggtggtgtttggccatgatggggaaaaggggcgcttggttgtggatggactgagggcccgggagggaagtttgcctggaaactccaccatcagcatcagagcgccagtttacctgggatcacctccatcagggaaaccaaagagcctccccacaaacagctttgtgggatgcctgaagaactttcagctggattcaaaacccttgtataccccttcttcaagcttcggggtgtcttcctgcttgggtggtcctttggagaaaggcatttatttctctgaagaaggaggtcatgtcgtcttggctcactctgtattgttggggccagaatttaagcttgttttcagcatccgcccaagaagtctcactgggatcctaatacacatcggaagtcagcccgggaagcacttatgtgtttacctggaggcaggaaaggtcacggcctctatggacagtggggcaggtgggacctcaacgtcggtcacaccaaagcagtctctgtgtgatggacagtggcactcggtggcagtcaccataaaacaacacatcctgcacctggaactggacacagacagtagctacacagctggacagatccccttcccacctgccagcactcaagagccactacaccttggaggtgctccagccaatttgacgacactgaggatccctgtgtggaaatcattctttggctgtctgaggaatattcatgtcaatcacatccctgtccctgtcactgaagccttggaagtccaggggcctgtcagtctgaatggttgtcctgaccagtaacccaagcctatttcacagcaaggaaattcaccttcaaaagcactgattacccaatgcacctccctccccagctcgagatcattcttcactcaggacacaaaccagacaggtttaatagcgaatctaattttgaattctgaccatggatacccatcactttggcattcagtgctacatgtgtattttatataaaaatcccatttcttgaagataaaaaaattgttattcaaattgttatgcacagaatgtttttggtaatattaatttccactaaaaaattaaatgtcttttaagaaacattcttttccacttgttaaaaaaattaaatatattttaaagcactttaagaatatgaaactttcatatatgttaaaggattataatttatggaattaaaaaatgcagtgtagtccttaaaaaaaa

SEQ ID NO: 13959 - DNA, 2011 bp, Homo sapiens
gagtctgtaccctcgtgatgtccccgccccggttcccaggcaagtttagggaagtgaaaggcgccaggtgccagtcctggcctctgatgtaacccagcgccccgcagtcccgacacagattcctggatctcagccccatagcagctatgatcccgctgctgctggcagcgctgctgtgcgtccccgccggggccctgacctgctacggggactccgggcagcctgtagactggttcgtggtctacaagctgccagctcttagagggtccggggaggcggcgcagagagggctgcagtacaagtatctggacgagagctccggaggctggcgggacggcagggcactcatcaacagcccggagggggccgtgggccgaagcctgcagccgctgtaccggagcaacaccagccagctcgccttcctgctctacaatgaccaaccgcctcaacccagcaaggctcaggactcttccatgcgtgggcacacgaagggtgtcctgctccttgaccacgatgggggcttctggctggtccacagtgtacctaacttccctccaccggcctcctctgctgcatacagctggcctcatagcgcctgtacctacgggcagaccctgctctgtgtgtcttttcccttcgctcagttctcgaagatgggcaagcagctgacctacacctacccctgggtctataactaccagctggaagggatctttgcccaggaattccccgacttggagaatgtggtcaagggccaccacgttagccaagaaccctggaacagcagcatcacactcacatcccaggccggggctgttttccagagctttgccaagttcagcaaatttggagatgacctgtactccggctggttggcagcagcccttggtaccaacctgcaggtccagttctggcacaaaactgtaggcatcctgccctctaactgctcggatatctggcaggttctgaatgtgaaccagatagctttccctggaccagccggcccaagcttcaacagcacagaggaccactccaaatggtgcgtgtccccaaaagggccctggacctgcgtgggtgacatgaatcggaaccagggagaggagcaacggggtgggggcacactgtgtgcccagctgccagccctctggaaagccttccagccgctggtgaagaactaccagccctgtaatggcatggccaggaagcccagcagagcttataagatctaacccttatggccaggtgcagtggctcacgtatgtaatcccagcactttgggaagccaaggagggaggatcacttgaactcaggaattcgagaccagcctgggctacatagtgagaccacatctctactagaacttaaaaaaagttagccaggcacggtgataaatgcctgtagtcccagccactgaagccagaggatcgattgaaccagggagatcatggtcacagtgaactatgattacgccaacctgggtcacatagcaagactctgtttcaaaaaaaaagggggggcgggggacgggtgggtgcagtggctcacatctgtaaccccagcactttgggaggctgagatgggcagatcacttgaggtcaggagttcgagaccagcctggccaacatggtgaaaccccatatccattaaaaatatttaaaaattagccagacatggtggcacgcgtctgtggtcctagctcctcgggaggctgaggcaggagaatcgcttgaactcgggaggcagaggttgtcatgagctgagctaacaccacggcacttcagcctgggtgacagaatgagactctgtgtcaaaaaaataaaaaataaaaaatctaagggctcaggaaccagtttggacttgattttgaatcccagttcatccccttcctagctgtatgaccttgattgtgtgccttaaccgctctgtgacacagtctacctgtctgcaaaatgggaaacataatacctgccatcaggattgttgaggagtaaataaatggaaattggtgaaa

SEQ ID NO: 13960 - DNA, 4335 bp, Homo sapiens
gcgcggagctgggagtggcttcgccatggctgtgagaagggactccgtgtggaagtactgctggggtgttttgatggttttatgcagaactgcgatttccaaatcgatagttttagagcctatctattggaattcctcgaactccaaatttctacctggacaaggactggtactatacccacagataggagacaaattggatattatttgccccaaagtggactctaaaactgttggccagtatgaatattataaagtttatatggttgataaagaccaagcagacagatgcactattaagaaggaaaatacccctctcctcaactgtgccaaaccagaccaagatatcaaattcaccatcaagtttcaagaattcagccctaacctctggggtctagaatttcagaagaacaaagattattacattatatctacatcaaatgggtctttggagggcctggataaccaggagggaggggtgtgccagacaagagccatgaagatcctcatgaaagttggacaagatgcaagttctgctggatcaaccaggaataaagatccaacaagacgtccagaactagaagctggtacaaatggaagaagttcgacaacaagtccctttgtaaaaccaaatccaggttctagcacagacggcaacagcgccggacattcggggaacaacatcctcggttccgaagtggccttatttgcagggattgcttcaggatgcatcatcttcatcgtcatcatcatcacgctggtggtcctcttgctgaagtaccggaggagacacaggaagcactcgccgcagcacacgaccacgctgtcgctcagcacactggccacacccaagcgcagcggcaacaacaacggctcagagcccagtgacattatcatcccgctaaggactgcggacagcgtcttctgccctcactacgagaaggtcagcggggactacgggcacccggtgtacatcgtccaggagatgcccccgcagagcccggcgaacatttactacaaggtctgagagggaccctggtggtacctgtgctttcccagaggacacctaatgtcccgatgcctcccttgagggtttgagagcccgcgtgctggagaattgactgaagcacagcaccgggggagagggacactcctcctcggaagagcccgtcgcgctggacagcttacctagtcttgtagcattcggccttggtgaacacacacgctccctggaagctggaagactgtgcagaagacgcccattcggactgctgtgccgcgtcccacgtctcctcctcgaagccatgtgctgcggtcactcaggcctctgcagaagccaagggaagacagtggtttgtggacgagagggctgtgagcatcctggcaggtgccccaggatgccacgcctggaagggccggcttctgcctggggtgcatttcccccgcagtgcataccggacttgtcacacggacctcgggctagttaaggtgtgcaaagatctctagagtttagtccttactgtctcactcgttctgttacccagggctctgcagcacctcacctgagacctccactccacatctgcatcactcatggaacactcatgtctggagtcccctcctccagccgctggcaacaacagcttcagtccatgggtaatccgttcatagaaattgtgtttgctaacaaggtgccctttagccagatgctaggctgtctgcgaagaaggctaggagttcatagaagggagtggggctggggaaagggctggctgcaattgcagctcactgctgctgcctctgaaacagaaagttggaaaggaaaaaagaaaaaagcaattaggtagcacagcactttggttttgctgagatcgaagaggccagtaggagacacgacagcacacacagtggattccagtgcatggggaggcactcgctgttatcaaatagcgatgtgcaggaagaaaagcccctcttcattccggggaacaaagacgggtattgttgggaaaggaacaggcttggagggaagggagaaagtaggccgctgatgatatattcgggcaggactgttgtggtactggcaataagatacacagctccgagctgtaggagagtcggtctgctttggatgattttttaagcagactcagctgctatacttatcacattttattaaacacagggaaagcatttaggagaatagcagagagccaaatctgacctaaaagttgaaaagccaaaggtcaaacaggctgtaattccatcatcatcgttgttattaaagaatccttatctataaaaggtaggtcagatccccctccccccaggttcctccttcccctcccgattgagccttacgacactttggtttatgcggtgctgtccgggtgccagggctgcagggtcggtactgatggaggctgcagcgcccggtgctctgtgtcaaggtgaagcacatacggcagacctcttagagtccttaagacggaagtaaattatgatgtccagggggagaaggaagataggacgtatttataataggtatatagaacacaagggatataaaatgaaagatttttactaatatatattttaaggttgcacacagtacacaccagaagatgtgaaattcatttgtggcaattaagtggtcccaatgctcagcgcttaaaaaaacaaattggacagctacttctgggaaaaacaacatcattccaaaaagaacaataatgagagcaaatgcaaaaataaccaagtcctccgaaggcatctcacggaaccgtagactaggaagtacgagccccacagagcaggaagccgatgtgactgcatcatatatttaacaatgacaagatgttccggcgtttatttctgcgttgggttttcccttgccttatgggctgaagtgttctctagaatccagcaggtcacactgggggcttcaggtgacgatttagctgtggctccctcctcctgtcctcccccgcaccccctcccttctgggaaacaagaagagtaaacaggaaacctactttttatgtgctatgcaaaatagacatctttaacatagtcctgttactatggtaacactttgctttctgaattggaagggaaaaaaaatgtagcgacagcattttaaggttctcagacctccagtgagtacctgcaaaaatgagttgtcacagaaattatgatcctctatttcctgaacctggaaatgatgttggtccaaagtgcgtgtgtgtatgtgtgagtgggtgcgtggtatacatgtgtacatatatgtataatatatatctacaatatatattatatatatctatatcatatttctgtggagggttgccatggtaaccagccacagtacatatgtaattctttccatcaccccaacctctcctttctgtgcattcatgcaagagtttcttgtaagccatcagaagttacttttaggatgggggagaggggcgagaaggggaaaaatgggaaatagtctgattttaatgaaatcaaatgtatgtatcatcagttggctacgttttggttctatgctaaactgtgaaaaatcagatgaattgataaaagagttccctgcaaccaattgaaaagtgttctgtgcgtctgttttgtgtctggtgcagaatatgacaatctaccaactgtccctttgtttgaagttggtttagctttggaaagttactgtaaatgccttgcttgtatgatcgtccctggtcacccgactttggaatttgcaccatcatgtttcagtgaagatgctgtaaataggttcagattttactgtctatggatttggggtgttacagtagccttattcacctttttaataaaaatacacatgaaaacaagaaagaaatggcttttcttacccagattgtgtacatagagcaatgttggttttttataaagtctaagcaagatgttttgtataaaatctgaattttgcaatgtatttagctacagcttgtttaacggcagtgtcattcccctttgcactgtaatgaggaaaaaatggtataaaaggttgccaaattgctgcatatttgtgccgtaattatgtaccatgaatatttatttaaaatttcgttgtccaatttgtaagtaacacagtattatgcctgagttataaatatttttttctttctttgttttattttaatagcctgtcataggttttaaatctgctttagtttcacattgcagttagccccagaaaatgaaatccgtgaagtcacattccacatctgtttcaaactgaatttgttcttaaaaaaataaaatatttttttcctatggaaaaaaaaaaaaaaaaaa

SEQ ID NO: 13961 - DNA, 9090 bp, Homo sapiens
cgagcccagtcgagccgcgctcacctcgggctcccgctccgtctccacctccgcctttgccctggcggcgcgaccccgtcccggcgcggcccccagcagtcgcgcgccgttagcctcgcgcccgccgcgcagtccgggcccggcgcgatgggggccgccgccggccggagcccccacctggggcccgcgcccgcccgccgcccgcagcgctctctgctcctgctgcagctgctgctgctcgtcgctgccccggggtccacgcaggcccaggccgccccgttccccgagctgtgcagttatacatgggaagctgttgataccaaaaataatgtactttataaaatcaacatctgtggaagtgtggatattgtccagtgcgggccatcaagtgctgtttgtatgcacgacttgaagacacgcacttatcattcagtgggtgactctgttttgagaagtgcaaccagatctctcctggaattcaacacaacagtgagctgtgaccagcaaggcacaaatcacagagtccagagcagcattgccttcctgtgtgggaaaaccctgggaactcctgaatttgtaactgcaacagaatgtgtgcactactttgagtggaggaccactgcagcctgcaagaaagacatatttaaagcaaataaggaggtgccatgctatgtgtttgatgaagagttgaggaagcatgatctcaatcctctgatcaagcttagtggtgcctacttggtggatgactccgatccggacacttctctattcatcaatgtttgtagagacatagacacactacgagacccaggttcacagctgcgggcctgtccccccggcactgccgcctgcctggtaagaggacaccaggcgtttgatgttggccagccccgggacggactgaagctggtgcgcaaggacaggcttgtcctgagttacgtgagggaagaggcaggaaagctagacttttgtgatggtcacagccctgcggtgactattacatttgtttgcccgtcggagcggagagagggcaccattcccaaactcacagctaaatccaactgccgctatgaaattgagtggattactgagtatgcctgccacagagattacctggaaagtaaaacttgttctctgagcggcgagcagcaggatgtctccatagacctcacaccacttgcccagagcggaggttcatcctatatttcagatggaaaagaatatttgttttatttgaatgtctgtggagaaactgaaatacagttctgtaataaaaaacaagctgcagtttgccaagtgaaaaagagcgatacctctcaagtcaaagcagcaggaagataccacaatcagaccctccgatattcggatggagacctcaccttgatatattttggaggtgatgaatgcagctcagggtttcagcggatgagcgtcataaactttgagtgcaataaaaccgcaggtaacgatgggaaaggaactcctgtattcacaggggaggttgactgcacctacttcttcacatgggacacggaatacgcctgtgttaaggagaaggaagacctcctctgcggtgccaccgacgggaagaagcgctatgacctgtccgcgctggtccgccatgcagaaccagagcagaattgggaagctgtggatggcagtcagacggaaacagagaagaagcattttttcattaatatttgtcacagagtgctgcaggaaggcaaggcacgagggtgtcccgaggacgcggcagtgtgtgcagtggataaaaatggaagtaaaaatctgggaaaatttatttcctctcccatgaaagagaaaggaaacattcaactctcttattcagatggtgatgattgtggtcatggcaagaaaattaaaactaatatcacacttgtatgcaagccaggtgatctggaaagtgcaccagtgttgagaacttctggggaaggcggttgcttttatgagtttgagtggcgcacagctgcggcctgtgtgctgtctaagacagaaggggagaactgcacggtctttgactcccaggcagggttttcttttgacttatcacctctcacaaagaaaaatggtgcctataaagttgagacaaagaagtatgacttttatataaatgtgtgtggcccggtgtctgtgagcccctgtcagccagactcaggagcctgccaggtggcaaaaagtgatgagaagacttggaacttgggtctgagtaatgcgaagctttcatattatgatgggatgatccaactgaactacagaggcggcacaccctataacaatgaaagacacacaccgagagctacgctcatcacctttctctgtgatcgagacgcgggagtgggcttccctgaatatcaggaagaggataactccacctacaacttccggtggtacaccagctatgcctgcccggaggagcccctggaatgcgtagtgaccgacccctccacgctggagcagtacgacctctccagtctggcaaaatctgaaggtggccttggaggaaactggtatgccatggacaactcaggggaacatgtcacgtggaggaaatactacattaacgtgtgtcggcctctgaatccagtgccgggctgcaaccgatatgcatcggcttgccagatgaagtatgaaaaagatcagggctccttcactgaagtggtttccatcagtaacttgggaatggcaaagaccggcccggtggttgaggacagcggcagcctccttctggaatacgtgaatgggtcggcctgcaccaccagcgatggcagacagaccacatataccacgaggatccatctcgtctgctccaggggcaggctgaacagccaccccatcttttctctcaactgggagtgtgtggtcagtttcctgtggaacacagaggctgcctgtcccattcagacaacgacggatacagaccaggcttgctctataagggatcccaacagtggatttgtgtttaatcttaatccgctaaacagttcgcaaggatataacgtctctggcattgggaagatttttatgtttaatgtctgcggcacaatgcctgtctgtgggaccatcctgggaaaacctgcttctggctgtgaggcagaaacccaaactgaagagctcaagaattggaagccagcaaggccagtcggaattgagaaaagcctccagctgtccacagagggcttcatcactctgacctacaaagggcctctctctgccaaaggtaccgctgatgcttttatcgtccgctttgtttgcaatgatgatgtttactcagggcccctcaaattcctgcatcaagatatcgactctgggcaagggatccgaaacacttactttgagtttgaaaccgcgttggcctgtgttccttctccagtggactgccaagtcaccgacctggctggaaatgagtacgacctgactggcctaagcacagtcaggaaaccttggacggctgttgacacctctgtcgatgggagaaagaggactttctatttgagcgtttgcaatcctctcccttacattcctggatgccagggcagcgcagtggggtcttgcttagtgtcagaaggcaatagctggaatctgggtgtggtgcagatgagtccccaagccgcggcgaatggatctttgagcatcatgtatgtcaacggtgacaagtgtgggaaccagcgcttctccaccaggatcacgtttgagtgtgctcagatatcgggctcaccagcatttcagcttcaggatggttgtgagtacgtgtttatctggagaactgtggaagcctgtcccgttgtcagagtggaaggggacaactgtgaggtgaaagacccaaggcatggcaacttgtatgacctgaagcccctgggcctcaacgacaccatcgtgagcgctggcgaatacacttattacttccgggtctgtgggaagctttcctcagacgtctgccccacaagtgacaagtccaaggtggtctcctcatgtcaggaaaagcgggaaccgcagggatttcacaaagtggcaggtctcctgactcagaagctaacttatgaaaatggcttgttaaaaatgaacttcacggggggggacacttgccataaggtttatcagcgctccacagccatcttcttctactgtgaccgcggcacccagcggccagtatttctaaaggagacttcagattgttcctacttgtttgagtggcgaacgcagtatgcctgcccacctttcgatctgactgaatgttcattcaaagatggggctggcaactccttcgacctctcgtccctgtcaaggtacagtgacaactgggaagccatcactgggacgggggacccggagcactacctcatcaatgtctgcaagtctctggccccgcaggctggcactgagccgtgccctccagaagcagccgcgtgtctgctgggtggctccaagcccgtgaacctcggcagggtaagggacggacctcagtggagagatggcataattgtcctgaaatacgttgatggcgacttatgtccagatgggattcggaaaaagtcaaccaccatccgattcacctgcagcgagagccaagtgaactccaggcccatgttcatcagcgccgtggaggactgtgagtacacctttgcctggcccacagccacagcctgtcccatgaagagcaacgagcatgatgactgccaggtcaccaacccaagcacaggacacctgtttgatctgagctccttaagtggcagggcgggattcacagctgcttacagcgagaaggggttggtttacatgagcatctgtggggagaatgaaaactgccctcctggcgtgggggcctgctttggacagaccaggattagcgtgggcaaggccaacaagaggctgagatacgtggaccaggtcctgcagctggtgtacaaggatgggtccccttgtccctccaaatccggcctgagctataagagtgtgatcagtttcgtgtgcaggcctgaggccgggccaaccaataggcccatgctcatctccctggacaagcagacatgcactctcttcttctcctggcacacgccgctggcctgcgagcaagcgaccgaatgttccgtgaggaatggaagctctattgttgacttgtctccccttattcatcgcactggtggttatgaggcttatgatgagagtgaggatgatgcctccgataccaaccctgatttctacatcaatatttgtcagccactaaatcccatgcacgcagtgccctgtcctgccggagccgctgtgtgcaaagttcctattgatggtccccccatagatatcggccgggtagcaggaccaccaatactcaatccaatagcaaatgagatttacttgaattttgaaagcagtactccttgcttagcggacaagcatttcaactacacctcgctcatcgcgtttcactgtaagagaggtgtgagcatgggaacgcctaagctgttaaggaccagcgagtgcgactttgtgttcgaatgggagactcctgtcgtctgtcctgatgaagtgaggatggatggctgtaccctgacagatgagcagctcctctacagcttcaacttgtccagcctttccacgagcacctttaaggtgactcgcgactcgcgcacctacagcgttggggtgtgcacctttgcagtcgggccagaacaaggaggctgtaaggacggaggagtctgtctgctctcaggcaccaagggggcatcctttggacggctgcaatcaatgaaactggattacaggcaccaggatgaagcggtcgttttaagttacgtgaatggtgatcgttgccctccagaaaccgatgacggcgtcccctgtgtcttccccttcatattcaatgggaagagctacgaggagtgcatcatagagagcagggcgaagctgtggtgtagcacaactgcggactacgacagagaccacgagtggggcttctgcagacactcaaacagctaccggacatccagcatcatatttaagtgtgatgaagatgaggacattgggaggccacaagtcttcagtgaagtgcgtgggtgtgatgtgacatttgagtggaaaacaaaagttgtctgccctccaaagaagttggagtgcaaattcgtccagaaacacaaaacctacgacctgcggctgctctcctctctcaccgggtcctggtccctggtccacaacggagtctcgtactatataaatctgtgccagaaaatatataaagggcccctgggctgctctgaaagggccagcatttgcagaaggaccacaactggtgacgtccaggtcctgggactcgttcacacgcagaagctgggtgtcataggtgacaaagttgttgtcacgtactccaaaggttatccgtgtggtggaaataagaccgcatcctccgtgatagaattgacctgtacaaagacggtgggcagacctgcattcaagaggtttgatatcgacagctgcacttactacttcagctgggactcccgggctgcctgcgccgtgaagcctcaggaggtgcagatggtgaatgggaccatcaccaaccctataaatggcaagagcttcagcctcggagatatttattttaagctgttcagagcctctggggacatgaggaccaatggggacaactacctgtatgagatccaactttcctccatcacaagctccagaaacccggcgtgctctggagccaacatatgccaggtgaagcccaacgatcagcacttcagtcggaaagttggaacctctgacaagaccaagtactaccttcaagacggcgatctcgatgtcgtgtttgcctcttcctctaagtgcggaaaggataagaccaagtctgtttcttccaccatcttcttccactgtgaccctctggtggaggacgggatccccgagttcagtcacgagactgccgactgccagtacctcttctcttggtacacctcagccgtgtgtcctctgggggtgggctttgacagcgagaatcccggggacgacgggcagatgcacaaggggctgtcagaacggagccaggcagtcggcgcggtgctcagcctgctgctggtggcgctcacctgctgcctgctggccctgttgctctacaagaaggagaggagggaaacagtgataagtaagctgaccacttgctgtaggagaagttccaacgtgtcctacaaatactcaaaggtgaataaggaagaagagacagatgagaatgaaacagagtggctgatggaagagatccagctgcctcctccacggcagggaaaggaagggcaggagaacggccatattaccaccaagtcagtgaaagccctcagctccctgcatggggatgaccaggacagtgaggatgaggttctgaccatcccagaggtgaaagttcactcgggcaggggagctggggcagagagctcccacccagtgagaaacgcacagagcaatgcccttcaggagcgtgaggacgatagggtggggctggtcaggggtgagaaggcgaggaaagggaagtccagctctgcacagcagaagacagtgagctccaccaagctggtgtccttccatgacgacagcgacgaggacctcttacacatctgactccgcagtgcctgcaggggagcacggagccgcgggacagccaagcacctccaaccaaataagacttccactcgatgatgcttctataattttgcctttaacagaaactttcaaaagggaagagtttttgtgatgggggagagggtgaaggaggtcaggccccactccttcctgattgtttacagtcattggaataaggcatggctcagatcggccacagggcggtaccttgtgcccagggttttgccccaagtcctcatttaaaagcataaggccggacgcatctcaaaacagagggctgcattcgaagaaacccttgctgctttagtcccgatagggtatttgaccccgatatattttagcattttaattctctccccctatttattgactttgacaattactcaggtttgagaaaaaggaaaaaaaaacagccaccgtttcttcctgccagcaggggtgtgatgtaccagtttgtccatcttgagatggtgaggctgtcagtgtatggggcagcttccggcgggatgttgaactggtcattaatgtgtcccctgagttggagctcattctgtctcttttctcttttgctttctgtttcttaagggcacacacacgtgcgtgcgagcacacacacacatacgtgcacagggtccccgagtgcctaggttttggagagtttgcctgttctatgcctttagtcaggaatggctgcacctttttgcatgatatcttcaagcctgggcgtacagagcacatttgtcagtatttttgccggctggtgaattcaaacaacctgcccaaagattgatttgtgtgtttgtgtgtgtgtgtgtgtgtgtgtgtgtgtgtgagtggagttgaggtgtcagagaaaatgaattttttccagatttggggtataggtctcatctcttcaggttctcatgataccacctttactgtgcttatttttttaagaaaaaagtgttgatcaaccattcgacctataagaagccttaatttgcacagtgtgtgacttacagaaactgcatgaaaaatcatgggccagagcctcggccctagcattgcacttggcctcatgctggagggaggctgggcgggtacagcgcggaggaggagggaggccaggcgggcatggcgtggaggaggagggaggccgggcggtcacagcatggaggaggagggaggcgctgctggtgttcttattctggcggcagcgcctttcctgccatgtttagtgaatgacttttctcgcattgtagaattgtatatagactctggtgttctattgctgagaagcaaaccgccctgcagcatccctcagcctgtaccggtttggctggcttgtttgatttcaacatgagtgtattttttaaaattgatttttctcttcatttttttttcaatcaactttactgtaatataaagtattcaacaatttcaataaaagataaattattaaaa

SEQ ID NO: 13962 - DNA, 3319 bp, Homo sapiens
agcggagctgcagccggagaaagaggaagagggagagagagcgcgccagggcgagggcaccgccgccggtcgggcgcgctgggcctgcccggaatcccgccgcctgcgccccgcgccccgcgccctgcgggccatgggagccggccgccggcagggacgacgcctgtgagacccgcgagcggcctcggggaccatggggagcgatcgggcccgcaagggcggagggggcccgaaggacttcggcgcgggactcaagtacaactcccggcacgagaaagtgaatggcttggaggaaggcgtggagttcctgccagtcaacaacgtcaagaaggtggaaaagcatggcccggggcgctgggtggtgctggcagccgtgctgatcggcctcctcttggtcttgctggggatcggcttcctggtgtggcatttgcagtaccgggacgtgcgtgtccagaaggtcttcaatggctacatgaggatcacaaatgagaattttgtggatgcctacgagaactccaactccactgagtttgtaagcctggccagcaaggtgaaggacgcgctgaagctgctgtacagcggagtcccattcctgggcccctaccacaaggagtcggctgtgacggccttcagcgagggcagcgtcatcgcctactactggtctgagttcagcatcccgcagcacctggtggaggaggccgagcgcgtcatggccgaggagcgcgtagtcatgctgcccccgcgggcgcgctccctgaagtcctttgtggtcacctcagtggtggctttccccacggactccaaaacagtacagaggacccaggacaacagctgcagctttggcctgcacgcccgcggtgtggagctgatgcgcttcaccacgcccggcttccctgacagcccctaccccgctcatgcccgctgccagtgggccctgcggggggacgccgactcagtgctgagcctcaccttccgcagctttgaccttgcgtcctgcgacgagcgcggcagcgacctggtgacggtgtacaacaccctgagccccatggagccccacgccctggtgcagttgtgtggcacctaccctccctcctacaacctgaccttccactcctcccagaacgtcctgctcatcacactgataaccaacactgagcggcggcatcccggctttgaggccaccttcttccagctgcctaggatgagcagctgtggaggccgcttacgtaaagcccaggggacattcaacagcccctactacccaggccactacccacccaacattgactgcacatggaacattgaggtgcccaacaaccagcatgtgaaggtgcgcttcaaattcttctacctgctggagcccggcgtgcctgcgggcacctgccccaaggactacgtggagatcaacggggagaaatactgcggagagaggtcccagttcgtcgtcaccagcaacagcaacaagatcacagttcgcttccactcagatcagtcctacaccgacaccggcttcttagctgaatacctctcctacgactccagtgacccatgcccggggcagttcacgtgccgcacggggcggtgtatccggaaggagctgcgctgtgatggctgggccgactgcaccgaccacagcgatgagctcaactgcagttgcgacgccggccaccagttcacgtgcaagaacaagttctgcaagcccctcttctgggtctgcgacagtgtgaacgactgcggagacaacagcgacgagcaggggtgcagttgtccggcccagaccttcaggtgttccaatgggaagtgcctctcgaaaagccagcagtgcaatgggaaggacgactgtggggacgggtccgacgaggcctcctgccccaaggtgaacgtcgtcacttgtaccaaacacacctaccgctgcctcaatgggctctgcttgagcaagggcaaccctgagtgtgacgggaaggaggactgtagcgacggctcagatgagaaggactgcgactgtgggctgcggtcattcacgagacaggctcgtgttgttgggggcacggatgcggatgagggcgagtggccctggcaggtaagcctgcatgctctgggccagggccacatctgcggtgcttccctcatctctcccaactggctggtctctgccgcacactgctacatcgatgacagaggattcaggtactcagaccccacgcagtggacggccttcctgggcttgcacgaccagagccagcgcagcgcccctggggtgcaggagcgcaggctcaagcgcatcatctcccaccccttcttcaatgacttcaccttcgactatgacatcgcgctgctggagctggagaaaccggcagagtacagctccatggtgcggcccatctgcctgccggacgcctcccatgtcttccctgccggcaaggccatctgggtcacgggctggggacacacccagtatggaggcactggcgcgctgatcctgcaaaagggtgagatccgcgtcatcaaccagaccacctgcgagaacctcctgccgcagcagatcacgccgcgcatgatgtgcgtgggcttcctcagcggcggcgtggactcctgccagggtgattccgggggacccctgtccagcgtggaggcggatgggcggatcttccaggccggtgtggtgagctggggagacggctgcgctcagaggaacaagccaggcgtgtacacaaggctccctctgtttcgggactggatcaaagagaacactggggtataggggccggggccacccaaatgtgtacacctgcggggccacccatcgtccaccccagtgtgcacgcctgcaggctggagactggaccgctgactgcaccagcgcccccagaacatacactgtgaactcaatctccagggctccaaatctgcctagaaaacctctcgcttcctcagcctccaaagtggagctgggaggtagaaggggaggacactggtggttctactgacccaactgggggcaaaggtttgaagacacagcctcccccgccagccccaagctgggccgaggcgcgtttgtgcatatctgcctcccctgtctctaaggagcagcgggaacggagcttcggggcctcctcagtgaaggtggtggggctgccggatctgggctgtggggcccttgggccacgctcttgaggaagcccaggctcggaggaccctggaaaacagacgggtctgagactgaaattgttttaccagctcccagggtggacttcagtgtgtgtatttgtgtaaatgagtaaaacattttatttctttttaaaaaaaaaaaaaaaaaaaa

SEQ ID NO: 13963 - DNA, 11433 bp, Homo sapiens
aggctgcttcgttgcacacccgagaaagtttcagccaaacttcgggcggcggctgaggcggcggccgaggagcggcggactcggggcgcggggagtcgaggcatttgcgcctgggcttcggagcgtagcgccagggcctgagcctttgaagcaggaggaggggaggagagagtggggctcctctatcgggaccccctccccatgtggatctgcccaggcggcggcggcggcggcggaggaggaggcgaccgagaagatgcccgccctgcgccccgctctgctgtgggcgctgctggcgctctggctgtgctgcgcggcccccgcgcatgcattgcagtgtcgagatggctatgaaccctgtgtaaatgaaggaatgtgtgttacctaccacaatggcacaggatactgcaaatgtccagaaggcttcttgggggaatattgtcaacatcgagacccctgtgagaagaaccgctgccagaatggtgggacttgtgtggcccaggccatgctggggaaagccacgtgccgatgtgcctcagggtttacaggagaggactgccagtactcaacatctcatccatgctttgtgtctcgaccctgcctgaatggcggcacatgccatatgctcagccgggatacctatgagtgcacctgtcaagtcgggtttacaggtaaggagtgccaatggacggatgcctgcctgtctcatccctgtgcaaatggaagtacctgtaccactgtggccaaccagttctcctgcaaatgcctcacaggcttcacagggcagaaatgtgagactgatgtcaatgagtgtgacattccaggacactgccagcatggtggcacctgcctcaacctgcctggttcctaccagtgccagtgccctcagggcttcacaggccagtactgtgacagcctgtatgtgccctgtgcaccctcaccttgtgtcaatggaggcacctgtcggcagactggtgacttcacttttgagtgcaactgccttccaggttttgaagggagcacctgtgagaggaatattgatgactgccctaaccacaggtgtcagaatggaggggtttgtgtggatggggtcaacacttacaactgccgctgtcccccacaatggacaggacagttctgcacagaggatgtggatgaatgcctgctgcagcccaatgcctgtcaaaatgggggcacctgtgccaaccgcaatggaggctatggctgtgtatgtgtcaacggctggagtggagatgactgcagtgagaacattgatgattgtgccttcgcctcctgtactccaggctccacctgcatcgaccgtgtggcctccttctcttgcatgtgcccagaggggaaggcaggtctcctgtgtcatctggatgatgcatgcatcagcaatccttgccacaagggggcactgtgtgacaccaaccccctaaatgggcaatatatttgcacctgcccacaaggctacaaaggggctgactgcacagaagatgtggatgaatgtgccatggccaatagcaatccttgtgagcatgcaggaaaatgtgtgaacacggatggcgccttccactgtgagtgtctgaagggttatgcaggacctcgttgtgagatggacatcaatgagtgccattcagacccctgccagaatgatgctacctgtctggataagattggaggcttcacatgtctgtgcatgccaggtttcaaaggtgtgcattgtgaattagaaataaatgaatgtcagagcaacccttgtgtgaacaatgggcagtgtgtggataaagtcaatcgtttccagtgcctgtgtcctcctggtttcactgggccagtttgccagattgatattgatgactgttccagtactccgtgtctgaatggggcaaagtgtatcgatcacccgaatggctatgaatgccagtgtgccacaggtttcactggtgtgttgtgtgaggagaacattgacaactgtgaccccgatccttgccaccatggtcagtgtcaggatggtattgattcctacacctgcatctgcaatcccgggtacatgggcgccatctgcagtgaccagattgatgaatgttacagcagcccttgcctgaacgatggtcgctgcattgacctggtcaatggctaccagtgcaactgccagccaggcacgtcaggggttaattgtgaaattaattttgatgactgtgcaagtaacccttgtatccatggaatctgtatggatggcattaatcgctacagttgtgtctgctcaccaggattcacagggcagagatgtaacattgacattgatgagtgtgcctccaatccctgtcgcaagggtgcaacatgtatcaacggtgtgaatggtttccgctgtatatgccccgagggaccccatcaccccagctgctactcacaggtgaacgaatgcctgagcaatccctgcatccatggaaactgtactggaggtctcagtggatataagtgtctctgtgatgcaggctgggttggcatcaactgtgaagtggacaaaaatgaatgcctttcgaatccatgccagaatggaggaacttgtgacaatctggtgaatggatacaggtgtacttgcaagaagggctttaaaggctataactgccaggtgaatattgatgaatgtgcctcaaatccatgcctgaaccaaggaacctgctttgatgacataagtggctacacttgccactgtgtgctgccatacacaggcaagaattgtcagacagtattggctccctgttccccaaacccttgtgagaatgctgctgtttgcaaagagtcaccaaattttgagagttatacttgcttgtgtgctcctggctggcaaggtcagcggtgtaccattgacattgacgagtgtatctccaagccctgcatgaaccatggtctctgccataacacccagggcagctacatgtgtgaatgtccaccaggcttcagtggtatggactgtgaggaggacattgatgactgccttgccaatccttgccagaatggaggttcctgtatggatggagtgaatactttctcctgcctctgccttccgggtttcactggggataagtgccagacagacatgaatgagtgtctgagtgaaccctgtaagaatggagggacctgctctgactacgtcaacagttacacttgcaagtgccaggcaggatttgatggagtccattgtgagaacaacatcaatgagtgcactgagagctcctgtttcaatggtggcacatgtgttgatgggattaactccttctcttgcttgtgccctgtgggtttcactggatccttctgcctccatgagatcaatgaatgcagctctcatccatgcctgaatgagggaacgtgtgttgatggcctgggtacctaccgctgcagctgccccctgggctacactgggaaaaactgtcagaccctggtgaatctctgcagtcggtctccatgtaaaaacaaaggtacttgcgttcagaaaaaagcagagtcccagtgcctatgtccatctggatgggctggtgcctattgtgacgtgcccaatgtctcttgtgacatagcagcctccaggagaggtgtgcttgttgaacacttgtgccagcactcaggtgtctgcatcaatgctggcaacacgcattactgtcagtgccccctgggctatactgggagctactgtgaggagcaactcgatgagtgtgcgtccaacccctgccagcacggggcaacatgcagtgacttcattggtggatacagatgcgagtgtgtcccaggctatcagggtgtcaactgtgagtatgaagtggatgagtgccagaatcagccctgccagaatggaggcacctgtattgaccttgtgaaccatttcaagtgctcttgcccaccaggcactcggggcctactctgtgaagagaacattgatgactgtgcccggggtccccattgccttaatggtggtcagtgcatggataggattggaggctacagttgtcgctgcttgcctggctttgctggggagcgttgtgagggagacatcaacgagtgcctctccaacccctgcagctctgagggcagcctggactgtatacagctcaccaatgactacctgtgtgtttgccgtagtgcctttactggccggcactgtgaaaccttcgtcgatgtgtgtccccagatgccctgcctgaatggagggacttgtgctgtggccagtaacatgcctgatggtttcatttgccgttgtcccccgggattttccggggcaaggtgccagagcagctgtggacaagtgaaatgtaggaagggggagcagtgtgtgcacaccgcctctggaccccgctgcttctgccccagtccccgggactgcgagtcaggctgtgccagtagcccctgccagcacgggggcagctgccaccctcagcgccagcctccttattactcctgccagtgtgccccaccattctcgggtagccgctgtgaactctacacggcaccccccagcacccctcctgccacctgtctgagccagtattgtgccgacaaagctcgggatggcgtctgtgatgaggcctgcaacagccatgcctgccagtgggatgggggtgactgttctctcaccatggagaacccctgggccaactgctcctccccacttccctgctgggattatatcaacaaccagtgtgatgagctgtgcaacacggtcgagtgcctgtttgacaactttgaatgccaggggaacagcaagacatgcaagtatgacaaatactgtgcagaccacttcaaagacaaccactgtgaccaggggtgcaacagtgaggagtgtggttgggatgggctggactgtgctgctgaccaacctgagaacctggcagaaggtaccctggttattgtggtattgatgccacctgaacaactgctccaggatgctcgcagcttcttgcgggcactgggtaccctgctccacaccaacctgcgcattaagcgggactcccagggggaactcatggtgtacccctattatggtgagaagtcagctgctatgaagaaacagaggatgacacgcagatcccttcctggtgaacaagaacaggaggtggctggctctaaagtctttctggaaattgacaaccgccagtgtgttcaagactcagaccactgcttcaagaacacggatgcagcagcagctctcctggcctctcacgccatacaggggaccctgtcataccctcttgtgtctgtcgtcagtgaatccctgactccagaacgcactcagctcctctatctccttgctgttgctgttgtcatcattctgtttattattctgctgggggtaatcatggcaaaacgaaagcgtaagcatggctctctctggctgcctgaaggtttcactcttcgccgagatgcaagcaatcacaagcgtcgtgagccagtgggacaggatgctgtggggctgaaaaatctctcagtgcaagtctcagaagctaacctaattggtactggaacaagtgaacactgggtcgatgatgaagggccccagccaaagaaagtaaaggctgaagatgaggccttactctcagaagaagatgaccccattgatcgacggccatggacacagcagcaccttgaagctgcagacatccgtaggacaccatcgctggctctcacccctcctcaggcagagcaggaggtggatgtgttagatgtgaatgtccgtggcccagatggctgcaccccattgatgttggcttctctccgaggaggcagctcagatttgagtgatgaagatgaagatgcagaggactcttctgctaacatcatcacagacttggtctaccagggtgccagcctccaggcccagacagaccggactggtgagatggccctgcaccttgcagcccgctactcacgggctgatgctgccaagcgtctcctggatgcaggtgcagatgccaatgcccaggacaacatgggccgctgtccactccatgctgcagtggcagctgatgcccaaggtgtcttccagattctgattcgcaaccgagtaactgatctagatgccaggatgaatgatggtactacacccctgatcctggctgcccgcctggctgtggagggaatggtggcagaactgatcaactgccaagcggatgtgaatgcagtggatgaccatggaaaatctgctcttcactgggcagctgctgtcaataatgtggaggcaactcttttgttgttgaaaaatggggccaaccgagacatgcaggacaacaaggaagagacacctctgtttcttgctgcccgggaggggagctatgaagcagccaagatcctgttagaccattttgccaatcgagacatcacagaccatatggatcgtcttccccgggatgtggctcgggatcgcatgcaccatgacattgtgcgccttctggatgaatacaatgtgaccccaagccctccaggcaccgtgttgacttctgctctctcacctgtcatctgtgggcccaacagatctttcctcagcctgaagcacaccccaatgggcaagaagtctagacggcccagtgccaagagtaccatgcctactagcctccctaaccttgccaaggaggcaaaggatgccaagggtagtaggaggaagaagtctctgagtgagaaggtccaactgtctgagagttcagtaactttatcccctgttgattccctagaatctcctcacacgtatgtttccgacaccacatcctctccaatgattacatcccctgggatcttacaggcctcacccaaccctatgttggccactgccgcccctcctgccccagtccatgcccagcatgcactatctttttctaaccttcatgaaatgcagcctttggcacatggggccagcactgtgcttccctcagtgagccagttgctatcccaccaccacattgtgtctccaggcagtggcagtgctggaagcttgagtaggctccatccagtcccagtcccagcagattggatgaaccgcatggaggtgaatgagacccagtacaatgagatgtttggtatggtcctggctccagctgagggcacccatcctggcatagctccccagagcaggccacctgaagggaagcacataaccacccctcgggagcccttgccccccattgtgactttccagctcatccctaaaggcagtattgcccaaccagcgggggctccccagcctcagtccacctgccctccagctgttgcgggccccctgcccaccatgtaccagattccagaaatggcccgtttgcccagtgtggctttccccactgccatgatgccccagcaggacgggcaggtagctcagaccattctcccagcctatcatcctttcccagcctctgtgggcaagtaccccacacccccttcacagcacagttatgcttcctcaaatgctgctgagcgaacacccagtcacagtggtcacctccagggtgagcatccctacctgacaccatccccagagtctcctgaccagtggtcaagttcatcaccccactctgcttctgactggtcagatgtgaccaccagccctacccctgggggtgctggaggaggtcagcggggacctgggacacacatgtctgagccaccacacaacaacatgcaggtttatgcgtgagagagtccacctccagtgtagagacataactgacttttgtaaatgctgctgaggaacaaatgaaggtcatccgggagagaaatgaagaaatctctggagccagcttctagaggtaggaaagagaagatgttcttattcagataatgcaagagaagcaattcgtcagtttcactgggtatctgcaaggcttattgattattctaatctaataagacaagtttgtggaaatgcaagatgaatacaagccttgggtccatgtttactctcttctatttggagaataagatggatgcttattgaagcccagacattcttgcagcttggactgcattttaagccctgcaggcttctgccatatccatgagaagattctacactagcgtcctgttgggaattatgccctggaattctgcctgaattgacctacgcatctcctcctccttggacattcttttgtcttcatttggtgcttttggttttgcacctctccgtgattgtagccctaccagcatgttatagggcaagacctttgtgcttttgatcattctggcccatgaaagcaactttggtctcctttcccctcctgtcttcccggtatcccttggagtctcacaaggtttactttggtatggttctcagcacaaacctttcaagtatgttgtttctttggaaaatggacatactgtattgtgttctcctgcatatatcattcctggagagagaaggggagaagaatacttttcttcaacaaattttgggggcaggagatcccttcaagaggctgcaccttaatttttcttgtctgtgtgcaggtcttcatataaactttaccaggaagaagggtgtgagtttgttgtttttctgtgtatgggcctggtcagtgtaaagttttatccttgatagtctagttactatgaccctccccacttttttaaaaccagaaaaaggtttggaatgttggaatgaccaagagacaagttaactcgtgcaagagccagttacccacccacaggtccccctacttcctgccaagcattccattgactgcctgtatggaacacatttgtcccagatctgagcattctaggcctgtttcactcactcacccagcatatgaaactagtcttaactgttgagcctttcctttcatatccacagaagacactgtctcaaatgttgtacccttgccatttaggactgaactttccttagcccaagggacccagtgacagttgtcttccgtttgtcagatgatcagtctctactgattatcttgctgcttaaaggcctgctcaccaatctttctttcacaccgtgtggtccgtgttactggtatacccagtatgttctcactgaagacatggactttatatgttcaagtgcaggaattggaaagttggacttgttttctatgatccaaaacagccctataagaaggttggaaaaggaggaactatatagcagcctttgctattttctgctaccatttcttttcctctgaagcggccatgacattccctttggcaactaacgtagaaactcaacagaacattttcctttcctagagtcaccttttagatgataatggacaactatagacttgctcattgttcagactgattgcccctcacctgaatccactctctgtattcatgctcttggcaatttctttgactttcttttaagggcagaagcattttagttaattgtagataaagaatagttttcttcctcttctccttgggccagttaataattggtccatggctacactgcaacttccgtccagtgctgtgatgcccatgacacctgcaaaataagttctgcctgggcattttgtagatattaacaggtgaattcccgactcttttggtttgaatgacagttctcattccttctatggctgcaagtatgcatcagtgcttcccacttacctgatttgtctgtcggtggccccatatggaaaccctgcgtgtctgttggcataatagtttacaaatggttttttcagtcctatccaaatttattgaaccaacaaaaataattacttctgccctgagataagcagattaagtttgttcattctctgctttattctctccatgtggcaacattctgtcagcctctttcatagtgtgcaaacattttatcattctaaatggtgactctctgcccttggacccatttattattcacagatggggagaacctatctgcatggacctctgtggaccacagcgtacctgcccctttctgccctcctgctccagccccacttctgaaagtatcagctactgatccagccactggatattttatatcctcccttttccttaagcacaatgtcagaccaaattgcttgtttctttttcttggactactttaatttggatcctttgggtttggagaaagggaatgtgaaagctgtcattacagacaacaggtttcagtgatgaggaggacaacactgcctttcaaactttttactgatctcttagattttaagaactcttgaattgtgtggtatctaataaaagggaaggtaagatggataatcactttctcatttgggttctgaattggagactcagtttttatgagacacatcttttatgccatgtatagatcctcccctgctatttttggtttatttttattgttataaatgctttctttctttgactcctcttctgcctgcctttggggataggtttttttgtttgtttatttgcttcctctgttttgttttaagcatcattttcttatgtgaggtggggaagggaaaggtatgagggaaagagagtctgagaattaaaatattttagtataagcaattggctgtgatgctcaaatccattgcatcctcttattgaatttgccaatttgtaatttttgcataataaagaaccaaaggtgtaatgttttgttgagaggtggtttagggattttggccctaaccaatacattgaatgtatgatgactatttgggaggacacatttatgtacccagaggcccccactaataagtggtactatggttacttccttgtgtacatttctcttaaaagtgatattatatctgtttgtatgagaaacccagtaaccaataaaatgaccgcatattcctgactaaacgtagtaaggaaaatgcacactttgtttttacttttccgtttcattctaaaggtagttaagatgaaatttatatgaaagcatttttatcacaaaataaaaaaggtttgccaagctcagtggtgttgtattttttattttccaatactgcatccatggcctggcagtgttacctcatgatgtcataatttgctgagagagcaaattttcttttctttctgaatcccacaaagcctagcaccaaacttctttttttcttcctttaattagatcataaataaatgatcctggggaaaaagcatctgtcaaataggaaacatcacaaaactgagcactcttctgtgcactagccatagctggtgacaaacagatggttgctcagggacaaggtgccttccaatggaaatgcgaagtagttgctatagcaagaattgggaactgggatataagtcataatattaattatgctgttatgtaaatgattggtttgtaacattccttaagtgaaatttgtgtagaacttaatatacaggattataaaataatattttgtgtataaatttgttataagttcacattcatacatttatttataaagtcagtgagatatttgaacatgaaaaaaaaaa

SEQ ID NO: 13964 - DNA, 1456 bp, Homo sapiens
atgaaggccactatcatcctccttctgcttgcacaagtttcctgggctggaccgtttcaacagagaggcttatttgactttatgctagaagatgaggcttctgggataggcccagaagttcctgatgaccgcgacttcgagccctccctaggcccagtgtgccccttccgctgtcaatgccatcttcgagtggtccagtgttctgatttgggtcttcctccttcccttacggaattacatcttgatggcaacaaaatcagcagagttgatgcagctagcctgaaaggactgaataatttggctaagttgggattgagtttcaacagcatctctgctgttgacaatggctctctggccaacacgcctcatctgagggagcttcacttggacaacaacaagcttaccagagtacctggtgggctggcagagcataagtacatccaggttgtctaccttcataacaacaatatctctgtagttggatcaagtgacttctgcccacctggacacaacaccaaaaaggcttcttattcgggtgtgagtcttttcagcaacccggtccagtactgggagatacagccatccaccttcagatgtgtctacgtgcgctctgccattcaactcggaaactataagtaattctcaagaaagccctcatttttataacctggcaaaatcttgttaatgtcattgctaaaaaataaataaaagctagatactggaaacctaactgcaatgtggatgttttacccacatgacttattatgcataaagccaaatttccagtttaagtaattgcctacaataaaaagaaattttgcctgccattttcagaatcatcttttgaagctttctgttgatgttaactgagctactagagatattcttatttcactaaatgtaaaatttggagtaaatatatatgtcaatatttagtaaagcttttcttttttaatttccaggaaaaaataaaaagagtatgagtcttctgtaattcattgagcagttagctcatttgagataaagtcaaatgccaaacactagctctgtattaatccccatcattactggtaaagcctcatttgaatgtgtgaattcaatacaggctatgtaaaatttttactaatgtcattattttgaaaaaataaatttaaaaatacattcaaaattactattgtatacaagcttaattgttaatattccctaaacacaattttatgaagggagaagacattggtttgttgacaataacagtacatcttttcaagttctcagctatttcttctacctctccctatcttacatttgagtatggtaacttatgtcatctatgttgaatgtaagcttataaagcacaaagcatacatttcctgactggtctagagaactgatgtttcaatttacccctctgctaaataaatattaaaactatcatgtgaaaaaaaaaaaaaaaaaa

SEQ ID NO: 13965 - DNA, 1336 bp, Homo sapiens
atgaaggccactatcatcctccttctgcttgcacaagtttcctgggctggaccgtttcaacagagaggcttatttgactttatgctagaagatgaggcttctgggataggcccagaagttcctgatgaccgcgacttcgagccctccctaggcccagtgtgccccttccgctgtcaatgccatcttcgagtggtccagtgttctgatttgggtctggacaaagtgccaaaggatcttccccctgacacaactctgctagacctgcaaaacaacaaaataaccgaaatcaaagatggagactttaagaacctgaagaaccttcacgttgtctaccttcataacaacaatatctctgtagttggatcaagtgacttctgcccacctggacacaacaccaaaaaggcttcttattcgggtgtgagtcttttcagcaacccggtccagtactgggagatacagccatccaccttcagatgtgtctacgtgcgctctgccattcaactcggaaactataagtaattctcaagaaagccctcatttttataacctggcaaaatcttgttaatgtcattgctaaaaaataaataaaagctagatactggaaacctaactgcaatgtggatgttttacccacatgacttattatgcataaagccaaatttccagtttaagtaattgcctacaataaaaagaaattttgcctgccattttcagaatcatcttttgaagctttctgttgatgttaactgagctactagagatattcttatttcactaaatgtaaaatttggagtaaatatatatgtcaatatttagtaaagcttttcttttttaatttccaggaaaaaataaaaagagtatgagtcttctgtaattcattgagcagttagctcatttgagataaagtcaaatgccaaacactagctctgtattaatccccatcattactggtaaagcctcatttgaatgtgtgaattcaatacaggctatgtaaaatttttactaatgtcattattttgaaaaaataaatttaaaaatacattcaaaattactattgtatacaagcttaattgttaatattccctaaacacaattttatgaagggagaagacattggtttgttgacaataacagtacatcttttcaagttctcagctatttcttctacctctccctatcttacatttgagtatggtaacttatgtcatctatgttgaatgtaagcttataaagcacaaagcatacatttcctgactggtctagagaactgatgtttcaatttacccctctgctaaataaatattaaaactatcatgtgaaaaaaaaaaaaaaaaaa

SEQ ID NO: 13966 - DNA, 1267 bp, Homo sapiens
acattctcttttcttttattcttgtctgttctgcctcactcccgagctctactgactcccaacagagcgcccaagaagaaaatggccataagtggagtccctgtgctaggatttttcatcatagctgtgctgatgagcgctcaggaatcatgggctatcaaagaagaacatgtgatcatccaggccgagttctatctgaatcctgaccaatcaggcgagtttatgtttgactttgatggtgatgagattttccatgtggatatggcaaagaaggagacggtctggcggcttgaagaatttggacgatttgccagctttgaggctcaaggtgcattggccaacatagctgtggacaaagccaacctggaaatcatgacaaagcgctccaactatactccgatcaccaatgtacctccagaggtaactgtgctcacgaacagccctgtggaactgagagagcccaacgtcctcatctgtttcatagacaagttcaccccaccagtggtcaatgtcacgtggcttcgaaatggaaaacctgtcaccacaggagtgtcagagacagtcttcctgcccagggaagaccaccttttccgcaagttccactatctccccttcctgccctcaactgaggacgtttacgactgcagggtggagcactggggcttggatgagcctcttctcaagcactgggagtttgatgctccaagccctctcccagagactacagagaacgtggtgtgtgccctgggcctgactgtgggtctggtgggcatcattattgggaccatcttcatcatcaagggattgcgcaaaagcaatgcagcagaacgcagggggcctctgtaaggcacatggaggtgatggtgtttcttagagagaagatcactgaagaaacttctgctttaatggctttacaaagctggcaatattacaatccttgacctcagtgaaagcagtcatcttcagcattttccagccctatagccaccccaagtgtggatatgcctcttcgattgctccgtactctaacatctagctggcttccctgtctattgccttttcctgtatctattttcctctatttcctatcattttattatcaccatgcaatgcctctggaataaaacatacaggagtctgtctctgctatggaatgccccatggggcatctcttgtgtacttattgtttaaggtttcctcaaactgtgatttttctgaacacaataaactattttgatgatcttgggtggaaaaaaaaaaaaaaaaa

SEQ ID NO: 13967 - DNA, 2534 bp, Homo sapiens
gcactcgggcgcagccgggtggatctcgagcaggtgtgagcagcctatcagtcaccatgtccgcagcctggatcccggctctcggcctcggtgtgtgtctgctgctgctgccggggcccgcgggcagcgagggagccgctcccattgctatcacatgttttaccagaggcttggacatcaggaaagagaaagcagatgtcctctgcccagggggctgccctcttgaggaattctctgtgtatgggaacatagtatatgcttctgtatcgagcatatgtggggctgctgtccacaggggagtaatcagcaactcagggggacctgtacgagtctatagcctacctggtcgagaaaactattcctcagtagatgccaatggcatccagtctcaaatgctttctagatggtctgcttctttcacagtaactaaaggcaaaagtagtacacaggaggccacaggacaagcagtgtccacagcacatccaccaacaggtaaacgactaaagaaaacacccgagaagaaaactggcaataaagattgtaaagcagacattgcatttctgattgatggaagctttaatattgggcagcgccgatttaatttacagaagaattttgttggaaaagtggctctaatgttgggaattggaacagaaggaccacatgtgggccttgttcaagccagtgaacatcccaaaatagaattttacttgaaaaactttacatcagccaaagatgttttgtttgccataaaggaagtaggtttcagagggggtaattccaatacaggaaaagccttgaagcatactgctcagaaattcttcacggtagatgctggagtaagaaaagggatccccaaagtggtggtggtatttattgatggttggccttctgatgacatcgaggaagcaggcattgtggccagagagtttggtgtcaatgtatttatagtttctgtggccaagcctatccctgaagaactggggatggttcaggatgtcacatttgttgacaaggctgtctgtcggaataatggcttcttctcttaccacatgcccaactggtttggcaccacaaaatacgtaaagcctctggtacagaagctgtgcactcatgaacaaatgatgtgcagcaagacctgttataactcagtgaacattgcctttctaattgatggctccagcagtgttggagatagcaatttccgcctcatgcttgaatttgtttccaacatagccaagacttttgaaatctcggacattggtgccaagatagctgctgtacagtttacttatgatcagcgcacggagttcagtttcactgactatagcaccaaagagaatgtcctagctgtcatcagaaacatccgctatatgagtggtggaacagctactggtgatgccatttccttcactgttagaaatgtgtttggccctataagggagagccccaacaagaacttcctagtaattgtcacagatgggcagtcctatgatgatgtccaaggccctgcagctgctgcacatgatgcaggaatcactatcttctctgttggtgtggcttgggcacctctggatgacctgaaagatatggcttctaaaccgaaggagtctcatgctttcttcacaagagagttcacaggattagaaccaattgtttctgatgtcatcagaggcatttgtagagatttcttagaatcccagcaataatggtaacattttgacaactgaaagaaaaagtacaaggggatccagtgtgtaaattgtattctcataatactgaaatgctttagcatactagaatcagatacaaaactattaagtatgtcaacagccatttaggcaaataagcactcctttaaagccgctgccttctggttacaatttacagtgtactttgttaaaaacactgctgaggcttcataatcatggctcttagaaactcaggaaagaggagataatgtggattaaaaccttaagagttctaaccatgcctactaaatgtacagatatgcaaattccatagctcaataaaagaatctgatacttagaccaaaagcaacattcgttctctaaccattctgtattgattatataagcaaaatgaaaagagaaacttaaatgaacacagctctttaacatggttcaggtacacatattttgacccaagtggatattttcttaaaaccaatcaataatagctagctattactgcagactataaaatctggatatagaaaggagacctgtatcaaactgcttttgtagtgtgttttcataacaacttatgactaaaaatatcacactgaataagagagcaggattgccaggtatttttctatttctctccttaattttatatgtatatagatatatttggcttatattctaagtcacctaagtacttaaaagttaagttggtaaagtatttactgactgcttataaacatttaaagacaaagacatttcaaataactgcagaaaaaatattgtagtttgaatatttaagcaataaaactgctagtgagttattgt

SEQ ID NO: 13968 - DNA, 2039 bp, Homo sapiens
cggaagcgcccgcagcccggtaccggctcctcctgggctccctctagcgccttccccccggcccgactccgctggtcagcgccaagtgacttacgcccccgaccctgagcccggaccgctaggcgaggaggatcagatctccgctcgagaatctgaaggtgccctggtcctggaggagttccgtcccagcccgcggtctcccggtactgtcgggccccggccctctggagcttcaggaggcggccgtcagggtcggggagtatttgggtccggggtctcagggaagggcggcgcctgggtctgcggtatcggaaagagcctgctggagccaagtagccctccctctcttgggacagacccctcggtcccatgtccatgggggcaccgcggtccctcctcctggccctggctgctggcctggccgttgcccgtccgcccaacatcgtgctgatctttgccgacgacctcggctatggggacctgggctgctatgggcaccccagctctaccactcccaacctggaccagctggcggcgggagggctgcggttcacagacttctacgtgcctgtgtctctgtgcacaccctctagggccgccctcctgaccggccggctcccggttcggatgggcatgtaccctggcgtcctggtgcccagctcccgggggggcctgcccctggaggaggtgaccgtggccgaagtcctggctgcccgaggctacctcacaggaatggccggcaagtggcaccttggggtggggcctgagggggccttcctgcccccccatcagggcttccatcgatttctaggcatcccgtactcccacgaccagggcccctgccagaacctgacctgcttcccgccggccactccttgcgacggtggctgtgaccagggcctggtccccatcccactgttggccaacctgtccgtggaggcgcagcccccctggctgcccggactagaggcccgctacatggctttcgcccatgacctcatggccgacgcccagcgccaggatcgccccttcttcctgtactatgcctctcaccacacccactaccctcagttcagtgggcagagctttgcagagcgttcaggccgcgggccatttggggactccctgatggagctggatgcagctgtggggaccctgatgacagccataggggacctggggctgcttgaagagacgctggtcatcttcactgcagacaatggacctgagaccatgcgtatgtcccgaggcggctgctccggtctcttgcggtgtggaaagggaacgacctacgagggcggtgtccgagagcctgccttggccttctggccaggtcatatcgctcccggcgtgacccacgagctggccagctccctggacctgctgcctaccctggcagccctggctggggccccactgcccaatgtcaccttggatggctttgacctcagccccctgctgctgggcacaggcaagagccctcggcagtctctcttcttctacccgtcctacccagacgaggtccgtggggtttttgctgtgcggactggaaagtacaaggctcacttcttcacccagggctctgcccacagtgataccactgcagaccctgcctgccacgcctccagctctctgactgctcatgagcccccgctgctctatgacctgtccaaggaccctggtgagaactacaacctgctggggggtgtggccggggccaccccagaggtgctgcaagccctgaaacagcttcagctgctcaaggcccagttagacgcagctgtgaccttcggccccagccaggtggcccggggcgaggaccccgccctgcagatctgctgtcatcctggctgcaccccccgcccagcttgctgccattgcccagatccccatgcctgagggcccctcggctggcctgggcatgtgatggctcctcactgggagcctgtgggggaggctcaggtgtctggagggggtttgtgcctgataacgtaataacaccagtggagacttgcacatctgaaaaaaaaaaaaaaaaa

SEQ ID NO: 13969 - DNA, 2323 bp, Homo sapiens
ggcgagaggaagcagggaggagagtgatttgagtagaaaagaaacacagcattccaggctggccccacctctatattgataagtagccaatgggagcgggtagccctgatccctggccaatggaaactgaggtaggcgggtcatcgcgctggggtctgtagtctgagcgctacccggttgctgctgcccaaggaccgcggagtcggacgcaggcagaccatgtggaccctggtgagctgggtggccttaacagcagggctggtggctggaacgcggtgcccagatggtcagttctgccctgtggcctgctgcctggaccccggaggagccagctacagctgctgccgtccccttctggacaaatggcccacaacactgagcaggcatctgggtggcccctgccaggttgatgcccactgctctgccggccactcctgcatctttaccgtctcagggacttccagttgctgccccttcccagaggccgtggcatgcggggatggccatcactgctgcccacggggcttccactgcagtgcagacgggcgatcctgcttccaaagatcaggtaacaactccgtgggtgccatccagtgccctgatagtcagttcgaatgcccggacttctccacgtgctgtgttatggtcgatggctcctgggggtgctgccccatgccccaggcttcctgctgtgaagacagggtgcactgctgtccgcacggtgccttctgcgacctggttcacacccgctgcatcacacccacgggcacccaccccctggcaaagaagctccctgcccagaggactaacagggcagtggccttgtccagctcggtcatgtgtccggacgcacggtcccggtgccctgatggttctacctgctgtgagctgcccagtgggaagtatggctgctgcccaatgcccaacgccacctgctgctccgatcacctgcactgctgcccccaagacactgtgtgtgacctgatccagagtaagtgcctctccaaggagaacgctaccacggacctcctcactaagctgcctgcgcacacagtgggggatgtgaaatgtgacatggaggtgagctgcccagatggctatacctgctgccgtctacagtcgggggcctggggctgctgcccttttacccaggctgtgtgctgtgaggaccacatacactgctgtcccgcggggtttacgtgtgacacgcagaagggtacctgtgaacaggggccccaccaggtgccctggatggagaaggccccagctcacctcagcctgccagacccacaagccttgaagagagatgtcccctgtgataatgtcagcagctgtccctcctccgatacctgctgccaactcacgtctggggagtggggctgctgtccaatcccagaggctgtctgctgctcggaccaccagcactgctgcccccagggctacacgtgtgtagctgaggggcagtgtcagcgaggaagcgagatcgtggctggactggagaagatgcctgcccgccgggcttccttatcccaccccagagacatcggctgtgaccagcacaccagctgcccggtggggcagacctgctgcccgagcctgggtgggagctgggcctgctgccagttgccccatgctgtgtgctgcgaggatcgccagcactgctgcccggctggctacacctgcaacgtgaaggctcgatcctgcgagaaggaagtggtctctgcccagcctgccaccttcctggcccgtagccctcacgtgggtgtgaaggacgtggagtgtggggaaggacacttctgccatgataaccagacctgctgccgagacaaccgacagggctgggcctgctgtccctaccgccagggcgtctgttgtgctgatcggcgccactgctgtcctgctggcttccgctgcgcagccaggggtaccaagtgtttgcgcagggaggccccgcgctgggacgcccctttgagggacccagccttgagacagctgctgtgagggacagtactgaagactctgcagccctcgggaccccactcggagggtgccctctgctcaggcctccctagcacctccccctaaccaaattctccctggaccccattctgagctccccatcaccatgggaggtggggcctcaatctaaggccttccctgtcagaagggggttgtggcaaaagccacattacaagctgccatcccctccccgtttcagtggaccctgtggccaggtgcttttccctatccacaggggtgtttgtgtgtgtgcgcgtgtgcgtttcaataaagtttgtacactttcaaaaaaaaaaaaaaaaaa

SEQ ID NO: 13970 - DNA, 6331 bp, Homo sapiens
gtcccgcagtggctggagccctgggcgctgcaaagcgtgtcccgccgggtccccgagcgtcccgcgccctcgccccgccatgctcctgctgctggggctgtgcctggggctgtccctgtgtgtggggtcgcaggaagaggcgcagagctggggccactcttcggagcaggatggactcagggtcccgaggcaagtcagactgttgcagaggctgaaaaccaaacctttgatgacagaattctcagtgaagtctaccatcatttcccgttatgccttcactacggtttcctgcagaatgctgaacagagcttctgaagaccaggacattgagttccagatgcagattccagctgcagctttcatcaccaacttcactatgcttattggagacaaggtgtatcagggcgaaattacagagagagaaaagaagagtggtgatagggtaaaagagaaaaggaataaaaccacagaagaaaatggagagaaggggactgaaatattcagagcttctgcagtgattcccagcaaggacaaagccgcctttttcctgagttatgaggagcttctgcagaggcgcctgggcaagtacgagcacagcatcagcgtgcggccccagcagctgtccgggaggctgagcgtggacgtgaatatcctggagagcgcgggcatcgcatccctggaggtgctgccgcttcacaacagcaggcagaggggcagtgggcgcggggaagatgattctgggcctcccccatctactgtcattaaccaaaatgaaacatttgccaacataatttttaaacctactgtagtacaacaagccaggattgcccagaatggaattttgggagactttatcattagatatgacgtcaatagagaacagagcattggggacatccaggttctaaatggctattttgtgcactactttgctcctaaagaccttcctcctttacccaagaatgtggtattcgtgcttgacagcagtgcttctatggtgggaaccaaactccggcagaccaaggatgccctcttcacaattctccatgacctccgaccccaggaccgtttcagtatcattggattttccaaccggatcaaagtatggaaggaccacttgatatcagtcactccagacagcatcagggatgggaaagtgtacattcaccatatgtcacccactggaggcacagacatcaacggggccctgcagagggccatcaggctcctcaacaagtacgtggcccacagtggcattggagaccggagcgtgtccctcatcgtcttcctgacggatgggaagcccacggtcggggagacgcacaccctcaagatcctcaacaacacccgagaggccgcccgaggccaagtctgcatcttcaccattggcatcggcaacgacgtggacttcaggctgctggagaaactgtcgctggagaactgtggcctcacacggcgcgtgcacgaggaggaggacgcaggctcgcagctcatcgggttctacgatgaaatcaggaccccgctcctctctgacatccgcatcgattatccccccagctcagtggtgcaggccaccaagaccctgttccccaactacttcaacggctcggagatcatcattgcggggaagctggtggacaggaagctggatcacctgcacgtggaggtcaccgccagcaacagtaagaaattcatcatcctgaagacagatgtgcctgtgcggcctcagaaggcagggaaagatgtcacaggaagccccaggcctggaggcgatggagagggggacaccaaccacatcgagcgtctctggagctacctcaccacaaaggagctgctgagctcctggctgcaaagtgacgatgaaccggagaaggagcggctgcggcagcgggcccaggccctggctgtgagctaccgcttcctcactcccttcacctccatgaagctgagggggccggtcccacgcatggatggcctggaggaggcccacggcatgtcggctgccatgggacccgaaccggtggtgcagagcgtgcgaggagctggcacgcagccaggacctttgctcaagaagccataccagccaagaattaaaatctctaaaacatcagtggatggtgatccccactttgttgtggatttccccctgagcagactcaccgtgtgcttcaacattgatgggcagcccggggacatcctcaggctggtctctgatcacagggactctggtgtcacagtgaacggagagttaattggggcacccgcccctccaaatggccacaagaaacagcgcacttacttgcgcactatcaccatcctcatcaacaagccagagagatcttatctcgagatcacaccgagcagagtcatcttggatggtggggacagactggtgctcccctgcaaccagagtgtggtggtggggagctgggggctggaggtgtccgtgtctgccaacgccaatgtcaccgtcaccatccagggctccatagcctttgtcatcctcatccacctctacaaaaagccggcgcccttccagcgacaccacctgggtttctacattgccaacagcgagggcctttccagcaactgccacggactgctgggtcagttcctgaatcaggatgccagactcacagaagaccctgcagggcccagccagaacctcactcaccctctgctccttcaggtgggagaggggcctgaggccgtcctaacagtgaaaggccaccaagtcccagtggtctggaagcaaaggaagatttacaacggggaagagcagatagactgctggtttgccaggaacaatgccgccaaactgattgacggggagtacaaggattacctggcatcccatccatttgacacagggatggacacttggccggggaatgtccagggagctctgaagctggcagccttaaagatgcaagtgcatgaaggacagtgatgtggggaggccgtggggcagctcttttcatggcttgtacacgcctcagctcctggcaattagctggactccatgacccacccctggtgcagcatagatccgacgtctgtctgggcgaagggtaggggtgggtaggggcgggaagcctgagtgcaaatgtcatttccctctactgcctcttcctgcctctccccaccctgcccacatccacagaggggagagaagggtcatagctaaatgcaacaaagtctgtatcttgtcccaacctgcttttctgttctgttagcatatcataaagtaagcctttctggtgaaggaaggttgctatgaaactttttttcttggtggaaatggacaagtttaggcactctgctttttgccttacactaatgcttagaaagctgtcttttcagtggtgttgcagcccccagatgtgtggccaacctctgctgcaaaggaatctcttgctgagtccaggccaccaatcaggcaaatagcccatacatttgatcgttgtaaaccatgaagtcttttcttgcaagacgtttttcttctgctgtggtatcttgcccttaaaaattagttttcattaaaaagaaatttgattgaaaatagaaacatctacagctcagatactgatctctttctagtgggctttgtaaaccacttgactttgctaatggctattctccaatttgttccaataagctaagggcttttcatacacaggacaactccatgtggttgattttactggcatgtcttggtgacgaagagttggccaagtgaatgatgcatcttttacttggagctctccagcctttgtcatagttcccagaccttttttccttgtggtcatccaggaggtgatcaattacatgtgcacagtgctaggacgggaggcagagccggctcagagcaggtccaccagcccacctatagcaggaagcgtgtcggtgcttaggaaatctaggacttccagcttccctcatgtcagatagaaaaaaagtcaggaaaccagctcgtggacaggggctttggttccaaaacttggacaaacctgatgccttaaggaaaaggttaagatgagagggggcttccagagtcaatgaacgtcacccttcagccgacggataccgggagcgcttgggcaaaacagcagagaaagaaagactgtggtcggggaagtggaatgcttcgatgcaggccagagttcaaggctctggggctggcctcacaagaggcttcttccacggggcttgacaccagagcagcccccgcgtgaaatgagaaggcatgcttagcactgggaggaaaagctgagttaagaaaattctttatcatgtttgccttccctggggaaacattcaggcagtaaaatgacatccacgtgttcctgtcggacgcagcggcttcgggaacaagttagcgctgggggactatctgggctcgtctctctctgcttcgtgaacccaccacaccagggcctgtctgctgtgctatttatttgccttccgtcttcccaacctcagctgcctgtattcatgccagaggtgcaaaggctgccagccagtgctgctgacagatgctttcagactgtagagctcagagaaagggagcggcagctagaggtagccagggagctggccaggctccccggggccttcctattatgtaaatcccagctggacagacagccctggagccaggtggccctgtcccctgtggagcacttggagcagtgatctgttgttccaggtgtaagtctcgacactgcagaaatgaggacgttattaggaaagaccagttcctactgcctgtgttgctactttaagagctgagaaaaacattccaatgagctatccatagctaacttgcttgctcagaaaaacataagtaacaaagttgagctttcatttttaaaaattatattttactttagaaaaatatcaccttttttcttcctcttctttacgtgtagatctttttttttttttcaaatggggtcagtacctgaaagcccgaaaccccataccaagcttatagttaggacctttgcatttgataaaaaaaaatatagtattttctgttgtccagaaaatcttcccagatagggaaactgaggcagagagtgccgtggagtggtttttgccaagtcatacaacatacttaatgcagggctacactgaacctccagaatcattttgtttgctttgaccctgtttcaccatctgggcaatcatttattttccttgagcatttataaaccagggcgagggttgttccaaaatgagtaattgaatgagatgaagaaatatgtcataattagaggagataaatctccttgttatcacaatagttaatgtgtcatgatcactgactaactgggaccttgaacaagtcagcatctctgcctttcaaaatgaaggaacattgttctctatcctcccctgaccccccacggccccatgctaggtgcaccatcttcctccatttgactttttaatgctttacaacttcaggctaaagggaggggatgttgggaggagaaaccatcacaagattccctcggtgccacagctgtgctgaggaggccggggactgggaatcggagtgggcacctctgtgtttctctagggagtaacattcaacatttaattgaatcgtgtatcctgataggtggattaggaacaggattcattcctttaactttaacttttggctaaacgacatgccttggattgagtgtatatgtcttccccaaattcatatgttgaagcttaaatcctgaatgtgatggttcttggaattgggacctttggaaggttattgggtcttgagggcagagccctcacgaatgggattaaggcccttataagaagagacatggggccaggtgcagtggctcacacctgtaatcccaacattttgggaggccgagaagggtggatcatgaggtcaggagatggagaccatcctggccaacatggtgaaacctcgtctctactaaaaatacaaaaattagctgggcgtggtggtgcgtgcctgtagttccagctacttgggaggctgaggcaggagaatcgcttgaaccaggcagtcggaacttgtagtgagccaagatcacgccactgcactccagctggagtgacagagccaaactccgtcaaaaaaaaacaaaacaaaacaaaaaaaagacatgggagagatggtgtttttcctctccaccacctggggatacgatgagaagatggccacctgcaagccaggaagacggccctcaccagacaccatgtctgctggcaccttgatcttggacctcccagcctccagaactgtgagaaataaatgtgttttgtttaagctaaaaaaaaaaaaaaa

SEQ ID NO: 13971 - DNA, 5815 bp, Homo sapiens
gaaggcagtttccggagggaaggggtagggttggggtgggggcgctctccgcccggtgttgcgctccttcccagaatccgctccggcctttccttcctgccgcgattcccaactttgctcaaagtcgctggactctaagctgtcggagggaccgctggacagacctgggaactgacagagggcctggagggaaacaggccaaagacccacaggcagagttgacacggaaccccaaagcaaggaggagggctcgggccgagaccgttcacctccccttatccctgttcccctcttcaggatggagctgacctcaagggaaagagggaggggacagcctctgccctgggaacttcgactgggcctactgctaagcgtgctggctgccacactggcacaggcccctgccccggatgtgcctggctgttccaggggaagctgctaccccgccacgggcgacctgctggtgggccgagctgacagactgactgcctcatccacttgtggcctgaatggcccccagccctactgcatcgtcagtcacctgcaggacgaaaagaagtgcttcctttgtgactcccggcgccccttctctgctagagacaacccacacagccatcgcatccagaatgtagtcaccagctttgcaccacagcggcgggcagcctggtggcagtcagagaatggtatccctgcggtcaccatccagctggacctggaggctgagtttcatttcacacacctcattatgaccttcaagacatttcgccctgctgccatgctggtggaacgctcagcagactttggccgaacctggcatgtgtaccgatatttctcctatgactgtggggctgacttcccaggagtcccactagcacccccacggcactgggatgatgtagtctgtgagtcccgctactcagagattgagccatccactgaaggcgaggtcatctatcgtgtgctggaccctgccatccctatcccagacccctacagctcacggattcagaacctgttgaagatcaccaacctacgggtgaacctgactcgtctacacacgttgggagacaacctactcgacccacggagggagatccgagagaagtactactatgccctctatgagctggttgtacgtggcaactgcttctgctacggacacgcctcagagtgtgcacccgccccaggggcaccagcccatgctgagggcatggtgcacggagcttgcatctgcaaacacaacacacgtggcctcaactgcgagcagtgtcaggatttctatcgtgacctgccctggcgtccggctgaggacggccatagtcatgcctgtaggaagtgtgagtgccatgggcacacccacagctgccacttcgacatggccgtatacctggcatctggcaatgtgagtggaggtgtgtgtgatggatgtcagcataacacagctgggcgccactgtgagctctgtcggcccttcttctaccgtgacccaaccaaggacctgcgggatccggctgtgtgccgctcctgtgattgtgaccccatgggttctcaagacggtggtcgctgtgattcccatgatgaccctgcactgggactggtctccggccagtgtcgctgcaaagaacatgtggtgggcactcgctgccagcaatgccgtgatggcttctttgggctcagcatcagtgaccgtctgggctgccggcgatgtcaatgtaatgcacggggcacagtgcctgggagcactccttgtgaccccaacagtggatcctgttactgcaaacgtctagtgactggacgtggatgtgaccgctgcctgcctggccactggggcctgagccacgacctgctcggctgccgcccctgtgactgcgacgtgggtggtgctttggatccccagtgtgatgagggcacaggtcaatgccactgccgccagcacatggttgggcgacgctgtgagcaggtgcaacctggctacttccggcccttcctggaccacctaatttgggaggctgaggacacccgagggcaggtgctcgatgtggtggagcgcctggtgacccccggggaaactccatcctggactggctcaggcttcgtgcggctacaggaaggtcagaccctggagttcctggtggcctctgtgccgaaggctatggactatgacctgctgctgcgcttagagccccaggtccctgagcaatgggcagagttggaactgattgtgcagcgtccagggcctgtgcctgcccacagcctgtgtgggcatttggtgcccaaggatgatcgcatccaagggactctgcaaccacatgccaggtacttgatatttcctaatcctgtctgccttgagcctggtatctcctacaagctgcatctgaagctggtacggacagggggaagtgcccagcctgagactccctactctggacctggcctgctcattgactcgctggtgctgctgccccgtgtcctggtgctagagatgtttagtgggggtgatgctgctgccctggagcgccaggccacctttgaacgctaccaatgccatgaggagggtctggtgcccagcaagacttctccctctgaggcctgcgcacccctcctcatcagcctgtccaccctcatctacaatggtgccctgccatgtcagtgcaaccctcaaggttcactgagttctgagtgcaaccctcatggtggtcagtgcctgtgcaagcctggagtggttgggcgccgctgtgacctctgtgcccctggctactatggctttggccccacaggctgtcaagcctgccagtgcagccacgagggggcactcagcagtctctgtgaaaagaccagtgggcaatgtctctgtcgaactggtgcctttgggcttcgctgtgaccgctgccagcgtggccagtggggattccctagctgccggccatgtgtctgcaatgggcatgcagatgagtgcaacacccacacaggcgcttgcctgggctgccgtgatcacacagggggtgagcactgtgaaaggtgcattgctggtttccacggggacccacggctgccatatgggggccagtgccggccctgtccctgtcctgaaggccctgggagccaacggcactttgctacttcttgccaccaggatgaatattcccagcagattgtgtgccactgccgggcaggctatacggggctgcgatgtgaagcttgtgcccctgggcactttggggacccatcaaggccaggtggccggtgccaactgtgtgagtgcagtgggaacattgacccaatggatcctgatgcctgtgacccccacacgggccaatgcctgcgctgtttacaccacacagagggtccacactgtgcccactgcaagcctggcttccatgggcaggctgcccgacagagctgtcaccgctgcacatgcaacctgctgggcacaaatccgcagcagtgcccatctcctgaccagtgccactgtgatccaagcagtgggcagtgcccatgcctccccaatgtccagggccctagctgtgaccgctgtgcccccaacttctggaacctcaccagtggccatggttgccagccttgtgcctgccacccaagccgggccagaggccccacctgcaacgagttcacagggcagtgccactgccgtgccggctttggagggcggacttgttctgagtgccaagagctccactggggagaccctgggttgcagtgccatgcctgtgattgtgactctcgtggaatagatacacctcagtgtcaccgcttcacaggtcactgcagctgccgcccaggggtgtctggtgtgcgctgtgaccagtgtgcccgtgcgttctcaggaatctttcctgcctgccatccctgccatgcatgcttcggggattgggaccgagtggtgcaggacttggcagcccgtacacagcgcctagagcagcgggcgcaggagttgcaacagacgggtgtgctgggtgcctttgagagcagcttctggcacatgcaggagaagctgggcattgtgcagggcatcgtaggtgcccgcaacacctcagccgcctccactgcacagcttgtggaggccacagaggagctgcggcgtgaaattggggaggccactgagcacctgactcagctcgaggcagacctgacagatgtgcaagatgagaacttcaatgccaaccatgcactaagtggtctggagcgagataggcttgcacttaatctcacactgcggcagctcgaccagcatcttgacttgctcaaacattcaaacttcctgggtgcctatgacagcatccggcatgcccatagccagtctgcagaggcagaacgtcgtgccaatacctcagccctggcagtacctagccctgtgagcaactcggcaagtgctcggcatcggacagaggcactgatggatgctcagaaggaggacttcaacagcaaacacatggccaaccagcgggcacttggcaagctctctgcccatacccacaccctgagcctgacagacataaatgagctggtgtgtggggcaccaggggatgcaccctgtgctacaagcccttgtgggggtgccggctgtcgagatgaggatgggcagccgcgctgtgggggcctcagctgcaatggggcagcggctacagcagacctagcactgggccgggcccggcacacacaggcagagctgcagcgggcactggcagaaggtggtagcatcctcagcagagtggctgagactcgtcggcaggcaagcgaggcacagcagcgggcccaggcagccctggacaaggctaatgcttccaggggacaggtggaacaggccaaccaggaacttcaagaacttatccagagtgtgaaggacttcctcaaccaggagggggctgatcctgatagcattgaaatggtggccacacgggtgctagagctctccatcccagcttcagctgagcagatccagcacctggcgggcgcgattgcagagcgagtccggagcctggcagatgtggatgcgatcctggcacgtactgtaggagatgtgcgtcgtgccgagcagctactgcaggatgcacggcgggcaaggagctgggctgaggatgagaaacagaaggcagagacagtacaggcagcactggaggaggcccagcgggcacagggtattgcccagggtgccatccggggggcagtggctgacacacgggacacagagcagaccctgtaccaggtacaggagaggatggcaggtgcagagcgggcactgagctctgcaggtgaaagggctcggcagttggatgctctcctggaggctctgaaattgaaacgggcaggaaatagtctggcagcctctacagcagaagaaacggcaggcagtgcccagggtcgtgcccaggaggctgagcagctgctacgcggtcctctgggtgatcagtaccagacggtgaaggccctagctgagcgcaaggcccaaggtgtgctggctgcacaggcaagggcagaacaactgcgggatgaggctcgggacctgttgcaagccgctcaggacaagctgcagcggctacaggaattggaaggcacctatgaggaaaatgagcgggcactggagagtaaggcagcccagttggacgggttggaggccaggatgcgcagcgtgcttcaagccatcaacttgcaggtgcagatctacaacacctgccagtgacccctgcccaaggcctaccccagttcctagcactgccccacatgcatgtctgcctatgcactgaagagctcttggcccggcagggcccccaataaaccagtgtgaacccccaaaaaaaaa

SEQ ID NO: 13972 - DNA, 914 bp, Homo sapiens
acttgtgtccgggtggtggactggattagctgcggagccctggaagctgcctgtccttctccctgtgcttaaccagaggtgcccatgggttggacaatgaggctggttacagcagcactgttactgggtctcatgatggtggtcactggagacgaggatgagaacagcccgtgtgcccatgaggccctcttggacgaggacaccctcttttgccagggccttgaagttttctacccagagttggggaacattggctgcaaggttgttcctgattgtaacaactacagacagaagatcacctcctggatggagccgatagtcaagttcccgggggccgtggacggcgcaacctatatcctggtgatggtggatccagatgcccctagcagagcagaacccagacagagattctggagacattggctggtaacagatatcaagggcgccgacctgaaggaagggaagattcagggccaggagttatcagcctaccaggctccctccccaccggcacacagtggcttccatcgctaccagttctttgtctatcttcaggaaggaaaagtcatctctctccttcccaaggaaaacaaaactcgaggctcttggaaaatggacagatttctgaaccgcttccacctgggcgaacctgaagcaagcacccagttcatgacccagaactaccaggactcaccaaccctccaggctcccagaggaagggccagcgagcccaagcacaaaaccaggcggagatagctgcctgctagatagccggctttgccatccgggcatgtggccacactgctcaccaccgacgatgtgggtatggaaccccctctggatacagaaccccttcttttccaaattaaaaaaaaaaatcatccgaaaaaaaaaaaaaaaaaaaaaaaaaaaaa

SEQ ID NO: 13973 - DNA, 5680 bp, Homo sapiens
gggcgatgggttgatgggcgccgggggacgcaggatgcggggggcgcccgcgcgcctgctgctgccgctgctgccgtggctcctgctgctcctggcgcccgaggctcggggcgcgcccggctgcccgctatccatccgcagctgcaagtgctcgggggagcggcccaaggggctgagcggcggcgtccctggcccggctcggcggagggtggtgtgcagcggcggggacctcccggagcctcccgagcccggccttctgcctaacggcaccgttaccctgctcttgagcaataacaagatcacggggctccgcaatggctccttcctgggactgtcactgctggagaagctggacctgaggaacaacatcatcagcacagtgcagccgggcgccttcctgggcctgggggagctgaagcgtttagatctctccaacaaccggattggctgtctcacctccgagaccttccagggcctccccaggcttctccgactaaacatatctggaaacatcttctccagtctgcaacctggggtctttgatgagctgccagcccttaaggttgtggacttgggcaccgagttcctgacctgtgactgccacctgcgctggctgctgccctgggcccagaatcgctccctgcagctgtcggaacacacgctctgtgcttaccccagtgccctgcatgctcaggccctgggcagcctccaggaggcccagctctgctgcgagggggccctggagctgcacacacaccacctcatcccgtccctacgccaagtggtgttccagggggatcggctgcccttccagtgctctgccagctacctgggcaacgacacccgcatccgctggtaccacaaccgagcccctgtggagggtgatgagcaggcgggcatcctcctggccgagagcctcatccacgactgcaccttcatcaccagtgagctgacgctgtctcacatcggcgtgtgggcctcaggcgagtgggagtgcaccgtgtccatggcccaaggcaacgccagcaagaaggtggagatcgtggtgctggagacctctgcctcctactgccccgccgagcgtgttgccaacaaccgcggggacttcaggtggccccgaactctggctggcatcacagcctaccagtcctgcctgcagtatcccttcacctcagtgcccctgggcgggggtgccccgggcacccgagcctcccgccggtgtgaccgtgccggccgctgggagccaggggactactcccactgtctctacaccaacgacatcaccagggtgctgtacaccttcgtgctgatgcccatcaatgcctccaatgcgctgaccctggctcaccagctgcgcgtgtacacagccgaggccgctagcttttcagacatgatggatgtagtctatgtggctcagatgatccagaaatttttgggttatgtcgaccagatcaaagagctggtagaggtgatggtggacatggccagcaacctgatgctggtggacgagcacctgctgtggctggcccagcgcgaggacaaggcctgcagccgcatcgtgggtgccctggagcgcattgggggggccgccctcagcccccatgcccagcacatctcagtgaatgcgaggaacgtggcattggaggcctacctcatcaagccgcacagctacgtgggcctgacctgcacagccttccagaggagggagggaggggtgccgggcacacggccaggaagccctggccagaaccccccacctgagcccgagcccccagctgaccagcagctccgcttccgctgcaccaccgggaggcccaatgtttctctgtcgtccttccacatcaagaacagcgtggccctggcctccatccagctgcccccgagtctattctcatcccttccggctgccctggctcccccggtgcccccagactgcaccctgcaactgctcgtcttccgaaatggccgcctcttccacagccacagcaacacctcccgccctggagctgctgggcctggcaagaggcgtggcgtggccacccccgtcatcttcgcaggaaccagtggctgtggcgtgggaaacctgacagagccagtggccgtttcgctgcggcactgggctgagggagccgaacctgtggccgcttggtggagccaggaggggcccggggaggctgggggctggacctcggagggctgccagctccgctccagccagcccaatgtcagcgccctgcactgccagcacttgggcaatgtggccgtgctcatggagctgagcgcctttcccagggaggtggggggcgccggggcagggctgcaccccgtggtatacccctgcacggccttgctgctgctctgcctcttcgccaccatcatcacctacatcctcaaccacagctccatccgtgtgtcccggaaaggctggcacatgctgctgaacttgtgcttccacatagccatgacctctgctgtctttgcggggggcatcacactcaccaactaccagatggtctgccaggcggtgggcatcaccctgcactactcctccctatccacgctgctctggatgggcgtgaaggcgcgagtgctccataaggagctcacctggagggcaccccctccgcaagaaggggaccccgctctgcctactcccagtcctatgctccggttctatttgatcgctggagggattccactcattatctgtggcatcacagctgcagtcaacatccacaactaccgggaccacagcccctactgctggctggtgtggcgtccaagccttggcgccttctacatccctgtggctttgattctgctcatcacctggatctatttcctgtgcgccgggctacgcttacggggtcctctggcacagaaccccaaggcgggcaacagcagggcctccctggaggcaggggaggagctgaggggttccaccaggctcaggggcagcggccccctcctgagtgactcaggttcccttcttgctactgggagcgcgcgagtggggacgcccgggcccccggaggatggtgacagcctctattctccgggagtccagctaggggcgctggtgaccacgcacttcctgtacttggccatgtgggcctgcggggctctggcagtgtcccagcgctggctgccccgggtggtgtgcagctgcttgtacggggtggcagcctccgccctgggcctcttcgtcttcactcaccactgtgccaggcggagggacgtgagagcctcgtggcgcgcctgctgcccccctgcctctcccgcggccccccatgccccgccccgggccctgcccgccgccgcagaggacggttccccggtgttcggggaggggcccccctccctcaagtcctccccaagcggcagcagcggccatccgctggctctgggcccctgcaagctcaccaacctgcagctggcccagagtcaggtgtgcgaggcgggggcggcggccggcggggaaggagagccggagccggcgggcacccggggaaacctcgcccaccgccaccccaacaacgtgcaccacgggcgtcgggcgcacaagagccgggccaagggacaccgcgcgggggaggcctgcggcaagaaccggctcaaggccctgcgcgggggcgcggcgggggcgctggagctgctgtccagcgagagcggtagtctgcacaacagccccaccgacagctacctgggcagcagccgcaacagcccgggcgccggcctgcagctggaaggcgagcccatgctcacgccgtccgagggcagcgacaccagcgccgcgccgctttctgaggcgggccgggcaggccagcgccgcagcgccagccgcgacagtctcaagggcggcggcgcgctggagaaggagagccatcgccgctcgtacccgctcaacgccgccagcctaaacggcgcccccaaggggggcaagtacgacgacgtcaccctgatgggcgcggaggtagccagcggcggctgcatgaagaccggactctggaagagcgaaactaccgtctaaggtggggcgggcgacgcggtagacgggctggccacgcggctcgttcccccgctcctcggggccctccaaggtgtctccgtagtcagcaggttggaggcagaggagccgatggctggaggaagcccacaggcggatgttccccacttgcctagagggcatccctctggggtagcgacagacaatcccagaaacacgcataatacatttccgtccagcccggggcagtctgactgtcggtgccctcccaggaacggggaaggcctccgtctgtgtgaaagggcacagcacatcccaggtgcaccctccccaagtactcccaccccgcctactgtccatgcggcctcactgggggccatcagcctcaccagcaaagcagagatgagagcgtgggaactgtgttctttcctccctgccctctactgatttcagcccagcccctgcctagatcctaggtcccttttcctcccgagtttggctggcacgagagctagcccagcacatgaagcaggtgatgttaagtcacaaggtgctgcttttcagatccactatgcaagaggggagggtggggccacgtgaaaggcagctctagacatcaaccagtcctgggggaggggagtgggaaccgggcacaactaggaacaatgccaccattcccacaggagtggtacttaaaccagacagcagggttcagaggtggcacaccgggacaaagctgaggccctgcacctcaacagctgactgccaggtgcctgtgggtgaactgaggggagtagagggagagggcaggtggaactggggcagaatctagtcatgccctaaagctagtcctgtaaacaatggtgccccagaaagctgcaggtggtgtttggagaagcagttacttttcagttacaagacccatctccctagtctcagccttacaacaccacgggactaaggaagagcacttccttgcctccgtaaggccagaggaagaaccatcccaatcatttgatctccagctccacagtagagagaaacctacaaaatgtcaaaccagcttcccgactcccaggagctcaagccaagcccagaggcagtggctggggtccctgcaggtcatgaggggcctatgcctttactccttttaaacaccagcacccgtcttttccccaacctaaaaccaaccaccagcatttcactacaggaccaaatggaaaccgagggaaccctgggtcttgggaagaacaacaggaaaccaaggtctgacctagggttccctcccagtcttcacatcactctggcctcatcaccaaggtgacagaggacacaggggagggggaaaacccacacacactccttggaatgggtcctgttatttatgcttgctgcacagacatattagaagaaaaaaaaaagctttgtattattcttccacatatgctggctgctgtttacacaccctgccaatgccttagcactggagagctttttgcaatatgctggggaaaggggagggagggaatgaaagtgccaaagaaaacatgtttttaagaactcgggttttatacaatagaatgttttctagcagatgcctcttgttttaatatattaaaattttgcaaagccctttgagctacaaaaaaaaaaaaaaaaaaaaaaaaaaaaaaa

SEQ ID NO: 13974 - DNA, 2780 bp, Homo sapiens
gtgggcggaccgcgcggctggaggtgtgaggatccgaacccaggggtggggggtggaggcggctcctgcgatcgaaggggacttgagactcaccggccgcacgccatgagggccctgtgggtgctgggcctctgctgcgtcctgctgaccttcgggtcggtcagagctgacgatgaagttgatgtggatggtacagtagaagaggatctgggtaaaagtagagaaggatcaaggacggatgatgaagtagtacagagagaggaagaagctattcagttggatggattaaatgcatcacaaataagagaacttagagagaagtcggaaaagtttgccttccaagccgaagttaacagaatgatgaaacttatcatcaattcattgtataaaaataaagagattttcctgagagaactgatttcaaatgcttctgatgctttagataagataaggctaatatcactgactgatgaaaatgctctttctggaaatgaggaactaacagtcaaaattaagtgtgataaggagaagaacctgctgcatgtcacagacaccggtgtaggaatgaccagagaagagttggttaaaaaccttggtaccatagccaaatctgggacaagcgagtttttaaacaaaatgactgaagcacaggaagatggccagtcaacttctgaattgattggccagtttggtgtcggtttctattccgccttccttgtagcagataaggttattgtcacttcaaaacacaacaacgatacccagcacatctgggagtctgactccaatgaattttctgtaattgctgacccaagaggaaacactctaggacggggaacgacaattacccttgtcttaaaagaagaagcatctgattaccttgaattggatacaattaaaaatctcgtcaaaaaatattcacagttcataaactttcctatttatgtatggagcagcaagactgaaactgttgaggagcccatggaggaagaagaagcagccaaagaagagaaagaagaatctgatgatgaagctgcagtagaggaagaagaagaagaaaagaaaccaaagactaaaaaagttgaaaaaactgtctgggactgggaacttatgaatgatatcaaaccaatatggcagagaccatcaaaagaagtagaagaagatgaatacaaagctttctacaaatcattttcaaaggaaagtgatgaccccatggcttatattcactttactgctgaaggggaagttaccttcaaatcaattttatttgtacccacatctgctccacgtggtctgtttgacgaatatggatctaaaaagagcgattacattaagctctatgtgcgccgtgtattcatcacagacgacttccatgatatgatgcctaaatacctcaattttgtcaagggtgtggtggactcagatgatctccccttgaatgtttcccgcgagactcttcagcaacataaactgcttaaggtgattaggaagaagcttgttcgtaaaacgctggacatgatcaagaagattgctgatgataaatacaatgatactttttggaaagaatttggtaccaacatcaagcttggtgtgattgaagaccactcgaatcgaacacgtcttgctaaacttcttaggttccagtcttctcatcatccaactgacattactagcctagaccagtatgtggaaagaatgaaggaaaaacaagacaaaatctacttcatggctgggtccagcagaaaagaggctgaatcttctccatttgttgagcgacttctgaaaaagggctatgaagttatttacctcacagaacctgtggatgaatactgtattcaggcccttcccgaatttgatgggaagaggttccagaatgttgccaaggaaggagtgaagttcgatgaaagtgagaaaactaaggagagtcgtgaagcagttgagaaagaatttgagcctctgctgaattggatgaaagataaagcccttaaggacaagattgaaaaggctgtggtgtctcagcgcctgacagaatctccgtgtgctttggtggccagccagtacggatggtctggcaacatggagagaatcatgaaagcacaagcgtaccaaacgggcaaggacatctctacaaattactatgcgagtcagaagaaaacatttgaaattaatcccagacacccgctgatcagagacatgcttcgacgaattaaggaagatgaagatgataaaacagttttggatcttgctgtggttttgtttgaaacagcaacgcttcggtcagggtatcttttaccagacactaaagcatatggagatagaatagaaagaatgcttcgcctcagtttgaacattgaccctgatgcaaaggtggaagaagagcccgaagaagaacctgaagagacagcagaagacacaacagaagacacagagcaagacgaagatgaagaaatggatgtgggaacagatgaagaagaagaaacagcaaaggaatctacagctgaaaaagatgaattgtaaattatactctcaccatttggatcctgtgtggagagggaatgtgaaatttacatcatttctttttgggagagacttgttttggatgccccctaatccccttctcccctgcactgtaaaatgtgggattatgggtcacaggaaaaagtgggttttttagttgaattttttttaacattcctcatgaatgtaaatttgtactatttaactgactattcttgatgtaaaatcttgtcatgtgtataaaaataaaaaagatcccaaat

SEQ ID NO: 13975 - DNA, 3859 bp, Homo sapiens
gcggcgcgcggggactcggaggtactgggcgcgcgcggctccggctcgggacgcctcgggacgcctcggggtcgggctccggctgcggctgctgctgcggcgcccgcgctccggtgcgctccgcctcctgtgcccgccgcggagcgcagtctgcgcgcccgccgtgcgccctcagctccttttcctgagcccgccgcgatgggagctgcgcggggatccccggccagaccccgccggttgcctctgctcagcgtcctgctgctgccgctgctgggcggtacccagacagccattgtcttcatcaagcagccgtcctcccaggatgcactgcaggggcgccgggcgctgcttcgctgtgaggttgaggctccgggcccggtacatgtgtactggctgctcgatggggcccctgtccaggacacggagcggcgtttcgcccagggcagcagcctgagctttgcagctgtggaccggctgcaggactctggcaccttccagtgtgtggctcgggatgatgtcactggagaagaagcccgcagtgccaacgcctccttcaacatcaaatggattgaggcaggtcctgtggtcctgaagcatccagcctcggaagctgagatccagccacagacccaggtcacacttcgttgccacattgatgggcaccctcggcccacctaccaatggttccgagatgggacccccctttctgatggtcagagcaaccacacagtcagcagcaaggagcggaacctgacgctccggccagctggtcctgagcatagtgggctgtattcctgctgcgcccacagtgcttttggccaggcttgcagcagccagaacttcaccttgagcattgctgatgaaagctttgccagggtggtgctggcaccccaggacgtggtagtagcgaggtatgaggaggccatgttccattgccagttctcagcccagccacccccgagcctgcagtggctctttgaggatgagactcccatcactaaccgcagtcgccccccacacctccgcagagccacagtgtttgccaacgggtctctgctgctgacccaggtccggccacgcaatgcagggatctaccgctgcattggccaggggcagaggggcccacccatcatcctggaagccacacttcacctagcagagattgaagacatgccgctatttgagccacgggtgtttacagctggcagcgaggagcgtgtgacctgccttccccccaagggtctgccagagcccagcgtgtggtgggagcacgcgggagtccggctgcccacccatggcagggtctaccagaagggccacgagctggtgttggccaatattgctgaaagtgatgctggtgtctacacctgccacgcggccaacctggctggtcagcggagacaggatgtcaacatcactgtggccaatgggagcagcctcccagagtgggtgacagacaacgctgggaccctgcattttgcccgggtgactcgagatgacgctggcaactacacttgcattgcctccaacgggccgcagggccagattcgtgcccatgtccagctcactgtggcagtttttatcaccttcaaagtggaaccagagcgtacgactgtgtaccagggccacacagccctactgcagtgcgaggcccagggggaccccaagccgctgattcagtggaaaggcaaggaccgcatcctggaccccaccaagctgggacccaggatgcacatcttccagaatggctccctggtgatccatgacgtggcccctgaggactcaggccgctacacctgcattgcaggcaacagctgcaacatcaagcacacggaggcccccctctatgtcgtggacaagcctgtgccggaggagtcggagggccctggcagccctcccccctacaagatgatccagaccattgggttgtcggtgggtgccgctgtggcctacatcattgccgtgctgggcctcatgttctactgcaagaagcgctgcaaagccaagcggctgcagaagcagcccgagggcgaggagccagagatggaatgcctcaacggtgggcctttgcagaacgggcagccctcagcagagatccaagaagaagtggccttgaccagcttgggctccggccccgcggccaccaacaaacgccacagcacaagtgataagatgcacttcccacggtctagcctgcagcccatcaccacgctggggaagagtgagtttggggaggtgttcctggcaaaggctcagggcttggaggagggagtggcagagaccctggtacttgtgaagagcctgcagagcaaggatgagcagcagcagctggacttccggagggagttggagatgtttgggaagctgaaccacgccaacgtggtgcggctcctggggctgtgccgggaggctgagccccactacatggtgctggaatatgtggatctgggagacctcaagcagttcctgaggatttccaagagcaaggatgaaaaattgaagtcacagcccctcagcaccaagcagaaggtggccctatgcacccaggtagccctgggcatggagcacctgtccaacaaccgctttgtgcataaggacttggctgcgcgtaactgcctggtcagtgcccagagacaagtgaaggtgtctgccctgggcctcagcaaggatgtgtacaacagtgagtactaccacttccgccaggcctgggtgccgctgcgctggatgtcccccgaggccatcctggagggtgacttctctaccaagtctgatgtctgggccttcggtgtgctgatgtgggaagtgtttacacatggagagatgccccatggtgggcaggcagatgatgaagtactggcagatttgcaggctgggaaggctagacttcctcagcccgagggctgcccttccaaactctatcggctgatgcagcgctgctgggccctcagccccaaggaccggccctccttcagtgagattgccagcgccctgggagacagcaccgtggacagcaagccgtgaggagggagcccgctcaggatggcctgggcaggggaggacatctctagagggaagctcacagcatgatgggcaagatccctgtcctcctgggccctgaggcccctgccctagtgcaacaggcattgctgaggtctgagcagggcctggcctttcctcctcttcctcaccctcatcctttgggaggctgacttggacccaaactgggcgactagggctttgagctgggcagttttccctgccacctcttcctctatcagggacagtgtgggtgccacaggtaaccccaatttctggccttcaacttctccccttgaccgggtccaactctgccactcatctgccaactttgcctggggagggctaggcttgggatgagctgggtttgtggggagttccttaatattctcaagttctgggcacacagggttaatgagtctcttggcccactggtcccacttgggggtctagaccaggattatagaggacacagcaagtgagtcctccccactctgggcttgtgcacactgacccagacccacgtcttccccacccttctctcctttcctcatcctaagtgcctggcagatgaaggagttttcaggagcttttgacactatataaaccgccctttttgtatgcaccacgggcggcttttatatgtaattgcagcgtggggtgggtgggcatgggaggtaggggtgggccctggagatgaggagggtgggccatccttaccccacacttttattgttgtcgttttttgtttgttttgtttttttgtttttgtttttgtttttacactcgctgctctcaataaataagccttttttacaacctg

SEQ ID NO: 13976 - DNA, 4249 bp, Homo sapiens
gcggcgcgcggggactcggaggtactgggcgcgcgcggctccggctcgggacgcctcgggacgcctcggggtcgggctccggctgcggctgctgctgcggcgcccgcgctccggtgcgctccgcctcctgtgcccgccgcggagcgcagtctgcgcgcccgccgtgcgccctcagctccttttcctgagcccgccgcgatgggagctgcgcggggatccccggccagaccccgccggttgcctctgctcagcgtcctgctgctgccgctgctgggcggtacccagacagccattgtcttcatcaagcagccgtcctcccaggatgcactgcaggggcgccgggcgctgcttcgctgtgaggttgaggctccgggcccggtacatgtgtactggctgctcgatggggcccctgtccaggacacggagcggcgtttcgcccagggcagcagcctgagctttgcagctgtggaccggctgcaggactctggcaccttccagtgtgtggctcgggatgatgtcactggagaagaagcccgcagtgccaacgcctccttcaacatcaaatggattgaggcaggtcctgtggtcctgaagcatccagcctcggaagctgagatccagccacagacccaggtcacacttcgttgccacattgatgggcaccctcggcccacctaccaatggttccgagatgggacccccctttctgatggtcagagcaaccacacagtcagcagcaaggagcggaacctgacgctccggccagctggtcctgagcatagtgggctgtattcctgctgcgcccacagtgcttttggccaggcttgcagcagccagaacttcaccttgagcattgctgatgaaagctttgccagggtggtgctggcaccccaggacgtggtagtagcgaggtatgaggaggccatgttccattgccagttctcagcccagccacccccgagcctgcagtggctctttgaggatgagactcccatcactaaccgcagtcgccccccacacctccgcagagccacagtgtttgccaacgggtctctgctgctgacccaggtccggccacgcaatgcagggatctaccgctgcattggccaggggcagaggggcccacccatcatcctggaagccacacttcacctagcagagattgaagacatgccgctatttgagccacgggtgtttacagctggcagcgaggagcgtgtgacctgccttccccccaagggtctgccagagcccagcgtgtggtgggagcacgcgggagtccggctgcccacccatggcagggtctaccagaagggccacgagctggtgttggccaatattgctgaaagtgatgctggtgtctacacctgccacgcggccaacctggctggtcagcggagacaggatgtcaacatcactgtggccactgtgccctcctggctgaagaagccccaagacagccagctggaggagggcaaacccggctacttggattgcctgacccaggccacaccaaaacctacagttgtctggtacagaaaccagatgctcatctcagaggactcacggttcgaggtcttcaagaatgggaccttgcgcatcaacagcgtggaggtgtatgatgggacatggtaccgttgtatgagcagcaccccagccggcagcatcgaggcgcaagcccgtgtccaagtgctggaaaagctcaagttcacaccaccaccccagccacagcagtgcatggagtttgacaaggaggccacggtgccctgttcagccacaggccgagagaagcccactattaagtgggaacgggcagatgggagcagcctcccagagtgggtgacagacaacgctgggaccctgcattttgcccgggtgactcgagatgacgctggcaactacacttgcattgcctccaacgggccgcagggccagattcgtgcccatgtccagctcactgtggcagtttttatcaccttcaaagtggaaccagagcgtacgactgtgtaccagggccacacagccctactgcagtgcgaggcccagggggaccccaagccgctgattcagtggaaaggcaaggaccgcatcctggaccccaccaagctgggacccaggatgcacatcttccagaatggctccctggtgatccatgacgtggcccctgaggactcaggccgctacacctgcattgcaggcaacagctgcaacatcaagcacacggaggcccccctctatgtcgtggacaagcctgtgccggaggagtcggagggccctggcagccctcccccctacaagatgatccagaccattgggttgtcggtgggtgccgctgtggcctacatcattgccgtgctgggcctcatgttctactgcaagaagcgctgcaaagccaagcggctgcagaagcagcccgagggcgaggagccagagatggaatgcctcaacggtgggcctttgcagaacgggcagccctcagcagagatccaagaagaagtggccttgaccagcttgggctccggccccgcggccaccaacaaacgccacagcacaagtgataagatgcacttcccacggtctagcctgcagcccatcaccacgctggggaagagtgagtttggggaggtgttcctggcaaaggctcagggcttggaggagggagtggcagagaccctggtacttgtgaagagcctgcagagcaaggatgagcagcagcagctggacttccggagggagttggagatgtttgggaagctgaaccacgccaacgtggtgcggctcctggggctgtgccgggaggctgagccccactacatggtgctggaatatgtggatctgggagacctcaagcagttcctgaggatttccaagagcaaggatgaaaaattgaagtcacagcccctcagcaccaagcagaaggtggccctatgcacccaggtagccctgggcatggagcacctgtccaacaaccgctttgtgcataaggacttggctgcgcgtaactgcctggtcagtgcccagagacaagtgaaggtgtctgccctgggcctcagcaaggatgtgtacaacagtgagtactaccacttccgccaggcctgggtgccgctgcgctggatgtcccccgaggccatcctggagggtgacttctctaccaagtctgatgtctgggccttcggtgtgctgatgtgggaagtgtttacacatggagagatgccccatggtgggcaggcagatgatgaagtactggcagatttgcaggctgggaaggctagacttcctcagcccgagggctgcccttccaaactctatcggctgatgcagcgctgctgggccctcagccccaaggaccggccctccttcagtgagattgccagcgccctgggagacagcaccgtggacagcaagccgtgaggagggagcccgctcaggatggcctgggcaggggaggacatctctagagggaagctcacagcatgatgggcaagatccctgtcctcctgggccctgaggcccctgccctagtgcaacaggcattgctgaggtctgagcagggcctggcctttcctcctcttcctcaccctcatcctttgggaggctgacttggacccaaactgggcgactagggctttgagctgggcagttttccctgccacctcttcctctatcagggacagtgtgggtgccacaggtaaccccaatttctggccttcaacttctccccttgaccgggtccaactctgccactcatctgccaactttgcctggggagggctaggcttgggatgagctgggtttgtggggagttccttaatattctcaagttctgggcacacagggttaatgagtctcttggcccactggtcccacttgggggtctagaccaggattatagaggacacagcaagtgagtcctccccactctgggcttgtgcacactgacccagacccacgtcttccccacccttctctcctttcctcatcctaagtgcctggcagatgaaggagttttcaggagcttttgacactatataaaccgccctttttgtatgcaccacgggcggcttttatatgtaattgcagcgtggggtgggtgggcatgggaggtaggggtgggccctggagatgaggagggtgggccatccttaccccacacttttattgttgtcgttttttgtttgttttgtttttttgtttttgtttttgtttttacactcgctgctctcaataaataagccttttttacaacctg

SEQ ID NO: 13977 - DNA, 4129 bp, Homo sapiens
gcggcgcgcggggactcggaggtactgggcgcgcgcggctccggctcgggacgcctcgggacgcctcggggtcgggctccggctgcggctgctgctgcggcgcccgcgctccggtgcgctccgcctcctgtgcccgccgcggagcgcagtctgcgcgcccgccgtgcgccctcagctccttttcctgagcccgccgcgatgggagctgcgcggggatccccggccagaccccgccggttgcctctgctcagcgtcctgctgctgccgctgctgggcggtacccagacagccattgtcttcatcaagcagccgtcctcccaggatgcactgcaggggcgccgggcgctgcttcgctgtgaggttgaggctccgggcccggtacatgtgtactggctgctcgatggggcccctgtccaggacacggagcggcgtttcgcccagggcagcagcctgagctttgcagctgtggaccggctgcaggactctggcaccttccagtgtgtggctcgggatgatgtcactggagaagaagcccgcagtgccaacgcctccttcaacatcaaatggattgaggcaggtcctgtggtcctgaagcatccagcctcggaagctgagatccagccacagacccaggtcacacttcgttgccacattgatgggcaccctcggcccacctaccaatggttccgagatgggacccccctttctgatggtcagagcaaccacacagtcagcagcaaggagcggaacctgacgctccggccagctggtcctgagcatagtgggctgtattcctgctgcgcccacagtgcttttggccaggcttgcagcagccagaacttcaccttgagcattgctgatgaaagctttgccagggtggtgctggcaccccaggacgtggtagtagcgaggtatgaggaggccatgttccattgccagttctcagcccagccacccccgagcctgcagtggctctttgaggatgagactcccatcactaaccgcagtcgccccccacacctccgcagagccacagtgtttgccaacgggtctctgctgctgacccaggtccggccacgcaatgcagggatctaccgctgcattggccaggggcagaggggcccacccatcatcctggaagccacacttcacctagcagagattgaagacatgccgctatttgagccacgggtgtttacagctggcagcgaggagcgtgtgacctgccttccccccaagggtctgccagagcccagcgtgtggtgggagcacgcgggagtccggctgcccacccatggcagggtctaccagaagggccacgagctggtgttggccaatattgctgaaagtgatgctggtgtctacacctgccacgcggccaacctggctggtcagcggagacaggatgtcaacatcactgtggccactgtgccctcctggctgaagaagccccaagacagccagctggaggagggcaaacccggctacttggattgcctgacccaggccacaccaaaacctacagttgtctggtacagaaaccagatgctcatctcagaggactcacggttcgaggtcttcaagaatgggaccttgcgcatcaacagcgtggaggtgtatgatgggacatggtaccgttgtatgagcagcaccccagccggcagcatcgaggcgcaagcccgtgtccaagtgctggatgggagcagcctcccagagtgggtgacagacaacgctgggaccctgcattttgcccgggtgactcgagatgacgctggcaactacacttgcattgcctccaacgggccgcagggccagattcgtgcccatgtccagctcactgtggcagtttttatcaccttcaaagtggaaccagagcgtacgactgtgtaccagggccacacagccctactgcagtgcgaggcccagggggaccccaagccgctgattcagtggaaaggcaaggaccgcatcctggaccccaccaagctgggacccaggatgcacatcttccagaatggctccctggtgatccatgacgtggcccctgaggactcaggccgctacacctgcattgcaggcaacagctgcaacatcaagcacacggaggcccccctctatgtcgtggacaagcctgtgccggaggagtcggagggccctggcagccctcccccctacaagatgatccagaccattgggttgtcggtgggtgccgctgtggcctacatcattgccgtgctgggcctcatgttctactgcaagaagcgctgcaaagccaagcggctgcagaagcagcccgagggcgaggagccagagatggaatgcctcaacggtgggcctttgcagaacgggcagccctcagcagagatccaagaagaagtggccttgaccagcttgggctccggccccgcggccaccaacaaacgccacagcacaagtgataagatgcacttcccacggtctagcctgcagcccatcaccacgctggggaagagtgagtttggggaggtgttcctggcaaaggctcagggcttggaggagggagtggcagagaccctggtacttgtgaagagcctgcagagcaaggatgagcagcagcagctggacttccggagggagttggagatgtttgggaagctgaaccacgccaacgtggtgcggctcctggggctgtgccgggaggctgagccccactacatggtgctggaatatgtggatctgggagacctcaagcagttcctgaggatttccaagagcaaggatgaaaaattgaagtcacagcccctcagcaccaagcagaaggtggccctatgcacccaggtagccctgggcatggagcacctgtccaacaaccgctttgtgcataaggacttggctgcgcgtaactgcctggtcagtgcccagagacaagtgaaggtgtctgccctgggcctcagcaaggatgtgtacaacagtgagtactaccacttccgccaggcctgggtgccgctgcgctggatgtcccccgaggccatcctggagggtgacttctctaccaagtctgatgtctgggccttcggtgtgctgatgtgggaagtgtttacacatggagagatgccccatggtgggcaggcagatgatgaagtactggcagatttgcaggctgggaaggctagacttcctcagcccgagggctgcccttccaaactctatcggctgatgcagcgctgctgggccctcagccccaaggaccggccctccttcagtgagattgccagcgccctgggagacagcaccgtggacagcaagccgtgaggagggagcccgctcaggatggcctgggcaggggaggacatctctagagggaagctcacagcatgatgggcaagatccctgtcctcctgggccctgaggcccctgccctagtgcaacaggcattgctgaggtctgagcagggcctggcctttcctcctcttcctcaccctcatcctttgggaggctgacttggacccaaactgggcgactagggctttgagctgggcagttttccctgccacctcttcctctatcagggacagtgtgggtgccacaggtaaccccaatttctggccttcaacttctccccttgaccgggtccaactctgccactcatctgccaactttgcctggggagggctaggcttgggatgagctgggtttgtggggagttccttaatattctcaagttctgggcacacagggttaatgagtctcttggcccactggtcccacttgggggtctagaccaggattatagaggacacagcaagtgagtcctccccactctgggcttgtgcacactgacccagacccacgtcttccccacccttctctcctttcctcatcctaagtgcctggcagatgaaggagttttcaggagcttttgacactatataaaccgccctttttgtatgcaccacgggcggcttttatatgtaattgcagcgtggggtgggtgggcatgggaggtaggggtgggccctggagatgaggagggtgggccatccttaccccacacttttattgttgtcgttttttgtttgttttgtttttttgtttttgtttttgtttttacactcgctgctctcaataaataagccttttttacaacctg

SEQ ID NO: 13978 - DNA, 2131 bp, Homo sapiens
ctctttataatttagtttccatagaagttatatgtgcatttaaaaaaattcaatgctggagcgaccgtgtctggggagccgagccccgcttctcgctgcggtgagcccggactggggcacgcactgcgcagactccccgctgcagtgggcggagtcccacaggccccgcccctcctcccaccctcgttcagcctgtccagacagaagctggggcccagcggaggtagcagcagacgcctgagagcgaggccgaggccctcagggtttggagaccctgacacacccaccttctcacctgggctctgcgtatcccccagccttgagggaagatgaagcctaaactgatgtaccaggagctgaaggtgcctgcagaggagcccgccaatgagctgcccatgaatgagattgaggcgtggaaggctgcggaaaagaaagcccgctgggtcctgctggtcctcattctggcggttgtgggcttcggagcctgatgactcagctgtttctatgggaatacggcgacttgcatctctttgggcccaaccagcgcccagccccctgctatgacccttgcgaagcagtgctggtggaaagcattcctgagggcctggacttccccaatgcctccacggggaacccttccaccagccaggcctggctgggcctgctcgccggtgcgcacagcagcctggacatcgcctccttctactggaccctcaccaacaatgacacccacacgcaggagccctctgcccagcagggtgaggaggtcctccggcagctgcagaccctggcaccaaagggcgtgaacgtccgcatcgctgtgagcaagcccagcgggccccagccacaggcggacctgcaggctctgctgcagagcggtgcccaggtccgcatggtggacatgcagaagctgacccatggcgtcctgcataccaagttctgggtggtggaccagacccacttctacctgggcagtgccaacatggactggcgttcactgacccaggtcaaggagctgggcgtggtcatgtacaactgcagctgcctggctcgagacctgaccaagatctttgaggcctactggttcctgggccaggcaggcagctccatcccatcaacttggccccggttctatgacacccgctacaaccaagagacaccaatggagatctgcctcaatggaacccctgctctggcctacctggcgagtgcgcccccacccctgtgtccaagtggccgcactccagacctgaaggctctactcaacgtggtggacaatgcccggagtttcatctacgtcgctgtcatgaactacctgcccactctggagttctcccaccctcacaggttctggcctgccattgacgatgggctgcggcgggccacctacgagcgtggcgtcaaggtgcgcctgctcatcagctgctggggacactcggagccatccatgcgggccttcctgctctctctggctgccctgcgtgacaaccatacccactctgacatccaggtgaaactctttgtggtccccgcggatgaggcccaggctcgaatcccatatgcccgtgtcaaccacaacaagtacatggtgactgaacgcgccacctacatcggaacctccaactggtctggcaactacttcacggagacggcgggcacctcgctgctggtgacgcagaatgggaggggcggcctgcggagccagctggaggccattttcctgagggactgggactccccttacattcatgaccttgacacctcagctgacagcgtgggcaacgcctgccgcctgctctgaggcccgatccagtgggcaggccaaggcctgctgggcccccgcggacccaggtgctctgggtcacggtccctgtccccgcacccccgcttctgtctgccccattgtggctcctcaggctctctcccctgctctcccacctctacctccacccccaccggcctgacgctgtggccccgggacccagcagagctgggggagggatcagcccccaaagaaatgggggtgcatgctggcctgccccctggcccacccccactttccagggcaaaaagggcccagggttataataagtaaataacttgtctgtaaaaaaaaaaaaaaaaaaaaaaa

SEQ ID NO: 13979 - DNA, 7018 bp, Homo sapiens
ggcgggcgcgccgggcggcaggtgtcggcgtcggcggcattcggcggcgatggagcggccctggggagctgcggacggcctctcgcgctggccccatggcctcggcctcctcctcctcctgcagctgctgccgccgtcgaccctcagccaggaccggctggacgcgccgccgccgcccgctgcgccgctgccgcgctggtctggccccatcggggtgagctgggggctgcgggcggccgcagccgggggcgcgtttccccgcggcggccgttggcgtcgcagcgcgccgggcgaggacgaggagtgcggccgggtccgggacttcgtcgccaagctggccaacaacacgcaccagcatgtgtttgatgatctcagaggctcagtatccttgtcctgggttggagatagcactggggtcattctagtcttgactaccttccatgtaccactggtaattatgacttttggacagtccaagctatatcgaagtgaggattatgggaagaactttaaggatattacagatctcatcaataacacctttattcggactgaatttggcatggctattggtcctgagaactctggaaaggtggtgttaacagcagaggtgtctggaggaagtcgtggaggaagaatcttcagatcatcagattttgcgaagaattttgtgcaaacagatctcccttttcatcctctcactcagatgatgtatagccctcagaattctgattatcttttagctctcagcactgaaaatggcctgtgggtgtccaagaattttgggggaaaatgggaagaaatccacaaagcagtatgtttggccaaatggggatcagacaacaccatcttctttacaacctatgcaaatggctcctgcaaagctgaccttggggctctggaattatggagaacttcagacttgggaaaaagcttcaaaactattggtgtgaaaatctactcatttggtcttgggggacgtttcctttttgcctctgtgatggctgataaggataccacaagaaggatccacgtttcaacagatcaaggggacacatggagcatggcccagctcccctccgtgggacaggaacagttctattctattctggcagcaaatgatgacatggtattcatgcatgtagatgaacctggagacactgggtttggcacaatctttacctcagatgatcgaggcattgtctattccaagtctttggaccgacatctctacactaccacaggcggagagacggactttaccaacgtgacctccctccgcggcgtctacataacaagcgtgctctccgaagataattctatccagaccatgatcacttttgaccaaggaggaaggtggacgcacctgaggaagcctgaaaacagtgaatgtgatgctacagcaaaaaacaagaatgagtgcagccttcatattcatgcttcctacagcatctcccagaaactgaatgttccaatggccccactctcagagccgaatgccgtaggcattgtcattgctcatggtagcgtgggggatgccatctcagtgatggttccagatgtgtacatctcagatgatgggggttactcctggacaaagatgctggaaggaccccactattacaccatcctggattctggaggcatcattgtggccattgagcacagcagccgtcctatcaatgtgattaagttctccacagacgaaggtcaatgctggcaaacctacacgttcaccagggaccccatctatttcactggcctagcttcagaacctggagctaggtccatgaatatcagcatttggggcttcacagaatctttcctgaccagccagtgggtctcctacaccattgattttaaagatatccttgaaaggaactgtgaagagaaggactataccatatggctggcacactccacagaccctgaagattatgaagatggctgcattttgggctacaaagaacagtttctgcggctacgcaagtcatccgtgtgtcagaatggtcgagactatgttgtgaccaagcagccctccatctgcctctgttccctggaggactttctctgtgattttggctactaccgtccagaaaatgactccaagtgtgtggaacagccagaactgaagggccacgacctggagttttgtctgtacggaagagaagaacacctaacaacaaatgggtaccggaaaattccaggggacaaatgccagggtggggtaaatccagttcgagaagtaaaagacttgaaaaagaaatgcacaagcaactttttgagtccggaaaaacagaattccaagtcaaattctgttccaattatcctggccatcgtgggattgatgctggtcacagtcgtagcaggagtgctcattgtgaagaaatatgtctgtgggggaaggttcctggtgcatcgatactctgtgctgcagcagcatgcagaggccaatggtgtggatggtgtggatgctttggacacagcctcccacactaataaaagtggttatcatgatgactcagatgaggacctcttggaatagctcttcagaggagctggacccagcatggatggtggaaccacagtacctcttacactccctgtggctccaacttcaggaaataaatttcccattgcgagggacccagctctgtttctgctgcttccatcaaagccaaaaggacctacactaaagaaatgcagggtgggggtggggaaccctgagcacttttttacaattggctctgagaaaaagggagacattttaaattctttaacttcttatttctcgtcctgtctctttgcaaagtatgggcttttttgtttttgttttttaagggaaacgaaatggaattcgaagggaccttttcactaaccccacttctgtgtgttctgcatggcgcctgccccagggcatctgccaactccagtatcagctctcacagtgtacttggtaccatccctgggctctgctggcgagacgaaacagctgtagagatgaaaacaggctgcagaggctggcacagcctggccggcttttctccatctggggacagtcctactccaagaacactgcacaccagctcctcacacagatcccacttactctttttttttttttcagagaccacagaccacagtgatttttcttttcccttgtttaattaggcaatacccttgttaattgccctttggcaactaacttaaccatgtgcttcccacacagtacatcaggaaaacttacagggcaatatttttaacttggggcaggaagaagggagcagcagagaattgactagatatagcacctattaaaagagaactcttgcttcttctgagatttttcaagctgtgctttgtgtgtgtgccagtagacttacgcaaggacagggtacaaacttagctggaagtctgcccaggctgaatgatctcttccctagagttgattgtcgggtacacagtgtgaacccccgaagacggaacctcacagtcttccatgttcccttcttaactgtcgtgtggctcgttgctaaatcatgacaatggctgcctatctgctgcttcttaggttgctgttgtacatggaaccaggactagagattttttcagatttatagacttaaaaaattagaattttattaccaggctttccttctcaccccttttttctgactttgccaagtaatttgttgacacgaaaattttggaggaaccaattgaaaacacacttccagtctagatgatgctttgtgtgatacattaagttcttattttggattaaaagaagttttccatttgatacttctctaaattaaataaattatagaatgtagttgggtggattttggggtggccatatagtaatggaaagctgcaataattagttttaatacagcttgaatatttgctatatagaaatatagtatggaaagtttttggtcttaatgtagctactgtgcgggtcacagtttctcccaatgattatgactgggacattctttggtagataccatttgctactagtttattttgtggctagaaagtcagttttgtgtgtttttttttttttttatttgaagtgccaaattaactttagtcagaatgtgagcagatggctaagttctctcctccccagaatggattaacagctgcgtggaaagtgggggagagagtggatggagacttttagagatgttaaaactgcagtagaatgaaatgagtcagggagcttcagttagaaaataaagttgaggcagtttttgtgaagataatatggttagggctggagtgcactagtctttttgcttattcattttgcatggttttaaaattaaaaataattccgaagatacaccagctcacaaatgaaaacgtcagcctctgccccaccctccctcctgcccaaagtgaatttggtactcagaaaagaactgtttataccactcacctttctcccagcatgtactcactgtgggcagatgcaccaatacatggtaatcctcttactcattttaagacgtaggaaactcaatattcttctctaaccatatacgatagggctcttcgcttttaatgatatctgggatttctgtggaacttggcaaattttcagagcaccttcactcacataatgtcatttgaacctcacaatgttcttgggatggagtcagttgttcagggtccccgtgtgtgtgataagcagtgctggctggctgtcttcagaactcttggaaatctttacacatgcgagtgctaaccactttgagcaaggctgccttcttgtagatgacttgctgttctttatgacagggatcagtggcatttgtttcctagcagtatttagcacctttttgccaccttggtgaacagaaaattgtattttcctgtctttcatggctgaaaacaaaagtaatgggaattttaaatacgtttgcagaaactgcccctcccctcattgagggtcactgctcaagagtgcaggagtggactctccactgatgggtctccctccccatcctggtttccaccccgggctggctagctctgttggtttgaagactgacagccagcctggctcattctcattattggctagttagctttctttatcaacctgctcactcacaaatgtgtgccctcagccagagagtaagaaagcccaaatctgttacagcttctaaaaaaatagatttctaatttgtcctactcatgttaggagcattatctttgaaggtaaaacatagtgtatcattgtgtaaactcccaggcttgatgtagcagaagagatcatttctggaggcttcagcaatggaatttagcattataagagagattggacaaaccagtccaaagtggtccgagttcttaaatccaggtagggaactcactcttctttcttctctggacctaattgggcattgggctttagtgagaccacagaccaggcccgtctctcctgtaggcttttaattcaatggcaactctatttcaaagaataaaagcctttggagagttgcggcagttctgggggcgggctcaggagagtccatagatcagccgtaactggaacgtagaatctacgtctgcctctgaatggacttcccacctcctctctcttgctctgatgcttgcctctgggcctctccatgcccaaggtggtctttcatccttgacaggctggtaatgtgctggccacctccagctcctgcatcgagtctgtaaaccagagctggttctcatggccttcgtcacgataccaggatacggaggggagcccagggccatccatacccaccccagggtaacggggctggcctggcattagtcattatttagtttccaggccaaccatccagatagagattccctctttcctttgagcagtgctctcaagagctccgtgcctgtccacaatgacctagagtgcatcctgctcattgtcagtgtagcccctcgcccctatattcatccaggatacttggaagtgctaaaataggaagggattcggctttcaactttgctaccatcttccctgaagcaggaaaatgaacatggacttaaatgttctttgaaaaaaccaaagttttaagatttgctgtgtgatgaagtgacagggagggccggagtcagcaggtgccagactttctgttctgtctgccatgggtttgtccagctcaggtagctctaggagcaccatcctgccctagcagagcccaggccttgccctcatgaagcatcattgaaatagcaggagcatgttgatttcttggttaggttgcattataataacaagagtcagaacattaattcgaaacaacttgcagtatgcatttcttcacaccagtacattcttaagtgtacttgtttataaggaataacataaactaatctgtacctttatatatatgtgtgtgtacatatatacatatataaactgtatagtgtacatggtaatgatttattgctatgccccagatccttaatgtagttctcatcctccgcatgccctcagccacaagcgggtgactgactgttccctgatgatttggcccacctcctgtgtttggacctctagggaggagggttttggtcatactctccttatcctcgtgcacagaaatgctcagggtccccatgtgcctgttgttcagccctctctcttgttccctttctgagcatgtggtccttccccaggctgtgggacagctgccttcccacgaaagtgtaaagcagtattaagatcattactgcatgtgccctaaaaacccaagttttctattcccttaggacagaaaattgcatgtgaggtgggataatcgagtttcagtgacccacgtcagttacacattaaagccagaccccatgataaaattccacaaaatggaaataaaactcaaatttctttagcattgtgtaaataaatctgaatgtgtttaactttgtactggtaattttctgtatatttggaatatttgggttaaaaataaaacagactggactttgttacctgacctac

SEQ ID NO: 13980 - DNA, 2109 bp, Homo sapiens
ttgctgcatagattacaacggtgatggcgggcaagcggtccggctggagccgggcggctctcctccagctccttctcggcgtgaacctggtggtgatgccgcccacccgggcccggagtctgcgcttcgttaccttgctgtaccgccatggagaccgttcaccagtgaagacatatcccaaggacccctatcaggaagaagaatggccccaggggtttggtcagttaaccaaggaggggatgctacagcactgggaactgggccaggccctgcggcagcgctatcacggcttcctaaacacctcttatcaccggcaagaggtttatgtgcgaagcacagactttgaccggactctcatgagtgctgaggccaacctggctggactcttccctcccaacgggatgcagcgcttcaacccgaacatctcgtggcagcctattcctgtgcacactgtgcccatcactgaggacaggctgctgaagttcccgttgggcccatgtccccgttatgagcagctgcagaacgagacccggcagacaccagagtatcagaatgagagttctcggaatgcacaatttctggacatggtggccaacgagacagggcttacagacctgacactggagaccgtctggaatgtctatgacacactcttctgtgagcaaacgcacgggctgcgcctgccgccctgggcctcaccccaaaccatgcagcgtctcagccggctaaaggacttcagcttccgcttcctcttcggaatctaccagcaggcggagaaggcccggcttcaggggggagtcctgctggctcagataaggaagaacctgaccctaatggcgaccacctcccagctccccaagctgctggtttactctgcgcacgacactaccctggttgccctgcaaatggcactggatgtctacaatggtgaacaagccccctacgcctcctgccacatatttgaactgtaccaggaagattctgggaatttctcagtggagatgtactttcggaacgagagtgacaaggccccctggccgctcagcctgcctggctgccctcaccgctgcccactgcaggacttccttcgcctcacagagcccgtcgtgcccaaggattggcagcaggagtgccagctggcaagcggtcctgcagacacagaggtgattgtggccttggctgtatgtggctccatcctcttcctcctcatagtgctgctcctcaccgtcctcttccggatgcaggcccagcctcctggctaccgccacgtcgcagatggggaggaccacgcctgacaaccactcagcccccttccctccacctcctaggggaggtgggctgggccctcgctcctgactgttgctgctccccagcccatggacaggagatcctgggttgggcctccctctgatgaccccagccagatgagcgagtggggctcagcgtggcccatggtgcctgtcactcagcattcccatgcctgatgtttaccaagtgctgtgttggacactggctttctccaaacaggatttgcctcctccacgctccctacacacctgagatgtaaactggcagtcagtgttcactcaggacctaggattagaaaatggcagagttggtgctggatccaccttgcacttctatcaagccctgttctttttcctccagcctgaagtcttcggcaaatagctcagagggacacggtcttgcctctcagtgcttattttagtgggaaaaacagctaataccaggggtacaaacattggctcccaaggaactggatcacccaacagccagccagccacatttccctgtgtctggctagagccaccattagactcagacagaatgcttcaggaatcgttgtcaccccttcaactggagcaggacggaaggttgtctgtacttgggagggagtggggagtggtgggaagggagttgcttgtcacacgaatcaggaaactgctctccctcagctgggctggggtctccagggacctgagctacatgcaggttgtgagctggaaaagaaagttctagactgtggcccagaatagggctggggcagctcccagagaatgaatagtgctgtttcctattggactgata

SEQ ID NO: 13981 - DNA, 3215 bp, Homo sapiens
gacaatatcaggtgagctgtggaggtggggtccttggaagctggatgacagcagctggcaaggggataagagagcagtgagcccctccctcaaggaggtctggctttatccatagacagggccctctgaggtggggctgaggtacaaagggggattgagcagcccaggagaagagagatgggggttcccttcttctcttctctcagatgcatggtggacttaggaccttgctgggctgggggtctcactgcagagatgaagctgcttctggccctagcagggctcctggccattctggccacgccccagccctctgaaggtgctgctccagctgtcctgggggaggtggacacctcgttggtgctgagctccatggaggaggccaagcagctggtggacaaggcctacaaggagcggcgggaaagcatcaagcagcggcttcgcagcggctcagccagccccatggaactcctatcctacttcaagcagccggtggcagccaccaggacggcggtgagggccgctgactacctgcacgtggctctagacctgctggagaggaagctgcggtccctgtggcgaaggccattcaatgtcactgatgtgctgacgcccgcccagctgaatgtgttgtccaagtcaagcggctgcgcctaccaggacgtgggggtgacttgcccggagcaggacaaataccgcaccatcaccgggatgtgcaacaacagacgcagccccacgctgggggcctccaaccgtgcctttgtgcgctggctgccggcggagtatgaggacggcttctctcttccctacggctggacgcccggggtcaagcgcaacggcttcccggtggctctggctcgcgcggtctccaacgagatcgtgcgcttccccactgatcagctgactccggaccaggagcgctcactcatgttcatgcaatggggccagctgttggaccacgacctcgacttcacccctgagccggccgcccgggcctccttcgtcactggcgtcaactgcgagaccagctgcgttcagcagccgccctgcttcccgctcaagatcccgcccaatgacccccgcatcaagaaccaagccgactgcatcccgttcttccgctcctgcccggcttgccccgggagcaacatcaccatccgcaaccagatcaacgcgctcacttccttcgtggacgccagcatggtgtacggcagcgaggagcccctggccaggaacctgcgcaacatgtccaaccagctggggctgctggccgtcaaccagcgcttccaagacaacggccgggccctgctgccctttgacaacctgcacgatgacccctgtctcctcaccaaccgctcagcgcgcatcccctgcttcctggcaggggacacccgttccagtgagatgcccgagctcacctccatgcacaccctcttacttcgggagcacaaccggctggccacagagctcaagagcctgaaccctaggtgggatggggagaggctctaccaggaagcccggaagatcgtgggggccatggtccagatcatcacttaccgggactacctgcccctggtgctggggccaacggccatgaggaagtacctgcccacgtaccgttcctacaatgactcagtggacccacgcatcgccaacgtcttcaccaatgccttccgctacggccacaccctcatccaacccttcatgttccgcctggacaatcggtaccagcccatggaacccaacccccgtgtccccctcagcagggtcttttttgcctcctggagggtcgtgctggaaggtggcattgaccccatcctccggggcctcatggccacccctgccaagctgaatcgtcagaaccaaattgcagtggatgagatccgggagcgattgtttgagcaggtcatgaggattgggctggacctgcctgctctgaacatgcagcgcagcagggaccacggcctcccaggatacaatgcctggaggcgcttctgtgggctcccgcagcctgaaactgtgggccagctgggcacggtgctgaggaacctgaaattggcgaggaaactgatggagcagtatggcacgcccaacaacatcgacatctggatgggcggcgtgtccgagcctctgaagcgcaaaggccgcgtgggcccactcctcgcctgcatcatcggtacccagttcaggaagctccgggatggtgatcggttttggtgggagaacgagggtgtgttcagcatgcagcagcgacaggccctggcccagatctcattgccccggatcatctgcgacaacacaggcatcaccaccgtgtctaagaacaacatcttcatgtccaactcatatccccgggactttgtcaactgcagtacacttcctgcattgaacctggcttcctggagggaagcctcctagaggccaggtaagggggtgcagcagtgaggggtatatctgggctggccagttggaaccacggagatctccttgccctagatgagcccagccctgttctgggtgcagctgagaaaatgagtgactagacgttcatttgtgtgctcatgtatgtgcgaagtatataaattggcttttcatgcgtgtgtgttgtctgaacatggggagtgtttcatgggttatgtgtatgtgccatttatgtgagtgtgtgtttgtgctgatgagaatactgagtatgtggaaggcagcagagcggactggtgaggagcacagctcaggaactagactgcctgggttccaatcctggctctgtggcttgctagctatgtgaccttgagcaaattaccctccttaaacaagagttttcttccttgtaaattacatctgtcatggtttcttggagggcccacttgtatcctctggttcttcatttattgagcacctactacatgcaaggcactgtactaggcgtgagaagcatatagaggcaagaaagagataccaagatgccatctgtgtcctggttagcagagctggaccagtggtgccttggagggataagccagctgcagctgggctgtgtggttgacttatgggcccagccagccaggctcaggccatggctcccctttttcttcctcaccctgatttcttgcttattcactgaagttctcctgaagaggaactgggcctgttgccctttctgtaccatttatttgctcccaatgtttatgataataaaggcaccgctgatggggacctcc

SEQ ID NO: 13982 - DNA, 2212 bp, Homo sapiens
cagcggcgcgtcctgcctgcagagagccaggccggagaagccgagcggcgcagaggacgccagggcgcgcgccgcagccacccaccctccggaccgcggcagctgctgacccgccatcgccatggcccgcgggaaagccaaggaggagggcagctggaagaaattcatctggaactcagagaagaaggagtttctgggcaggaccggtggcagttggtttaagatccttctattctacgtaatattttatggctgcctggctggcatcttcatcggaaccatccaagtgatgctgctcaccatcagtgaatttaagcccacatatcaggaccgagtggccccgccaggattaacacagattcctcagatccagaagactgaaatttcctttcgtcctaatgatcccaagagctatgaggcatatgtactgaacatagttaggttcctggaaaagtacaaagattcagcccagagggatgacatgatttttgaagattgtggcgatgtgcccagtgaaccgaaagaacgaggagactttaatcatgaacgaggagagcgaaaggtctgcagattcaagcttgaatggctgggaaattgctctggattaaatgatgaaacttatggctacaaagagggcaaaccgtgcattattataaagctcaaccgagttctaggcttcaaacctaagcctcccaagaatgagtccttggagacttacccagtgatgaagtataacccaaatgtccttcccgttcagtgcactggcaagcgagatgaagataaggataaagttggaaatgtggagtattttggactgggcaactcccctggttttcctctgcagtattatccgtactatggcaaactcctgcagcccaaatacctgcagcccctgctggccgtacagttcaccaatcttaccatggacactgaaattcgcatagagtgtaaggcgtacggtgagaacattgggtacagtgagaaagaccgttttcagggacgttttgatgtaaaaattgaagttaagagctgatcacaagcacaaatctttcccactagccatttaataagttaaaaaaagatacaaaaacaaaaacctactagtcttgaacaaactgtcatacgtatgggacctacacttaatctatatgctttacactagctttctgcatttaataggttagaatgtaaattaaagtgtagcaatagcaacaaaatatttattctactgtaaatgacaaaagaaaaagaaaaattgagccttgggacgtgcccatttttactgtaaattatgattccgtaactgacttgtagtaagcagtgtttctggcccctaagtattgctgccttgtgtattttatttagtgtacagtactacaggtgcatactctggtcatttttcaagccatgttttattgtatctgttttctactttatgtgagcaaggtttgctgtccaaggtgtaaatattcaacgggaataaaactggcatggtaattttttttttttttttttttttgttttttggctctttcaaaggtaatggcccatcgatgagcatttttaacatactccatagtcttttcctgtggtgttaggtctttatttttatttttttcctgggggctggggtgggggtttgtcatgggggaactgccctttaaattttaagtgacactacagaaaaacacaaaaaggtgatgggttgtgttatgcttgtattgaatgctgtcttgacatctcttgccttgtcctccggtatgttctaaagctgtgtctgagatctggatctgcccatcactttggctagtgacagggctaattaatttgctttatacattttcttttactttccttttttcctttctggaggcatcacatgctggtgctgtgtctttatgaatgttttaaccattttcatggtggaagaattttatatttatgcagttgtacaattttatttttttctgcaagaaaaagtgtaatgtatgaaataaaccaaagtcacttgtttgaaaataaatctttattttgaactttataaaaagcaatgcagtaccccatagactggtgttaaatgttgtctacagtgcaaaatccatgttctaacatatgtaataattgccaggagtacagtgctcttgttgatcttgtattcagtcaggttaaaacaacggacaataaaagaatgaacacattcaaaaaaaaaaaa

SEQ ID NO: 13983 - DNA, 3779 bp, Homo sapiens
gcgtcgagctcgccgcggactcaagatggcggcgtgtggacgtgtacggaggatgttccgcttgtcggcggcgctgcatctgctgctgctattcgcggccggggccgagaaactccccggccagggcgtccacagccagggccagggtcccggggccaactttgtgtccttcgtagggcaggccggaggcggcggcccggcgggtcagcagctgccccagctgcctcagtcatcgcagcttcagcagcaacagcagcagcagcaacagcaacagcagcctcagccgccgcagccgcctttcccggcgggtgggcctccggcccggcggggaggagcgggggctggtgggggctggaagctggcggaggaagagtcctgcagggaggacgtgacccgcgtgtgccctaagcacacctggagcaacaacctggcggtgctcgagtgcctgcaggatgtgagggagcctgaaaatgaaatttcttcagactgcaatcatttgttgtggaattataagctgaacctaactacagatcccaaatttgaatctgtggccagagaggtttgcaaatctactataacagagattaaagaatgtgctgatgaaccggttggaaaaggttacatggtttcctgcttggtggatcaccgaggcaacatcactgagtatcagtgtcaccagtacattaccaagatgacggccatcatttttagtgattaccgtttaatctgtggcttcatggatgactgcaaaaatgacatcaacattctgaaatgtggcagtattcggcttggagaaaaggatgcacattcacaaggtgaggtggtatcatgcttggagaaaggcctggtgaaagaagcagaagaaagagaacccaagattcaagtttctgaactctgcaagaaagccattctccgggtggctgagctgtcatcggatgactttcacttagaccggcatttatattttgcttgccgagatgatcgggagcgtttttgtgaaaatacacaagctggtgagggcagagtgtataagtgcctctttaaccataaatttgaagaatccatgagtgaaaagtgtcgagaagcacttacaacccgccaaaagctgattgcccaggattataaagtcagttattcattggccaaatcctgtaaaagtgacttgaagaaataccggtgcaatgtggaaaaccttccgcgatcgcgtgaagccaggctctcctacttgttaatgtgcctggagtcagctgtacacagagggcgacaagtcagcagtgagtgccagggggagatgctggattaccgacgcatgttgatggaagacttttctctgagccctgagatcatcctaagctgtcggggggagattgaacaccattgttccggattacatcgaaaagggcggaccctacactgtctgatgaaagtagttcgaggggagaaggggaaccttggaatgaactgccagcaggcgcttcaaacactgattcaggagactgaccctggtgcagattaccgcattgatcgagctttgaatgaagcttgtgaatctgtaatccagacagcctgcaaacatataagatctggagacccaatgatcttgtcgtgcctgatggaacatttatacacagagaagatggtagaagactgtgaacaccgtctcttagagctgcagtatttcatctcccgggattggaagctggaccctgtcctgtaccgcaagtgccagggagacgcttctcgtctttgccacacccacggttggaatgagaccagtgaatttatgcctcagggagctgtgttctcttgtttatacagacacgcctaccgcactgaggaacagggaaggaggctctcacgggagtgccgagctgaagtccaaaggatcctacaccagcgtgccatggatgtcaagctggatcctgccctccaggataagtgcctgattgatctgggaaaatggtgcagtgagaaaacagagactggacaggagctggagtgccttcaggaccatctggatgacttggtggtggagtgtagagatatagttggcaacctcactgagttagaatcagaggatattcaaatagaagccttgctgatgagagcctgtgagcccataattcagaacttctgccacgatgtggcagataaccagatagactctggggacctgatggagtgtctgatacagaacaaacaccagaaggacatgaacgagaagtgtgccatcggagttacccacttccagctggtgcagatgaaggattttcggttttcttacaagtttaaaatggcctgcaaggaggacgtgttgaagctttgcccaaacataaaaaagaaggtggacgtggtgatctgcctgagcacgaccgtgcgcaatgacactctgcaggaagccaaggagcacagggtgtccctgaagtgccgcaggcagctccgtgtggaggagctggagatgacggaggacatccgcttggagccagatctatacgaagcctgcaagagtgacatcaaaaacttctgttccgctgtgcaatatggcaacgctcagattatcgaatgtctgaaagaaaacaagaagcagctaagcacccgctgccaccaaaaagtatttaagctgcaggagacagagatgatggacccagagctagactacaccctcatgagggtctgcaagcagatgataaagaggttctgtccggaagcagattctaaaaccatgttgcagtgcttgaagcaaaataaaaacagtgaattgatggatcccaaatgcaaacagatgataaccaagcgccagatcacccagaacacagattaccgcttaaaccccatgttaagaaaagcctgtaaagctgacattcctaaattctgtcacggtatcctgactaaggccaaggatgattcagaattagaaggacaagtcatctcttgcctgaagctgagatatgctgaccagcgcctgtcttcagactgtgaagaccagatccgaatcattatccaggagtccgccctggactaccgcctggatcctcagctccagctgcactgctcagacgagatctccagtctatgtgctgaagaagcagcagcccaagagcagacaggtcaggtggaggagtgcctcaaggtcaacctgctcaagatcaaaacagaattgtgtaaaaaggaagtgctaaacatgctgaaggaaagcaaagcagacatctttgttgacccggtacttcatactgcttgtgccctggacattaaacaccactgcgcagccatcacccctggccgcgggcgtcaaatgtcctgtctcatggaagcactggaggataagcgggtgaggttacagcccgagtgcaaaaagcgcctcaatgaccggattgagatgtggagttacgcagcaaaggtggccccagcagatggcttctctgatcttgccatgcaagtaatgacgtctccatctaagaactacattctctctgtgatcagtgggagcatctgtatattgttcctgattggcctgatgtgtggacggatcaccaagcgagtgacacgagagctcaaggacaggctacaatacaggtcagagacaatggcttataaaggtttagtgtggtctcaggatgtgacaggcagtccagcctgacctttctgcacactccagacaaacttcccagacaagctcctttgtgcctctacgtggagagggtgtggaaagttatcacattaaaagatggaggatttaaaaaaaaaaaaaaaaaaaaaaaaaaaagaaaaaaaaaaaaaaa

SEQ ID NO: 13984 - DNA, 1280 bp, Homo sapiens
tgccgcagcccccgcccgcccgcagagcttttgaaaggcggcgggaggcggcgagcgccatggccagtccgggctgcctgctgtgcgtgctgggcctgctactctgcggggcggcgagcctcgagctgtctagaccccacggcgacaccgccaagaagcccatcatcggaatattaatgcaaaaatgccgtaataaagtcatgaaaaactatggaagatactatattgctgcgtcctatgtaaagtacttggagtctgcaggtgcgagagttgtaccagtaaggctggatcttacagagaaagactatgaaatacttttcaaatctattaatggaatccttttccctggaggaagtgttgacctcagacgctcagattatgctaaagtggccaaaatattttataacttgtccatacagagttttgatgatggagactattttcctgtgtggggcacatgccttggatttgaagagctttcactgctgattagtggagagtgcttattaactgccacagatactgttgacgtggcaatgccgctgaacttcactggaggtcaattgcacagcagaatgttccagaattttcctactgagttgttgctgtcattagcagtagaacctctgactgccaatttccataagtggagcctctccgtgaagaattttacaatgaatgaaaagttaaagaagtttttcaatgtcttaactacaaatacagatggcaagattgagtttatttcaacaatggaaggatataagtatccagtatatggtgtccagtggcatccagagaaagcaccttatgagtggaagaatttggatggcatttcccatgcacctaatgctgtgaaaaccgcattttatttagcagagttttttgttaatgaagctcggaaaaacaaccatcattttaaatctgaatctgaagaggagaaagcattgatttatcagttcagtccaatttatactggaaatatttcttcatttcagcaatgttacatatttgattgaaagtcttcaatttgttaacagagcaaatttgaataattccatgattaaactgttagaataacttgctactcatggcaagattaggaagtcacagattcttttctataatgtgcctggctctgattcttcattatgtatgtgactatttatataacattagataattaaatagtgagacataaatagagtgctttttcatggaaaagccttcttatatctgaagattgaaaaataaatttactgaaatacaaaaaaaaaaaaaaa

SEQ ID NO: 13985 - DNA, 4267 bp, Homo sapiens
attcgcctctgggaggtttaggaagcggctccgggtcggtggccccaggacagggaagagcgggcgctatggggagccggacgccagagtcccctctccacgccgtgcagctgcgctggggcccccggcgccgacccccgctgctgccgctgctgttgctgctgctgccgccgccacccagggtcgggggcttcaacttagacgcggaggccccagcagtactctcggggcccccgggctccttcttcggattctcagtggagttttaccggccgggaacagacggggtcagtgtgctggtgggagcacccaaggctaataccagccagccaggagtgctgcagggtggtgctgtctacctctgtccttggggtgccagccccacacagtgcacccccattgaatttgacagcaaaggctctcggctcctggagtcctcactgtccagctcagagggagaggagcctgtggagtacaagtccttgcagtggttcggggcaacagttcgagcccatggctcctccatcttggcatgcgctccactgtacagctggcgcacagagaaggagccactgagcgaccccgtgggcacctgctacctctccacagataacttcacccgaattctggagtatgcaccctgccgctcagatttcagctgggcagcaggacagggttactgccaaggaggcttcagtgccgagttcaccaagactggccgtgtggttttaggtggaccaggaagctatttctggcaaggccagatcctgtctgccactcaggagcagattgcagaatcttattaccccgagtacctgatcaacctggttcaggggcagctgcagactcgccaggccagttccatctatgatgacagctacctaggatactctgtggctgttggtgaattcagtggtgatgacacagaagactttgttgctggtgtgcccaaagggaacctcacttacggctatgtcaccatccttaatggctcagacattcgatccctctacaacttctcaggggaacagatggcctcctactttggctatgcagtggccgccacagacgtcaatggggacgggctggatgacttgctggtgggggcacccctgctcatggatcggacccctgacgggcggcctcaggaggtgggcagggtctacgtctacctgcagcacccagccggcatagagcccacgcccacccttaccctcactggccatgatgagtttggccgatttggcagctccttgacccccctgggggacctggaccaggatggctacaatgatgtggccatcggggctccctttggtggggagacccagcagggagtagtgtttgtatttcctgggggcccaggagggctgggctctaagccttcccaggttctgcagcccctgtgggcagccagccacaccccagacttctttggctctgcccttcgaggaggccgagacctggatggcaatggatatcctgatctgattgtggggtcctttggtgtggacaaggctgtggtatacaggggccgccccatcgtgtccgctagtgcctccctcaccatcttccccgccatgttcaacccagaggagcggagctgcagcttagaggggaaccctgtggcctgcatcaaccttagcttctgcctcaatgcttctggaaaacacgttgctgactccattggtttcacagtggaacttcagctggactggcagaagcagaagggaggggtacggcgggcactgttcctggcctccaggcaggcaaccctgacccagaccctgctcatccagaatggggctcgagaggattgcagagagatgaagatctacctcaggaacgagtcagaatttcgagacaaactctcgccgattcacatcgctctcaacttctccttggacccccaagccccagtggacagccacggcctcaggccagccctacattatcagagcaagagccggatagaggacaaggctcagatcttgctggactgtggagaagacaacatctgtgtgcctgacctgcagctggaagtgtttggggagcagaaccatgtgtacctgggtgacaagaatgccctgaacctcactttccatgcccagaatgtgggtgagggtggcgcctatgaggctgagcttcgggtcaccgcccctccagaggctgagtactcaggactcgtcagacacccagggaacttctccagcctgagctgtgactactttgccgtgaaccagagccgcctgctggtgtgtgacctgggcaaccccatgaaggcaggagccagtctgtggggtggccttcggtttacagtccctcatctccgggacactaagaaaaccatccagtttgacttccagatcctcagcaagaatctcaacaactcgcaaagcgacgtggtttcctttcggctctccgtggaggctcaggcccaggtcaccctgaacggtgtctccaagcctgaggcagtgctattcccagtaagcgactggcatccccgagaccagcctcagaaggaggaggacctgggacctgctgtccaccatgtctatgagctcatcaaccaaggccccagctccattagccagggtgtgctggaactcagctgtccccaggctctggaaggtcagcagctcctatatgtgaccagagttacgggactcaactgcaccaccaatcaccccattaacccaaagggcctggagttggatcccgagggttccctgcaccaccagcaaaaacgggaagctccaagccgcagctctgcttcctcgggacctcagatcctgaaatgcccggaggctgagtgtttcaggctgcgctgtgagctcgggcccctgcaccaacaagagagccaaagtctgcagttgcatttccgagtctgggccaagactttcttgcagcgggagcaccagccatttagcctgcagtgtgaggctgtgtacaaagccctgaagatgccctaccgaatcctgcctcggcagctgccccaaaaagagcgtcaggtggccacagctgtgcaatggaccaaggcagaaggcagctatggcgtcccactgtggatcatcatcctagccatcctgtttggcctcctgctcctaggtctactcatctacatcctctacaagcttggattcttcaaacgctccctcccatatggcaccgccatggaaaaagctcagctcaagcctccagccacctctgatgcctgagtcctcccaatttcagactcccattcctgaagaaccagtccccccaccctcattctactgaaaaggaggggtctgggtacttcttgaaggtgctgacggccagggagaagctcctctccccagcccagagacatacttgaagggccagagccaggggggtgaggagctggggatccctcccccccatgcactgtgaaggacccttgtttacacataccctcttcatggatgggggaactcagatccagggacagaggccccagcctccctgaagcctttgcattttggagagtttcctgaaacaacttggaaagataactaggaaatccattcacagttctttgggccagacatgccacaaggacttcctgtccagctccaacctgcaaagatctgtcctcagccttgccagagatccaaaagaagcccccagctaagaacctggaacttggggagttaagacctggcagctctggacagccccaccctggtgggccaacaaagaacactaactatgcatggtgccccaggaccagctcaggacagatgccacacaaggatagatgctggcccagggcccagagcccagctccaaggggaatcagaactcaaatggggccagatccagcctggggtctggagttgatctggaacccagactcagacattggcacctaatccaggcagatccaggactatatttgggcctgctccagacctgatcctggaggcccagttcaccctgatttaggagaagccaggaatttcccaggaccctgaaggggccatgatggcaacagatctggaacctcagcctggccagacacaggccctccctgttccccagagaaaggggagcccactgtcctgggcctgcagaatttgggttctgcctgccagctgcactgatgctgcccctcatctctctgcccaacccttccctcaccttggcaccagacacccaggacttatttaaactctgttgcaagtgcaataaatctgacccagtgcccccactgaccagaactagaaaaaaaaaaaaaaaaaaa

SEQ ID NO: 13986 - DNA, 2755 bp, Homo sapiens
ggcggagagggagcctggtgggcgggcggggcgcgtcttgcgggctccctcgggtaccggcgctgccgcaccccgccgcgctcccgcacccgcggcccgcccaccgcgccgctcccgcatctgcacccgcagcccggcggcctcccggcgggagcgagcagatccagtccggcccgcagcgcaactcggtccagtcggggcggcggctgcgggcgcagagcggagatgcagcggcttggggccaccctgctgtgcctgctgctggcggcggcggtccccacggcccccgcgcccgctccgacggcgacctcggctccagtcaagcccggcccggctctcagctacccgcaggaggaggccaccctcaatgagatgttccgcgaggttgaggaactgatggaggacacgcagcacaaattgcgcagcgcggtggaagagatggaggcagaagaagctgctgctaaagcatcatcagaagtgaacctggcaaacttacctcccagctatcacaatgagaccaacacagacacgaaggttggaaataataccatccatgtgcaccgagaaattcacaagataaccaacaaccagactggacaaatggtcttttcagagacagttatcacatctgtgggagacgaagaaggcagaaggagccacgagtgcatcatcgacgaggactgtgggcccagcatgtactgccagtttgccagcttccagtacacctgccagccatgccggggccagaggatgctctgcacccgggacagtgagtgctgtggagaccagctgtgtgtctggggtcactgcaccaaaatggccaccaggggcagcaatgggaccatctgtgacaaccagagggactgccagccggggctgtgctgtgccttccagagaggcctgctgttccctgtgtgcacacccctgcccgtggagggcgagctttgccatgaccccgccagccggcttctggacctcatcacctgggagctagagcctgatggagccttggaccgatgcccttgtgccagtggcctcctctgccagccccacagccacagcctggtgtatgtgtgcaagccgaccttcgtggggagccgtgaccaagatggggagatcctgctgcccagagaggtccccgatgagtatgaagttggcagcttcatggaggaggtgcgccaggagctggaggacctggagaggagcctgactgaagagatggcgctgagggagcctgcggctgccgccgctgcactgctgggaggggaagagatttagatctggaccaggctgtgggtagatgtgcaatagaaatagctaatttatttccccaggtgtgtgctttaggcgtgggctgaccaggcttcttcctacatcttcttcccagtaagtttcccctctggcttgacagcatgaggtgttgtgcatttgttcagctcccccaggctgttctccaggcttcacagtctggtgcttgggagagtcaggcagggttaaactgcaggagcagtttgccacccctgtccagattattggctgctttgcctctaccagttggcagacagccgtttgttctacatggctttgataattgtttgaggggaggagatggaaacaatgtggagtctccctctgattggttttggggaaatgtggagaagagtgccctgctttgcaaacatcaacctggcaaaaatgcaacaaatgaattttccacgcagttctttccatgggcataggtaagctgtgccttcagctgttgcagatgaaatgttctgttcaccctgcattacatgtgtttattcatccagcagtgttgctcagctcctacctctgtgccagggcagcattttcatatccaagatcaattccctctctcagcacagcctggggagggggtcattgttctcctcgtccatcagggatctcagaggctcagagactgcaagctgcttgcccaagtcacacagctagtgaagaccagagcagtttcatctggttgtgactctaagctcagtgctctctccactaccccacaccagccttggtgccaccaaaagtgctccccaaaaggaaggagaatgggatttttcttttgaggcatgcacatctggaattaaggtcaaactaattctcacatccctctaaaagtaaactactgttaggaacagcagtgttctcacagtgtggggcagccgtccttctaatgaagacaatgatattgacactgtccctctttggcagttgcattagtaactttgaaaggtatatgactgagcgtagcatacaggttaacctgcagaaacagtacttaggtaattgtagggcgaggattataaatgaaatttgcaaaatcacttagcagcaactgaagacaattatcaaccacgtggagaaaatcaaaccgagcagggctgtgtgaaacatggttgtaatatgcgactgcgaacactgaactctacgccactccacaaatgatgttttcaggtgtcatggactgttgccaccatgtattcatccagagttcttaaagtttaaagttgcacatgattgtataagcatgctttctttgagttttaaattatgtataaacataagttgcatttagaaatcaagcataaatcacttcaactgctcttctgtagttcttggatttcttttcccttttgactttgaataaatgtaaaatcctttcagccagaaaaagtaaaatagaaacaacctgtattaaaaatcttccatagaaaaaaaaaaa

SEQ ID NO: 13987 - DNA, 2769 bp, Homo sapiens
cgacgccaaggggagggggctgacctgtgcttggtccaccccaggtaggggctgagagaggcttgaggtggaagtgggggtcgggcactctgacctggtcgaggaggggctagggtttgaaccggggacagagtctaggtgagctggggcttgggagctattagcgtagaggatccgggttcggttgctctggcgagggctccagcatcacaggcggcggctgcgggcgcagagcggagatgcagcggcttggggccaccctgctgtgcctgctgctggcggcggcggtccccacggcccccgcgcccgctccgacggcgacctcggctccagtcaagcccggcccggctctcagctacccgcaggaggaggccaccctcaatgagatgttccgcgaggttgaggaactgatggaggacacgcagcacaaattgcgcagcgcggtggaagagatggaggcagaagaagctgctgctaaagcatcatcagaagtgaacctggcaaacttacctcccagctatcacaatgagaccaacacagacacgaaggttggaaataataccatccatgtgcaccgagaaattcacaagataaccaacaaccagactggacaaatggtcttttcagagacagttatcacatctgtgggagacgaagaaggcagaaggagccacgagtgcatcatcgacgaggactgtgggcccagcatgtactgccagtttgccagcttccagtacacctgccagccatgccggggccagaggatgctctgcacccgggacagtgagtgctgtggagaccagctgtgtgtctggggtcactgcaccaaaatggccaccaggggcagcaatgggaccatctgtgacaaccagagggactgccagccggggctgtgctgtgccttccagagaggcctgctgttccctgtgtgcacacccctgcccgtggagggcgagctttgccatgaccccgccagccggcttctggacctcatcacctgggagctagagcctgatggagccttggaccgatgcccttgtgccagtggcctcctctgccagccccacagccacagcctggtgtatgtgtgcaagccgaccttcgtggggagccgtgaccaagatggggagatcctgctgcccagagaggtccccgatgagtatgaagttggcagcttcatggaggaggtgcgccaggagctggaggacctggagaggagcctgactgaagagatggcgctgagggagcctgcggctgccgccgctgcactgctgggaggggaagagatttagatctggaccaggctgtgggtagatgtgcaatagaaatagctaatttatttccccaggtgtgtgctttaggcgtgggctgaccaggcttcttcctacatcttcttcccagtaagtttcccctctggcttgacagcatgaggtgttgtgcatttgttcagctcccccaggctgttctccaggcttcacagtctggtgcttgggagagtcaggcagggttaaactgcaggagcagtttgccacccctgtccagattattggctgctttgcctctaccagttggcagacagccgtttgttctacatggctttgataattgtttgaggggaggagatggaaacaatgtggagtctccctctgattggttttggggaaatgtggagaagagtgccctgctttgcaaacatcaacctggcaaaaatgcaacaaatgaattttccacgcagttctttccatgggcataggtaagctgtgccttcagctgttgcagatgaaatgttctgttcaccctgcattacatgtgtttattcatccagcagtgttgctcagctcctacctctgtgccagggcagcattttcatatccaagatcaattccctctctcagcacagcctggggagggggtcattgttctcctcgtccatcagggatctcagaggctcagagactgcaagctgcttgcccaagtcacacagctagtgaagaccagagcagtttcatctggttgtgactctaagctcagtgctctctccactaccccacaccagccttggtgccaccaaaagtgctccccaaaaggaaggagaatgggatttttcttttgaggcatgcacatctggaattaaggtcaaactaattctcacatccctctaaaagtaaactactgttaggaacagcagtgttctcacagtgtggggcagccgtccttctaatgaagacaatgatattgacactgtccctctttggcagttgcattagtaactttgaaaggtatatgactgagcgtagcatacaggttaacctgcagaaacagtacttaggtaattgtagggcgaggattataaatgaaatttgcaaaatcacttagcagcaactgaagacaattatcaaccacgtggagaaaatcaaaccgagcagggctgtgtgaaacatggttgtaatatgcgactgcgaacactgaactctacgccactccacaaatgatgttttcaggtgtcatggactgttgccaccatgtattcatccagagttcttaaagtttaaagttgcacatgattgtataagcatgctttctttgagttttaaattatgtataaacataagttgcatttagaaatcaagcataaatcacttcaactgctcttctgtagttcttggatttcttttcccttttgactttgaataaatgtaaaatcctttcagccagaaaaagtaaaatagaaacaacctgtattaaaaatcttccatagaaaaaaaaaaa

SEQ ID NO: 13988 - DNA, 5298 bp, Homo sapiens
atacagagcagcgagcactgaaggcttccctctttccttaaacctgtcgggttgtgggctctctcttttcccctcttgctcctttcttttctttttttctgtttttttaaaccttccaaggcaagttcatggatactaagctgatgtgtttgttgttctttttctccctgcctccgctcctagtgagtaaccacactggccgcatcaaggtggtctttactccgagcatctgtaaagtgacctgcaccaagggcagctgtcagaacagctgtgagaaggggaacaccaccactctcattagtgagaatggtcatgctgccgacaccctgacggccacgaacttccgagtggtaatttgccatcttccatgtatgaatggtggccagtgcagttcaagggacaaatgtcagtgccctccaaatttcacaggaaaactttgtcagatcccagtccatggtgccagcgtgcctaaactttatcagcattcccagcagccaggcaaggcgttggggacgcatgtcatccattcaacacataccttgcctctgaccgtgactagccagcaaggagtcaaagtgaaatttcctcctaacatagtcaatatccatgtgaaacatcctcctgaagcttccgtccagatacatcaggtttcaagaattgatggcccaacaggccagaagacaaaagaagctcaaccaggccaatcccaagtctcgtaccaagggcttcctgtccagaagacccagaccatacattccacatactcccaccagcaggtcattcctcacgtctaccccgtggctgctaagacacagcttggccggtgcttccaggaaaccattgggtcacagtgtggcaaagcgctccctggcctttcaaagcaagaggactgctgtggaactgtgggtacctcctggggctttaacaaatgccagaaatgccccaagaaaccatcttatcatggatacaaccaaatgatggaatgcctaccgggttataagcgggttaacaacaccttttgccaagatattaatgaatgtcagctacaaggtgtatgccctaatggtgagtgtttgaataccatgggcagctatcgatgtacctgcaaaataggatttgggccggatcctaccttttcaagttgtgttcctgatccccctgtgatctcggaagagaaagggccctgttaccgacttgtcagttctggaagacagtgtatgcaccctctgtctgttcacctcaccaagcagctctgctgttgtagtgtgggcaaggcctggggcccacactgtgagaaatgtccccttccaggcacagctgcttttaaggaaatctgtcctggtggaatgggttatacggtttctggcgttcatagacgcaggccaatccatcaccatgtaggtaaaggacctgtatttgtcaagccaaagaacactcaacctgttgctaaaagtactcatcctccacctctcccagccaaggaagagccagtggaggccctgaccttctcccgggaacacgggccaggagtggcggagccagaagtggcaactgcaccccctgaaaaggaaataccttcattggatcaagagaaaaccaaacttgagcctggtcaaccccagctgtctccaggcatttccactattcatctgcatccacagtttccaggtatagtgattgaaaaaacatcacctcctgtgcctgttgaagtagctcctgaagcttctacgtctagtgccagccaagtgattgctcctactcaagtgacagaaatcaatgaatgtactgtgaaccctgatatctgtggagcaggacactgcattaacctaccagtgagatatacctgtatatgctacgagggctacaggttcagtgaacaacagaggaaatgtgtggatattgatgagtgtactcaggtccaacacctctgctcccagggccgctgtgaaaacaccgagggaagtttcttgtgcatttgcccagcaggatttatggccagtgaggagggtactaactgcatagatgttgacgaatgcctgaggccggacgtctgtggggaggggcactgtgtcaatactgtgggggccttccggtgtgaatactgtgacagcgggtaccgcatgactcagagaggccgttgtgaggatattgatgaatgtttgaatccaagcacttgtccagatgagcagtgtgtgaattctcctggatcttaccagtgcgttccctgcacagaaggattccgaggctggaatggacagtgccttgatgtggacgagtgcctggaaccaaacgtctgcgcaaatggtgattgttccaaccttgaaggctcctacatgtgttcatgccacaaaggctatacccggactccggaccacaagcactgtagagatattgatgaatgtcagcaagggaatctatgtgtaaacgggcagtgcaaaaataccgagggctccttcaggtgcacctgtggacaggggtaccagctgtcggcagctaaagaccagtgtgaagacattgatgaatgccagcaccgtcatctctgtgctcatgggcagtgcaggaacactgagggctcttttcaatgtgtgtgtgaccagggttacagagcatctgggcttggagaccactgtgaagatatcaatgaatgcttggaggacaagagtgtttgccagagaggagactgcattaatactgcagggtcctatgattgtacttgtccggatggatttcagctagatgacaataaaacatgtcaagatattaatgaatgtgaacatccagggctctgtggtccgcaaggggagtgcctaaacacagagggttctttccattgtgtctgccagcagggtttctcaatctctgcagatggccgtacgtgtgaagatattgatgaatgtgtaaacaacactgtttgtgacagtcacgggttttgtgacaatacagctggctccttccgctgcctctgttatcagggctttcaagccccacaggatgggcaagggtgtgtggatgtgaatgaatgtgaactgctcagtggggtgtgtggtgaagccttctgtgaaaacgtggaagggtccttcctgtgcgtgtgtgctgatgaaaaccaagagtacagccccatgactgggcagtgccgctcccggacctccacagatttagatgtagatgtagatcaacccaaagaagaaaagaaagaatgctactataatctcaatgacgccagtctctgtgataatgtgttggcccccaatgtcacgaaacaagaatgctgctgtacatcaggcgcgggatggggagataactgcgaaatcttcccctgcccggtcttgggaactgctgagttcactgaaatgtgtcccaaagggaaaggttttgtgcctgctggagaatcatcttctgaagctggtggtgagaactataaagatgcagatgaatgcctactttttggacaagaaatctgcaaaaatggtttctgtttgaacactcggcctgggtatgaatgctactgtaagcaagggacgtactatgatcctgtgaaactgcagtgctttgatatggatgaatgtcaagaccccagtagttgtattgatggccagtgtgttaatacagagggctcttacaactgcttctgtactcaccccatggtcctggatgcgtcagaaaaaagatgtatacgaccggctgagtcaaacgaacaaatagaagaaactgatgtctaccaagatttgtgctgggaacatctgagtgatgaatacgtgtgtagccggcctcttgtgggcaagcagacaacgtacactgagtgctgctgtctgtatggagaggcctggggcatgcagtgtgccctctgccccctgaaggattcagatgactatgctcagctgtgtaacatccccgtgacgggacgccggcagccatatggacgggacgccttggttgacttcagtgaacagtatactccagaagccgatccctacttcatccaagaccgttttctaaatagctttgaggagttacaggctgaggaatgcggcatcctcaatggatgtgaaaatggtcgctgtgtgagggtccaggaaggttacacctgcgattgctttgatgggtatcacttggatacggccaagatgacctgtgtcgatgtaaatgaatgcgatgagttgaacaaccggatgtctctctgcaagaatgccaagtgcattaacaccgatggttcctacaagtgtttgtgtctgccaggctacgtgccttctgacaagccaaactactgcactccgttgaataccgccttgaatttagagaaagacagtgacctggagtgaaacagaatctacataacctaagcccatatactctgcactgtgtaaaggaaaagggagaaatgtattatacttgagacattgcacctaccccggaaggctggaaatacagaaacagcatggagttgcaagtcctctgaagacaatgagaggatttaggatgagcccgataggtgtggcagaccaaatggacatttctctaaaaaaccagtatatatagtctgttcatatgtaaaattcaatggaagagaggtggaacagtgctgttattttaaacagaaggttgtattattatgttgttttgtttttttactattgcttgattaaatttggcatttaaatagtggtggaaatattttatataattttcattttttggttgtgcagttccttggctactgtttttcttttacttcagttttttaaaaatctcaaatgaaaaagtcttcgatacaatattgttaagctgtattataagtattgttacacagggttatgcaattcccggcctggagcatttttgaaattcaaattgtctgtcctgtggagcaggcagtgattttgttccaaaactttgtatacacatttggagaaaagtactttatattttcagtgttttgtctgattttaatgtccgttcttagccaagctgctagcaggtgttaattggatccctttccttcactgaaatggaagagtttataagcttacgttagtattgtaatatgtaaagtaagcccaacaaaaatttttaaaaatttgatgatccccaatatatctaccattgtatgttaaataaatcaccatttttgtagaaaaaattctacctgagagtaattgtcaatgagtacatgtgtataagttgtatcccactctccccacttttatcttttccagtggtcttctgttaatgtagtgtcttttacaagttaatcattaaatttgttagatcttgttatgggctaaaaaaaaaaaaaaaaaa

SEQ ID NO: 13989 - DNA, 5140 bp, Homo sapiens
gcttctgctgggcagggccggctgttaatctcgcctggcggagcggacaccggggcgtggtgggggagatgggccttataggtggcgtccgctggtgagaaacaccttgcgcaggtaaaagggtggcggcgagagggagttcccacccgtggctttcttagagaaatgaagtcttaagtcttaaatagacaacaaggaggggccgatcggtgtcttttggacgcgtctggagcccctccctccgccaaaggaaaagccccttggatgagaggcaggcgcttcagagaagctaagaaaagcacctctccgcgcgccccacctcctccgcctcgcgctcctcctgagcagcgggcccagactgcgctccggccgcggccctcgccccgcggagccctcctaccccggcccgacgctcggcccgcgacctgccccgagccctctccatggaggcagcccgcccctccggctcctggaacggagccctctgccggctgctcctgctgaccctcgcgatcttaatatttgccagtgatgcctgcaaaaatgtgacattacatgttccctccaaactagatgccgagaaacttgttggtagagttaacctgaaagagtgctttacagctgcaaatctaattcattcaagtgatcctgacttccaaattttggaggatggttcagtctatacaacaaatactattctattgtcctcggagaagagaagttttaccatattactttccaacactgagaaccaagaaaagaagaaaatatttgtctttttggagcatcaaacaaaggtcctaaagaaaagacatactaaagaaaaagttctaaggcgcgccaagagaagatgggctccaattccttgttcgatgctagaaaactccttgggtccttttccacttttccttcaacaggttcaatctgacacggcccaaaactataccatatactattccataagaggtcctggagttgaccaagaacctcggaatttattttatgtggagagagacactggaaacttgtattgtactcgtcctgtagatcgtgagcagtatgaatcttttgagataattgcctttgcaacaactccagatgggtatactccagaacttccactgcccctaataatcaaaatagaggatgaaaatgataactacccaatttttacagaagaaacttatacttttacaatttttgaaaattgcagagtgggcactactgtgggacaagtgtgtgctactgacaaagatgagcctgacacgatgcacacacgcctgaagtactccatcattgggcaggtgccaccatcacccaccctattttctatgcatccaactacaggcgtgatcaccacaacatcatctcagctagacagagagttaattgacaagtaccagttgaaaataaaagtacaagacatggatggtcagtattttggtctacagacaacttcaacttgtatcattaacattgatgatgtaaatgaccacttgccaacatttactcgtacttcttatgtgacatcagtggaagaaaatacagttgatgtggaaatcttacgagttactgttgaggataaggacttagtgaatactgctaactggagagctaattataccattttaaagggcaatgaaaatggcaattttaaaattgtaacagatgccaaaaccaatgaaggagttctttgtgtagttaagcctttgaattatgaagaaaagcaacagatgatcttgcaaattggtgtagttaatgaagctccattttccagagaggctagtccaagatcagccatgagcacagcaacagttactgttaatgtagaagatcaggatgagggccctgagtgtaaccctccaatacagactgttcgcatgaaagaaaatgcagaagtgggaacaacaagcaatggatataaagcatatgacccagaaacaagaagtagcagtggcataaggtataagaaattaactgatccaacagggtgggtcaccattgatgaaaatacaggatcaatcaaagttttcagaagcctggatagagaggcagagaccatcaaaaatggcatatataatattacagtccttgcatcagaccaaggagggagaacatgtacggggacactgggcattatacttcaagacgtgaatgataacagcccattcatacctaaaaagacagtgatcatctgcaaacccaccatgtcatctgcggagattgttgcggttgatcctgatgagcctatccatggcccaccctttgactttagtctggagagttctacttcagaagtacagagaatgtggagactgaaagcaattaatgatacagcagcacgtctttcctatcagaatgatcctccatttggctcatatgtagtacctataacagtgagagatagacttggcatgtctagtgtcacttcattggatgttacactgtgtgactgcattaccgaaaatgactgcacacatcgtgtagatccaaggattggcggtggaggagtacaacttggaaagtgggccatccttgcaatattgttgggcatagcattgctcttttgcatcctgtttacgctggtctgtggggcttctgggacgtctaaacaaccaaaagtaattcctgatgatttagcccagcagaacctaattgtatcaaacacagaagctcctggagatgacaaagtgtattctgcgaatggcttcacaacccaaactgtgggcgcttctgctcagggagtttgtggcaccgtgggatcaggaatcaaaaacggaggtcaggagaccatcgaaatggtgaaaggaggacaccagacctcggaatcctgccggggggctggccaccatcacaccctggactcctgcaggggaggacacacggaggtggacaactgcagatacacttactcggagtggcacagttttactcagccccgtcttggtgaaaaagtgtatctgtgtaatcaagatgaaaatcacaagcatgcccaagactatgtcctgacatataactatgaaggaagaggatcggtggctgggtctgtaggttgttgcagtgaacgacaagaagaagatgggcttgaatttttggataatttggagcccaaatttaggacactagcagaagcatgcatgaagagatgagtgtgttctaataagtctctgaaagccagtggctttatgacttttaaaaaaaattacaaaccaagaattttttaaagcagaagatgctatttgtgggggtttttctctcattatttggatggaatctctttggtcaaatgcacatttacagagagacactataaacaagtacacaaatttttcaatttttacatatttttaaattacttatcttctatccaaggaggtctacagagaaattaaagtctgccttatttgttacatttgggtataatgacaacagccaatttatagtgcaataaaatgtaattaattcaagtccttattatagactatttgaagcacaacctaatggaaaattgtagagaccttgctttaacattatctccagttaattaagtgttcatgtggtgcttggaaactgttgttttcctgaacatctaaagtgtgtagactgcattcttgctattattttattcttgtaatgtgaccttttcactgtgcaaagggagatttctagccaggcattgactattacaatttcattttggtggagtttagttttaggttttattgtatataaaatcctgcactgaatctgtgtctcctctgttacctacttttgccagtgaaatttaagttttaaaatactttcagaatgtatttttactactgcaagtttttggtctttaaaatgtcaagtagcatctctctctttctctctgtctctttctgtttctctctccagttttttttttttttttaatttccatatgggctaaagaatccaaatattttaaaaatctgtctctcttttcttctctcataaagtgaattattccttttttttgttttatgtaagtgtatatattcttagtttttcttgaaatcattgtaatgttaactttgttgtttcaaatatcttggtgattgcttcattatctcttcaacaaaaaaaacctttaattttgccattgaaactgtagaactatgccatgcttttattagaagcagtgctctgtgttaacaacaagaatggtgtaattagaattgggatgtggatatttactgtatgacaacacatttacagttctgtaatgcaaggatgcagtttaaaaatgtgaagtagtgatggtttttgaaataagctttaaaatatagggatcttgaaggctccctggggtaactattttataacttagataaaatggctagtcatatctgtgtgtttgtaaagttatttttttaatattttaagattacaattttaacaaatgtagaaatgagccaaactatttaaattttaaaacagtaaaacaaaatgaaacttaatagctcacaaaattccagtccatgtttcatgacttattttagtcaatgaattttctatttatactaaacatatggacattttaaatgtgtttctaatatttttgattatctataatgtgcctgtcttcaattcacaagattgggttataacaattatttgccagattaacactagggaattatttgataaccagcttatcttatcagtagttttattgctgatcaggcaaaaatagttttccaaagttatttttaataaagtatatacaaaattcttatatattactagtcatgataaagtaaattaagcagtttttaaaacttagtgtgagtttgttcatcacaggtctgatatgagtttaagggatttcgcactccctgaatcagagaagtaagaccccttccttagattcctgttatacattttttaaaatgtagagtttgttttggagacattttcagtgcattgttattgccatatttatataatatgactattctaaaggctgtgaggccatggggtattggttaagttgcttgcttttgctttgtccattttcatcattttaaaatgggggataataacagaacttgtttcctagggccattgtaagtcacttgaataaaaaatagttttgaagcaaaaaaaaaaaaaaaaa

SEQ ID NO: 13990 - DNA, 5186 bp, Homo sapiens
gcttctgctgggcagggccggctgttaatctcgcctggcggagcggacaccggggcgtggtgggggagatgggccttataggtggcgtccgctggtgagaaacaccttgcgcaggtaaaagggtggcggcgagagggagttcccacccgtggctttcttagagaaatgaagtcttaagtcttaaatagacaacaaggaggggccgatcggtgtcttttggacgcgtctggagcccctccctccgccaaaggaaaagccccttggatgagaggcaggcgcttcagagaagctaagaaaagcacctctccgcgcgccccacctcctccgcctcgcgctcctcctgagcagcgggcccagactgcgctccggccgcggccctcgccccgcggagccctcctaccccggcccgacgctcggcccgcgacctgccccgagccctctccatggaggcagcccgcccctccggctcctggaacggagccctctgccggctgctcctgctgaccctcgcgatcttaatatttgccagtgatgcctgcaaaaatgtgacattacatgttccctccaaactagatgccgagaaacttgttggtagagttaacctgaaagagtgctttacagctgcaaatctaattcattcaagtgatcctgacttccaaattttggaggatggttcagtctatacaacaaatactattctattgtcctcggagaagagaagttttaccatattactttccaacactgagaaccaagaaaagaagaaaatatttgtctttttggagcatcaaacaaaggtcctaaagaaaagacatactaaagaaaaagttctaaggcgcgccaagagaagatgggctccaattccttgttcgatgctagaaaactccttgggtccttttccacttttccttcaacaggttcaatctgacacggcccaaaactataccatatactattccataagaggtcctggagttgaccaagaacctcggaatttattttatgtggagagagacactggaaacttgtattgtactcgtcctgtagatcgtgagcagtatgaatcttttgagataattgcctttgcaacaactccagatgggtatactccagaacttccactgcccctaataatcaaaatagaggatgaaaatgataactacccaatttttacagaagaaacttatacttttacaatttttgaaaattgcagagtgggcactactgtgggacaagtgtgtgctactgacaaagatgagcctgacacgatgcacacacgcctgaagtactccatcattgggcaggtgccaccatcacccaccctattttctatgcatccaactacaggcgtgatcaccacaacatcatctcagctagacagagagttaattgacaagtaccagttgaaaataaaagtacaagacatggatggtcagtattttggtctacagacaacttcaacttgtatcattaacattgatgatgtaaatgaccacttgccaacatttactcgtacttcttatgtgacatcagtggaagaaaatacagttgatgtggaaatcttacgagttactgttgaggataaggacttagtgaatactgctaactggagagctaattataccattttaaagggcaatgaaaatggcaattttaaaattgtaacagatgccaaaaccaatgaaggagttctttgtgtagttaagcctttgaattatgaagaaaagcaacagatgatcttgcaaattggtgtagttaatgaagctccattttccagagaggctagtccaagatcagccatgagcacagcaacagttactgttaatgtagaagatcaggatgagggccctgagtgtaaccctccaatacagactgttcgcatgaaagaaaatgcagaagtgggaacaacaagcaatggatataaagcatatgacccagaaacaagaagtagcagtggcataaggtataagaaattaactgatccaacagggtgggtcaccattgatgaaaatacaggatcaatcaaagttttcagaagcctggatagagaggcagagaccatcaaaaatggcatatataatattacagtccttgcatcagaccaaggagggagaacatgtacggggacactgggcattatacttcaagacgtgaatgataacagcccattcatacctaaaaagacagtgatcatctgcaaacccaccatgtcatctgcggagattgttgcggttgatcctgatgagcctatccatggcccaccctttgactttagtctggagagttctacttcagaagtacagagaatgtggagactgaaagcaattaatgatacagcagcacgtctttcctatcagaatgatcctccatttggctcatatgtagtacctataacagtgagagatagacttggcatgtctagtgtcacttcattggatgttacactgtgtgactgcattaccgaaaatgactgcacacatcgtgtagatccaaggattggcggtggaggagtacaacttggaaagtgggccatccttgcaatattgttgggcatagcattgctcttttgcatcctgtttacgctggtctgtggggcttctgggacgtctaaacaaccaaaagtaattcctgatgatttagcccagcagaacctaattgtatcaaacacagaagctcctggagatgacaaagtgtattctgcgaatggcttcacaacccaaactgtgggcgcttctgctcagggagtttgtggcaccgtgggatcaggaatcaaaaacggaggtcaggagaccatcgaaatggtgaaaggaggacaccagacctcggaatcctgccggggggctggccaccatcacaccctggactcctgcaggggaggacacacggaggtggacaactgcagatacacttactcggagtggcacagttttactcagccccgtcttggtgaagaatccattagaggacacactctgattaaaaattaaacaatgaaagaaagtgtatctgtgtaatcaagatgaaaatcacaagcatgcccaagactatgtcctgacatataactatgaaggaagaggatcggtggctgggtctgtaggttgttgcagtgaacgacaagaagaagatgggcttgaatttttggataatttggagcccaaatttaggacactagcagaagcatgcatgaagagatgagtgtgttctaataagtctctgaaagccagtggctttatgacttttaaaaaaaattacaaaccaagaattttttaaagcagaagatgctatttgtgggggtttttctctcattatttggatggaatctctttggtcaaatgcacatttacagagagacactataaacaagtacacaaatttttcaatttttacatatttttaaattacttatcttctatccaaggaggtctacagagaaattaaagtctgccttatttgttacatttgggtataatgacaacagccaatttatagtgcaataaaatgtaattaattcaagtccttattatagactatttgaagcacaacctaatggaaaattgtagagaccttgctttaacattatctccagttaattaagtgttcatgtggtgcttggaaactgttgttttcctgaacatctaaagtgtgtagactgcattcttgctattattttattcttgtaatgtgaccttttcactgtgcaaagggagatttctagccaggcattgactattacaatttcattttggtggagtttagttttaggttttattgtatataaaatcctgcactgaatctgtgtctcctctgttacctacttttgccagtgaaatttaagttttaaaatactttcagaatgtatttttactactgcaagtttttggtctttaaaatgtcaagtagcatctctctctttctctctgtctctttctgtttctctctccagttttttttttttttttaatttccatatgggctaaagaatccaaatattttaaaaatctgtctctcttttcttctctcataaagtgaattattccttttttttgttttatgtaagtgtatatattcttagtttttcttgaaatcattgtaatgttaactttgttgtttcaaatatcttggtgattgcttcattatctcttcaacaaaaaaaacctttaattttgccattgaaactgtagaactatgccatgcttttattagaagcagtgctctgtgttaacaacaagaatggtgtaattagaattgggatgtggatatttactgtatgacaacacatttacagttctgtaatgcaaggatgcagtttaaaaatgtgaagtagtgatggtttttgaaataagctttaaaatatagggatcttgaaggctccctggggtaactattttataacttagataaaatggctagtcatatctgtgtgtttgtaaagttatttttttaatattttaagattacaattttaacaaatgtagaaatgagccaaactatttaaattttaaaacagtaaaacaaaatgaaacttaatagctcacaaaattccagtccatgtttcatgacttattttagtcaatgaattttctatttatactaaacatatggacattttaaatgtgtttctaatatttttgattatctataatgtgcctgtcttcaattcacaagattgggttataacaattatttgccagattaacactagggaattatttgataaccagcttatcttatcagtagttttattgctgatcaggcaaaaatagttttccaaagttatttttaataaagtatatacaaaattcttatatattactagtcatgataaagtaaattaagcagtttttaaaacttagtgtgagtttgttcatcacaggtctgatatgagtttaagggatttcgcactccctgaatcagagaagtaagaccccttccttagattcctgttatacattttttaaaatgtagagtttgttttggagacattttcagtgcattgttattgccatatttatataatatgactattctaaaggctgtgaggccatggggtattggttaagttgcttgcttttgctttgtccattttcatcattttaaaatgggggataataacagaacttgtttcctagggccattgtaagtcacttgaataaaaaatagttttgaagcaaaaaaaaaaaaaaaaa

SEQ ID NO: 13991 - DNA, 2069 bp, Homo sapiens
cgctcgtaagttttcggcagtttccggggagactcggggactccgcgtctcgctctctgtgttccaatcgcccggtgcggtggtgcagggtctcgggctagtcatggcgtccccgtctcggagactgcagactaaaccagtcattacttgtttcaagagcgttctgctaatctacacttttattttctggatcactggcgttatccttcttgcagttggcatttggggcaaggtgagcctggagaattacttttctcttttaaatgagaaggccaccaatgtccccttcgtgctcattgctactggtaccgtcattattcttttgggcacctttggttgttttgctacctgccgagcttctgcatggatgctaaaactgtatgcaatgtttctgactctcgtttttttggtcgaactggtcgctgccatcgtaggatttgttttcagacatgagattaagaacagctttaagaataattatgagaaggctttgaagcagtataactctacaggagattatagaagccatgcagtagacaagatccaaaatacgttgcattgttgtggtgtcaccgattatagagattggacagatactaattattactcagaaaaaggatttcctaagagttgctgtaaacttgaagattgtactccacagagagatgcagacaaagtaaacaatgaaggttgttttataaaggtgatgaccattatagagtcagaaatgggagtcgttgcaggaatttcctttggagttgcttgcttccaactgattggaatctttctcgcctactgcctctctcgtgccataacaaataaccagtatgagatagtgtaacccaatgtatctgtgggcctattcctctctacctttaaggacatttagggtcccccctgtgaattagaaagttgcttggctggagaactgacaacactacttactgatagaccaaaaaactacaccagtaggttgattcaatcaagatgtatgtagacctaaaactacaccaataggctgattcaatcaagatccgtgctcgcagtgggctgattcaatcaagatgtatgtttgctatgttctaagtccaccttctatcccattcatgttagatcgttgaaaccctgtatccctctgaaacactggaagagctagtaaattgtaaatgaagtaatactgtgttcctcttgactgttatttttcttagtagggggcctttggaaggcactgtgaatttgctattttgatgtagtgttacaagatggaaaattgattcctctgactttgctattgatgtagtgtgatagaaaattcacccctctgaactggctccttcccagtcaaggttatctggtttgattgtataatttgcaccaagaagttaaaatgttttatgactctctgttctgctgacaggcagagagtcacattgtgtaatttaatttcagtcagtcaatagatggcatccctcatcagggttgccagatggtgataacagtgtaaggccttgggtctaaggcatccacgactggaagggactactgatgttctgtgatacatcaggtttcagcacacaacttacatttctttgcctccaaattgaggcatttattatgatgttcatactttccctcttgtttgaaagtttctaattattaaatggtgtcggaattgttgtattttccttaggaattcagtggaacttatcttcattaaatttagctggtaccaggttgatatgacttgtcaatattatggtcaactttaagtcttagttttcgtttgtgcctttgattaataagtataactcttatacaataaatactgctttcctctaaaaagatcgtgtttaaattaacttgtagaaaatctgctggaatggttgttgttttccactgagaaagctaagccctacatttctattcagagtactgtttttagatgtgaaatataagcctgcggccttaactctgtattaaaaaaaatgtttttgtttaaaaaaaactgttcccataggtgcagcaaaccaccatggcacatgtatacctatgtaacaaacctgcacatt

SEQ ID NO: 13992 - DNA, 3474 bp, Homo sapiens
gcgatccggccgcgccgcccgcacgccgccgcgcccgccccagcccgcccggccccgcggcggggcgcgatgagcccgagcgcgagccggcccgccggggagtgagcgcggggcgcccagggcgcgttgcgtagctgctcctgcgcacaaccccgccgcgccgccggcccgcactggccgcggagtgcaagaggctcgtccgtgcccagcgcccggccggccgcgggagcaggaagcgcaggccacgcaggacccaactgaaacaaagtgtcggccgcccggcgccggcgcccgccccgaccctgcccctcccgcccgcaactccgccgcccaccatggcttccgaggagctgtacgaggttgaaaggattgttgacaaaaggaaaaataaaaaagggaagacagagtatttggttcggtggaaaggctatgacagcgaggacgacacttgggagccggaacagcacctcgtgaactgtgaggaatacatccacgacttcaacagacgccacacggagaagcagaaggagagcacattgaccagaacaaacaggacctctcccaacaatgctaggaaacaaatctccagatccaccaacagcaacttttctaagacctctcctaaggcactcgtgattgggaaagaccacgaatccaaaaacagccagctgtttgctgccagccagaagttcaggaagaacacagctccatctctctccagccggaagaacatggacctagcgaagtcaggtatcaagatcctcgtgcctaaaagccccgttaagagcaggaccgcagtggacggctttcagagcgagagccctgagaaactggaccccgtcgagcagggtcaggaggacacagtggcacccgaagtggcagcggaaaagccggtcggagctttattgggccccggtgccgagagggccaggatggggagcaggcccaggatacacccactagtgcctcaggtgcccggccctgtgactgcagccatggccacaggcttagctgttaacgggaaaggtacatctccgttcatggatgcattaacagccaatgggacaaccaacatacagacatctgttacaggagtgactgccagcaaaaggaaatttattgacgacagaagagaccagccttttgacaagcgattgcgtttcagcgtgaggcaaacagaaagtgcctacagatacagagatattgtggtcaggaagcaggatggcttcacccacatcttgttatccacaaagtcctcagagaataactcactaaatccagaggtaatgagagaagtccagagtgctctgagcacggccgctgccgatgacagcaagctggtactgctcagcgccgttggcagcgtcttctgttgtggacttgactttatttattttatacgacgtctgacagatgacaggaaaagagaaagcactaaaatggcagaagctatcagaaacttcgtgaatactttcattcaatttaagaagcccattattgtagcagtcaatggcccagccattggtctaggagcatctatattgcctctttgcgatgtggtttgggctaatgaaaaggcttggtttcaaacaccctataccaccttcggacagagtccagatggctgttctaccgttatgtttcccaagataatgggaggagcatctgcaaacgagatgctgctcagtggacggaagctgacagcgcaggaggcgtgtggcaagggcctggtctcccaggtgttttggcccgggacgttcactcaggaagtgatggttcgcattaaggagcttgcctcgtgcaatccagttgtgcttgaggaatccaaagccctcgtgcgctgcaacatgaagatggagctggagcaggccaacgagagggagtgtgaggtgctgaagaaaatctggggctcggcccaggggatggactccatgttaaagtacttgcagaggaagatcgatgagttctgagtgtcgggctgcccactggtgacaccgggatcgggctgagcaggagaacatcaccggctccagttcccctgatccattctcacagcctgaaacaagctcacccgtagcttacgcttggaagcaggactgggaacatccacgctatttattatcgaggagttttaaagtactgtaactttaaaataaataactacaaagcttctttgtccaaacgtcattattttatacttatatacacgcaggtgtaaaagtataaaggtgagcactagactgctcttagaagctctaatttttgttttctttggctagtactgtataaaaaacagaattgtgttttattggttttggatgacagaaaagtctggaataatgtttgttttcctcatttcttccttctagaacacagaatctaaaggggtattagccagcctcgcctccctgccccacgtagagacacagagtgatgtgaggcgttggctttttctccaagaaggtacagatacctcagattcgggaaactcaaaatcaaaagacttagcttctaggataaatacttctgatgaaaaatccgctgaggagcataccccaaaccagacatatgcttaggattcatgctgagatatcaattggtttccccttctttttaaaatacgtccagttcttacccagttaacatgaagaaaccactgtctctagaagaaagcttgttttgcagtattagtgaatcactgaatagcttaagtatgactatctaagttataagttagtctttagtgggttttaaatagtttttctgacccttctgaaaaataactacataagtgcttcttgttgctgggtgagaaatactactttatagacagttttggttttctgtttgcagatatgattgatgtatttcaccaaaataaaatatttttatgtttataaagtgtaatttttaggttcacttagaatatattttatttaataagttaaaattcttttggcacactattaaatgcaaaaactcctttcaaaacaaaaaagaactaccttatattcaacatttaatgttcttggcctctgcttttatgtctatacaatatactgagttcagtatggtgtccaagagtgccctgtgtggatagacatgtgcactccttccaggagtgggtactgattccagactccagatgcctattattagttaggcttctgagcttgcaatcatattgaatgtatgaagagcgaaatcaaattcttatttttgtacagttttgaagtttatacttagaactgaccacctccccggccacgcggagagctgtacagtgtgtaaatctgcctttatcttggattgattggtacagtatttttgcatctgtgggacctaccttttcgttcagtagtttgaactatatataaactgtacaatctgtaaagtttttatagaataaatattcagctgtgaaaactggttaaataaaactaatatttcttaacacaaaaaaaaaaaaaaaaa

SEQ ID NO: 13993 - DNA, 3432 bp, Homo sapiens
ggagagaggacctatttctacctaaggacattcccggaaggcaatgggtttcaaacaatatcctgaagagactcatctcggggaactaagcaggtggtcatcagagaacacagagcccccggaagaattttatgacatttcaggcaagccacaggtcagcctggggaaaaagcaggaagaaaaactggcaatacgagggcccaacccaaaagttattcctgaagagaaacaacgtgtcagcaccagatgggccttcagaccccagcatctccgtgagcagtgagcaaagcggggcacagcagcctcccgctttacaggttgaaaggattgttgacaaaaggaaaaataaaaaagggaagacagagtatttggttcggtggaaaggctatgacagcgaggacgacacttgggagccggaacagcacctcgtgaactgtgaggaatacatccacgacttcaacagacgccacacggagaagcagaaggagagcacattgaccagaacaaacaggacctctcccaacaatgctaggaaacaaatctccagatccaccaacagcaacttttctaagacctctcctaaggcactcgtgattgggaaagaccacgaatccaaaaacagccagctgtttgctgccagccagaagttcaggaagaacacagctccatctctctccagccggaagaacatggacctagcgaagtcaggtatcaagatcctcgtgcctaaaagccccgttaagagcaggaccgcagtggacggctttcagagcgagagccctgagaaactggaccccgtcgagcagggtcaggaggacacagtggcacccgaagtggcagcggaaaagccggtcggagctttattgggccccggtgccgagagggccaggatggggagcaggcccaggatacacccactagtgcctcaggtgcccggccctgtgactgcagccatggccacaggcttagctgttaacgggaaaggtacatctccgttcatggatgcattaacagccaatgggacaaccaacatacagacatctgttacaggagtgactgccagcaaaaggaaatttattgacgacagaagagaccagccttttgacaagcgattgcgtttcagcgtgaggcaaacagaaagtgcctacagatacagagatattgtggtcaggaagcaggatggcttcacccacatcttgttatccacaaagtcctcagagaataactcactaaatccagaggtaatgagagaagtccagagtgctctgagcacggccgctgccgatgacagcaagctggtactgctcagcgccgttggcagcgtcttctgttgtggacttgactttatttattttatacgacgtctgacagatgacaggaaaagagaaagcactaaaatggcagaagctatcagaaacttcgtgaatactttcattcaatttaagaagcccattattgtagcagtcaatggcccagccattggtctaggagcatctatattgcctctttgcgatgtggtttgggctaatgaaaaggcttggtttcaaacaccctataccaccttcggacagagtccagatggctgttctaccgttatgtttcccaagataatgggaggagcatctgcaaacgagatgctgctcagtggacggaagctgacagcgcaggaggcgtgtggcaagggcctggtctcccaggtgttttggcccgggacgttcactcaggaagtgatggttcgcattaaggagcttgcctcgtgcaatccagttgtgcttgaggaatccaaagccctcgtgcgctgcaacatgaagatggagctggagcaggccaacgagagggagtgtgaggtgctgaagaaaatctggggctcggcccaggggatggactccatgttaaagtacttgcagaggaagatcgatgagttctgagtgtcgggctgcccactggtgacaccgggatcgggctgagcaggagaacatcaccggctccagttcccctgatccattctcacagcctgaaacaagctcacccgtagcttacgcttggaagcaggactgggaacatccacgctatttattatcgaggagttttaaagtactgtaactttaaaataaataactacaaagcttctttgtccaaacgtcattattttatacttatatacacgcaggtgtaaaagtataaaggtgagcactagactgctcttagaagctctaatttttgttttctttggctagtactgtataaaaaacagaattgtgttttattggttttggatgacagaaaagtctggaataatgtttgttttcctcatttcttccttctagaacacagaatctaaaggggtattagccagcctcgcctccctgccccacgtagagacacagagtgatgtgaggcgttggctttttctccaagaaggtacagatacctcagattcgggaaactcaaaatcaaaagacttagcttctaggataaatacttctgatgaaaaatccgctgaggagcataccccaaaccagacatatgcttaggattcatgctgagatatcaattggtttccccttctttttaaaatacgtccagttcttacccagttaacatgaagaaaccactgtctctagaagaaagcttgttttgcagtattagtgaatcactgaatagcttaagtatgactatctaagttataagttagtctttagtgggttttaaatagtttttctgacccttctgaaaaataactacataagtgcttcttgttgctgggtgagaaatactactttatagacagttttggttttctgtttgcagatatgattgatgtatttcaccaaaataaaatatttttatgtttataaagtgtaatttttaggttcacttagaatatattttatttaataagttaaaattcttttggcacactattaaatgcaaaaactcctttcaaaacaaaaaagaactaccttatattcaacatttaatgttcttggcctctgcttttatgtctatacaatatactgagttcagtatggtgtccaagagtgccctgtgtggatagacatgtgcactccttccaggagtgggtactgattccagactccagatgcctattattagttaggcttctgagcttgcaatcatattgaatgtatgaagagcgaaatcaaattcttatttttgtacagttttgaagtttatacttagaactgaccacctccccggccacgcggagagctgtacagtgtgtaaatctgcctttatcttggattgattggtacagtatttttgcatctgtgggacctaccttttcgttcagtagtttgaactatatataaactgtacaatctgtaaagtttttatagaataaatattcagctgtgaaaactggttaaataaaactaatatttcttaacacaaaaaaaaaaaaaaaaa

SEQ ID NO: 13994 - DNA, 2077 bp, Homo sapiens
ccgagcgccagcgcggggaaccgggaaaaggaaaccgtgttgtgtacgtaagattcaggaaacgaaaccaggagccgcgggtgttggcgcaaaggttactcccagacccttttccggctgacttctgagaaggttgcgcacagctgtgcccggcagtctagaggcgcagaagaggaagccatcgcctggccccggctctctggaccttgtctcgctcgggagcggaaacagcggcagccagagaactgttttaatcatggacaaacaaaactcacagatgaatgcttctcacccggaaacaaacttgccagttgggtatcctcctcagtatccaccgacagcattccaaggacctccaggatatagtggctaccctgggccccaggtcagctacccacccccaccagccggccattcaggtcctggcccagctggctttcctgtcccaaatcagccagtgtataatcagccagtatataatcagccagttggagctgcaggggtaccatggatgccagcgccacagcctccattaaactgtccacctggattagaatatttaagtcagatagatcagatactgattcatcagcaaattgaacttctggaagttttaacaggttttgaaactaataacaaatatgaaattaagaacagctttggacagagggtttactttgcagcggaagatactgattgctgtacccgaaattgctgtgggccatctagaccttttaccttgaggattattgataatatgggtcaagaagtcataactctggagagaccactaagatgtagcagctgttgttgtccctgctgccttcaggagatagaaatccaagctcctcctggtgtaccaataggttatgttattcagacttggcacccatgtctaccaaagtttacaattcaaaatgagaaaagagaggatgtactaaaaataagtggtccatgtgttgtgtgcagctgttgtggagatgttgattttgagattaaatctcttgatgaacagtgtgtggttggcaaaatttccaagcactggactggaattttgagagaggcatttacagacgctgataactttggaatccagttccctttagaccttgatgttaaaatgaaagctgtaatgattggtgcctgtttcctcattgacttcatgttttttgaaagcactggcagccaggaacaaaaatcaggagtgtggtagtggattagtgaaagtctcctcaggaaatctgaagtctgtatattgattgagactatctaaactcatacctgtatgaattaagctgtaaggcctgtagctctggttgtatacttttgcttttcaaattatagtttatcttctgtataactgatttataaaggtttttgtacattttttaatactcattgtcaatttgagaaaaaggacatatgagtttttgcatttattaatgaaacttcctttgaaaaactgctttgaattatgatctctgattcattgtccattttactaccaaatattaactaaggccttattaatttttatataaattatatcttgtcctattaaatctagttacaatttatttcatgcataagagctaatgttattttgcaaatgccatatattcaaaaaagctcaaagataattttctttactattatgttcaaataatattcaatatgcatattatctttaaaaagttaaatgtttttttaatcttcaagaaatcatgctacacttaacttctcctagaagctaatctataccataatattttcatattcacaagatattaaattaccaattttcaaattattgttagtaaagaacaaaatgattctctcccaaagaaagacacattttaaatactccttcactctaaaactctggtattataacttttgaaagttaatatttctacatgaaatgtttagctcttacactctatccttcctagaaaatggtaattgagattactcagatattaattaaatacaatatcatatatatattcacagagtataaacctaaataatgatctattagattcaaatatttgaaataaaaacttgatttttttgt

SEQ ID NO: 13995 - DNA, 2805 bp, Homo sapiens
gcgatccggccgcgccgcccgcacgccgccgcgcccgccccagcccgcccggccccgcggcggggcgcgatgagcccgagcgcgagccggcccgccggggagtgagcgcggggcgcccagggcgcgttgcgtagctgctcctgcgcacaaccccgccgcgccgccggcccgcactggccgcggagtgcaagaggctcgtccgtgcccagcgcccggccggccgcgggagcaggaagcgcaggccacgcaggacccaactgaaacaaagtgtcggccgcccggcgccggcgcccgccccgaccctgcccctcccgcccgcaactccgccgcccaccatggcttccgaggagctgtacgagtacatctccgttcatggatgcattaacagccaatgggacaaccaacatacagacatctgttacaggagtgactgccagcaaaaggaaatttattgacgacagaagagaccagccttttgacaagcgattgcgtttcagcgtgaggcaaacagaaagtgcctacagatacagagatattgtggtcaggaagcaggatggcttcacccacatcttgttatccacaaagtcctcagagaataactcactaaatccagaggtaatgagagaagtccagagtgctctgagcacggccgctgccgatgacagcaagctggtactgctcagcgccgttggcagcgtcttctgttgtggacttgactttatttattttatacgacgtctgacagatgacaggaaaagagaaagcactaaaatggcagaagctatcagaaacttcgtgaatactttcattcaatttaagaagcccattattgtagcagtcaatggcccagccattggtctaggagcatctatattgcctctttgcgatgtggtttgggctaatgaaaaggcttggtttcaaacaccctataccaccttcggacagagtccagatggctgttctaccgttatgtttcccaagataatgggaggagcatctgcaaacgagatgctgctcagtggacggaagctgacagcgcaggaggcgtgtggcaagggcctggtctcccaggtgttttggcccgggacgttcactcaggaagtgatggttcgcattaaggagcttgcctcgtgcaatccagttgtgcttgaggaatccaaagccctcgtgcgctgcaacatgaagatggagctggagcaggccaacgagagggagtgtgaggtgctgaagaaaatctggggctcggcccaggggatggactccatgttaaagtacttgcagaggaagatcgatgagttctgagtgtcgggctgcccactggtgacaccgggatcgggctgagcaggagaacatcaccggctccagttcccctgatccattctcacagcctgaaacaagctcacccgtagcttacgcttggaagcaggactgggaacatccacgctatttattatcgaggagttttaaagtactgtaactttaaaataaataactacaaagcttctttgtccaaacgtcattattttatacttatatacacgcaggtgtaaaagtataaaggtgagcactagactgctcttagaagctctaatttttgttttctttggctagtactgtataaaaaacagaattgtgttttattggttttggatgacagaaaagtctggaataatgtttgttttcctcatttcttccttctagaacacagaatctaaaggggtattagccagcctcgcctccctgccccacgtagagacacagagtgatgtgaggcgttggctttttctccaagaaggtacagatacctcagattcgggaaactcaaaatcaaaagacttagcttctaggataaatacttctgatgaaaaatccgctgaggagcataccccaaaccagacatatgcttaggattcatgctgagatatcaattggtttccccttctttttaaaatacgtccagttcttacccagttaacatgaagaaaccactgtctctagaagaaagcttgttttgcagtattagtgaatcactgaatagcttaagtatgactatctaagttataagttagtctttagtgggttttaaatagtttttctgacccttctgaaaaataactacataagtgcttcttgttgctgggtgagaaatactactttatagacagttttggttttctgtttgcagatatgattgatgtatttcaccaaaataaaatatttttatgtttataaagtgtaatttttaggttcacttagaatatattttatttaataagttaaaattcttttggcacactattaaatgcaaaaactcctttcaaaacaaaaaagaactaccttatattcaacatttaatgttcttggcctctgcttttatgtctatacaatatactgagttcagtatggtgtccaagagtgccctgtgtggatagacatgtgcactccttccaggagtgggtactgattccagactccagatgcctattattagttaggcttctgagcttgcaatcatattgaatgtatgaagagcgaaatcaaattcttatttttgtacagttttgaagtttatacttagaactgaccacctccccggccacgcggagagctgtacagtgtgtaaatctgcctttatcttggattgattggtacagtatttttgcatctgtgggacctaccttttcgttcagtagtttgaactatatataaactgtacaatctgtaaagtttttatagaataaatattcagctgtgaaaactggttaaataaaactaatatttcttaacacaaaaaaaaaaaaaaaa

SEQ ID NO: 13996 - DNA, 6641 bp, Homo sapiens
ctttcaaataaggtgttgatttatgtggtcttgagaaatctttgttgctctgatcttaagtttctttttataatattagaatcatagtttacctacattacagggcttttatgaagattaaatcgagcatcgtgggtagtgttttttcagcccctgtgactaagtaggttataaatggtcctcagtcatcatcatcataaatgattcaaggcctgaatggcagaagaagaagaggaaaactcaagtgaaaagtgctagacatagaacacagcttacctaataaaacatgctactggctaactaagctggggtggctttctgccccctctacttaaatttaagaaagaaaaacagaaacgtctctgcatctgccactgcataccctctcagagcacagaccaactttgcccttccttaaaagtcccagggtttacctaccaacttttaggaaataaataaccagcctcaaagcttggcaaagagggcatcagtatcagctctagaggtttgctccgatttatatctcctcctccagtaaagtcttctgctcccactcccagccaaccccgctcaacgcccacccctcactgcggcactggacgcgcgggggatgcggggttgttcccagagtagccgctaaggggagccggacgctagaccgccctcccgcgttcccatgacaacgacaccggcgggcgcgtagcctggagagcgaagtgccggctacagcaggtgtcggattgcagtgcgctcgctgaggctccggaccttggagcgtctagagtctggctactgttcctccgcctccctctcgggcagctccctaagccggctgggacgcgcagagtgaaaatggtccaccattcaggctccattcagtcctttaaacagcaaaaaggtatgaatataagcaagagtgagataacaaaagaaacttcgttaaaaccgtctcggagatccctgccttgcctcgcccagagctacgcttactcaaagagcttgagccagtctacttccctcttccagtcaaccgagagtgaatctcaggctcccacatctataaccttaatctccactgacaaagcagagcaagttaatactgaggagaataaaaacgactctgtgctgagatgttcatttgctgacctcagcgatttttgtttggccctaggaaaagataaggattacacggatgaatcagaacacgctacttatgaccgatctcgtctcattaatgactttgttatcaaagataaatctgaattcaagacaaaattatctaagaatgacatgaattacatagcatccagtggacctctgttcaaagatggcaaaaggagaattgattacatcttggtttatagaaagacaaatataccatatgataaaagaaacacatttgaaaagaacctcagagcagaaggcttgatgttggagaaggagccagctattgcaagccccgatatcatgtttattaaaattcacattccatgggacacgctgtgcaagtatgcagagaggctgaatatcaggatgcccttcaggaaaaaatgctattacactgacgggaggagcaaatcaatgggcaggatgcaaacttattttagaagaatcaaagactggatggcccaaaacccaatggttcttgacaagtcagcttttccagacctagaggagtcagactgctatactggccccttcagccgtgcacggattcaccacttcataataaataataaagacaccttcttcagcaatgctactcgaagcagaatagtctatcacatgctggaacgcaccaaatatgaaaatggaatatcaaaagtgggtatccgtaaacttataaacaatggctcatacatagcagcgtttccaccacatgagggagcctacaaaagtagccagcccattaaaacccatggacctcagaataacagacatctattatatgagcgctgggcacgctggggaatgtggtataagcatcagcctctggatttaatcaggctgtactttggtgagaagattggactatactttgcttggctgggatggtatactggaatgttgattcctgcagcaattgttggtttgtgcgttttcttctatggattatttacaatgaataatagtcaagtaagccaagaaatttgtaaagccactgaagtctttatgtgccctctctgtgacaagaactgctccctgcagagactcaacgacagctgtatctatgccaaggtgacatatttgttcgataatggagggacagtcttctttgctatttttatggcaatatgggccacagtcttcctggagttttggaaaaggagaaggagtatactgacctatacttgggaccttatcgaatgggaagaagaggaggaaacacttcgtccccagtttgaagccaagtattacaagatggagattgtaaatcccatcacgggaaaacctgaaccacatcagccttcctcagacaaagtcactcgtcttcttgtttctgtctcaggaatattcttcatgatatccttggtgatcactgcagtgtttggagttgtggtgtaccgcctggttgtcatggaacagtttgcatcattcaagtggaatttcatcaaacaatactggcagtttgcaacatctgctgctgctgtctgtatcaatttcataatcattatgttgctgaatcttgcttatgaaaaaattgcttacctcctcaccaatttagaatatcctcgaacagaatcagagtgggaaaacagcttcgccctgaagatgttcctcttccagtttgtcaatttaaacagttccatcttctatatcgctttctttttgggaagatttgtaggccacccaggaaaatacaataaactttttgaccggtggagactggaggaatgtcatcctagtggctgtttgatagacctctgcctccagatgggtgtcatcatgtttttgaagcaaatatggaacaacttcatggaactaggatacccgttgatccagaactggtggtcacgacataaaatcaagcggggaatacatgatgcttccatacctcagtgggaaaatgattggaatctgcagcccatgaaccttcatggactgatggatgagtacttagaaatggttttgcaatttggttttaccaccatctttgttgcggcttttcctctagcccctcttttggctttgttaaacaatatcattgaaatcaggctggatgcatacaaatttgtcactcaatggcggaggcctttgccagcccgagcaactgacataggtatctggcttggaattctcgaaggaatcggtatattggctgtgatcaccaatgcatttgtaattgctattacttctgattacatcccacgttttgtttatgaatacaaatatggcccctgtgcaaatcatgtagaaccaagtgaaaattgcttgaagggatatgtcaacaatagcctatccttctttgacctgagtgagcttggtatgggaaaatctggttattgcaggtacagagactacagaggcccgccttggagttccaaaccctatgagtttactttacaatactggcatatccttgctgctagattggccttcattattgtgtttgagcaccttgtttttgggattaagtcattcatcgcatacctgattccagacgtaccaaagggtctacatgaccgaatacgacgagagaagtacttagttcaagaaatgatgtatgaggctgaactggaacatttgcaacaacaacggagaaaaagtggtcagcctgttcaccatgaatggccttagttgacacctgttacccattaggggtgataacattaatgggaagaaatgatggcaactttgaatgctaggtgaaatctaggaggaaggcatacttggcaaaccacatgtataatatgctacttggaaatgtatcacagccatctctgggatttgaaatatccagacttgtagggaagaaaacaatgacttgacgaccttaaaaagggttagattgacattgcaggaagccaggatgtaattctcagaaccagtctcagggagatatatgcttggagaactctgccttccatcaactgcagtgtaatgggaaagagggtggtgaggttttgaaagacagatttccatgtaaatgtgcacaagccaggcatggcttaaaatatcatgcagtcttcactcacatactaatttgactttggaaagtatggttgagttcagatacttataagaaatgacttaaacaaatccttgccttggctgccagaactctacatcccttcagtttacaggttggtaggaattgcccatgtctcttgctgagattatggatctgtgccacaggggatttatgctgctttacattgactatgcagttgaagagttgcacatcacctttagtggtcaaaccaaaaatctaagattccaaaaagaacagcattcattgaaataatattccattgcattggctacttcaagtctcttttacccctggcagagccagttgcagtgcaattttttgtactaaatgccaataaagccacatacttataaactatgaatggctattcttatatagtttagaacacaactaatccatactttattgtggaaggctgttttatagtatatttaattttttctctatgatttattacaactctcacggaatattaacttgaaatgctgtaaatacgttggttttccttgtccctttgcaccttgacagtacgtagtatacattgtggtttatgcagctctgacaccagtttttgctattgtaatatgtttattcgggaaaactgaggccagatgctctgcaacacttacgctttttcaacaatgtgcactcttactcatgaactaatgaaaataatgcatgaatataaatctatattatttgctaaaaaaagaaaaaacatttgtgttttagtttcttttttcatgactgaagggagttttatgttattatttcttccatagttttgttttggtttatttttaacaacgctctagaaacaaagtcaaattaatcacaaaagacataattttgctttgttgtggaatttctatttcaacgtcaactctgtatctatgagtatgtctgttccacagacagatgaggcaggagtgatggggcactcaagaaagttcagaggaggcataagctatggaggttggaaaggaagaaagagaagagctgaagtaaatgtatggtagaaattaagacgtttctttgcaaaacaaggaaatcacacatatgcacacatacatatttatggttactatgattgttattatttgtccaatcaagcaaagcaccattatttctaacatataaaagaccagatcaaacacaatggaaataaagctactacatatatatgccagtatttctctagtaagattatgtttctcttactagaaaactattttctaaatattaacactgaaaatgttttgttagcttttccttctttctctccagaagaaacatggatagatgatagctgtttcattgtttgtttttgtcaagcatattcactttcctccttgtcctctgattctgagcaaagggcctcagactctgaacttccctcaagtgccgttgttatgtgaactcttccattcagattccagagaggttctcatgctccccccccctccttatttgtagcaatcgtagcaactaattccactaagtacaagggagttttttacactcctccatttttatagcatctgcattttttttttttgttaggtacatgtatacacctgcctgagtataaatactctctctacctaataataacatcaaccaacatcttttccaaattagggccacagaacagcaacatttgtctgacagtagtataaagaataatgatagctctatccttaagaagtatttcctttcctttttatatagtcccgttagggtttaaaaccatattgatcaactagaaagaaaaatatgaaaagagaaaaatattttaatttaaaaattgtaatacattgatttataaaatgccttctctgatacttttgaaacagatgtgaaaaacagaaaaagaaaaaattgtctgaaatgtttattttgcaaaacagtgcaatagaatctagttatgccttcatcactgttgacagtaaatactgacagccccttgcagtgtgttagttttagatcactctgttttagttgagagaaatgttttatatcatggtttttatatgaatacaaattatttctcaaagatttatagcacacactattctcaggaattctgtattacatgaatgctgcttatatattttcatattctaacttgtcttttcaagcaaataactaatatatatgtgcatgcagtctgccttgacaagttgttccaagctgaagagctttcactgtacaatgtgtggaaaatcaccatagatcatggctgaaatagtttgtaattgtctgagtctgtgcacgtacttttagataaaatgctgctgagtgactgcatgatgagatacaacttctgaatgctgcacattcttccaaaatgatccttagcacaatctattgtatgatggaatgaatagaaaactttttcactcaataaattattatttgatatggt

SEQ ID NO: 13997 - DNA, 2267 bp, Homo sapiens
agagctggaggaagtgagaggtcggctgggggtcctcaaagtgagaggggagcagaggatcctcccgtgcaggctgtggatgtcactcacttcccagctggtgaagcctcgctgcagagatgcatctgctcccagccctggcaggggtcctggccacactcgtcctcgcccagccctgtgagggcactgacccagcctcccctggggcagtggagacctcggtcctgcgagactgcatagcagaggccaagttgctggtggatgctgcctacaattggacccagaagagcatcaagcagcggcttcgcagcggttcagccagccccatggacctcctgtcctacttcaaacaaccggtagcagccaccaggacagttgttcgggccgcagattatatgcatgtggctttggggctgcttgaagagaagttacaaccccagcggtccggacccttcaatgtcactgatgtgctaacagaaccacagctgcggctgctgtcccaggccagtggctgtgctctccgggaccaggccgagcgctgcagcgacaagtaccgcaccatcactggacggtgcaacaacaagaggagacccttgctaggggcctccaaccaggctctggctcgctggctgcccgccgagtatgaggatgggctgtcgctccccttcggctggacccccagcaggaggcgcaatggcttccttctccctcttgtccgggctgtctccaaccagattgtgcgcttccccaatgagagactgacctccgaccgtggccgagccctcatgttcatgcagtggggccagttcattgaccatgacctggacttctccccggagtccccggccagagtggccttcactgcaggcgttgactgtgagaggacctgcgcccagctgcccccctgctttcccatcaagatcccacccaatgacccccgcatcaagaaccagcgtgactgcatccctttcttccgctcggcaccctcatgcccccaaaacaagaacagagtccgcaaccagatcaacgcgctcacctcctttgtggacgccagcatggtgtatggcagtgaggtctccctctcgctgcggctccgcaaccggaccaactacctggggctgctggccatcaaccagcgctttcaagacaacggccgggccctgctgcccttcgacaacctgcacgatgacccctgtctcctcaccaaccgctcggcgcgcatcccctgcttcctggcaggtgacacccgatcaacggaaacccccaaactggcagccatgcacaccctctttatgcgagagcacaaccggctggccaccgagctgagacgcctgaatccccggtggaatggagacaaactgtacaatgaggctcggaagatcatgggggccatggtccagatcatcacctaccgagactttctgcccctggttctgggcaaggcccgggccaggagaaccctggggcactacagggggtactgctccaatgtggacccacgggtggccaatgtcttcaccctggccttccgctttggccacacaatgctccagcccttcatgttccgcttggacagtcagtaccgggcctccgcacccaactcgcatgtcccacttagctctgccttctttgccagctggcggatcgtgtatgaagggggcatcgaccccatcctccggggcctcatggccacccctgccaagctgaaccgtcaggatgccatgttagtggatgagctccgggaccggctgtttcggcaagtgaggaggattgggctggacctggcagctctcaacatgcaacgaagccgggaccacggccttccagggtacaatgcttggaggcgcttctgtgggctctcccagccccggaatttggcacagcttagccgggtgctgaaaaaccaggacttggcaaggaagttcctgaatttgtatggaacacctgacaacattgacatctggattggggccatcgctgagcctcttttgccgggggctcgagtggggcctcttctggcttgtctgttcgagaaccagttcagaagagcccgagacggagacaggttctggtggcagaaacgaggtgttttcaccaaaagacagcgcaaggccctgagcagaatttccttgtctcgaattatatgtgacaataccggtatcaccacggtttcaagggacatcttcagagccaacatctaccctcggggctttgtgaactgcagccgtatccccaggttgaacctatcagcctggcgagggacatga

SEQ ID NO: 13998 - DNA, 938 bp, Homo sapiens
gcacggaggggcagagaccccggagccccagccccaccatgaccctcggccgccgactcgcgtgtcttttcctcgcctgtgtcctgccggccttgctgctggggggcaccgcgctggcctcggagattgtggggggccggcgagcgcggccccacgcgtggcccttcatggtgtccctgcagctgcgcggaggccacttctgcggcgccaccctgattgcgcccaacttcgtcatgtcggccgcgcactgcgtggcgaatgtaaacgtccgcgcggtgcgggtggtcctgggagcccataacctctcgcggcgggagcccacccggcaggtgttcgccgtgcagcgcatcttcgaaaacggctacgaccccgtaaacttgctcaacgacatcgtgattctccagctcaacgggtcggccaccatcaacgccaacgtgcaggtggcccagctgccggctcagggacgccgcctgggcaacggggtgcagtgcctggccatgggctggggccttctgggcaggaaccgtgggatcgccagcgtcctgcaggagctcaacgtgacggtggtgacgtccctctgccgtcgcagcaacgtctgcactctcgtgaggggccggcaggccggcgtctgtttcggggactccggcagccccttggtctgcaacgggctaatccacggaattgcctccttcgtccggggaggctgcgcctcagggctctaccccgatgcctttgccccggtggcacagtttgtaaactggatcgactctatcatccaacgctccgaggacaacccctgtccccacccccgggacccggacccggccagcaggacccactgagaagggctgcccgggtcacctcagctgcccacacccacactctccagcatctggcacaataaacattctctgttttgtagaaaaaaaaaaaaaaaa

SEQ ID NO: 13999 - DNA, 4297 bp, Homo sapiens
acagcggagcgcagagtgagaaccaccaaccgaggcgccgggcagcgacccctgcagcggagacagagactgagcggcccggcaccgccatgcctgcgctctggctgggctgctgcctctgcttctcgctcctcctgcccgcagcccgggccacctccaggagggaagtctgtgattgcaatgggaagtccaggcagtgtatctttgatcgggaacttcacagacaaactggtaatggattccgctgcctcaactgcaatgacaacactgatggcattcactgcgagaagtgcaagaatggcttttaccggcacagagaaagggaccgctgtttgccctgcaattgtaactccaaaggttctcttagtgctcgatgtgacaactctggacggtgcagctgtaaaccaggtgtgacaggagccagatgcgaccgatgtctgccaggcttccacatgctcacggatgcggggtgcacccaagaccagagactgctagactccaagtgtgactgtgacccagctggcatcgcagggccctgtgacgcgggccgctgtgtctgcaagccagctgttactggagaacgctgtgataggtgtcgatcaggttactataatctggatggggggaaccctgagggctgtacccagtgtttctgctatgggcattcagccagctgccgcagctctgcagaatacagtgtccataagatcacctctacctttcatcaagatgttgatggctggaaggctgtccaacgaaatgggtctcctgcaaagctccaatggtcacagcgccatcaagatgtgtttagctcagcccaacgactagaccctgtctattttgtggctcctgccaaatttcttgggaatcaacaggtgagctatgggcaaagcctgtcctttgactaccgtgtggacagaggaggcagacacccatctgcccatgatgtgattctggaaggtgctggtctacggatcacagctcccttgatgccacttggcaagacactgccttgtgggctcaccaagacttacacattcaggttaaatgagcatccaagcaataattggagcccccagctgagttactttgagtatcgaaggttactgcggaatctcacagccctccgcatccgagctacatatggagaatacagtactgggtacattgacaatgtgaccctgatttcagcccgccctgtctctggagccccagcaccctgggttgaacagtgtatatgtcctgttgggtacaaggggcaattctgccaggattgtgcttctggctacaagagagattcagcgagactggggccttttggcacctgtattccttgtaactgtcaagggggaggggcctgtgatccagacacaggagattgttattcaggggatgagaatcctgacattgagtgtgctgactgcccaattggtttctacaacgatccgcacgacccccgcagctgcaagccatgtccctgtcataacgggttcagctgctcagtgatgccggagacggaggaggtggtgtgcaataactgccctcccggggtcaccggtgcccgctgtgagctctgtgctgatggctactttggggacccctttggtgaacatggcccagtgaggccttgtcagccctgtcaatgcaacaacaatgtggaccccagtgcctctgggaattgtgaccggctgacaggcaggtgtttgaagtgtatccacaacacagccggcatctactgcgaccagtgcaaagcaggctacttcggggacccattggctcccaacccagcagacaagtgtcgagcttgcaactgtaaccccatgggctcagagcctgtaggatgtcgaagtgatggcacctgtgtttgcaagccaggatttggtggccccaactgtgagcatggagcattcagctgtccagcttgctataatcaagtgaagattcagatggatcagtttatgcagcagcttcagagaatggaggccctgatttcaaaggctcagggtggtgatggagtagtacctgatacagagctggaaggcaggatgcagcaggctgagcaggcccttcaggacattctgagagatgcccagatttcagaaggtgctagcagatcccttggtctccagttggccaaggtgaggagccaagagaacagctaccagagccgcctggatgacctcaagatgactgtggaaagagttcgggctctgggaagtcagtaccagaaccgagttcgggatactcacaggctcatcactcagatgcagctgagcctggcagaaagtgaagcttccttgggaaacactaacattcctgcctcagaccactacgtggggccaaatggctttaaaagtctggctcaggaggccacaagattagcagaaagccacgttgagtcagccagtaacatggagcaactgacaagggaaactgaggactattccaaacaagccctctcactggtgcgcaaggccctgcatgaaggagtcggaagcggaagcggtagcccggacggtgctgtggtgcaagggcttgtggaaaaattggagaaaaccaagtccctggcccagcagttgacaagggaggccactcaagcggaaattgaagcagataggtcttatcagcacagtctccgcctcctggattcagtgtctcggcttcagggagtcagtgatcagtcctttcaggtggaagaagcaaagaggatcaaacaaaaagcggattcactctcaacgctggtaaccaggcatatggatgagttcaagcgtacacaaaagaatctgggaaactggaaagaagaagcacagcagctcttacagaatggaaaaagtgggagagagaaatcagatcagctgctttcccgtgccaatcttgctaaaagcagagcacaagaagcactgagtatgggcaatgccactttttatgaagttgagagcatccttaaaaacctcagagagtttgacctgcaggtggacaacagaaaagcagaagctgaagaagccatgaagagactctcctacatcagccagaaggtttcagatgccagtgacaagacccagcaagcagaaagagccctggggagcgctgctgctgatgcacagagggcaaagaatggggccggggaggccctggaaatctccagtgagattgaacaggagattgggagtctgaacttggaagccaatgtgacagcagatggagccttggccatggaaaagggactggcctctctgaagagtgagatgagggaagtggaaggagagctggaaaggaaggagctggagtttgacacgaatatggatgcagtacagatggtgattacagaagcccagaaggttgataccagagccaagaacgctggggttacaatccaagacacactcaacacattagacggcctcctgcatctgatgggtatgtgaacccacaacccacaaccttccagctccatgctccagggctttgctccagaacactcactatacctagccccagcaaaggggagtctcagctttccttaaggatatcagtaaatgtgctttgtttccaggcccagataactttcggcaggttcccttacatttactggaccctgttttaccgttgctaagatgggtcactgaacacctattgcacttgggggtaaaggtctgtgggccaaagaacaggtgtatataagcaacttcacagaacacgagacagcttgggaatcctgctaaagagtctggcctggaccctgagaagccagtggacagttttaagcagaggaataacatcaccactgtatatttcagaaagatcactagggcagccgagtggaggaaagcttgaagagggggttagagagaaggcaggttgagactacttaagatattgttgaaataattgaagagagaaatgacaggagcctgctctaaggcagtagaatggtggctgggaagatgtgaaggaagattttcccagtctgtgaagtcaagaatcacttgccggccgggtgtggtggctcacgcctgtaattctagcactttgggagactgaagcgggtggatcacccgaggtcaggagttgaagaccagcctggccaacatggtgaaaccctgtctctactaaaagtacaaaaattagctggatgtggtggtgggcgcctgtaattccagctactcaggagtctgaggcaggagaatcgcttgaacccaggaggcggaggttacagtgagccaagattgcaccactgctctccagcctggggaacagagcaagactgtctcaaaaaaaaaaaaaaaaggaaaaataa

SEQ ID NO: 14000 - DNA, 5175 bp, Homo sapiens
acagcggagcgcagagtgagaaccaccaaccgaggcgccgggcagcgacccctgcagcggagacagagactgagcggcccggcaccgccatgcctgcgctctggctgggctgctgcctctgcttctcgctcctcctgcccgcagcccgggccacctccaggagggaagtctgtgattgcaatgggaagtccaggcagtgtatctttgatcgggaacttcacagacaaactggtaatggattccgctgcctcaactgcaatgacaacactgatggcattcactgcgagaagtgcaagaatggcttttaccggcacagagaaagggaccgctgtttgccctgcaattgtaactccaaaggttctcttagtgctcgatgtgacaactctggacggtgcagctgtaaaccaggtgtgacaggagccagatgcgaccgatgtctgccaggcttccacatgctcacggatgcggggtgcacccaagaccagagactgctagactccaagtgtgactgtgacccagctggcatcgcagggccctgtgacgcgggccgctgtgtctgcaagccagctgttactggagaacgctgtgataggtgtcgatcaggttactataatctggatggggggaaccctgagggctgtacccagtgtttctgctatgggcattcagccagctgccgcagctctgcagaatacagtgtccataagatcacctctacctttcatcaagatgttgatggctggaaggctgtccaacgaaatgggtctcctgcaaagctccaatggtcacagcgccatcaagatgtgtttagctcagcccaacgactagaccctgtctattttgtggctcctgccaaatttcttgggaatcaacaggtgagctatgggcaaagcctgtcctttgactaccgtgtggacagaggaggcagacacccatctgcccatgatgtgattctggaaggtgctggtctacggatcacagctcccttgatgccacttggcaagacactgccttgtgggctcaccaagacttacacattcaggttaaatgagcatccaagcaataattggagcccccagctgagttactttgagtatcgaaggttactgcggaatctcacagccctccgcatccgagctacatatggagaatacagtactgggtacattgacaatgtgaccctgatttcagcccgccctgtctctggagccccagcaccctgggttgaacagtgtatatgtcctgttgggtacaaggggcaattctgccaggattgtgcttctggctacaagagagattcagcgagactggggccttttggcacctgtattccttgtaactgtcaagggggaggggcctgtgatccagacacaggagattgttattcaggggatgagaatcctgacattgagtgtgctgactgcccaattggtttctacaacgatccgcacgacccccgcagctgcaagccatgtccctgtcataacgggttcagctgctcagtgatgccggagacggaggaggtggtgtgcaataactgccctcccggggtcaccggtgcccgctgtgagctctgtgctgatggctactttggggacccctttggtgaacatggcccagtgaggccttgtcagccctgtcaatgcaacaacaatgtggaccccagtgcctctgggaattgtgaccggctgacaggcaggtgtttgaagtgtatccacaacacagccggcatctactgcgaccagtgcaaagcaggctacttcggggacccattggctcccaacccagcagacaagtgtcgagcttgcaactgtaaccccatgggctcagagcctgtaggatgtcgaagtgatggcacctgtgtttgcaagccaggatttggtggccccaactgtgagcatggagcattcagctgtccagcttgctataatcaagtgaagattcagatggatcagtttatgcagcagcttcagagaatggaggccctgatttcaaaggctcagggtggtgatggagtagtacctgatacagagctggaaggcaggatgcagcaggctgagcaggcccttcaggacattctgagagatgcccagatttcagaaggtgctagcagatcccttggtctccagttggccaaggtgaggagccaagagaacagctaccagagccgcctggatgacctcaagatgactgtggaaagagttcgggctctgggaagtcagtaccagaaccgagttcgggatactcacaggctcatcactcagatgcagctgagcctggcagaaagtgaagcttccttgggaaacactaacattcctgcctcagaccactacgtggggccaaatggctttaaaagtctggctcaggaggccacaagattagcagaaagccacgttgagtcagccagtaacatggagcaactgacaagggaaactgaggactattccaaacaagccctctcactggtgcgcaaggccctgcatgaaggagtcggaagcggaagcggtagcccggacggtgctgtggtgcaagggcttgtggaaaaattggagaaaaccaagtccctggcccagcagttgacaagggaggccactcaagcggaaattgaagcagataggtcttatcagcacagtctccgcctcctggattcagtgtctcggcttcagggagtcagtgatcagtcctttcaggtggaagaagcaaagaggatcaaacaaaaagcggattcactctcaacgctggtaaccaggcatatggatgagttcaagcgtacacaaaagaatctgggaaactggaaagaagaagcacagcagctcttacagaatggaaaaagtgggagagagaaatcagatcagctgctttcccgtgccaatcttgctaaaagcagagcacaagaagcactgagtatgggcaatgccactttttatgaagttgagagcatccttaaaaacctcagagagtttgacctgcaggtggacaacagaaaagcagaagctgaagaagccatgaagagactctcctacatcagccagaaggtttcagatgccagtgacaagacccagcaagcagaaagagccctggggagcgctgctgctgatgcacagagggcaaagaatggggccggggaggccctggaaatctccagtgagattgaacaggagattgggagtctgaacttggaagccaatgtgacagcagatggagccttggccatggaaaagggactggcctctctgaagagtgagatgagggaagtggaaggagagctggaaaggaaggagctggagtttgacacgaatatggatgcagtacagatggtgattacagaagcccagaaggttgataccagagccaagaacgctggggttacaatccaagacacactcaacacattagacggcctcctgcatctgatggaccagcctctcagtgtagatgaagaggggctggtcttactggagcagaagctttcccgagccaagacccagatcaacagccaactgcggcccatgatgtcagagctggaagagagggcacgtcagcagaggggccacctccatttgctggagacaagcatagatgggattctggctgatgtgaagaacttggagaacattagggacaacctgcccccaggctgctacaatacccaggctcttgagcaacagtgaagctgccataaatatttctcaactgaggttcttgggatacagatctcagggctcgggagccatgtcatgtgagtgggtgggatggggacatttgaacatgtttaatgggtatgctcaggtcaactgacctgaccccattcctgatcccatggccaggtggttgtcttattgcaccatactccttgcttcctgatgctgggcaatgaggcagatagcactgggtgtgagaatgatcaaggatctggaccccaaagaatagactggatggaaagacaaactgcacaggcagatgtttgcctcataatagtcgtaagtggagtcctggaatttggacaagtgctgttgggatatagtcaacttattctttgagtaatgtgactaaaggaaaaaactttgactttgcccaggcatgaaattcttcctaatgtcagaacagagtgcaacccagtcacactgtggccagtaaaatactattgcctcatattgtcctctgcaagcttcttgctgatcagagttcctcctacttacaacccagggtgtgaacatgttctccattttcaagctggaagaagtgagcagtgttggagtgaggacctgtaaggcaggcccattcagagctatggtgcttgctggtgcctgccaccttcaagttctggacctgggcatgacatcctttcttttaatgatgccatggcaacttagagattgcatttttattaaagcatttcctaccagcaaagcaaatgttgggaaagtatttactttttcggtttcaaagtgatagaaaagtgtggcttgggcattgaaagaggtaaaattctctagatttattagtcctaattcaatcctacttttcgaacaccaaaaatgatgcgcatcaatgtattttatcttattttctcaatctcctctctctttcctccacccataataagagaatgttcctactcacacttcagctgggtcacatccatccctccattcatccttccatccatctttccatccattacctccatccatccttccaacatatatttattgagtacctactgtgtgccaggggctggtgggacagtggtgacatagtctctgccctcatagagttgattgtctagtgaggaagacaagcatttttaaaaaataaatttaaacttacaaactttgtttgtcacaagtggtgtttattgcaataaccgcttggtttgcaacctctttgctcaacagaacatatgttgcaagaccctcccatgggggcacttgagttttggcaaggctgacagagctctgggttgtgcacatttctttgcattccagctgtcactctgtgcctttctacaactgattgcaacagactgttgagttatgataacaccagtgggaattgctggaggaaccagaggcacttccaccttggctgggaagactatggtgctgccttgcttctgtatttccttggattttcctgaaagtgtttttaaataaagaacaattgttagatgcc

SEQ ID NO: 14001 - DNA, 4193 bp, Homo sapiens
gcacacagccaggggccgcccgggctctcgacgcgccgacggccgggcggacggacggacggacgccgagcgcagtgccccgcgggtcttacaggagaggggaccgtcctgggctggcctggaccatggtgctgctctgggagcctgcaggagcctggcttgctctgggcctggccctggccctgggccccagcgtggccgcagctgcccctcggcaggactgcacgggcgtggagtgcccgccgctggagaactgcattgaggaggcgctggagccgggtgcctgctgtgccacgtgtgtgcagcagggctgcgcctgcgagggctaccagtactatgactgcctacagggtggcttcgtgcgcggccgcgtgcccgccggtcagtcctattttgtggacttcgggagcactgagtgctcctgcccaccaggcggcggcaagatcagctgccagttcatgctgtgcccggagctgccgcccaactgcatcgaggctgtagtggtggctgacagctgcccacagtgcggccaggtgggctgcgtccacgcgggccacaagtacgccgctggccacactgttcacctgccgccctgccgggcctgccactgccctgacgccggtggagagctcatctgctaccagctccccggttgccacgggaacttctcagatgccgaggagggtgaccccgagcgacactacgaagacccctacagctatgaccaggaggtggccgaggtggaagcagcaacagccctggggggtgaggtccaggcgggtgcagtccaggcaggcgcagggggccccccagctgctctgggaggtgggagtcagccactgtccaccatccaggcacccccctggccagctgtcctccccaggcccacagcggctgctgccctgggtcccccagccccagtgcaggccaaagctaggagagtgaccgaggacagtgaggaggaagaagaggaggaggaggagagagaggaaatggctgtcactgagcagctggcagcaggtggccacagggggctggatgggctgcccactacagccccagctggacccagtcttcctatccaggaggagagggcagaagctggggcaagggcagaagctggggcaaggcctgaagagaacctcatcctggatgcccaagccacgtcccgcagcactgggccggagggcgtgacgcatgcaccgagcctgggcaaggctgctctcgtcccaactcaggccgtgcctggctctcccagggacccagtcaagcccagcccccacaacatcctgtccacatcactgcctgatgcagcctggatcccacccacccgagaagtgcccaggaagccgcaagttctgccccattcccacgtggaggaggacacagaccccaactctgtccattctatccccagaagtagccctgaaggctccaccaaggacctgatcgagacttgctgcgcagccggacagcagtgggccattgacaatgacgagtgcctggagatccctgagagtggcactgaggacaacgtctgcaggacagcccagaggcactgctgtgtctcctacttgcaggagaagagctgcatggccggcgtcctgggagccaaggagggtgagacctgtggggctgaggacaacgacagctgcggcatctccctgtacaagcaatgctgtgactgctgtggcctgggcctccgcgtgcgggccgagggccagtcgtgtgagtccaatcctaacctgggctatccctgcaatcatgtcatgctctcctgctgtgagggtgaagagcctctcatagtacctgaggttcgccgacctccagagcccgcagctgcaccacggagagtttcagaggcagagatggcgggccgagaggccctgtcactgggcacagaggccgagctgccgaacagcctgccgggcgatgaccaggatgagtgccttctcctcccgggagagctgtgccagcacctttgcatcaatactgtgggttcttaccactgtgcctgctttcctggcttctcactgcaggacgatggccgcacttgccgcccagagggtcaccctccacagccggaagccccacaggagcctgcactgaagtcagaattttcccaggtggcctctaacaccatcccgctgccactgccgcagcccaatacctgcaaagacaatggaccctgcaagcaggtgtgcagcactgttgggggctcagccatatgctcctgttttcccggctatgccatcatggcggatggcgtgtcctgtgaagacatcaacgagtgtgtgacggacctgcacacgtgcagccggggcgagcactgtgtgaacacactgggctccttccactgctacaaggcactcacctgtgagccaggctatgccctcaaggatggcgagtgcgaagacgtggatgagtgtgcgatgggcacgcacacctgccagccgggcttcttgtgccagaacaccaagggctccttctactgccaggccaggcagcgctgcatggatggcttcctgcaggatcctgaaggcaactgtgtggacatcaacgagtgcacgtcactgtccgagccatgtcggccaggcttcagctgcatcaacacggtgggctcctacacatgccagaggaacccgctgatctgcgcgcgcggctaccacgccagcgatgatgggaccaagtgtgtggacgtgaatgagtgtgagacaggtgtgcaccgctgcggtgagggccaagtgtgccacaacctccctggctcctaccgctgtgactgcaaagccggctttcagcgggatgcctttggccggggctgcatcgacgtgaatgagtgctgggcctcgccaggccgcctgtgccagcacacgtgtgagaacacactcggctcctaccgctgttcctgcgcctccgggttcctgctagcagcggacggcaagcgctgtgaagacgtgaatgagtgtgaggcccagcgctgcagccaggagtgtgccaacatctatggctcctaccagtgctactgccgccagggctaccagctggctgaggatgggcacacctgcacagacatcgacgagtgtgctcaaggcgccggcatcctctgcaccttccgctgtctcaacgtgccagggagctaccagtgtgcatgccctgagcagggctacaccatgacggccaacgggaggtcctgcaaggacgtggatgagtgtgcactgggtacccacaactgttccgaggctgagacctgccacaacatccagggtagcttccgctgcctgcgcttcgagtgtcctcccaactatgtccaagtctccaaaacgaagtgcgagcgcaccacgtgccatgacttcctggagtgccagaactcgccagcgcgcatcacgcactaccagctcaacttccagacgggcctcctggtgcctgcgcatatcttccgcattggccccgcgccagccttcacgggggacaccatcgccctgaacatcatcaagggcaatgaggagggctactttggcacgcgcaggctcaatgcctacacgggtgtggtctacctgcagcgggccgtgctggagccccgggactttgccctggacgtggagatgaagctctggaggcagggctccgtcaccaccttcctggccaagatgcacatcttcttcaccacctttgccctgtgaggtgccagcacgggccacctgcgggtgtggcgcagcccagggctcacactgcgtgggagggactgggtcactattgtggtttttactataactttgtaaattaacttaattttgctgacttgactcctgtggcttctggacccctcctctgccccgcaggaggaagttccacggcaggtggtgcgttcccacgcaggcaccaagtggaagcttgcacggtgggccacggccgtggcgggtgccctgtgggtgaggctgggtgatgacctgaggaccagagacacgcgaccatgttggggctcttggactcctctggatgacccgtccccaaagttgacattccatttcatgttccactgtgattaattcttttcttttttaaaaaatcattttaaagttttttgtttaactataaagtagtacatgtacattatataaaaaaaagttcaactagtatgaaagggttataaagtaacagaggaaaacgcctcttggtccctttaaaaaaaaaaa

SEQ ID NO: 14002 - DNA, 2820 bp, Homo sapiens
ggcgggttcgcgccccgaaggctgagagctggcgctgctcgtgccctgtgtgccagacggcggagctccgcggccggaccccgcggccccgctttgctgccgactggagtttgggggaagaaactctcctgcgccccagaagatttcttcctcggcgaagggacagcgaaagatgagggtggcaggaagagaaggcgctttctgtctgccggggtcgcagcgcgagagggcagtgccatgttcctctccatcctagtggcgctgtgcctgtggctgcacctggcgctgggcgtgcgcggcgcgccctgcgaggcggtgcgcatccctatgtgccggcacatgccctggaacatcacgcggatgcccaaccacctgcaccacagcacgcaggagaacgccatcctggccatcgagcagtacgaggagctggtggacgtgaactgcagcgccgtgctgcgcttcttcttctgtgccatgtacgcgcccatttgcaccctggagttcctgcacgaccctatcaagccgtgcaagtcggtgtgccaacgcgcgcgcgacgactgcgagcccctcatgaagatgtacaaccacagctggcccgaaagcctggcctgcgacgagctgcctgtctatgaccgtggcgtgtgcatttcgcctgaagccatcgtcacggacctcccggaggatgttaagtggatagacatcacaccagacatgatggtacaggaaaggcctcttgatgttgactgtaaacgcctaagccccgatcggtgcaagtgtaaaaaggtgaagccaactttggcaacgtatctcagcaaaaactacagctatgttattcatgccaaaataaaagctgtgcagaggagtggctgcaatgaggtcacaacggtggtggatgtaaaagagatcttcaagtcctcatcacccatccctcgaactcaagtcccgctcattacaaattcttcttgccagtgtccacacatcctgccccatcaagatgttctcatcatgtgttacgagtggcgttcaaggatgatgcttcttgaaaattgcttagttgaaaaatggagagatcagcttagtaaaagatccatacagtgggaagagaggctgcaggaacagcggagaacagttcaggacaagaagaaaacagccgggcgcaccagtcgtagtaatccccccaaaccaaagggaaagcctcctgctcccaaaccagccagtcccaagaagaacattaaaactaggagtgcccagaagagaacaaacccgaaaagagtgtgagctaactagtttccaaagcggagacttccgacttccttacaggatgaggctgggcattgcctgggacagcctatgtaaggccatgtgccccttgccctaacaactcactgcagtgctcttcatagacacatcttgcagcatttttcttaaggctatgcttcagtttttctttgtaagccatcacaagccatagtggtaggtttgccctttggtacagaaggtgagttaaagctggtggaaaaggcttattgcattgcattcagagtaacctgtgtgcatactctagaagagtagggaaaataatgcttgttacaattcgacctaatatgtgcattgtaaaataaatgccatatttcaaacaaaacacgtaatttttttacagtatgttttattaccttttgatatctgttgttgcaatgttagtgatgttttaaaatgtgatgaaaatataatgtttttaagaaggaacagtagtggaatgaatgttaaaagatctttatgtgtttatggtctgcagaaggatttttgtgatgaaaggggattttttgaaaaattagagaagtagcatatggaaaattataatgtgtttttttaccaatgacttcagtttctgtttttagctagaaacttaaaaacaaaaataataataaagaaaaataaataaaaaggagaggcagacaatgtctggattcctgttttttggttacctgatttccatgatcatgatgcttcttgtcaacaccctcttaagcagcaccagaaacagtgagtttgtctgtaccattaggagttaggtactaattagttggctaatgctcaagtattttatacccacaagagaggtatgtcactcatcttacttcccaggacatccaccctgagaataatttgacaagcttaaaaatggccttcatgtgagtgccaaattttgtttttcttcatttaaatattttctttgcctaaatacatgtgagaggagttaaatataaatgtacagagaggaaagttgagttccacctctgaaatgagaattacttgacagttgggatactttaatcagaaaaaaagaacttatttgcagcattttatcaacaaatttcataattgtggacaattggaggcatttattttaaaaaacaattttattggccttttgctaacacagtaagcatgtattttataaggcattcaataaatgcacaacgcccaaaggaaataaaatcctatctaatcctactctccactacacagaggtaatcactattagtattttggcatattattctccaggtgtttgcttatgcacttataaaatgatttgaacaaataaaactaggaacctgtatacatgtgtttcataacctgcctcctttgcttggccctttattgagataagttttcctgtcaagaaagcagaaaccatctcatttctaacagctgtgttatattccatagtatgcattactcaacaaactgttgtgctattggatacttaggtggtttcttcactgacaatactgaataaacatctcaccggaattc

SEQ ID NO: 14003 - DNA, 1745 bp, Homo sapiens
aaggctggggttgcctggggcgaggttactcatcctgggctcaggtaagagggcccgagctcggaggcggcacatccaggggggacgccaagggagcaggacggagccatggaccccgccaggaaagcaggtgcccaggccatgatctggactgcaggctggctgctgctgctgctgcttcgcggaggagcgcaggccctggagtgctacagctgcgtgcagaaagcagatgacggatgctccccgaacaagatgaagacagtgaagtgcgcgccgggcgtggacgtctgcaccgaggccgtgggggcggtggagaccatccacggacaattctcgctggcagtgcggggttgcggttcgggactccccggcaagaatgaccgcggcctggatcttcacgggcttctggcgttcatccagctgcagcaatgcgctcaggatcgctgcaacgccaagctcaacctcacctcgcgggcgctcgacccggcaggtaatgagagtgcatacccgcccaacggcgtggagtgctacagctgtgtgggcctgagccgggaggcgtgccagggtacatcgccgccggtcgtgagctgctacaacgccagcgatcatgtctacaagggctgcttcgacggcaacgtcaccttgacggcagctaatgtgactgtgtccttgcctgtccggggctgtgtccaggatgaattctgcactcgggatggagtaacaggcccagggttcacgctcagtggctcctgttgccaggggtcccgctgtaactctgacctccgcaacaagacctacttctcccctcgaatcccaccccttgtccggctgccccctccagagcccacgactgtggcctcaaccacatctgtcaccacttctacctcggccccagtgagacccacatccaccaccaaacccatgccagcgccaaccagtcagactccgagacagggagtagaacacgaggcctcccgggatgaggagcccaggttgactggaggcgccgctggccaccaggaccgcagcaattcagggcagtatcctgcaaaaggggggccccagcagccccataataaaggctgtgtggctcccacagctggattggcagcccttctgttggccgtggctgctggtgtcctactgtgagcttctccacctggaaatttccctctcacctacttctctggccctgggtacccctcttctcatcacttcctgttcccaccactggactgggctggcccagcccctgtttttccaacattccccagtatccccagcttctgctgcgctggtttgcggctttgggaaataaaataccgttgtatatattctgccaggggtgttctagctttttgaggacagctcctgtatccttctcatccttgtctctccgcttgtcctcttgtgatgttaggacagagtgagagaagtcagctgtcacggggaaggtgagagagaggatgctaagcttcctactcactttctcctagccagcctggactttggagcgtggggtgggtgggacaatggctccccactctaagcactgcctcccctactccccgcatctttggggaatcggttccccatatgtcttccttactagactgtgagctcctcgagggcagggaccgtgccttatgtctgtgtgtgatcagtttctggcacataaatgcctcaataaagatttaattactttgaaaaaaaaaaaaaaaaaaaaaaaaaaaaaaaaaaaaaaa

SEQ ID NO: 14004 - DNA, 955 bp, Homo sapiens
aggccagctctggggtctcggcaggtggtccacaacatgacctctgagttcttcgctgcccagctccgggcccagatctctgacgacaccactcacccgatctcctactacaagcccgagttctacacgccggttgatgggggcactgctcacctgtctgtcgtcgcagaggacggcagtgctgtgtccgccaccagcaccatcaacctctactttggctccaaggtccgctccccggtcagcgagatcctgttcaatgatgaaatggatgacttcagctctcccaacatcaccaacgagtttggggtgcccccctcacctgccaatttcatccagccagggaagcagccgctctcgtcaatgtgcccgacgatcatggtgggccaggacggccaggtccggatggtggtgggagctgctgggggcacacagatcaccacagccactgcactgatatgtgtcaccccttttctccctggccgtgcccaccctgcacagcccccaagccatgctgatcacactcccatgccccaggccatcatctacaacctctggttcggctatgacgtgaagcgggccgtggaggagccccggctgcacaaccagcttctgcccaacgtcacgacagtggagagaaacattgaccaggcagtgactgcagccctggagacccggcaccatcacacccagatcgcgtccaccttcatcgctgtggtgcaagccatcgtccgcacggctggtggctgggcagctgcctcggactccaggaaaggcggggagcctgccggctactgagtgctccaggaggacaaggctgacaagcaatccagggacaagatactcaccaggaccaggaaggggactctgggggactggcttcccctgtgagcagcagagcagcacaataaatgaggccactgtgccaggctccaggtggcctccctgccctgtcaaa

SEQ ID NO: 14005 - DNA, 872 bp, Homo sapiens
gccagctctggggtctcggcaggtggtccacaacatgacctctgagttcttcgctgcccagctccgggcccagatctctgacgacaccactcacccgatctcctactacaagcccgagttctacacgccggttgatgggggcactgctcacctgtctgtcgtcgcagaggacggcagtgctgtgtccgccaccagcaccatcaacctctactttggctccaaggtccgctccccggtcagcgagatcctgttcaatgatgaaatggatgacttcagctctcccaacatcaccaacgagtttggggtgcccccctcacctgccaatttcatccagccagggaagcagccgctctcgtcaatgtgcccgacgatcatggtgggccaggacggccaggtccggatggtggtgggagctgctgggggcacacagatcaccacagccactgcactggccatcatctacaacctctggttcggctatgacgtgaagcgggccgtggaggagccccggctgcacaaccagcttctgcccaacgtcacgacagtggagagaaacattgaccaggcagtgactgcagccctggagacccggcaccatcacacccagatcgcgtccaccttcatcgctgtggtgcaagccatcgtccgcacggctggtggctgggcagctgcctcggactccaggaaaggcggggagcctgccggctactgagtgctccaggaggacaaggctgacaagcaatccagggacaagatactcaccaggaccaggaaggggactctgggggactggcttcccctgtgagcagcagagcagcacaataaatgaggccactgtgccaggctccaggtggcctccctgccctgtcaaa

SEQ ID NO: 14006 - DNA, 1108 bp, Homo sapiens
attgaatgcagcaagggtctggaggctgaggaccaggcagacaaacattcagagttgctggaatgcgacagagacagggagtcagactggtcatgcaaggtcctgggcctgcccttgggtcctggggagccacggaaggttgtgggtgccagagggttgtggtcagagccacagtcaggggccttctgagacctgtgccccctccccaccctccctccccacctccctaggccagctctggggtctcggcaggtggtccgcgacatgacctccgagttcttctctgcccagctccgggcccagatctctgacgacaccactcacccgatctcctactacaagcccgagttctacatgccggatgacgggggcactgctcacctgtctgtggtcgcagaggacggcagtgctgtgtccgccaccagcaccatcaacctctactttggctccaaggtgcgctccccagtcagcgggatcctgctcaataatgaaatggatgacttcagctctaccagcatcaccaacgagtttggggtacccccctcacctgccaatttcatccagccagggaagcagccgctctcgtccatgtgcccgacgatcatggtgggccaggacggccaggtccggatggtggtgggagctgccgggggcacgcagatcaccatggccactgcactggccatcatctacaacctctggttcggctatgacgtgaagtgggccgtggaggagccccggctgcacaaccagcttctgcccaacgtcacgacagtggagagaaacattgaccaggaagtgactgcagccctggagacccggcaccatcacacccagatcacgtccaccttcattgctgtggtgcaagccatcgtccgcatggctggtggctgggcagctgcctcggactccaggaaaggtggggaacctgctggctactgattgctccaggcggacaaggctgacaagcaatccaggaacaaaatactcaccaggacgaggaagaggactttgggggacaggcttctcctgtgagcagcagagcagcacaataaatgaggccactgtgccaggctccaggtggcctccctggcctgtctccccactc

SEQ ID NO: 14007 - DNA, 1049 bp, Homo sapiens
ctcgagagctgggctctgcgtcctcgtccagccgccaactcggccaaaggcgaagccagcagtttcttctgctgccgggcaacgcgccttttaaacctgagggagtgggcgcgtgagcacttaatggcgccggtgacagagtgagcttaacggattaataagcgcagccaggccagctctggggtctcggcaggtggtccgcgacatgacctccgagttcttctctgcccagctccgggcccagatctctgacgacaccactcacccgatctcctactacaagcccgagttctacatgccggatgacgggggcactgctcacctgtctgtggtcgcagaggacggcagtgctgtgtccgccaccagcaccatcaacctctactttggctccaaggtgcgctccccagtcagcgggatcctgctcaataatgaaatggatgacttcagctctaccagcatcaccaacgagtttggggtacccccctcacctgccaatttcatccagccagggaagcagccgctctcgtccatgtgcccgacgatcatggtgggccaggacggccaggtccggatggtggtgggagctgccgggggcacgcagatcaccatggccactgcactggccatcatctacaacctctggttcggctatgacgtgaagtgggccgtggaggagccccggctgcacaaccagcttctgcccaacgtcacgacagtggagagaaacattgaccaggaagtgactgcagccctggagacccggcaccatcacacccagatcacgtccaccttcattgctgtggtgcaagccatcgtccgcatggctggtggctgggcagctgcctcggactccaggaaaggtggggaacctgctggctactgattgctccaggcggacaaggctgacaagcaatccaggaacaaaatactcaccaggacgaggaagaggactttgggggacaggcttctcctgtgagcagcagagcagcacaataaatgaggccactgtgccaggctccaggtggcctccctggcctgtctccccactc

SEQ ID NO: 14008 - DNA, 977 bp, Homo sapiens
attgaatgcagcaagggtctggaggctgaggaccaggcagacaaacattcagagttgctggaatgcgacagagacagggagtcagactggtcatgcaaggccagctctggggtctcggcaggtggtccgcgacatgacctccgagttcttctctgcccagctccgggcccagatctctgacgacaccactcacccgatctcctactacaagcccgagttctacatgccggatgacgggggcactgctcacctgtctgtggtcgcagaggacggcagtgctgtgtccgccaccagcaccatcaacctctactttggctccaaggtgcgctccccagtcagcgggatcctgctcaataatgaaatggatgacttcagctctaccagcatcaccaacgagtttggggtacccccctcacctgccaatttcatccagccagggaagcagccgctctcgtccatgtgcccgacgatcatggtgggccaggacggccaggtccggatggtggtgggagctgccgggggcacgcagatcaccatggccactgcactggccatcatctacaacctctggttcggctatgacgtgaagtgggccgtggaggagccccggctgcacaaccagcttctgcccaacgtcacgacagtggagagaaacattgaccaggaagtgactgcagccctggagacccggcaccatcacacccagatcacgtccaccttcattgctgtggtgcaagccatcgtccgcatggctggtggctgggcagctgcctcggactccaggaaaggtggggaacctgctggctactgattgctccaggcggacaaggctgacaagcaatccaggaacaaaatactcaccaggacgaggaagaggactttgggggacaggcttctcctgtgagcagcagagcagcacaataaatgaggccactgtgccaggctccaggtggcctccctggcctgtctccccactc

SEQ ID NO: 14009 - DNA, 5163 bp, Homo sapiens
ttaggggcagaaaaacatttgtaataattaatggctttgagagacacaaggctttgtttgccccagagtattagttaacccacctagtgctcctaatcatacaatattaaggattgggagggacattcattgcctcactctctatttgtttcaccttctgtaaaattggtagaataatagtacccacttcatagcattgtatgatgattaaattggttaatatttttaaaatgcttagaacacagattgggcacataacagcaagcaccacatgtgtttataagataaattcctttgtgttgccttccgttaaagtttaaataagtaaataaataaataaatacttgcatgacattttgaagtctctctataacatctgagtaagtggcggctgcgacaatgctactggagttccagaatcgtgttggtgacaagattgttcaccagcatatggtgtggtgaaaactcactaatttggaattagttcagattattaagcctgaataggtgaaaatcctgaaatcaaggatctttggaactatttgaaatcagtattttatattttcctgttgtattcattaaagtgttgcaagtgttctatttgatggattaagtatatttaggatatacatgttcaatttgtgattttgtatacttaattggaacaagaaagctaataaaggttttgatatggacatctattcttttaagtaaacttcaatgaaaatatatgagtagagcatatagagatgtaaataatttgtggacacaccacagactgaaatagcaaatttaaaagaaattgttggaagaatcaagtgtttgtggaatgagtcctcctagtaaagttcctgctcttgtgaataattaagcctcatgtataattactatagcaaaaggaagcctaagaagtattagactctacttgtatttaaattacattttacataatttatgtgtatgaaaaatgttttaaatgcttattttcgtaagccatgagatagctcctttatattttaagaatttctgaattaatttgcttggattttattagtgcaaatggcagagctagcaattcctttttctgtgttcccattccatcctattcatccctcttttaggaaactctgaactctggattgtccttgtttacatacctgcctcctgcattggactatgtgtctctgagtgtagtatgactaattcatttgtttgtcaaggactctcaatgcatttgttgaacagcctaattagtaatgtctgcaacaatgacattttactgtatttaataaagctctgggaaagtaggatacacataagacaggtctaggtctaaattctttacagaaacttggatttttagttcggtttgaaatttgaagatgtgagtatatttatctcagtttcccaaaggacaagctaattggaattatcatcctctttcacttgattggatccccagaatgccatttacgcatgcagcaggattttataacagttttaaattctgtatatttgatgaagaggttttatatttttggattcaagcctctttttaaacttctacaatatggtttacaataattccttatatcctgcttttgaaatacatattacaactttttaagtttggaaggctatatttcaaggactgaagttacagtatactcaagtgatacacaagcctagcaccccactttccacatagtgttcgataaagattgataaactcgaaatcacagaccttttaattcttaagacaaatagcagcagaaagaaacatctttggcttatttctggtaaggtttttatgctctgtaaaacaaagaattgtattcatccgcgcagcacagattctattaaaaataaatgtgagagtcgttaatgtagtactgctcatttaccatcaaaattcacttttcaggaataatcccatcagtttaaattggatattggaatgagcattgattacatttaacttggtagcccaaaatttcttcatggggttttgaactcggcgggatttcaaaggttttaaaaatgagtttttgattttttttaaaaccctcaaatttcattacctttaaactaggtcgaaacggggcgcaagagattggattaacaccatagtaatacttattttgttcttaaccatttcagggcttcttgaaatagaggctgtatggtgtaatggaaaaaacagccttggaatctgggagcctgattcctggattcagtcccagttttgcgtgaccttgggcaagttactttacttctctgaatttccgtttcctcctctgcaaaatgaggatcgcaatagccaccttgcaaccttgactggagcgagcctcgcacaccccgcgccggcctggaggaagagcagccatgattacgccgccttcgctccgctacccgcttgcggctggcgccctcctccagcaggtgtaggcgctgccgcgctgccccacgcctttccgccgctcgcgggcctgcgcctcggcgtccccgaggaggccgctgcgggctgaggtagcgcaccggcctctcggcgtcccagtccggtcccgggcggagggaaagcgggcgacccacctccgaggcagaagccgaggcccggccccgccgagtgcggaggagcgcaggcagcccccgcccctcggccctccccccggccctcccggccctccctccgccccctccgccctcgcgcgccgcccgcccgggtcgccgcggggccgtggtgtacgtgcagagcgcgcagagcgagtggcgcccgtatgccctgcgctcctccacagcctgggccgggccgcccgggacgctgaggcggcggcggcggccgagggggccggtcttgcgctccccaggcccgcgcgcctgagcccaggttgccattcgccgcacaggccctattctctcagccctcggcggcgatgaggcgctgaggcggctgccggcgctgcgccggagcttaggactcggaagcggccgggccgagggcgtggggtgccggcctccctgaggcgagggtagcgggtgcatggcgcagtaacggcccctatctctctccccgctccccagcctcgggcgaggccgtccggccgctacccctcctgctcggccgccgcagtcgccgtcgccgccgccgccgccgccatggccaatgacagcggcgggcccggcgggccgagcccgagcgagcgagaccggcagtactgcgagctgtgcgggaagatggagaacctgctgcgctgcagccgctgccgcagctccttctactgctgcaaggagcaccagcgtcaggactggaagaagcacaagctcgtgtgccagggcagcgagggcgccctcggccacggagtgggcccacaccagcattccggccccgcgccgccggctgcagtgccgccgcccagggccggggcccgggagcccaggaaggcagcggcgcgccgggacaacgcctccggggacgcggccaagggaaaagtaaaggccaagcccccggccgacccagcggcggccgcgtcgccgtgtcgtgcggccgccggcggccagggctcggcggtggctgccgaagccgagcccggcaaggaggagccgccggcccgctcatcgctgttccaggagaaggcgaacctgtaccccccaagcaacacgcccggggatgcgctgagccccggcggcggcctgcggcccaacgggcagacgaagcccctgccggcgctgaagctggcgctcgagtacatcgtgccgtgcatgaacaagcacggcatctgtgtggtggacgacttcctcggcaaggagaccggacagcagatcggcgacgaggtgcgcgccctgcacgacaccgggaagttcacggacgggcagctggtcagccagaagagtgactcgtccaaggacatccgaggcgataagatcacctggatcgagggcaaggagcccggctgcgaaaccattgggctgctcatgagcagcatggacgacctgatacgccactgtaacgggaagctgggcagctacaaaatcaatggccggacgaaagccatggttgcttgttatccgggcaatggaacgggttatgtacgtcatgttgataatccaaatggagatggaagatgtgtgacatgtatatattatcttaataaagactgggatgccaaggtaagtggaggtatacttcgaatttttccagaaggcaaagcccagtttgctgacattgaacccaaatttgatagactgctgtttttctggtctgaccgtcgcaaccctcatgaagtacaaccagcatatgctacaaggtacgcaataactgtttggtattttgatgcagatgagagagcacgagctaaagtaaaatatctaacaggtgaaaaaggtgtgagggttgaactcaataaaccttcagattcggtcggtaaagacgtcttctagagcctttgatccagcaataccccacttcacctacaatattgttaactatttgttaacttgtgaatacgaataaatgggataaagaaaaatagacaaccagttcgcattttaataaggaaacagaaacaactttttgtgttgcatcaaacagaagattttgactgctgtgactttgtactgcatgatcaacttcaaatctgtgattgcttacaggaggaagataagctactaattgaaaatggtttttacatctggatatgaaataagtgccctgtgtagaatttttttcattcttatattttgccagatctgttatctagctgagttcatttcatctctcccttttttatatcaagtttgaatttgggataatttttctatattaggtacaatttatctaaactgaattgagaaaaaattacagtattattcctcaaaataacatcaatctatttttgtaaacctgttcatactattaaattttgccctaaaagacctcttaataatgattgttgccagtgactgatgattaattttattttacttaaaataagaaaaggagcactttaattacaactgaaaaatcagattgttttgcagtccttccttacactaatttgaactcttaaagattgctgctttttttttgacattgtcaataacgaaacctaattgtaaaacagtcaccatttactaccaataacttttagttaatgttttacaagg

SEQ ID NO: 14010 - DNA, 10709 bp, Homo sapiens
agggggcggcgctcccggcccatcccttagccccgcggcggccgtgtgggccggaggctgcctgcaccgcgtcagggaggccggcctagaaaccctccctcccagaagaaagccgatcccagttcaggtggggtcttcctcggttgcgtacctggctggagccgagctggtgggcggccggcagccggcgtttctggtgatgacagccccgaaatgaaagcagcgcggccgccgcctccgagggctgcagggagatcagcgtccagcaaataagaagcaagtcctggacccggaggaggaggagcggccgagcatctctctctgctccgccgtgtcctttagatgagcactcccggccggagccggaggtggatccgcagagctgcctctgggcgcctgaccccgcgctgacatcacaacctgtgacaggcgcatcacgcccggtacctgctcccggccgctgcccgtcctcccagcctctttgtatgccgcagacatggccagccagcaggattcgggcttctttgagatcagtatcaaatatttactgaaatcctggagtaatacttctcccgttggcaacggttacatcaagcctccggttccacctgcttctggcacgcacagggagaaagggccgccaaccatgctacccatcaatgtggacccagacagtaaaccaggagaatatgtcctcaaaagtttatttgtcaacttcaccactcaggctgaacgcaagattcgtatcattatggcagagcccctggaaaagccattgacgaaatctctgcaacgtggagaagacccccaatttgatcaggtcatcagctcaatgagctccctttctgagtactgcctgccttccattctacgtacattatttgactggtataaaaggcaaaatggcattgaggatgaatcacatgaatacagaccaagaacaagcaataaatcaaaaagcgatgaacaacagcgagattatttaatggaaagacgggacctcgccattgattttattttttctttagtattaatagaagttttgaaacagattccacttcatcctgtaatagacagtttaatacatgatgttattaacttggctttcaagcactttaaatacaaagaagggtaccttggtcccaacactggcaatatgcatattgtggcagacctgtatgcagaagtcattggagtgttggcacaagccaaattccctgctgtaaagaagaaatttatggcggagctaaaagaattacggcacaaagagcagaacccatatgtggttcaaagcattatcagcttaataatgggcatgaaattctttcgaattaagatgtatccagtggaggattttgaggcctctcttcagtttatgcaggaatgtgcacattacttcctcgaggtcaaagacaaagatatcaagcatgccttggctgggctttttgttgaaatacttgttccagttgctgctgctgttaaaaatgaagtaaatgttccctgccttagaaattttgtggaaagcctgtatgacaccacgctggaactttcttctcgaaagaagcattccttggccttgtaccccctggtgacctgtttgctctgtgtcagtcagaagcagctgttcctgaacaggtggcacattttcctcaacaactgcttgtccaaccttaaaaacaaagatcccaagatggctcgagttgcactggaatctctctacagattactttgggtttacatgattcgaattaaatgtgaaagcaacacagctactcagagccgacttataaccatcatcacaacacttttccccaaagggtcccgcggtgtggtaccaagggacatgcctctgaacatctttgtgaaaatcatccagttcattgcccaggaacgtttagattttgcaatgaaagaaatcattttcgattttctttgtgtgggaaaaccagcaaaagcattcagtctcaacccagagagaatgaacattggtttacgggcattcttggtcatagctgatagcttgcagcagaaagatggggaacctcccatgccggttacaggagccgttcttccttcaggaaacacgttaagagtaaagaaaacatatttgagtaaaacactaactgaagaggaagccaaaatgataggcatgtccttatattactctcaagtacgaaaagctgtagacaacattttaaggcaccttgataaagaagtaggaaggtgtatgatgctgactaatgtacagatgttaaacaaagaaccggaagacatgatcacgggtgagagaaagccaaaaatagatcttttcaggacctgtgttgctgctattcctcgactgcttcctgatgggatgtcaaaacttgaacttattgacttactggctaggctctctattcatatggatgatgaattgcgacatattgcacaaaattctcttcagggtttacttgttgacttctcagattggagggaagatgtactatttggctttaccaacttcctgctccgggaagtaaatgatatgcatcacacactccttgattcgtccctgaagttgctgctgcagctgctcacccagtggaaactagtcatccagacacaaggaaaagtctatgaacaagccaacaaaatcagaaattcagagctcatcgcaaatggctccagtcacagaattcagtcggaacgaggtccccactgcagtgtactccacgctgtagaaggttttgctctggttttactctgcagtttccaggtggccacacgcaaactgtccgttttaatactcaaggaaattcgagcgttgtttattgccctggggcagcctgaggatgacgacaggccgatgattgatgtcatggatcagctaagttcttccattctagaaagttttattcatgtagcagtttcggattcagcaacattaccactcacccacaatgtggatctgcagtggttggtggaatggaacgcagtcctggtcaatagccattatgatgtgaaaagcccttcccatgtctggatatttgcacagtctgtcaaagacccctgggtcctctgcctcttcagcttcctccggcaggagaacttacccaagcactgccccacagccctcagctatgcctggccttatgccttcactcggctccagtcggtgatgcctctggtggacccaaatagcccaattaatgccaagaaaaccagcactgccggcagcggagacaactatgttactttgtggagaaattacctaattctttgttttggagttgcaaaacccagtattatgagcccaggacacttaagagcttccactccagaaataatggcgaccacacctgatggtacagtgagctacgataacaaggccataggcaccccatcggtgggagttctgttaaagcagttggtgcctttgatgagactagagagcattgagatcacagagtccttagttttaggatttggaagaacaaattcccttgttttcagagaattggtagaagaacttcatccattaatgaaagaagctctggaaagaagaccagagaacaagaaacgccgagaacggcgagacttgttaaggctacaactacttcgaatttttgaacttttggctgatgctggtgtaataagtgacagcacaaatggagccctagagcgggatactttagccctgggagctttgttcttagaatatgtggacttgacccgcatgctcctagaagctgaaaatgacaaagaagttgaaattcttaaagatatccgggcacattttagtgcaatggtggccaacttgattcagtgtgttccagttcaccaccgaagatttctcttcccccagcaaagtctgaggcaccaccttttcatcttattcagccagtgggcaggacccttcagcattatgttcactcctctggatcgttacagtgacagaaatcatcagattacaagatatcagtattgtgcattaaaagcaatgtcagcagtactgtgctgtggccctgtctttgacaatgtgggcctttccccagatggctacctatataaatggcttgacaacattctggcttgtcaagatttacgagttcatcaacttggctgcgaagttgttgtcttgctactggaacttaatcctgaccaaataaatctttttaactgggcaattgaccgatgctacacaggttcctaccaacttgcatctggctgcttcaaagccatagcaactgtgtgtggaagcaggaactatcccttcgacatagtgacattgttaaaccttgttctattcaaggcctctgacaccaacagagagatttatgaaatctccatgcagctcatgcagatccttgaagcaaagctttttgtatactcaaagaaagtcgctgagcaaagaccgggaagtattctctatggaacacacggcccgctgccacccctctacagcgtgtcactcgccctcttgtcatgtgagctggccaggatgtaccctgagctcacactccccctcttctcaggtaagccagcgattccccacaacacaccccaacgggcgccagatcatgcttacctacctgctgccctggctgcacaacatcgagctggtggacagcaggctcctcctcccgggtcgagccccagcagcccagaggacgaagtcaaggaccgggaaggtgacgtgactgcttctcacgggctgagaggaaatggctggggctctccagaagccacgtcactggtcctgaacaacctcatgtacatgacggccaagtatggagatgaagttcctgggccagaaatggaaaatgcttggaatgctttagccaacaatgagaaatggagcaacaacctgaggatcaccttgcagttcctgattagcctctgtggggtcagcagcgacacagttctcctaccctatattaaaaaagtggcaatatacttgtgccgtaacaacaccattcaaaccatggaagagcttctctttgagctgcagcagacagaacccgtgaaccccatcgtccagcattgtgacaacccgcccttctaccgcttcacggccagtagcaaggcttccgcagcagcctcaggaaccacctctagcagcaatacagtggttgctggccaggaaaatttcccagatgctgaggagaacaagatattgaaagaatctgatgaaaggtttagtaatgtcatcagagcccacactcgcctcgagtcaagatacagcaatagctctggaggatcctacgatgaagataaaaatgatccaatttctccctacacgggctggttgctgactattacagagaccaagcagccgcagcccttaccgatgccttgtactggaggatgctgggcccccctggttgactatctcccggagaccatcactccccgggggccactccacaggtgcaatattgctgtaatttttatgactgaaatggtggtggatcacagtgtacgagaagactgggcgcttcatctaccattattacttcatgctgtcttcttaggtttagaccactaccggcctgaagtctttgaacacagcaaaaaactgcttcttcacctcttgattgccctctcttgcaacagcaatttccattccattgcttccgtgctcctgcagacccgagagatgggtgaagctaagactctaaccgtgcagccagcctaccaacctgaatatctctatacaggtggctttgacttcctgagagaggaccagtcatccccggtgcctgactcagggcttagttcaagctccacctcctctagcatcagtctgggaggcagcagtggaaacctcccacagatgacccaggaggtagaagatgtggacacagctgctgaaacagatgagaaggcaaacaagctcattgagtttctcacgaccagggcatttggtccactttggtgccatgaagacatcacacctaaaaatcaaaattcaaagagtgctgaacagctcactaattttctacgtcacgttgtatctgtatttaaagattccaaatcaggcttccatctggagcaccagttgagtgaagttgcattgcagacagccctcgcaagctcttcaaggcactatgctggtcggtccttccagatattccgggccctcaagcaacctctgtcagcacatgccttatctgaccttctctcaagattggtggaggtgataggagaacatggagatgagattcagggttatgtaatggaagcgctcctaaccttggaggcggctgtggataacttgtctgactgcttgaagaacagtgacctcctaactgtattgtcccgctcttcctcaccagatttaagctccagcagtaaactaacagcaagcagaaagagcacaggacaactaaacatgaacccgggaaccaccagcggcaacaccgcaactgccgaacggagccggcatcaacgaagcttctctgtgcccaagaagtttggtgtcatcgaccgatcctctgacccacctcgaagtgccacactggacagaattcaggcttgtacccaacaaggcctctcctcaaaaaccagaagctcatcctccttgaaggacagtctcacggacccatcccacataaaccatcccaccaacctgctggccaccatattctgggtcacagtggccttgatggagtctgattttgagtttgaatacttaatggccttaaggctgttgagcagactactggcacatatgccactcgataaggctgagaaccgagaaaagcttgagaaactccaggcacagctgaagtgggccgacttctccgggctgcagcagctgctgctgaaaggattcacatccctcaccaccacagacctgaccctgcagctcttcagtctgctgacaccagtgtccaaaatatccatggtggatgcatcccacgctattgggtttccactgaatgtcttgtgtctcctgcctcagctgattcagcattttgaaaatcccaatcagttctgtaaggatatagccgaaaggattgctcaggtttgtttagaagagaagaaccccaaactttcaaatcttgcacatgtcatgactctttataaaacgcacagctacacgagggactgtgccacgtgggtcaatgtggtctgtcgataccttcatgaagcatatgctgacattaccttgaatatggttacctacctggcagagctgctggagaagggcctccctagtgtgcagcagcccctgctccaggtgatctacagtcttctcagctacatggacctttctgtcgttcctgtcaaacagttcaatgtggaagttctgaagacaattgaaaaatatgtgcaaagtgttcactggagagaagctctgaatatcttgaagctggtagtttctcggtcagccagccttgttttaccttcataccagcacagtgacctctcaaaaatagaaatacatcgagtgtggactagtgcttccaaggaattacctgggaaaaccctggacttccacttcgatatttcggagactccaatcatcgggaggcggtatgatgagctgcagaattcttctgggcgtgatgggaagcccagggccatggccgtcacccggagcacatcttccacttcctcaggctccaactccaacgtccttgttccagtgagctggaaaaggccccagtattctcagaagagaacaaaagagaagttggtacatgtcctttctctgtgtggccaagaagtaggattgagcaaaaatccatcagtgattttttcatcgtgtggggatctggatctgcttgagcaccagacaagcttggtatcttctgaggacggtgcccgagagcaggagaacatggatgacacaaacagcgagcagcagtttagagtcttcagagacttcgacttcctagatgtggagctggaggatggagagggtgagagtatggacaatttcaactggggagtgcgcagacgttctctggacagcctggataagtgtgatatgcagattctggaggagcgccaactgtcaggaagcactcctagcctgaataaaatgcaccatgaggactccgatgaatcatccgaggaggaggacctcacagccagccagatcctggagcactcagacctaatcatgactctctccccctctgaagagacgaatcccatggagctgctcaccacagcctgtgactcgacccctgcagaacctcattcctttaacaccagaatgtccagctttgatgcttccttgcctgatatgaataatctgcagatttctgagggttcaaaggctgaagctgttcgtgaggaggaggacaccaccgtgcatgaggatgatctttctagttccatcaatgaactcccagcagcttttgaatgcagcgacagctttagcctggacatgactgagggggaagaaaaaggcaatcgggcactggaccagtttaccctggcgagctttggagaaggtgacaggggagtctctccccctccctcgcccttcttctcagccatccttgccgcctttcagcccgcagcctgtgacgatgccgaggaggcctggcgcagccacatcaaccagcttatgtgtgactcagatggctcctgtgctgtgtatacatttcatgtgttctcctccttgtttaagaatattcagaaaaggttctgcttcctaacctgtgatgcagccagttaccttggagataacctccggggaatcggatccaaatttgtcagctcttcccagatgctcacctcctgctctgaatgtcctacactttttgtggatgccgagactctcctttcatgtggacttctggacaagctcaagttcagtgtgttagaactgcaagaatatttggatacctacaacaacaggaaagaggccacactctcttggcttgcaaattgtaaggcaacatttgcagggggatcaagagatggagtaattacctgtcaaccaggggactccgaagaaaagcaattggaactgtgtcagagattatataagctacacttccagctgctattgctttttcagtcctactgtaagctcatcggccaggtgcacgaagttagctccatgccagagctgctgaatatgtccagggaactgagtgacctaaagaaacacctgaaggaagccagtgcagtcattgcagctgaccctctctattcagacggcgcgtggtccgagcccaccttcacgtccactgaagcagccatccagtccatgctggagtgcctgaagaacaacgaactcggcaaagctttgcggcagatcagggagtgcagaagtctgtggcccaatgacatctttggaagcagttctgatgatgaggtccagacactactgaatatttatttccgtcaccaaactctgggacagacgggtacttatgccctggtggggtctaaccagagcctgaccgagatctgcaccaagctgatggagctgaacatggagatccgggacatgatccgcagggcccagagttaccgagtcctcactacttttcttccagactccagtgtttctggcactagtctctgacaggagcctcctgtccccactgggttccaaactgcagtgctgccatgctggggcaacgtcattcagtgtcttctcggccttcaaaaggcttggacagactgttctccctcttgttacctgtagggctttttctaaagaggatggcagaacttccaacgtgtagcaatactataagaaccaaggtagcttagaacgtcctggacagactccactcatcatgctgtgtggcacaaatgtgttacatttgaccgagcatatgcaactcgctactgaagaagtgacttccgttgcataccaaagccgactacactgaacagtaccttcctttctagaaacaattttagattggcaaaagtgcaatgttttcttcactcaaaaaattttatattctcaaacatgtatattctttccctgtcttgttccattttcttttcttttttcttttttctttttcctttctttcgtgggctgagaaaggggcaggcaaaatgaagctggccactgaaaactgtaagatggtcaaaagctgacagcctgtgtatgtgaaaagggaattgtaaatggactgcaatgtaatgtacactgtaatttgaatacaattactgtatctaaaaggagctgctatgaagtacctttcttatgttgctaggctactgtttctgaaagccctggatctctttgcaccaaaaatggtccagatagactctttttaaggatcttggctgctttttactagaaggttgcttttatgagcatatttatactgctgaaggatgagtgttaattttaattaactttgccgttttgtagagaaaactattcacaagataaattccaagtcttttcacctgtcaggcatgcatattttaatatctgtttggatagtcagaagtagaatcataaaggtaaaatatgagttgttactttgtttcttcgatgtcatattttatgtgtaatatatatgtaaagggccattcttaagttctctccttaaacttaatgctgtcaagtgttagatgtgtgcatgtgaacttgttgcactgcagaaacatattcagagtttatctatgtaacttattcactctgtaaatacatttaaagtttttgtgatgtaagcttaattgatattctgttcagaactttctttagactaaaaaaaaaaaaaaaagacaaa

SEQ ID NO: 14011 - DNA, 3280 bp, Homo sapiens
aacacaaacacaaacacgaacacgaacacgctcagcgtccccggggagggcggactgaagccacctcaccattcatcgcccctggaccccgcagtccccctcggactcagggccagagccttctgcgaagcaacctagccccagggaaacggtagcggccgcagaagccccgctctctgtaacggccgcggaggagcagcaagcctccctgtgagtcggtgggagacaagacggagcggcggtaagggcggtagggaagtgaagcgcctctctccaccttgttagaagcgcgctgaaagcggcctgcctacccaccccatcgctgccgttttgcagtcgtcgctcccaccttccgctgccgcctggagggaagccggagcgacgggggtcacggcggcggtcagagggtaaaggtcttgctcccagcagcctccgcggtggatacgtcgccatcttggatccgcgggacaagaaaattcatgcgagggagacgtggtgggcggtccttcctgtgacacgacccttgagtgacagttctatttgattgcctccggtactgtgaggaaaggacacgactctatggtgaggactgatggacatacattatctgagaaaagaaactaccaggtgacaaacagcatgtttggtgcttcaagaaagaagtttgtagagggggtcgacagtgactaccatgacgaaaacatgtactacagccagtcttctatgtttccacatcggtcagaaaaagatatgctggcatcaccatctacatcaggtcagctgtctcagtttggggcaagtttatacgggcaacaaagtgcactaggccttccaatgagggggatgagcaacaatacccctcagttaaatcgcagcttatcacaaggcactcagttaccgagccacgtcacgccaacaacaggggtaccaacaatgtcacttcacacgcctccatctccaagcaggggtattttgcctatgaatcctaggaatatgatgaaccactcccaggttggtcagggcattggaattcctagcaggacaaatagcatgagcagttcagggttaggtagccccaacagaagctcgccaagcataatatgtatgccaaagcagcagccttctcgacagccttttactgtgaacagtatgtctggatttggaatgaacaggaatcaggcatttggaatgaataactccttatcaagtaacatttttaatggaacagacggaagtgaaaatgtgacaggattggacctttcagatttcccagcattagcagaccgaaacaggagggaaggaagtggtaacccaactccattaataaaccccttggctggaagagctccttatgttggaatggtaacaaaaccagcaaatgaacaatcccaggacttctcaatacacaatgaagattttccagcattaccaggctccagctataaagatccaacatcaagtaatgatgacagtaaatctaatttgaatacatctggcaagacaacttcaagtacagatggacccaaattccctggagataaaagttcaacaacacaaaataataaccagcagaaaaaagggatccaggtgttacctgatggtcgggttactaacattcctcaagggatggtgacggaccaatttggaatgattggcctgttaacatttatcagggcagcagagacagacccaggaatggtacatcttgcattaggaagtgacttaacaacattaggcctcaatctgaactctcctgaaaatctctaccccaaatttgcgtcaccctgggcatcttcaccttgtcgacctcaagacatagacttccatgttccatctgagtacttaacgaacattcacattagggataagctggctgcaataaaacttggccgatatggtgaagaccttctcttctatctctattacatgaatggaggagacgtattacaacttttagctgcagtggagctttttaaccgtgattggagataccacaaagaagaacgagtatggattaccagggcaccaggcatggagccaacaatgaaaaccaatacctatgagaggggaacatattacttctttgactgtcttaactggaggaaagtagctaaggagttccatctggaatatgacaaattagaagaacggcctcacctgccatccaccttcaactacaaccctgctcagcaagccttctaaaaaaaaaaaaaaaaaaaaaaaaagacttcccttttcttggggtatggctgtctcagcacaatactcaacataactgcagaactgatgtggctcaggcaccctggttttaattccttgaggatctggcaattggcttacgcaaaaggtcaccatttgaggtcctgccttactaattatgtgctgcccaacaactaaatttgtaatttgtttttctctagtttgagcagggtctgaattttttcatttatttccttttttgccagcagacagacttgagtctgtaaagacaagcaaatacactgacagaagtttaccatagtttctaaaatgtaaaaaagaaaacccccaaaagactcaagaaaattagaccacaaattttgcattgttcattgtagcactattggtaataaaataacaaatgtttgtgcatttttatgtgaagatccttctcgtatttcatttggaaagatgagcaagaggtctgcttccttcattttacttccccttctgtttttgaaaggcagtttcgccaagcttaatgcaagaatatctgactgtttagaagaaagatattgccacaatctctggatggttttccagggttgtgttattactgagcttcatctttccagaatgagcaaaacactgtccagtctttgttacgattttgtaataaatgtgtacattttttttaaatttttggacatcacatgaataaaggtatgtatgtacgaatgtgtatatattatatatatgacatctattttggaaaatgtttgccctgctgtacctcatttttaggaggtgtgcatggatgcaatatatgaaaatgggacattctggaactgctggtcaggggactttgtcgccctgtgcactaaaagggccagattttcagcagccaaggacatccatacccaagtgaatgtgatgggacttaaaagaagtgaactgagacaattcactctggctgtttgaacagcagcgtttcataggaagagaaaaaaagatcaatcttgtattttctgaccacataaaggcttcttctctttgtaataaagtagaaaagctctcctca

SEQ ID NO: 14012 - DNA, 3593 bp, Homo sapiens
ctcggccccgggctgccgcgccagcccgtctccgcggcgggggaccgggctgccttggcccctcagcgctcgcgtcttttccggcagttggaacgcttcctgttgtcctcacccgtaaccgcctgttgccccctgtctcagagtccctcacgcgtcccctcccgtctttggctcgttggctgccgccgccggggcttcgccagccttcaagtcgagactactggccgaaggggcgtctgcggctctccgccgtccccagccctgcctctccctgggctctgcagccatggcaatgacaggctcaacaccttgctcatccatgagtaaccacacaaaggaaagggtgacaatgaccaaagtgacactggagaatttttatagcaaccttatcgctcaacatgaagaacgagaaatgagacaaaagaagttagaaaaggtgatggaagaagaaggcctaaaagatgaggagaaacgactccggagatcagcacatgctcggaaggaaacagagtttcttcgtttgaagagaacaagacttggattggaagattttgagtccttaaaagtaataggcagaggagcatttggtgaggtacggcttgttcagaagaaagatacgggacatgtgtatgcaatgaaaatactccgtaaagcagatatgcttgaaaaagagcaggttggccacattcgtgcggagcgtgacattctagtggaggcagacagtttgtgggttgtgaaaatgttctatagttttcaggataagctaaacctctacctaatcatggagttcctgcctggaggggacatgatgaccttgttgatgaaaaaagacactctgacagaagaggagactcagttttatatagcagaaacagtattagccatagactctattcaccaacttggattcatccacagagacatcaaaccagacaaccttcttttggacagcaagggccatgtgaaactttctgactttggtctttgcacaggactgaaaaaagcacataggacagaattttataggaatctgaaccacagcctccccagtgatttcactttccagaacatgaattccaaaaggaaagcagaaacctggaaaagaaatagacgtcagctagccttctccacagtaggcactcctgactacattgctcctgaggtgttcatgcagaccgggtacaacaagctctgtgattggtggtcgcttggggtgatcatgtatgagatgctcatcggctacccacctttctgttctgagacccctcaagagacatataagaaggtgatgaactggaaagaaactttgacttttcctccagaagttcccatctctgagaaagccaaggatctaattttgaggttctgctgtgaatgggaacatagaattggagctcctggagttgaggaaataaaaagtaactctttttttgaaggcgttgactgggaacatatcagagagagacctgctgcaatatctattgaaatcaaaagcattgatgatacctcaaacttcgatgagtttccagaatctgatattcttaagccaacagtggccacaagtaatcatcctgagactgactacaagaacaaagactgggtcttcatcaattacacgtacaagcgctttgagggcctgactgcaaggggggcaataccttcctacatgaaagcagcaaaatagtactcttgccacggaatcctatgtggagcagagttctttgtataacatcatgcttttcctctcacactcttgaagagcttccaagaagttgatggaacccaccaatatgtcatagtaaagtctcctgaaatgtggtagtaagaggattttcttccataatgcatctgaaaaactgtaaacaaagacaaccatttctactacgtcggccataaacagctatcctgctttggaagagaagcatcatgagccaatttgataggtgttttaaaaataacttgagttttcctaagttcatcagaatgaaggggaaaaacagccatcatccaacattattgagattgtcgtgtatagtcatcgaatatcagccagttcctgtaattttgtgacacgctctctgccaagcccaccaagtatttcctttatagctaaaagttccatagtactaaggaaataaagcaataaagacagtctcagcagccaggattctggctgaaggaaatgatccgccaccctgagggtggtgatggtagtttctacccatacctcagcctcaggcgagtggcttatagcctccattcatggtgcactttatttatggtactaagataaagactgtcaatccattgatttatctcctcctgtcccccatctaaaatacccatgctgcttttctgagtgttgatgggggttaccagcttgatccactgttgctcttagaaggcccagaaagtctttgggcattgccaagaaatcccggattatgtggaaaaccctcactttctcttcacggctgtaccagaaaatccctaagacagatcttgccgtggactagcaatacctgcaagtgctgccaatgggaactcaatttattcctgggaacctaacgaggagagcccaggcctaggcaggaggcctggaaccctcttggctaaggtgctgttcctgttcctgcaaggtctccagaacccctttggaaatggtgaaggaaccagcccaatagaagtacagagccagctgacaagtccttgtaaagctcactcctcagtccttggcacagccatgttttgtcttctctcttggtatttcttctctcccaactttagccattttgccttggaatcatgattacaattttttcctttgcagatgccttcctgggggatactcctccccaccctaaagggtcgcctgcaacttaggcggattgggtctctctgctgtggcgttctctcttgagagaccctctgaattttagcacaaagtgccttctgtttcacagctgccaccacctttagaggaatttcgtcagaaaaatgtggaggctccatattaatgcattattttttaaaaagttttgataactcttaaagcatcatttgcacctatgtgggaactttgcctgttgcaaagtattgtggccgagctgcagctgggagcctgctttctgccagtcttgaggttctgaagatcagctttgaaaggaaagtatgtcctagcttagccattcagaagagaaaaatggaatatcagagttacagttgtcagtgaaactactttggattttaacctcttagaggaagaaaaaaggttagggaagtgtcaactctggatgaaggtgatgtgtttgcctctcagtctttcattcatagcctgctagtgaaaaggaagtaaatgagattcttttgtgtgactttgtagtctctttgtattaccaaatagttggggtgttgactcctgtgtgttttgcaagaatgtgtggtaagcctgggtaaagagaaggaactgcggtgttgggagagtctttgtgttggggagtggcaggggatgatttgtttcaggggaaaatgcccacattttaacttttaaacttctgaataaactgtgtaaaaacaaaaaaaaaaaaaaaaaa

SEQ ID NO: 14013 - DNA, 2577 bp, Homo sapiens
tctgcttagtcatggtgacctgcgcgcgctccgcgcctcccccacgcgcagcgatggaggcgccggggctcgggcggtggaggcggagccggagcgcggccatggcggggtccctgagtgccagaggtggtggtgttgcttatcttctggaaccccatgcagccagatcccaggcctagcggggctggggcctgctgccgattcctgcccctgcagtcacagtgccctgagggggcaggggacgcggtgatgtacgcctccactgagtgcaaggcggaggtgacgccctcccagcatggcaaccgcaccttcagctacaccctggaggatcataccaagcaggcctttggcatcatgaacgagctgcggctcagccagcagctgtgtgacgtcacactgcaggtcaagtaccaggatgcaccggccgcccagttcatggcccacaaggtggtgctggcctcatccagccctgtcttcaaggccatgttcaccaacgggctgcgggagcagggcatggaggtggtgtccattgagggtatccaccccaaggtcatggagcgcctcattgaattcgcctacacggcctccatctccatgggcgagaagtgtgtcctccacgtcatgaacggtgctgtcatgtaccagatcgacagcgttgtccgtgcctgcagtgacttcctggtgcagcagctggaccccagcaatgccatcggcatcgccaacttcgctgagcagattggctgtgtggagttgcaccagcgtgcccgggagtacatctacatgcattttggggaggtggccaagcaagaggagttcttcaacctgtcccactgccaactggtgaccctcatcagccgggacgacctgaacgtgcgctgcgagtccgaggtcttccacgcctgcatcaactgggtcaagtacgactgcgaacagcgacggttctacgtccaggcgctgctgcgggccgtgcgctgccactcgttgacgccgaacttcctgcagatgcagctgcagaagtgcgagatcctgcagtccgactcccgctgcaaggactacctggtcaagatcttcgaggagctcaccctgcacaagcccacgcaggtgatgccctgccgggcgcccaaggtgggccgcctgatctacaccgcgggcggctacttccgacagtcgctcagctacctggaggcttacaaccccagtgacggcacctggctccggttggcggacctgcaggtgccgcggagcggcctggccggctgcgtggtgggcgggctgttgtacgccgtgggcggcaggaacaactcgcccgacggcaacaccgactccagcgccctggactgttacaaccccatgaccaatcagtggtcgccctgcgcccccatgagcgtgccccgtaaccgcatcggggtgggggtcatcgatggccacatctatgccgtcggcggctcccacggctgcatccaccacaacagtgtggagaggtatgagccagagcgggatgagtggcacttggtggccccaatgctgacacgaaggatcggggtgggcgtggctgtcctcaatcgtctcctttatgccgtggggggctttgacgggacaaaccgccttaattcagctgagtgttactacccagagaggaacgagtggcgaatgatcacagcaatgaacaccatccgaagcggggcaggcgtctgcgtcctgcacaactgtatctatgctgctgggggctatgatggtcaggaccagctgaacagcgtggagcgctacgatgtggaaacagagacgtggactttcgtagcccccatgaagcaccggcgaagtgccctggggatcactgtccaccaggggagaatctacgtccttggaggctatgatggtcacacgttcctggacagtgtggagtgttacgacccagatacagacacctggagcgaggtgacccgaatgacatcgggccggagtggggtgggcgtggctgtcaccatggagccctgccggaagcagattgaccagcagaactgtacctgttgaggcacttttgtttcttgggcaaaaatacagtccaatggggagtatcattgtttttgtacaaaaaccgggactaaaagaaaagacagcactgcaaataacccatcttccgggaagggaggccaggatgcctcagtgttaaaatgacatctcaaaagaagtccaaagcgggaatcatgtgcccctcagcggagccccgggagtgtccaagacagcctggctgggaaagggggtgtggaaagagcaggcttccaggagagaggcccccaaaccctctggccgggtaataggcctgggtcccactcacccatgccggcagctgtcaccatgtgatttattcttggatacctgggagggggccaatgggggcctcagggggaggccccctctggaaatgtggttcccagggatgggcctgtacatagaagccaccggatggcacttccccaccggatggacagttattttgttgataagtaaccctgtaattttccaaggaaaataaagaacagactaactagtgtctttcaccctgaaaaaaaaaaaaaa

SEQ ID NO: 14014 - DNA, 1218 bp, Homo sapiens
agatggacggccgccgtgttttgggccggttctggagtggctggcggcggggcctgggtgtccgcccagtgcccgaggacgcaggctttggcaccgaagcccggcatcagaggcaaccccgcggctcctgccaacggtcggggcccctcggggaccagcccttcgcggggctgctgccaaaaaacctcagtcgggaggagctggttgatgcgctgcgggcagccgtggtggaccggaaaggacctctagtgacgttgaacaagccacagggtctaccagtgacaggaaaaccaggagagctgacgttgttctcagtgctgccagagctgagccagtccctagggctcagggagcaggagcttcaggttgtccgagcatctgggaaagaaagctctgggcttgtactcctctccagctgtccccagacagctagtcgcctccagaagtacttcacccatgcacggagagcccaaaggcccacagccacctactgtgctgtcactgatgggatcccagctgcttctgaggggaagatccaggctgccctgaaactggaacacattgatggggtcaatctcacagttccagtgaaggccccatcccgaaaggacatcctggaaggtgtcaagaagactctcagtcactttcgtgtggtagccacaggctctggctgtgccctggtccagctgcagccactgacagtgttctccagtcaactacaggtgcacatggtactacagctctgccctgtgcttggggaccacatgtactctgcccgtgtgggcactgtcctgggccagcgatttctgctgccagctgagaacaacaagccccaaagacaggtcctggatgaagccctcctcagacgcctccacctgaccccctcccaggctgcccagctgcccttgcacctccacctacatcggctccttctcccaggcaccagggccagggacacccctgttgagctcctggcaccactgcccccttatttctccaggaccctacagtgcctggggctccgcttacaatagtcctccctctgttcctgaccccctcacacacactggaaagtgagggtgggggctctgcagtcagacaaacctaagatcacatcctggacaggccacttgcttgctgtgtggcattgggcaagtaactttacctctctggacttgtgataataaaagttcctacctcaaaaaaaaaaaaaaaaaa

SEQ ID NO: 14015 - DNA, 2441 bp, Homo sapiens
gggccacacagcggacccctaagcggaccgctggcaccggtcgggtggcagcagagtgtcgctcgacatgggggaggccggggctggcgctggcgcctcgggagggccggaggcaagcccggaggcagaggtggtgaagctgctgcccttcctggcgccgggcgcgcgggcggacctgcaggcggcggcggtgcggcacgtgctggcgctgactggctgcggacccggccgcgcgctgttggcggggcaggcggcgctgctgcaggcgctgatggagctggcgccggcctctgccccggcccgggacgccgcccgcgcgctcgtgaacttggccgccgaccccggcctgcacgagacattgctggcggccgaccccgggctgccagcgcgcctgatgggccgcgcgttggacccgcagtggccctgggccgaggaggcggccgccgcgctagccaacctcagtcgcgagccggcgccgtgtgcagcgctcatggcggcgctggcggccgcggagccggcagactcgggcctggagcggctggtgcgcgcgctgtgcacgcccggctacaacgcccgcgcgcccctgcactacctagcgccgctgctctccaacctcagccaacgccctgcggcgcgggccttcctactggaccccgacaggtgcgtggtccagcggctgctgccccttacccagtaccccgactcctctgtacgcaggggcggggtggtggggacgctgcggaattgctgcttcgagcaccgacatcacgagtggttgcttggacctgaggtggacattctcccctttttgctcctgcccttggctgggcctgaggatttctccgaggaagagatggaacggctgcctgtcgacttgcagtacctgccaccagacaagcagcgagaacctgatgcagacatccgcaagatgcttgttgaagccatcatgctgctgacagccacagcaccaggtcggcagcaggtgcgggaccagggagcctacctgatccttcgagagctgcacagctgggagccggagcccgacgtgcggacggcttgtgagaagctcatccaggtgcttattggggacgagcctgaacgtggcatggaaaacctgctggaggtgcaggtgcctgaggatgtggagcagcagctgcagcagctggattgcagggagcaggagcagttggagcgggagctggccccagagccatgggtggagagggccacacccacctgaggcccctgcagccggacaccagctccagggtcccctttgccaggctttctcagaccaggccttcctgcagctgtctgcaggccccctgggtccccttgttcagagactgtgctcttctgagaagcagagctacgcttaggctccagtaaggattggaggcactttccagccctgtgcagtgttgctaccagcaagaatgaaggttgtgcagagcagtactgtgaggtaggcaccgtgactcggctgcctgtgcagaaggtggaggtggcaggcggatggccagggagccatgagaagactcttcctgggcacggcgtggggactggacagaaaaccactgcaagccccaaggagccagctgaagcctcccaatccccagggcactgcagagtctgggcagaggtgggcgcataggtacaagtgctgctttgtcagcctcactccctgcagctctcagctccctgttccctgagacctggcctcaaagggctgacccagccatacgtagatcctggggtctttctaggactgtgcctccctgcttgacctatgctccaggaccctgccctcaacccttgtcagctccctaagtcttcctgtttcccagtctcagattgagtgggtgctctcattggcctctctagctaggccgtctccctggtcagcttccttgagcctgggccactcctccctggccttcttacctctgccaagagcctccagatgtgcctgcagcctagtccctgcccaagcttctcccccagccaccctctgcccctgtggtagagcccactataggcccaggcgccttacgtgcttctcccctggacctatgtgcatccctcacctgccagttatgtggctgccaagccccacaggctgtcatggtggctcttgccacacttcccttcctgagctgacctgacctcactgccacctcttgcattgggatcctgagggctggcccctgctcactgatgggccctcccaggcccgtcaagccctggtgaaggagcttagcttgtcttcttggcaattcacaatgcctcactccacaccctaaaactggagcgtcccctatggtctcctgctgtggcttgggtgccgggcgtctcccgcctccaggatctcctctcacctgcccccattaaagctctgccactcaaaaaaaaaaaaaaaaaaaaaaaaaaaaaaaaaaaac

SEQ ID NO: 14016 - DNA, 3535 bp, Homo sapiens
gcagtacacgggaggcttttaattccattgtggagaggacggcgttatttttattaactggaggcgacggcggctgcggcggcggcgggacccgcctcctccggggtatgaaaatcggcagtgggttcctgagtggcggcggaggtaccggcagtagcggtggtagcggctccggcggcggtggtagtggcggcggcggcggcggcggcagcagcggcaggagggcagagatggaacccacctttccccagggtatggttatgttcaaccaccgtcttcccccggtcaccagcttcacccggccggcggggtcggccgcccctcccccgcaatgcgtgttatcctcctctacctccgcagccccggccgctgagcccccccctccgccagccccggacatgactttcaagaaggagccggcggcgtcagccgcggccttcccctcgcagaggacctcctgggggttcttgcagtctttggttagcatcaaacaggagaaacccgcggatcctgaggagcagcagtcccaccaccaccatcaccaccaccactatggggggctgttcgctggagctgaagagaggtctccaggcctaggaggcggtgaaggggggagtcacggcgtcatccaggacctcagtattctccaccagcatgtccagcagcaaccagcccagcaccaccgtgacgtattactcagcagcagtagcaggactgatgaccaccatggcactgaggagccaaagcaggacactaatgtcaaaaaggcaaaaaggccaaagccagaatctcagggaatcaaagccaagaggaagccaagtgcatcttccaaaccttctttggttggagatggagaaggtgccatcctctccccaagtcagaaacctcatatctgtgatcactgtagtgctgctttccgaagctcctatcacctgcggagacatgtcctcattcatacaggagaaagacctttccagtgcagccagtgtagtatgggtttcattcagaaatacctactacagagacatgagaaaattcatagtagagagaagccatttggatgtgatcagtgcagcatgaagtttattcagaagtaccatatggagagacacaagaggacacatagtggagaaaagccatataagtgtgacacttgccaacagtatttttcaaggactgatagattgttgaagcacaggcgcacatgtggtgaagtcatagttaaaggagccactagtgcagaacctgggtcatcaaaccataccaatatgggtaatctggctgtgttgtctcagggaaatacaagttcttcaaggagaaaaacaaagtcaaaaagcatagctattgaaaataaggaacagaagaccggtaaaacaaatgaatcacaaatttcaaataatataaacatgcagagttactcagtagaaatgcctaccgtgtcttccagtggaggcataattggcactggaatagatgaactgcagaagagggtgccaaaattgatctttaagaaaggaagcagaaagaatacagataaaaactaccttaactttgtgtcaccattaccagacatagtaggacagaaatccttgtctggaaaaccaagtggctcacttggcatagtatcaaataatagtgtggagaccattggtcttctccaaagtacaagtggcaaacaaggtcagataagtagtaattatgatgatgccatgcagttttcaaagaaaagaagatatttaccaactgccagcagcaacagtgccttttctataaacgtaggacacatggtctcccaacagtctgtcattcagtctgcaggtgtcagtgttttggacaatgaggcaccattgtcacttattgactcctcagctctaaatgctgaaattaaatcttgtcatgacaagtctggaattcctgatgaggttttacaaagtattttggatcaatactccaacaaatcagaaagccagaaagaggatcctttcaatattgcagaaccacgagtggatttacacacctcaggagaacactcagaattggttcaagaagaaaatttgagcccaggcacccaaacaccttcaaatgataaagcaagtatgttgcaagaatactccaaatacctccaacaggcttttgaaaaatccactaatgcaagttttactcttggacacggtttccaatttgtcagtttgtcttcacctctccacaaccacactttgtttccagaaaaacaaatatacactacgtctcctttggagtgtggtttcggccaatctgttacctcagtgttgccatcttcattgccaaagcctccttttgggatgttgtttggatctcagccaggtctttatttgtctgctttggatgctacacatcagcagttgacaccttcccaggagctggatgatctgatagattctcagaagaacttagagacttcatcagccttccagtcctcatctcagaaattgactagccagaaggaacagaaaaacttagagtcttcaacaggctttcagattccatctcaggagttagctagccagatagatcctcagaaagacatagagcctagaacaacgtatcagattgagaactttgcacaagcgtttggttctcagtttaagtcgggcagcagggtgccaatgacctttatcactaactctaatggagaagtggaccatagagtaaggacttcagtgtcagatttctcagggtatacaaatatgatgtctgatgtaagtgagccatgtagtacaagagtaaagacacccaccagccagagttacaggtaaggtcccaaaagtggccaggctggaggtcttctaatgtaattttgttttattttgagaacactgccattggaatgtttctacacgatcctattaagaataatgtgatgccctttcaatgcaacttttcatatttagtttattttgttagcgtgattttagctctgtttgtattatgatttttaatcaaaatcaatagattaaaaatagtttgacattcaaagtgacaatgtttagcaatcaaatttacatgtatagatcgtcagggaatagcccaaatgttttaaacgcaaaaaaaaagacaaaaaaaaaccaaaaaaaaaaaacctacaaaaaaaactttgttgctaggattaaggttattctaattgctttactctcaggaaagtgtaataacgcatgggaattctgtacgttatcactgtaatggaatatccaatttacagatagtatgatatacatttcatcatttaagtaagggatcgaaaacatttcaaattgctctatctgggctgatagacatttcgtcatttaagtaagggatcgaagacatttcaaattgctatctccatctgggctgatccaaaattctgagattgttggctacctatattttgttgcagcttttaaatgtactctgaacttccaaaccacattcattccagcctggtagaacaaatattcttggatctttgatcaaagcctggaatgatagctttaataaaagaaaaaaaaaaaaaaaa

SEQ ID NO: 14017 - DNA, 7944 bp, Homo sapiens
aaagcggagagtcacagcggggccaggccctggggagcggagcctccaccgcccccctcattcccaggcaagggcttggggggaatgagccgggagagccgggtcccgagcctacagagccgggagcagctgagccgccggcgcctcggccgccgccgccgcctcctcctcctccgccgccgccagcccggagcctgagccggcggggcgggggggagaggagcgagcgcagcgcagcagcggagccccgcgaggcccgcccgggcgggtggggagggcagcccgggggactgggccccggggcggggtgggagggggggagaagacgaagacagggccgggtctctccgcggacgagacagcggggatcatggccgcgcaggtcgcccccgccgccgccagcagcctgggcaacccgccgccgccgccgccctcggagctgaagaaagccgagcagcagcagcgggaggaggcggggggcgaggcggcggcggcggcagcggccgagcgcggggaaatgaaggcagccgccgggcaggaaagcgagggccccgccgtggggccgccgcagccgctgggaaaggagctgcaggacggggccgagagcaatgggggtggcggcggcggcggagccggcagcggcggcgggcccggcgcggagccggacctgaagaactcgaacgggaacgcgggccctaggcccgccctgaacaataacctcacggagccgcccggcggcggcggtggcggcagcagcgatggggtgggggcgcctcctcactcagccgcggccgccttgccgcccccagcctacggcttcgggcaaccctacggccggagcccgtctgccgtcgccgccgccgcggccgccgtcttccaccaacaacatggcggacaacaaagccctggcctggcagcgctgcagagcggcggcggcgggggcctggagccctacgcggggccccagcagaactctcacgaccacggcttccccaaccaccagtacaactcctactaccccaaccgcagcgcctaccccccgcccgccccggcctacgcgctgagctccccgagaggtggcactccgggctccggcgcggcggcggctgccggctccaagccgcctccctcctccagcgcctccgcctcctcgtcgtcttcgtccttcgctcagcagcgcttcggggccatggggggaggcggcccctccgcggccggcgggggaactccccagcccaccgccacccccaccctcaaccaactgctcacgtcgcccagctcggcccggggctaccagggctaccccgggggcgactacagtggcgggccccaggacgggggcgccggcaagggcccggcggacatggcctcgcagtgttggggggctgcggcggcggcagctgcggcggcggccgcctcgggaggggcccaacaaaggagccaccacgcgcccatgagccccgggagcagcggcggcggggggcagccgctcgcccggacccctcagccatccagtccaatggatcagatgggcaagatgagacctcagccatatggcgggactaacccatactcgcagcaacagggacctccgtcaggaccgcagcaaggacatgggtacccagggcagccatacgggtcccagaccccgcagcggtacccgatgaccatgcagggccgggcgcagagtgccatgggcggcctctcttatacacagcagattcctccttatggacaacaaggccccagcgggtatggtcaacagggccagactccatattacaaccagcaaagtcctcaccctcagcagcagcagccaccctactcccagcaaccaccgtcccagacccctcatgcccaaccttcgtatcagcagcagccacagtctcaaccaccacagctccagtcctctcagcctccatactcccagcagccatcccagcctccacatcagcagtccccggctccatacccctcccagcagtcgacgacacagcagcacccccagagccagcccccctactcacagccacaggctcagtctccttaccagcagcagcaacctcagcagccagcaccctcgacgctctcccagcaggctgcgtatcctcagccccagtctcagcagtcccagcaaactgcctattcccagcagcgcttccctccaccgcaggagctatctcaagattcatttgggtctcaggcatcctcagccccctcaatgacctccagtaagggagggcaagaagatatgaacctgagccttcagtcaagaccctccagcttgcctgatctatctggttcaatagatgacctccccatggggacagaaggagctctgagtcctggagtgagcacatcagggatttccagcagccaaggagagcagagtaatccagctcagtctcctttctctcctcatacctcccctcacctgcctggcatccgaggcccttccccgtcccctgttggctctcccgccagtgttgctcagtctcgctcaggaccactctcgcctgctgcagtgccaggcaaccagatgccacctcggccacccagtggccagtcggacagcatcatgcatccttccatgaaccaatcaagcattgcccaagatcgaggttatatgcagaggaacccccagatgccccagtacagttccccccagcccggctcagccttatctccgcgtcagccttccggaggacagatacacacaggcatgggctcctaccagcagaactccatggggagctatggtccccaggggggtcagtatggcccacaaggtggctaccccaggcagccaaactataatgccttgcccaatgccaactaccccagtgcaggcatggctggaggcataaaccccatgggtgccggaggtcaaatgcatggacagcctggcatcccaccttatggcacactccctccagggaggatgagtcacgcctccatgggcaaccggccttatggccctaacatggccaatatgccacctcaggttgggtcagggatgtgtcccccaccagggggcatgaaccggaaaacccaagaaactgctgtcgccatgcatgttgctgccaactctatccaaaacaggccgccaggctaccccaatatgaatcaagggggcatgatgggaactggacctccttatggacaagggattaatagtatggctggcatgatcaaccctcagggacccccatattccatgggtggaaccatggccaacaattctgcagggatggcagccagcccagagatgatgggccttggggatgtaaagttaactccagccaccaaaatgaacaacaaggcagatgggacacccaagacagaatccaaatccaagaaatccagttcttctactacaaccaatgagaagatcaccaagttgtatgagctgggtggtgagcctgagaggaagatgtgggtggaccgttatctggccttcactgaggagaaggccatgggcatgacaaatctgcctgctgtgggtaggaaacctctggacctctatcgcctctatgtgtctgtgaaggagattggtggattgactcaggtcaacaagaacaaaaaatggcgggaacttgcaaccaacctcaatgtgggcacatcaagcagtgctgccagctccttgaaaaagcagtatatccagtgtctctatgcctttgaatgcaagattgaacggggagaagaccctcccccagacatctttgcagctgctgattccaagaagtcccagcccaagatccagcctccctctcctgcgggatcaggatctatgcaggggccccagactccccagtcaaccagcagttccatggcagaaggaggagacttaaagccaccaactccagcatccacaccacacagtcagatccccccattgccaggcatgagcaggagcaattcagttgggatccaggatgcctttaatgatggaagtgactccacattccagaagcggaattccatgactccaaaccctgggtatcagcccagtatgaatacctctgacatgatggggcgcatgtcctatgagccaaataaggatccttatggcagcatgaggaaagctccagggagtgatcccttcatgtcctcagggcagggccccaacggcgggatgggtgacccctacagtcgtgctgccggccctgggctaggaaatgtggcgatgggaccacgacagcactatccctatggaggtccttatgacagagtgaggacggagcctggaatagggcctgagggaaacatgagcactggggccccacagccgaatctcatgccttccaacccagactcggggatgtattctcctagccgctaccccccgcagcagcagcagcagcagcagcaacgacatgattcctatggcaatcagttctccacccaaggcaccccttctggcagccccttccccagccagcagactacaatgtatcaacagcaacagcaggtatccagccctgctcccctgccccggccaatggagaaccgcacctctcctagcaagtctccattcctgcactctgggatgaaaatgcagaaggcaggtcccccagtacctgcctcgcacatagcacctgcccctgtgcagccccccatgattcggcgggatatcaccttcccacctggctctgttgaagccacacagcctgtgttgaagcagaggaggcggctcacaatgaaagacattggaaccccggaggcatggcgggtaatgatgtccctcaagtctggtctcctggcagagagcacatgggcattagataccatcaacatcctgctgtatgatgacaacagcatcatgaccttcaacctcagtcagctcccagggttgctagagctccttgtagaatatttccgacgatgcctgattgagatctttggcattttaaaggagtatgaggtgggtgacccaggacagagaacgctactggatcctgggaggttcagcaaggtgtctagtccagctcccatggagggtggggaagaagaagaagaacttctaggtcctaaactagaagaggaagaagaagaggaagtagttgaaaatgatgaggagatagccttttcaggcaaggacaagccagcttcagagaatagtgaggagaagctgatcagtaagtttgacaagcttccagtaaagatcgtacagaagaatgatccatttgtggtggactgctcagataagcttgggcgtgtgcaggagtttgacagtggcctgctgcactggcggattggtgggggggacaccactgagcatatccagacccacttcgagagcaagacagagctgctgccttcccggcctcacgcaccctgcccaccagcccctcggaagcatgtgacaacagcagagggtacaccagggacaacagaccaggaggggcccccacctgatggacctccagaaaaacggatcacagccactatggatgacatgttgtctactcggtctagcaccttgaccgaggatggagctaagagttcagaggccatcaaggagagcagcaagtttccatttggcattagcccagcacagagccaccggaacatcaagatcctagaggacgaaccccacagtaaggatgagaccccactgtgtacccttctggactggcaggattctcttgccaagcgctgcgtctgtgtgtccaataccattcgaagcctgtcatttgtgccaggcaatgactttgagatgtccaaacacccagggctgctgctcatcctgggcaagctgatcctgctgcaccacaagcacccagaacggaagcaggcaccactaacttatgaaaaggaggaggaacaggaccaaggggtgagctgcaacaaagtggagtggtggtgggactgcttggagatgctccgggaaaacaccttggttacactcgccaacatctcggggcagttggacctatctccataccccgagagcatttgcctgcctgtcctggacggactcctacactgggcagtttgcccttcagctgaagcccaggaccccttttccaccctgggccccaatgccgtcctttccccgcagagactggtcttggaaaccctcagcaaactcagcatccaggacaacaatgtggacctgattctggccacaccccccttcagccgcctggagaagttgtatagcactatggtgcgcttcctcagtgaccgaaagaacccggtgtgccgggagatggctgtggtactgctggccaacctggctcagggggacagcctggcagctcgtgccattgcagtgcagaagggcagtatcggcaacctcctgggcttcctagaggacagccttgccgccacacagttccagcagagccaggccagcctcctccacatgcagaacccaccctttgagccaactagtgtggacatgatgcggcgggctgcccgcgcgctgcttgccttggccaaggtggacgagaaccactcagagtttactctgtacgaatcacggctgttggacatctcggtatcaccgttgatgaactcattggtttcacaagtcatttgtgatgtactgtttttgattggccagtcatgacagccgtgggacacctcccccccccgtgtgtgtgtgcgtgtgtggagaacttagaaactgactgttgccctttatttatgcaaaaccacctcagaatccagtttaccctgtgctgtccagcttctcccttgggaaaaagtctctcctgtttctctctcctccttccacctcccctccctccatcacctcacgcctttctgttccttgtcctcaccttactcccctcaggaccctaccccaccctctttgaaaagacaaagctctgcctacatagaagactttttttattttaaccaaagttactgttgtttacagtgagtttggggaaaaaaaataaaataaaaatggctttcccagtccttgctggctttcccagtccttgcatcaacgggatgccacatttcataactgtttttaatggtaaaaaaaaaaaaaaaaaatacaaaaaaaaattctgaaggacaaaaaaggtgactgctgaactgtgtgtggtttattgttgtacattcacaatcttgcaggagccaagaagttcgcagttgtgaacagaccctgttcactggagaggcctgtgcagtagagtgtagaccctttcatgtactgtactgtacacctgatactgtaaacatactgtaataataatgtctcacatggaaacagaaaacgctgggtcagcagcaagctgtagtttttaaaaatgtttttagttaaacgttgaggagaaaaaaaaaaaaggcttttcccccaaagtatcatgtgtgaacctacaacaccctgacctctttctctcctccttgattgtatgaataaccctgagatcacctcttagaactggttttaacctttagctgcagcggctacgctgccacgtgtgtatatatatgacgttgtacattgcacatacccttggatccccacagtttggtcctcctcccagctacccctttatagtatgacgagttaacaagttggtgacctgcacaaagcgagacacagctatttaatctcttgccagatatcgcccctcttggtgcgatgctgtacaggtctctgtaaaaagtccttgctgtctcagcagccaatcaacttatagtttatttttttctgggtttttgttttgttttgttttctttctaatcgaggtgtgaaaaagttctaggttcagttgaagttctgatgaagaaacacaattgagattttttcagtgataaaatctgcatatttgtatttcaacaatgtagctaaaacttgatgtaaattcctcctttttttccttttttggcttaatgaatatcatttattcagtatgaaatctttatactatatgttccacgtgttaagaataaatgtacattaaatcttggtaa

SEQ ID NO: 14018 - DNA, 5595 bp, Homo sapiens
cgggggacgcgggggacgcgggggacggcggggaacggcgggggacggcggggaacagcgggggacggcggggaacagcgggggacggcggggaacagcaggggactgcgggtcgcgtcctggccgccgaggagctccttcccttaacagagctgagagaggcatctggagctgcagcatggaccagcgagagcccctgcctcccgctcctgcagaaaatgaaatgaaatatgataccaataataatgaagaggaagagggagaacagttcgattttgacagtggagatgaaatcccagaagcggacagacaggccccatccgcccctgagacaggaggtgctggagccagtgaagcccctgcacccacaggaggtgaggatggagctggagcagaaaccaccccagtggcagagcctactaagctggtgctcccgatgaaagtcaacccatattctgtcatcgacatcacgccattccaggaggaccagccgcccacccccgtgcccagcgctgaggaggagaatgtgggtctccatgtgccctgcgggtacttggtgcctgtaccctgcggctatgcggtgccctccaacctgcccctcctgctgcccgcctactccagcccggtcatcatctgcgccacgtccctggacgaagaagaaacaccagaagtcacagaagatcgccagcccaattctctgagttccgaggagcctccaaccagtgaagatcaagtcggtcgagaggacagcgcacttgcccgctgggccgcagacccggccaacacagcctggatggagaatccagaggaagcaatttacgatgacgttccaagggaaaactcagactctgaaccagatgaaatgatttatgatgatgttgagaatggggatgaaggtggaaacagctccttggaatacggatggagttcgagtgaatttgaaagttacgaagagcagagtgactcggagtgcaagaatgggattcccaggtccttcctgcgcagcaaccacaaaaagcaactttctcatgacctaacccgtttaaaggagcactatgagaaaaagatgagagatttgatggcaagcacggtgggcgtggtggagattcagcagctcaggcagaagcatgaactgaagatgcagaagctcgtgaaggccgcgaaggacggcaccaaggacgggctggagaggaccagggcagccgtgaagaggggccgctccttcatcaggaccaagtctctcatcgcacaggatcacagatcttctcttgaggaagaacagaatttgttcattgatgttgactgcaagcacccggaagccatcttgaccccgatgcccgagggtttatctcagcagcaggttgtaagaagatatatactgggttcagttgtcgacagtgaaaagaactacgtagatgctcttaagaggattttggagcaatatgagaagccgctgtctgagatggagccaaaggttctgagtgagaggaagctgaagacggtgttctaccgagtcaaagagatcctgcagtgccactcgctatttcagatcgcgctggccagccgcgtttccgagtgggactccgtggaaatgataggcgatgtcttcgtggcttcgttttctaagtccatggtgctggatgcatacagtgaatatgtgaacaatttcagcacagccgtggcagtcctcaagaaaacatgtgccacaaagcccgcttttcttgaatttttaaagcaggaacaggaggccagccccgatcgaaccacgctctacagcctgatgatgaagcccatccagaggttcccacagttcatcctcctgctccaggacatgctgaagaacacctccaaaggccaccccgacaggctgcctcttcagatggccctgacagagctcgaaacactagcagagaagttaaatgaaagaaagagagatgctgatcaacgctgtgaagtgaagcaaatagccaaagccataaacgaaagatacctgaacaagcttctcagcagtggaagccgatacctcattcgatcagatgatatgatagaaacagtttacaacgacagaggagagattgttaaaaccaaagaacgccgagtcttcatgttaaatgatgtgttaatgtgtgccaccgtcagctcacgcccctctcatgacagccgtgtgatgagcagccagaggtacttgctgaagtggagcgttccactgggacatgtggacgccatcgagtatggcagcagcgcaggcacgggcgagcacagcaggcaccttgccgttcacccgccggagagcctggccgtggttgctaacgcgaaaccaaacaaagtttacatggggccaggacaactgtatcaagatttacaaaacttgttgcatgacttaaatgtaattggccaaatcactcagctgataggaaaccttaaaggaaactatcagaacttaaaccagtcagtagcccatgactggacatcaggtttacaaaggcttattttgaagaaagaagatgaaatcagagctgcggactgctgcagaattcagttacagcttcccgggaagcaggacaaatctgggcgaccgacgttctttacagctgtgttcaatacgttcacccctgccatcaaggagtcctgggtcaacagcttacagatggccaagctcgccctagaagaggagaaccacatgggctggttctgtgtggaagacgatgggaatcacattaaaaaggagaagcatcctctcctcgtcggacacatgcccgtgatggtggccaagcagcaggagttcaagattgaatgtgctgcttataaccctgaaccttacctaaataatgaaagccagccagattcattttccacggcacatggtttcctgtggatcggaagttgcacccatcaaatgggtcagattgccatcgtctcgtttcaaaattccactcccaaagtcattgagtgcttcaacgtggaatctcgcatcctgtgcatgctgtacgttcccgtcgaggagaagcgcagagagcctggggcacccccggaccccgagaccccggccgtgagagcttctgatgtccccacgatctgtgtagggacggaggagggaagcatttccatttataaaagcagtcaaggctccaagaaagtgagacttcagcactttttcactcctgagaagtccacagtcatgagcctggcttgcacgtctcagagcctgtacgctggcctggtcaacggggcagtcgccagctacgccagagccccagatggatcctgggattcagaacctcaaaaagtgatcaagttaggcgtcctaccagttagaagtctactcatgatggaagacacgttgtgggcggcttccggaggtcaagtcttcatcatcagtgtggagactcatgctgtagagggtcagctggaggcccaccaggaggaaggcatggtgatctcccacatggccgtgtccggcgtcgggatctggattgccttcacctcagggtccacgctccgcctttttcacacggaaactctcaagcacctgcaggacatcaacatcgccacccctgttcacaacatgctgccagggcaccagcggctgtcggtgacgagcctgctcgtctgccacggattgctgatggtcggcaccagcctgggagtcctcgtggccctgccggtcccacgtctgcaagggattcccaaagtgaccggaagaggcatggtctcctaccatgcacacaacagtcctgtcaaattcatcgtcctggccacggctctgcacgagaaagacaaggacaaatccagggacagcctggctcctggccccgagcctcaggacgaagaccagaaggacgcacttccgagtggaggagctggttcatctctgagccagggtgaccctgacgcagccatctggttgggagattcgctgggatcgatgactcagaaaagcgacctgtcctcctcatctgggtccctgagcttgtctcacggctccagctctctagagcacagatcagaggacagcaccatctatgatctcctgaaggatcctgtctcgctgagaagcaaagcacgccgggccaagaaagccaaggccagctcggcgctggtggtctgtggagggcagggccaccgccgggtgcacaggaaggcccggcagccccaccaggaagagctggcgccgaccgtcatggtctggcagatccctctgctgaatatataagcaggacggccgccttctgctgtcagaatttgcaatcaagggtgacttctcagctaatcctacagcctgagtggttaagctgtgtctacactggttgggaataaattaaaaacagtatttgggggagaaacgtgcaatagcgtaatggtggtgtccctgccaattccttccttctcttctgtacagcagaagtaattacaagcacttctcacgaaggcagaagactgatgcaattttcgagtaattgagtgcagttctgggaaaataccacattctttttgactgctgtagtccatatatgaatactaaatgttaaacttcatcagcgtcagacctattgtatcatattagagaatttgcagactaagaatttatgagaaaatatatgtattcagtagtgcaggcatttattaacaattcttaaaagttttacctgattcagattcacgacttttatttatattctatatttttgaatttcagagtaaaatttgttaacaattttaaaagccaggtaacacctaccagtccagttagcatgatttgctttcagaagtgagctgggttttccaaagtggtataatgtgtgtactgtatattttaacaaagtaatatttttgtattgcatttttctattaaaaaattaacagttaatgtttcagtcaatgtattatctgtagcatttcacaaataatgtttgctttgaaccaaaatgctcagtgcctatcaacatttggactcaagcatcaacaccaaattattcctcccttctcgtataaatagagtgactatccacaggagaaaagtgtgtgctttagtattagaggagataggcagagaagtcttgcttagttccttcgtgcagcttcttgcccctgttgacgtggaatgctgtgtctgctttagcacgcacgctccgaatgactcctggtgctaggccatgctggctgctgtcactgagcgggactcaggccaagaggcgtgacctcgggccagcctgtctgttgtgcagacgcctcctctgcagaacgcatcagtttctattctgcagttgcagagccagccccgcgtgagaacgtgcataatgagtgcacaccatcatgtcaaggtgcatacttagtgagcgccatcctgctgaacgtgtatttcagtgtttcacttactggacggataacaagaaaaaaatcctaacacaggcaggcaccagaaataaatgtctcagcactttacagatgactaaaaatgttaattttatgacttagccaaatatgttctaggttgcatatatcccccatgtgaaagtgatttcttcccaagcttctcaaactgttagctgctgtctgacttcatcaataaagtatttttattttaaaatgcaaaaa

SEQ ID NO: 14019 - DNA, 2054 bp, Homo sapiens
tttgcctcgatggcactttcctgtccgcgactccgcccccaccagaggggctaggctctgggattcaagatggaggcgctgagtcgagctgggcaggagatgagcctagcggccctgaagcaacacgacccctatatcaccagcatcgcagacctcacgggccaggtcgctctgtacaccttctgccccaaggccaaccagtgggagaagactgatatagaagggaccttattcgtatatcgaaggtcagcttccccttaccatggttttaccattgtgaatcgactaaatatgcacaatctagttgaaccagtgaataaagatttggaatttcagctccatgaaccatttcttctgtatagaaatgcaagcttgtcgatatatagtatctggttttatgacaagaatgactgtcaccgcatagcaaaactcatggctgatgtggtagaagaggagacacggcgatcccagcaagctgctcgggacaaacagagtcccagccaggccaatggctgcagcgaccacaggcccatcgacatcctggagatgctgagcagagccaaggatgagtatgagaggaatcagatgggtgactcaaatatctccagccctgggttacagccaagcactcagctctccaatctgggaagcaccgagactctagaagaaatgccctccgggtcacaggataagtctgctccatctggacacaagcatctgacggtagaagagttatttggaacctctttgccaaaggaacaaccagcagttgtgggtctggattcagaagaaatggagaggttgccaggagatgcctcccagaaagagcccaattcattcctaccatttccctttgagcagttaggaggagcccctcaatcagaaaccctgggtgtcccttctgctgcccaccattcagtccagcctgaaatcaccaccccggtgctaatcactccagcctccatcacacagtccaatgaaaagcatgctccaacctacacaatcccgttgagccctgttctcagtcccactctgccagctgaagctcctactgcacaggttccccccagcttacctcgaaacagcaccatgatgcaggcagtgaagaccacgcctagacagaggtctccactcctgaaccagccagtccctgagctaagccatgccagtctgattgccaaccagagccccttcagggccccattgaacgtgacgaacacagctggcacatccctcccaagcgttgatcttctccagaaactcaggttgaccccacagcatgaccaaatacagacacaaccacttgggaaaggtgcaatggtagccagcttttctccggcagctggtcagctagccacacctgagagcttcatagagcctccctctaagacagcagcagcaagagtggcggcctcagcctccctgagcaacatggtgcttgctccccttcagtctatgcagcagaaccaggatcctgaagtatttgtgcagcctaaggtgttatccagtgccatccaggttgcaggcgccccactggttactgcaacgaccactgcagtgtcttcagtcctgctggccccaagtgttttccagcagacagttacaagatcttcggaccttgagaggaaagccagctccccttctcctctaactattggaacgccagaaagtcagagaaagccttccattattctcagcaagtctcagctccaggatacattaatacatctaataaagaatgattccagcttcctcagtacacttcatgaagtctacttgcaggttctgaccaagaacaaagacaaccacaacctatgactggagcagaataagtctaaaggcagagccccagcctcagagacaaataggcttcatcatggaaacttctgagcagaacattgagtttgagaatcctgaaattgagcctatgagaaagagactcatttcttaagaatgttttccaagtgacattctcagtgataatggaggtttcactgtgaagcatcaccagcagatccttgttttgacaaaaaaaaaaaaaaaaaaaaaaaaaa

SEQ ID NO: 14020 - DNA, 5147 bp, Homo sapiens
aggcagcagcagagggagagctcggggcttggaggggaaacagcggaagacctaagattatcgggagggcagcagaggcagagaacgaggacaggacccttggccgtcttcttccagggaacgagaggtcacagcctcgctctccgcttatgcttctggcgccccagcttaaagccgaggctgcggctgacaaagggctcgcgccggtgccgccgcccttctcatccgggcattcgggtccctgcgagaaggagggggaaggacagagggggaggggaaggagccggaggggcgcacacttggagctgaagccctctccagggctccgggccggtgccccaacggacagaggtcgaggaggacccgcagaggtggcagcggccgggggcaggaggatggtgcagaaggagagtcaagcgacgttggaggagcgggagagcgagctcagctccaaccctgccgcctctgcgggggcatcgctggagccgccggcagctccggcacccggagaagacaaccccgccggggctgggggagcggcggtggccggggctgcaggaggggctcggcggttcctctgcggtgtggtggaaggattttatggaagaccttgggttatggaacagagaaaagaactctttagaaggctccagaaatgggaattaaatacatacttgtatgccccaaaagatgactacaaacataggatgttttggcgagagatgtattcagtggaggaagctgagcaacttatgactctcatctctgctgcacgagaatatgagatagagttcatctatgcgatctcacctggattggatatcactttttctaaccccaaggaagtatccacattgaaacgtaaattggaccaggtttctcagtttgggtgcagatcatttgctttgctttttgatgatatagaccataatatgtgtgcagcagacaaagaggtattcagttcttttgctcatgcccaagtctccatcacaaatgaaatctatcagtacctaggagagccagaaactttcctcttctgtcccacagaatactgtggcactttctgttatccaaatgtgtctcagtctccatatttaaggactgtgggtgaaaagcttctacctggaattgaagtgctttggacaggtcccaaagttgtttctaaagaaattccagtagagtccatcgaagaggtttctaagattattaagagagctccagtaatctgggataacattcatgctaatgattatgatcagaagagactgtttctgggcccgtacaaaggaagatccacagaactcatcccacggttaaaaggagtcctcactaatccaaattgtgaatttgaagccaactacgttgctatccacacccttgccacctggtacaaatcaaacatgaatggagtgagaaaagatgtagtgatgactgacagtgaagatagtactgtgtccatccagataaaattagaaaatgaaggcagtgatgaagatattgaaactgatgtactctatagtccacagatggctctaaagctagcattaacagaatggttgcaagagtttggtgtgcctcatcaatacagcagtaggcaagttgcacacagtggagctaaagcaagtgtagttgatgggactcctttagttgcagcaccctctttaaatgccacaaccgtagtaacaacagtttatcaggagcccattatgagccagggagcagccttgagtggtgagcctactactctgaccaaggaagaagaaaagaaacagcctgatgaagaacccatggacatggtggtggaaaaacaagaagaaacggaccacaagaatgacaatcaaatactgagtgaaattgttgaagcgaaaatggcagaggaattgaaaccaatggacactgataaagagagcatagctgaatcaaaatccccagagatgtccatgcaagaagattgtattagtgacattgcccccatgcaaactgatgaacagacaaacaaggagcagtttgtgccaggtccaaatgaaaagcctttgtacactgcggaaccagtgaccctggaggatttgcagttacttgctgatctattctaccttccttacgagcatggacccaaaggagcacagatgttacgggaatttcaatggcttcgagcaaatagtagtgttgtcagtgtcaattgcaaaggaaaagactctgaaaaaattgaagaatggcggtcacgagcagccaagtttgaagagatgtgtggactagtgatgggaatgttcactcggctctccaattgtgccaacaggacaattctttatgacatgtactcctatgtttgggatatcaagagtataatgtctatggtgaagtcttttgtacagtggttagggtgtcgtagtcattcttcagcacaattcttaattggagaccaagaaccctgggcctttagaggtggtctagcaggagagttccagcgtttgctgccaattgatggggcaaatgatctcttttttcagccacctccactgactcctacctccaaagtttatactatcagaccttattttcctaaggatgaggcatccgtgtacaagatttgcagagaaatgtatgacgatggagtgggtttaccctttcaaagtcagcctgatcttattggagacaagttagtaggagggctgctttccctcagcctggattactgctttgtcctagaagatgaagatggcatatgtggttatgccttgggcactgtagatgtgaccccctttattaaaaaatgtaaaatttcctggatccccttcatgcaggagaagtataccaagccaaatggtgacaaggaactctctgaggctgagaaaataatgttgagtttccatgaagaacaggaagtactgccagaaactttccttgctaatttcccttctctgataaagatggacattcacaaaaaagtaactgacccaagtgtggccaaaagcatgatggcttgcctcctgtcttcactgaaggctaatggctcccggggagctttctgtgaagtgagaccagatgataaaagaattctggaattttacagcaagttaggatgttttgaaattgcaaaaatggaaggatttccaaaggatgtggttatacttggtcggagcctgtgacatttgttgacactgtgaactgtccaaaagtctcttaactgcaccttgtgaatggtagttgaggtcttcatacagttcagcctctagaatggtaacaaatcagccaattggattcgaaacaaagaagactatgtaaaactcacccatcacactttgagactactcactggttggaagaatatagtattgcagcaaatcctgtatgaaagagagatgtgggcttcctttttgagtcttgtgttaggtgctgagaccttttacatgggcttatacagggagagagtcttcaataaatgtagtcagcactattttctgcatccagtgtggttgcgtttctcacctgagagtaatcaagataacatctgtcatcttccttggtttattgagtgaaatgcctctcagtcttaggggacatggcagagatgaaagaaagaaagagtgggtttcagaagtgtcagggtggagtgattccaagtgggatggttgtggcattagtttaagctgaataaataatttcaatttggggcagttattctgctttttgtaaagccgtggccaattgtctcctgtaatgactgttggttcaggcatgttgtactttgtagggacaaatgtgcatttgtttgtggcaaaagcctacaattgacaaacttgtaaatttctttgtatataaactagctgtaacctgactatcctttgtgtttactgtttttgtaaatttttttcctctataaatgaaagggtgttggttcagaatggcactttgaataatgtaaaccagtgaaaagtggattttctttacttttgtctttgggtttggggttgtttttgttctttttgaagttttattatttttaaagtgcctcccacctaggcgtaggccatgaccatttggggtacgagagcctaattttgtaggacttaatctgttgaaaagtgcagttacttctggaaattaacctcaatattaggtcagcatgtgaaatgttggatttgacatgtcaggtagggttcagggactgattggtcccatttgccctcaggtcagttgtttaatctcaagacctgttactactgattttattaaatcagagtctttaattcttgcatgtttgtatctaatttctgaacgaatgagcacactttaaccagttatttacagttacctttttcctttaaccggattgtgaaagcttcatgtattttaatttagattctgtgtttttaagggttctgagcatgaagctggcagatagtcggcaggactcattttttcatcatggctggctgatttctccatagattgataacagtattttgttatcttgcttctctgtagttttgcatcagctgtttaactttgagctgagtgaggggagaggggtaaagagaaagaaacttaagttttctttcacagaactccaccattgtgggctttgagagagccctaaagcattgtacctagtggtacctagtgacttccaaccaaagcctttgagtatgcactaaataggtgagaagaaaggagagaaggtttttaggttagaaacctttaaccgatagaaggatatggtatgttgtaaagctggaaccaagtttgcatttttgagggcttgagatgaagggaagactcttaccagatagtaagacagctgagttttcctcagttttctcgtcttaacactagtggacaattctagcattttgtttggaggatttcagagttaacctcatggaattcaggattttttagcaagtttgcttttggttttatcttggcttttagtaatcatgttggctggtctggtcacaggtgactgtgaaacagatgcccctggtcttgctttcatcactctaggatcatgaagtgctatgctatttcctggttatgaatattaaggttggaattacatttttattgattgtttggatcagagctcagttcctgtagaaaacgaactgtaaaagaccatgcaagaggcaaaataaaacttgaagtgg

SEQ ID NO: 14021 - DNA, 3181 bp, Homo sapiens
gtcgacggccattaccaatcgcgaaaccccgcaacctgtcgctcaggttcctcctctcccggccccgccccggcccggccccgccgagcgtcccacccgcccgcgggagacctggcgccccggccgaggcgcgaacagacggacgcaccggcgagcgccgaggggacaggccgagcgcggggcgccggaggcaggtgtgggacaggcactggcctcagaccggggccacactgaggtctgcccttctcccgctggccgccacccaagacaccatgagccagtccggggccgtgagctgctgcccgggtgccaccaatggcagcctgggccggtccgacggtgtggccaagatgagccccaaggacctgtttgagcagaggaagaagtattccaactccaacgtcatcatgcacgagacctcgcagtaccacgtccagcacctggccacattcatcatggacaagagcgaagccatcacgtctgtggacgacgccatccggaagctggtgcagctgagctccaaggagaagatctggacccaggagatgctgctgcaggtgaacgaccagtcgttgcggctgctggacatcgagtcacaggaggagctggaagacttcccgctgcccacggtgcagcgcagccagacggtcctcaaccagctgcgctacccgtctgtgctgctgctcgtgtgccaggactcggagcagagcaagccggatgtccacttcttccactgcgatgaggtggaggcagagctggtgcacgaggacatcgagagcgcgttggccgactgccggctgggcaagaagatgcggccgcagaccctgaagggacaccaggagaagattcggcagcggcagtccatcctgcctcctccccagggcccggcgcccatccccttccagcaccgcggcggggattccccggaggccaagaatcgcgtgggcccgcaggtgccactcagcgagccaggtttccgccgtcgggagtcgcaggaggagccgcgggccgtgctggctcagaagatagagaaggagacgcaaatcctcaactgcgccctggacgacatcgagtggtttgtggcccggctgcagaaggcagccgaggctttcaagcagctgaaccagcggaaaaaggggaagaagaagggcaagaaggcgccagcagagggcgtcctcacactgcgggcacggcccccctctgagggcgagttcatcgactgcttccagaaaatcaagctggcgattaacttgctggcaaagctgcagaagcacatccagaaccccagcgccgcggagctcgtgcacttcctcttcgggcctctggacctgatcgtcaacacctgcagtggcccagacatcgcacgctccgtctcctgcccactgctctcccgagatgccgtggacttcctgcgcggccacctggtccctaaggagatgtcgctgtgggagtcactgggagagagctggatgcggccccgttccgagtggccgcgggagccacaggtgcccctctacgtgcccaagttccacagcggctgggagcctcctgtggatgtgctgcaggaggccccctgggaggtggaggggctggcgtctgcccccatcgaggaggtgagtccagtgagccgacagtccataagaaactcccagaagcacagccccacttcagagcccacccccccgggggatgccctaccaccagtcagctccccacatactcacaggggctaccagccaacaccagccatggccaagtacgtcaagatcctgtatgacttcacagcccgaaatgccaacgagctatcggtgctcaaggatgaggtcctagaggtgctggaggacggccggcagtggtggaagctgcgcagccgcagcggccaggcggggtacgtgccctgcaacatcctaggcgaggcgcgaccggaggacgccggcgccccgttcgagcaggccggtcagaagtactggggccccgccagcccgacccacaagctacccccaagcttcccggggaacaaagacgagctcatgcagcacatggacgaggtcaacgacgagctcatccggaaaatcagcaacatcagggcgcagccacagaggcacttccgcgtggagcgcagccagcccgtgagccagccgctcacctacgagtcgggtccggacgaggtccgcgcctggctggaagccaaggccttcagcccgcggatcgtggagaacctgggcatcctgaccgggccgcagctcttctccctcaacaaggaggagctgaagaaagtgtgcggcgaggagggcgtccgcgtgtacagccagctcaccatgcagaaggccttcctggagaagcagcaaagtgggtcggagctggaagaactcatgaacaagtttcattccatgaatcagaggaggggggaggacagctaggcccagctgccttgggctggggcctgcggaggggaagcccacccacaatgcatggagtattatttttatatgtgtatgtattttgtatcaaggacacggagggggtgtggtgctggctagaggtccctgcccctgtctggaggcacaacgcccatccttaggccaaacagtacccaaggcctcagcccacaccaagactaatctcagccaaacctgctgcttggtggtgccagccccttgtccaccttctcttgaggccacagaactccctggggctggggcctctttctctggcctcccctgtgcacctggggggtcctggcccctgtgatgctcccccatccccacccacttctacatccatccacaccccagggtgagctggagctccaggctggccaggctgaacctcgcacacacgcagagttctgctccctgaggggggcccgggaggggctccagcaggaggccgtgggtgccattcgggggaaagtgggggaacgacacacacttcacctgcaagggccgacaacgcaggggacaccgtgccggcttcagacactcccagcgcccactcttacaggcccaggactggagctttctctggccaagtttcaggccaatgatccccgcatggtgttgggggtgctggtgtgtcttggtgcctggacttgagtctcaccctacagatgagaggtggctgaggcaccagggctaagcaattaaaccagttaagtctcccaggaaaaaaaaaaaaaaaa

SEQ ID NO: 14022 - DNA, 736 bp, Homo sapiens
cgagctggagaggtggtcggagaagtaggaacctcctgccgggctcgtggcggcttctgtccgctccgcggagggaagcgccttccccacaggacatcaatgcaagcttgaataagaaaaacaaattcttcctcctaagccatggcatatcagttatacagaaatactactttgggaaacagtcttcaggagagcctagatgagctcatacagtctcaacagatcaccccccaacttgcccttcaagttctacttcagtttgataaggctataaatgcagcactggctcagagggtcaggaacagagtcaatttcaggggctctctaaatacgtacagattctgcgataatgtgtggacttttgtactgaatgatgttgaattcagagaggtgacagaacttattaaagtggataaagtgaaaattgtagcctgtgatggtaaaaatactggctccaatactacagaatgaatagaaaaaatatgacttttttacaccatcttctgttattcattgcttttgaagagaagcatagaagagactttttatttattctagaattgcagaaatgactacactgtgctataccagagaattccagtagaaagaaacttgtaactctgtagcctcttacatcacctttattatacagcatgaaaaaccataacttttttttaaggacaaaagttgttgccttcctaagaaccttctttaataaactcattttaaaactctg

SEQ ID NO: 14023 - DNA, 13290 bp, Homo sapiens
gaagcgcctgtgctctgccgagactgccgtgcccattgctcgcctcggtcgccgccgctttagccgcctccgggggagcggccgcctattgtctttctccgcggcgaaggtgaagagttgtcccagctcggcccgcgggggagccccgggagccgcacgtgtcctgggtcatgaaacttaatccacagcaagctcccttatatggtgattgtgttgttacagtgctgcttgctgaagaggacaaagctgaagatgatgtagtgttttacttggtatttttgggttccaccctccgtcactgtacaagtactcggaaggtcagttctgatacattggagaccattgctcctggtcatgattgttgtgaaacagtgaaggtgcagctctgtgcttccaaagagggccttcccgtgtttgtggtggctgaagaagactttcatttcgtccaggatgaagcgtatgatgcagctcaattcctagcaaccagtgctggaaatcagcaggctttgaactttacccgttttcttgaccagtcaggacccccatctggggatgtgaattcccttgataagaagttggtgctggcattcaggcacctgaagctgcccacggagtggaatgtattggggacagatcagagtttgcatgatgctggcccgcgagagacattgatgcattttgctgtgcggctgggactgctgaggttgacgtggttcctgttgcagaagccaggtggccgcggagctctcagtatccacaaccaggaaggggcgacgcctgtgagcttggccttggagcgaggctatcacaagctgcaccagcttctaaccgaggagaatgctggagaaccagactcctggagcagtttatcctatgaaataccgtatggagactgttctgtgaggcatcatcgagagttggacatctatacattaacctctgagtctgattcacatcatgaacacccatttcctggagacggttgcactggaccaatttttaaacttatgaacatccaacagcaactaatgaaaacaaacctcaagcagatggacagtcttatgcccttaatgatgacagcacaggatccttccagtgccccagagacagatggccagtttcttccctgtgcaccggagcccacggaccctcagcgactttcttcttctgaagagactgagagcactcagtgctgcccagggagccctgttgcacagactgaaagtccctgtgatttgtcaagcatagttgaggaggagaatacagaccgttcctgtaggaagaaaaataaaggcgtggaaagaaaaggggaagaggtggagccagcacctattgtggactctggaactgtatctgatcaagacagctgccttcagagcttgcctgattgtggagtaaagggcacggaaggcctttcgtcctgtggaaacagaaatgaagaaactggaacaaaatcttctggaatgcccacagaccaggagtccctgagcagtggagatgctgtgcttcagagagacttggtcatggagccaggcacagcccagtattcctctggaggtgaactgggaggcatttcaacaacaaatgtcagtaccccagacactgcaggggaaatggaacatgggctcatgaacccagatgccactgtttggaagaatgtgcttcagggaggggaaagtacaaaggaaagatttgagaactctaatattggcacagctggagcctctgacgtgcacgtcacaagtaagcctgtggataaaatcagtgttccaaactgtgcccctgctgccagttccctggatggtaacaaacctgctgagtcttcacttgcatttagtaatgaagaaacctccactgaaaaaacagcagaaacggaaacttcacgaagtcgtgaggagagtgctgatgctccagtagatcagaattctgtggtgattccagctgctgcaaaagacaagatttcagatggattagaaccttatactctcttagcagcaggcataggtgaggcaatgtcaccctcagatttagcccttcttgggctggaagaagatgtaatgccacaccagaactcagaaacaaattcatctcatgctcaaagccaaaagggcaaatcctcacccatttgttctacaactggagacgataaactttgtgcagactctgcatgtcaacagaacacagtgacttctagtggcgatttggttgcaaaactgtgtgataacatagttagcgagtccgaaagcaccacagcaaggcaacccagctcacaagatccacccgatgcctcccactgtgaagacccacaggctcatacagtcacctctgaccctgtaagggatacccaggaacgtgcggatttttgtcctttcaaagtggtggataacaaaggccaacgaaaagatgtgaaactagataaacctttaacaaatatgcttgaggtggtttcacatccacatccagttgtccctaaaatggagaaagaactggtgccagaccaggcagtaatatcagacagtactttctctctggcaaacagtccaggcagtgaatcagtaaccaaggatgacgcactttcttttgtcccctcccagaaagaaaagggaacagcaactcctgaactacatacagctacagattatagagatggcccagatggaaattcgaatgagcctgatacgcggccactagaagacagggcagtaggcctgtccacatcctccactgctgcagagcttcagcacgggatggggaataccagtctcacaggacttggtggagagcatgagggtcccgcccctccagcaatcccagaagctctgaatatcaaggggaacactgactcttccctgcaaagtgtgggtaaggccactttggctttagattcagttttgactgaagaaggaaaacttctggtggtttcagaaagctctgcagctcaggaacaagataaggataaagcggtgacctgttcctctattaaggaaaatgctctctcttcaggaactttgcaggaagagcagagaacaccacctcctggacaagatactcaacaatttcatgaaaaatcaatctcagctgactgtgccaaggacaaagcacttcagctaagtaattcaccgggtgcatcctctgcctttcttaaggcagaaactgaacataacaaggaagtggccccacaagtctcactgctgactcaaggtggggctgcccagagcctggtgccaccaggagcaagtctggccacagagtcaaggcaggaagccttgggggcagagcacaacagctccgctctgttgccatgtctgttgccagatgggtctgatgggtccgatgctcttaactgcagtcagccttctcctctggatgttggagtgaagaacactcaatcccagggaaaaactagtgcctgtgaggtgagtggagatgtgacggtggatgttacaggggttaatgctctacaaggtatggctgagcccagaagagagaatatatcacacaacacccaagacatcctgattccaaacgtcttgttgagccaagagaagaatgccgttctaggtttgccagtggctctacaggacaaagctgtgactgacccacagggagttggaaccccagagatgatacctcttgattgggagaaagggaagctggagggagcagaccacagctgtaccatgggtgacgctgaggaagcccaaatagacgatgaagcacatcctgtcctactgcagcctgttgccaaggagctccccacagacatggagctctcagcccatgatgatggggccccagctggtgtgagggaagtcatgcgagccccgccttcaggcagggaaaggagcactccctctctaccttgcatggtctctgcccaggacgcacctctgcctaagggggcagacttgatagaggaggctgccagccgtatagtggatgctgtcatcgaacaagtcaaggccgctggagcactgcttactgagggggaggcctgtcacatgtcactgtccagccctgagttgggtcctctcactaaaggactagagagtgcttttacagaaaaagtgagtactttcccacctggggagagcctaccaatgggcagtactcctgaggaagccacggggagccttgcaggatgttttgctggaagggaggagccagagaagatcattttacctgtccaggggcctgagccagcagcagaaatgccagacgtgaaagctgaagatgaagtggattttagagcaagttcaatttctgaagaagtggctgtagggagcatagctgctacactgaagatgaagcaaggcccaatgacccaggcgataaaccgagaaaactggtgtacaatagagccatgccctgatgcagcatctcttctggcttccaagcagagcccagaatgtgagaacttcctggatgttggactgggcagagagtgtacctcaaaacaaggtgtacttaaaagagaatctgggagtgattctgacctctttcactcacccagtgatgacatggacagcatcatcttcccaaagccagaggaagagcatttggcctgtgatatcaccggatccagttcatccaccgatgacacggcttcactggaccgacattcttctcatggcagtgatgtgtctctctcccagattttaaagccaaacaggtcaagagatcggcaaagccttgatggattctacagccatgggatgggagctgagggtcgagaaagtgagagtgagcctgctgacccaggcgacgtggaggaggaggagatggacagtatcactgaagtgcctgcaaactgctctgtcctaaggagctccatgcgctctctttctcccttccggaggcacagctgggggcctgggaaaaatgcagccagcgatgcagaaatgaaccaccggagttcaatgcgagttcttggggatgttgtcaggagacctcccattcataggagaagtttcagtctagaaggcttgacaggaggagctggtgtcggaaacaagccatcctcatctctagaagtaagctctgcaaatgccgaagagctcagacacccattcagtggtgaggaacgggttgactctttggtgtcactttcagaagaggatctggagtcagaccagagagaacataggatgtttgatcagcagatatgtcacagatctaagcagcagggatttaattactgtacatcagccatttcctctccattgacaaaatccatctcattaatgacaatcagccatcctggattggacaattcacggcccttccacagtaccttccacaataccagtgctaatctgactgagagtataacagaagagaactataatttcctgccacatagcccctccaagaaagattctgaatggaagagtggaacaaaagtcagtcgtacattcagctacatcaagaataaaatgtctagcagcaagaagagcaaagaaaaggaaaaagaaaaagataagattaaggagaaggagaaagattctaaagacaaggagaaagataagaagactgtcaacgggcacactttcagttccattcctgttgtgggtcccatcagctgtagccagtgtatgaagcccttcaccaacaaagatgcctatacttgtgcaaattgcagtgcttttgtccacaaaggctgccgagaaagtctagcctcctgtgcaaaggtcaaaatgaagcagcccaaagggagccttcaggcacatgacacatcatcactgcccacggtcattatgagaaacaagccctcacagcccaaggagcgtcctcggtccgcagtcctcctggtggatgaaaccgctaccaccccaatatttgccaatagacgatcccagcagagtgtctcgctctccaaaagtgtctccatacagaacattactggagttggcaatgatgagaacatgtcaaacacctggaaattcctgtctcattcaacagactcactaaataaaatcagcaaggtcaatgagtcaacagaatcacttactgatgagggagtaggtacagacatgaatgaaggacaactactgggagactttgagattgagtccaaacagctggaagcagagtcttggagtcggataatagacagcaagtttctaaaacagcaaaagaaagatgtggtcaaacggcaagaagtaatatatgagttgatgcagacagagtttcatcatgtccgcactctcaagatcatgagtggtgtgtacagccaggggatgatggcggatctgctttttgagcagcagatggtagaaaagctgttcccctgtttggatgagctgatcagtatccatagccaattcttccagaggattctggagcggaagaaggagtctctggtggataaaagtgaaaagaactttctcatcaagaggataggggatgtgcttgtaaatcagttttcaggtgagaatgcagaacgtttaaagaagacatatggcaagttttgtgggcaacataaccagtctgtaaactacttcaaagacctttatgccaaggataagcgttttcaagcctttgtaaagaagaagatgagcagttcagttgttagaaggcttggaattccagagtgcatattgcttgtaactcagcggattaccaagtacccagttttattccaaagaatattgcagtgtaccaaagacaatgaagtggagcaggaagatctagcacagtccttgagcctggtgaaggatgtgattggagctgtagacagcaaagtggcaagttatgaaaagaaagtgcgtctcaatgagatttatacaaagacagatagcaagtcaatcatgaggatgaagagtggtcagatgtttgccaaggaagatttgaaacggaagaagcttgtacgtgatgggagtgtgtttctgaagaatgcagcaggaaggttgaaagaggttcaagcagttcttctcactgacattttagttttccttcaagaaaaagaccagaagtacatctttgcatcattggaccagaagtcaacagtgatctctttaaagaagctgattgtgagagaagtggcacatgaggagaaaggtttattcctgatcagcatggggatgacagatccagagatggtagaagtccatgccagctccaaagaggaacgaaacagctggattcagatcattcaggacacaatcaacaccctgaacagagatgaagatgaaggaattcctagtgagaatgaggaagaaaagaaaatgttggacaccagagcccgagaattaaaagaacaacttcaccagaaggaccaaaaaatcctactcttgttggaagagaaggagatgattttccgggacatggctgagtgcagcacccctctcccagaggattgctccccaacacatagccctagagttctcttccgctccaacacagaagaggctctcaaaggaggacctttaatgaaaagtgcaataaatgaggtggagatccttcagggtttggtgagtggaaatctgggaggcacacttgggccgactgtcagcagccccattgagcaagatgtggtcggtcccgtttccctgccccggagagcagagacctttggaggatttgacagccatcagatgaatgcttcaaaaggaggcgagaaggaagagggagatgatggccaagatcttaggagaacggaatcagatagtggcctaaaaaagggtggaaatgctaacctggtatttatgcttaaaagaaacagtgagcaggttgtccagagcgttgttcatctctacgagctcctcagcgctctgcagggtgtggtgctgcagcaggacagctacattgaggaccagaaactggtgctgagcgagagggcgctcactcgcagcttgtcccgcccgagctccctcattgagcaggagaagcagcgcagcctggagaagcagcgccaggacctggccaacctgcagaagcagcaggcccagtacctcgaggagaagcgcaggcgcgagcgtgagtgggaagctcgtgagagggagctgcgggagcgggaggccctcctggcccagcgcgaggaggaggtgcagcaggggcagcaggacctggaaaaggagcgggaggagctccagcagaagaagggcacataccagtatgacctggagcgactgcgtgctgcccagaaacagcttgagagggaacaggagcagctgcgccgggaggcagagcggctcagccagcggcagacagaacgggacctgtgtcaggtttcccatccacataccaagctgatgaggatcccatcgttcttccccagtcctgaggagcccccctcgccatctgcaccttccatagccaaatcagggtcattggactcagaactttcagtgtccccaaaaaggaacagcatctctcggacacacaaagataaggggccttttcacatactgagttcaaccagccagacaaacaaaggaccagaagggcagagccaggcccctgcgtccacctctgcctctacccgcctgtttgggttaacaaagccaaaggaaaagaaggagaaaaaaaagaagaacaaaaccagccgctctcagcccggtgatggtcccgcgtcagaagtatcagcagagggtgaagagatcttctgctgaccctcttcctctctgctgaggcagctgcctcctgatcctggccagcccacctctcctgctgtccccgcgtgcacaagtctcttacactggacgcccactgctcctcagcgtccagtcctcctgggcggccccaggtcctggacaataagcaacagatgatattgagtgtcgggtggggaaggaggcccagactctgcttcggccatgatttgtgactgcccaggactctcaggttgggctggccctactcaggattacactgaaagtaatggcctcgtaagtacaggtgatggttttggacacgtcaggaattcctaaaggctgaaagagtgtatccaagtaaggtctgaacctccgaatgccttttatttgggggaacacaaaaccaaacagcagatgttttggacttgatctgtgtacgtacatggggacctgtctgcatatacacacggggaatgccagaagaaggcccagtctgcaccaggcgtctggtcaacttagcacaagggcagtgcctggacggacccggagcccccgcatatcagcagttcacccagtactcctcagagactggtttccctctaaacccatcccgggcacataccacccgtgttttgcatgtatttctcatttcattttagggatgacaaacatttgtgaaaccagtgagagaaggcttgatgtgtataaaagacgtgatgtgcaccacctcgatctcggtgtttcaggcactaaagcaacaaaacaacccatagtatctcattctgtcatcagatccagaagaaatatcctggttttccagcatgtttacccacatgttttggccatggataaagtgaagaggcctactcaccattatccctgcagcgtgacaccttttgattgtcactgaccactcagaaggggccacggcctcctggctgtgttcctgagcccccgtcgtgcctctcccagacagcagctgtctggcccttgctgggtgagggcacaccactgccaggggtcagcctcgcacccaggccaggcagaagctgtgctctgaagctaggacagctggctgagaagtgggttcaggcgaagggtgaagccatgtgtagcagttcctgccagtgcagatctggagaggagctggcccggaaggcgtggttgtgaaagcgcccttcttatgttaggaggccttggcaaaattggatttcttcaaaaatacatgtaaaggtctgttgttgaattgtactctgcccctggaagcagatacagatggctgcctgctgctcggctttgcttttgcttttcccaccgtgttttcatctttgttcacttgaggctttccccagctggtgtgtgcaggacagttcatggtaatgttgccctctgaggccccgtacaccagaagggaggccctggaaaattttgtgcttccaacgtggccttcaattcttgcttttttgcccctcggaagcatggggcttttgagcacacttaaaaaaagaaaaatctgtaacttggtgcttattgatgaattgcaagctggccttgcagatggagatatttatctttcagtttatttgaaagaggtctggtttaaaatttgtagcctacatttgttttatttattgtatttgtgtgtttgtgtttgtttttttttaagggtgagccaggtctagcccaacagtctaaactatccagtcaataccgagtgaagtggcagccagcactgttcactctgtgtcttttgaagtgccttgaaggcccagatgaaattttaaagggagggggtccatgtccttccctcccccaccccgcctcattctttaatcaaaggatgtcttctcccttgtttgagaatgaagaaactcgccacctctgacctacctttgcctttttctgtcatggagaatactcacccttcagaaacagaccaaaggccaaaacctgctgatttttctattgaaaatatgtccccttgcaaagaccctaaacaaaaagttaagtttctttctttcacctatttgtacaactccaagttacagctgaatctgtcgtgactttcctgagatctacccggggcttggctgtctgttctgggcactggctccgagttcccctcctgggatttgcaggagggcagtactgaacctgcattcttctccttgtaaatgtaggccgggtgcccctgttctccgggtttggaacaatacgaggttggtgctgatgggatttacttgcgtacgtgctcttcacaaaaacaccgtggatgctgaagttagagcacgtcgccacagagcttgacatcaatgttagagggtctcttactccccgcccagctgtgatgtttcatctgctttggttgttttggtggtcttttttaaaaatagagatttcacatctgcccagaccccactcaaaacgatttggtcaggttctggttggacaagtttaaaatcaaagtagtgcccggaattccctcaaaccacccaacttcatccaggaatacagtctgcagtgcagcaacagaaccgcttaccaagaactgtgcttacatacctttgtcatctctcttccccccttggaagttgtcctcagggggatttgttcctgtcctggggatttacctgggatggtggctgcctgtgcttttgctcatggccttgacagtgctctagttgctggatctaatggcctgtcttggtttctatcacatgagaaggggttgtttttttggggtgactcggactgaattccccatactgtttccacgccgggacaccatgttctccatcaagctaaagaaatcacgtgcctgaaactgtgcttaagttttgggggaaagatggagttcctatccagagcccccagatttccagaatcgagtgagcttcctggaaggagactgcgtcttctctcaattccagtcatctcagtcgttgtcgttaggtgacatgtgcactttaaatgctctcatcggttggcttcattttcaagacaatcaaatgtattgactgtgttttcttcttagaaaatggagagggttaaaaacatgcaaactgccactttcaacctttgccagtattccctctacccccgtgagagctatctggggggaagaatccttaccaaggtttttttggaaaggtacgaatcttaacttttttccccttctgtgtctcagggtaatactattcagagtcgcccctttgctcattttctcccgtatttgttaccttcctgaggcctcagtattagtcgtgagcacaaagttttgagacctttggcgttgtttcttgatgtgggaggggaggtgttagtgcatgcaagggttgaactagatagaccctgccttagtagagggtgggactataaccttagaggccagaacttgatccagaagttgctgtccacagaagtgctttctatttcatcatttttgtttctagggctctttttctgtagccaggtcttcccaaggattttagtatttgcattggagttgaggtttactctaatgatggtggcccagctgtgcccagaggacagccaggcaggccctgggagggagtttagaaagacagtcctggtgaatgggcttcaagtggtcacaaagagggtggctgtgaggtgaccccagacactgcagaacgatgtgcaccctctgcgttttggatgtccttggaatgtgggagcctagaaataaccctgtggatggaattggggcagcggctgctggagatctgtgtgccttgccttccttcagcaggaccgtctaggtgcgcagccacctatggatgcgtcccagccagccccgtcgctctcgtccatcctcagagacaaagaagagggcagggagtttgggcttggttttgaactttcctttcaatgtagcaaagcattcctagttaaccagagccttggaatctactgcctgctggccaggctttaaaatgaaaagtgttttaatgctgccataaaagggaggcgggggggaggaagggaaaataaaggcatctttccaagtactcatctaatttaattgtcaaaagattgataggccatgaattacttctccatctcactaagggttaaaggcgtgcaaccccccactggctgtgtcccctgccaccgaagtgagtgacctgccctacaaccaggtgggaccacctgtgctgcagtccggaggggcttctgcaggaagcactcaccccccacaccttccccggcctgagcttcccctacctttcgtcaccacctgagggcatgagcacaggccatggggcgtgcctggtgagtctgcctgtggttcaggcttagcctgtggtctcctgtgtgctgctgcccgcatgggatgcgcaggggaggcgtggggatccgcaggagggtggttgggatacaccggatacctctgctctcattgcttgtttgcaaatgctctatggacatttgtgtgctaaatcctattaaataaaaaagacgggttaaaacccagatgctgtatattcatttgtaattatgtataaagtgaagcagttttaaactgtaaagatttttttcagtgtgttttctcgaattttgccacaacatactggcttcgtattttatttatctttctttctagttaccagcttcagacccttgtaaagtctccctcagccctttcaaaaaataataaatttcctgtgaagtt

SEQ ID NO: 14024 - DNA, 8081 bp, Homo sapiens
gtctaaaactctcttttctcttggctcttcttattcgagtgatgaggaggaggagttgcataattcacggcccttccacagtaccttccacaataccagtgctaatctgactgagagtataacagaagagaactataatttcctgccacatagcccctccaagaaagattctgaatggaagagtggaacaaaagtcagtcgtacattcagctacatcaagaataaaatgtctagcagcaagaagagcaaagaaaaggaaaaagaaaaagataagattaaggagaaggagaaagattctaaagacaaggagaaagataagaagactgtcaacgggcacactttcagttccattcctgttgtgggtcccatcagctgtagccagtgtatgaagcccttcaccaacaaagatgcctatacttgtgcaaattgcagtgcttttgtccacaaaggctgccgagaaagtctagcctcctgtgcaaaggtcaaaatgaagcagcccaaagggagccttcaggcacatgacacatcatcactgcccacggtcattatgagaaacaagccctcacagcccaaggagcgtcctcggtccgcagtcctcctggtggatgaaaccgctaccaccccaatatttgccaatagacgatcccagcagagtgtctcgctctccaaaagtgtctccatacagaacattactggagttggcaatgatgagaacatgtcaaacacctggaaattcctgtctcattcaacagactcactaaataaaatcagcaaggtcaatgagtcaacagaatcacttactgatgagggagtaggtacagacatgaatgaaggacaactactgggagactttgagattgagtccaaacagctggaagcagagtcttggagtcggataatagacagcaagtttctaaaacagcaaaagaaagatgtggtcaaacggcaagaagtaatatatgagttgatgcagacagagtttcatcatgtccgcactctcaagatcatgagtggtgtgtacagccaggggatgatggcggatctgctttttgagcagcagatggtagaaaagctgttcccctgtttggatgagctgatcagtatccatagccaattcttccagaggattctggagcggaagaaggagtctctggtggataaaagtgaaaagaactttctcatcaagaggataggggatgtgcttgtaaatcagttttcaggtgagaatgcagaacgtttaaagaagacatatggcaagttttgtgggcaacataaccagtctgtaaactacttcaaagacctttatgccaaggataagcgttttcaagcctttgtaaagaagaagatgagcagttcagttgttagaaggcttggaattccagagtgcatattgcttgtaactcagcggattaccaagtacccagttttattccaaagaatattgcagtgtaccaaagacaatgaagtggagcaggaagatctagcacagtccttgagcctggtgaaggatgtgattggagctgtagacagcaaagtggcaagttatgaaaagaaagtgcgtctcaatgagatttatacaaagacagatagcaagtcaatcatgaggatgaagagtggtcagatgtttgccaaggaagatttgaaacggaagaagcttgtacgtgatgggagtgtgtttctgaagaatgcagcaggaaggttgaaagaggttcaagcagttcttctcactgacattttagttttccttcaagaaaaagaccagaagtacatctttgcatcattggaccagaagtcaacagtgatctctttaaagaagctgattgtgagagaagtggcacatgaggagaaaggtttattcctgatcagcatggggatgacagatccagagatggtagaagtccatgccagctccaaagaggaacgaaacagctggattcagatcattcaggacacaatcaacaccctgaacagagatgaagatgaaggaattcctagtgagaatgaggaagaaaagaaaatgttggacaccagagcccgagaattaaaagaacaacttcaccagaaggaccaaaaaatcctactcttgttggaagagaaggagatgattttccgggacatggctgagtgcagcacccctctcccagaggattgctccccaacacatagccctagagttctcttccgctccaacacagaagaggctctcaaaggaggacctttaatgaaaagtgcaataaatgaggtggagatccttcagggtttggtgagtggaaatctgggaggcacacttgggccgactgtcagcagccccattgagcaagatgtggtcggtcccgtttccctgccccggagagcagagacctttggaggatttgacagccatcagatgaatgcttcaaaaggaggcgagaaggaagagggagatgatggccaagatcttaggagaacggaatcagatagtggcctaaaaaagggtggaaatgctaacctggtatttatgcttaaaagaaacagtgagcaggttgtccagagcgttgttcatctctacgagctcctcagcgctctgcagggtgtggtgctgcagcaggacagctacattgaggaccagaaactggtgctgagcgagagggcgctcactcgcagcttgtcccgcccgagctccctcattgagcaggagaagcagcgcagcctggagaagcagcgccaggacctggccaacctgcagaagcagcaggcccagtacctcgaggagaagcgcaggcgcgagcgtgagtgggaagctcgtgagagggagctgcgggagcgggaggccctcctggcccagcgcgaggaggaggtgcagcaggggcagcaggacctggaaaaggagcgggaggagctccagcagaagaagggcacataccagtatgacctggagcgactgcgtgctgcccagaaacagcttgagagggaacaggagcagctgcgccgggaggcagagcggctcagccagcggcagacagaacgggacctgtgtcaggtttcccatccacataccaagctgatgaggatcccatcgttcttccccagtcctgaggagcccccctcgccatctgcaccttccatagccaaatcagggtcattggactcagaactttcagtgtccccaaaaaggaacagcatctctcggacacacaaagataaggggccttttcacatactgagttcaaccagccagacaaacaaaggaccagaagggcagagccaggcccctgcgtccacctctgcctctacccgcctgtttgggttaacaaagccaaaggaaaagaaggagaaaaaaaagaagaacaaaaccagccgctctcagcccggtgatggtcccgcgtcagaagtatcagcagagggtgaagagatcttctgctgaccctcttcctctctgctgaggcagctgcctcctgatcctggccagcccacctctcctgctgtccccgcgtgcacaagtctcttacactggacgcccactgctcctcagcgtccagtcctcctgggcggccccaggtcctggacaataagcaacagatgatattgagtgtcgggtggggaaggaggcccagactctgcttcggccatgatttgtgactgcccaggactctcaggttgggctggccctactcaggattacactgaaagtaatggcctcgtaagtacaggtgatggttttggacacgtcaggaattcctaaaggctgaaagagtgtatccaagtaaggtctgaacctccgaatgccttttatttgggggaacacaaaaccaaacagcagatgttttggacttgatctgtgtacgtacatggggacctgtctgcatatacacacggggaatgccagaagaaggcccagtctgcaccaggcgtctggtcaacttagcacaagggcagtgcctggacggacccggagcccccgcatatcagcagttcacccagtactcctcagagactggtttccctctaaacccatcccgggcacataccacccgtgttttgcatgtatttctcatttcattttagggatgacaaacatttgtgaaaccagtgagagaaggcttgatgtgtataaaagacgtgatgtgcaccacctcgatctcggtgtttcaggcactaaagcaacaaaacaacccatagtatctcattctgtcatcagatccagaagaaatatcctggttttccagcatgtttacccacatgttttggccatggataaagtgaagaggcctactcaccattatccctgcagcgtgacaccttttgattgtcactgaccactcagaaggggccacggcctcctggctgtgttcctgagcccccgtcgtgcctctcccagacagcagctgtctggcccttgctgggtgagggcacaccactgccaggggtcagcctcgcacccaggccaggcagaagctgtgctctgaagctaggacagctggctgagaagtgggttcaggcgaagggtgaagccatgtgtagcagttcctgccagtgcagatctggagaggagctggcccggaaggcgtggttgtgaaagcgcccttcttatgttaggaggccttggcaaaattggatttcttcaaaaatacatgtaaaggtctgttgttgaattgtactctgcccctggaagcagatacagatggctgcctgctgctcggctttgcttttgcttttcccaccgtgttttcatctttgttcacttgaggctttccccagctggtgtgtgcaggacagttcatggtaatgttgccctctgaggccccgtacaccagaagggaggccctggaaaattttgtgcttccaacgtggccttcaattcttgcttttttgcccctcggaagcatggggcttttgagcacacttaaaaaaagaaaaatctgtaacttggtgcttattgatgaattgcaagctggccttgcagatggagatatttatctttcagtttatttgaaagaggtctggtttaaaatttgtagcctacatttgttttatttattgtatttgtgtgtttgtgtttgtttttttttaagggtgagccaggtctagcccaacagtctaaactatccagtcaataccgagtgaagtggcagccagcactgttcactctgtgtcttttgaagtgccttgaaggcccagatgaaattttaaagggagggggtccatgtccttccctcccccaccccgcctcattctttaatcaaaggatgtcttctcccttgtttgagaatgaagaaactcgccacctctgacctacctttgcctttttctgtcatggagaatactcacccttcagaaacagaccaaaggccaaaacctgctgatttttctattgaaaatatgtccccttgcaaagaccctaaacaaaaagttaagtttctttctttcacctatttgtacaactccaagttacagctgaatctgtcgtgactttcctgagatctacccggggcttggctgtctgttctgggcactggctccgagttcccctcctgggatttgcaggagggcagtactgaacctgcattcttctccttgtaaatgtaggccgggtgcccctgttctccgggtttggaacaatacgaggttggtgctgatgggatttacttgcgtacgtgctcttcacaaaaacaccgtggatgctgaagttagagcacgtcgccacagagcttgacatcaatgttagagggtctcttactccccgcccagctgtgatgtttcatctgctttggttgttttggtggtcttttttaaaaatagagatttcacatctgcccagaccccactcaaaacgatttggtcaggttctggttggacaagtttaaaatcaaagtagtgcccggaattccctcaaaccacccaacttcatccaggaatacagtctgcagtgcagcaacagaaccgcttaccaagaactgtgcttacatacctttgtcatctctcttccccccttggaagttgtcctcagggggatttgttcctgtcctggggatttacctgggatggtggctgcctgtgcttttgctcatggccttgacagtgctctagttgctggatctaatggcctgtcttggtttctatcacatgagaaggggttgtttttttggggtgactcggactgaattccccatactgtttccacgccgggacaccatgttctccatcaagctaaagaaatcacgtgcctgaaactgtgcttaagttttgggggaaagatggagttcctatccagagcccccagatttccagaatcgagtgagcttcctggaaggagactgcgtcttctctcaattccagtcatctcagtcgttgtcgttaggtgacatgtgcactttaaatgctctcatcggttggcttcattttcaagacaatcaaatgtattgactgtgttttcttcttagaaaatggagagggttaaaaacatgcaaactgccactttcaacctttgccagtattccctctacccccgtgagagctatctggggggaagaatccttaccaaggtttttttggaaaggtacgaatcttaacttttttccccttctgtgtctcagggtaatactattcagagtcgcccctttgctcattttctcccgtatttgttaccttcctgaggcctcagtattagtcgtgagcacaaagttttgagacctttggcgttgtttcttgatgtgggaggggaggtgttagtgcatgcaagggttgaactagatagaccctgccttagtagagggtgggactataaccttagaggccagaacttgatccagaagttgctgtccacagaagtgctttctatttcatcatttttgtttctagggctctttttctgtagccaggtcttcccaaggattttagtatttgcattggagttgaggtttactctaatgatggtggcccagctgtgcccagaggacagccaggcaggccctgggagggagtttagaaagacagtcctggtgaatgggcttcaagtggtcacaaagagggtggctgtgaggtgaccccagacactgcagaacgatgtgcaccctctgcgttttggatgtccttggaatgtgggagcctagaaataaccctgtggatggaattggggcagcggctgctggagatctgtgtgccttgccttccttcagcaggaccgtctaggtgcgcagccacctatggatgcgtcccagccagccccgtcgctctcgtccatcctcagagacaaagaagagggcagggagtttgggcttggttttgaactttcctttcaatgtagcaaagcattcctagttaaccagagccttggaatctactgcctgctggccaggctttaaaatgaaaagtgttttaatgctgccataaaagggaggcgggggggaggaagggaaaataaaggcatctttccaagtactcatctaatttaattgtcaaaagattgataggccatgaattacttctccatctcactaagggttaaaggcgtgcaaccccccactggctgtgtcccctgccaccgaagtgagtgacctgccctacaaccaggtgggaccacctgtgctgcagtccggaggggcttctgcaggaagcactcaccccccacaccttccccggcctgagcttcccctacctttcgtcaccacctgagggcatgagcacaggccatggggcgtgcctggtgagtctgcctgtggttcaggcttagcctgtggtctcctgtgtgctgctgcccgcatgggatgcgcaggggaggcgtggggatccgcaggagggtggttgggatacaccggatacctctgctctcattgcttgtttgcaaatgctctatggacatttgtgtgctaaatcctattaaataaaaaagacgggttaaaacccagatgctgtatattcatttgtaattatgtataaagtgaagcagttttaaactgtaaagatttttttcagtgtgttttctcgaattttgccacaacatactggcttcgtattttatttatctttctttctagttaccagcttcagacccttgtaaagtctccctcagccctttcaaaaaataataaatttcctgtgaagtt

SEQ ID NO: 14025 - DNA, 13302 bp, Homo sapiens
gaagcgcctgtgctctgccgagactgccgtgcccattgctcgcctcggtcgccgccgctttagccgcctccgggggagcggccgcctattgtctttctccgcggcgaaggtgaagagttgtcccagctcggcccgcgggggagccccgggagccgcacgtgtcctgggtcatgaaacttaatccacagcaagctcccttatatggtgattgtgttgttacagtgctgcttgctgaagaggacaaagctgaagatgatgtagtgttttacttggtatttttgggttccaccctccgtcactgtacaagtactcggaaggtcagttctgatacattggagaccattgctcctggtcatgattgttgtgaaacagtgaaggtgcagctctgtgcttccaaagagggccttcccgtgtttgtggtggctgaagaagactttcatttcgtccaggatgaagcgtatgatgcagctcaattcctagcaaccagtgctggaaatcagcaggctttgaactttacccgttttcttgaccagtcaggacccccatctggggatgtgaattcccttgataagaagttggtgctggcattcaggcacctgaagctgcccacggagtggaatgtattggggacagatcagagtttgcatgatgctggcccgcgagagacattgatgcattttgctgtgcggctgggactgctgaggttgacgtggttcctgttgcagaagccaggtggccgcggagctctcagtatccacaaccaggaaggggcgacgcctgtgagcttggccttggagcgaggctatcacaagctgcaccagcttctaaccgaggagaatgctggagaaccagactcctggagcagtttatcctatgaaataccgtatggagactgttctgtgaggcatcatcgagagttggacatctatacattaacctctgagtctgattcacatcatgaacacccatttcctggagacggttgcactggaccaatttttaaacttatgaacatccaacagcaactaatgaaaacaaacctcaagcagatggacagtcttatgcccttaatgatgacagcacaggatccttccagtgccccagagacagatggccagtttcttccctgtgcaccggagcccacggaccctcagcgactttcttcttctgaagagactgagagcactcagtgctgcccagggagccctgttgcacagactgaaagtccctgtgatttgtcaagcatagttgaggaggagaatacagaccgttcctgtaggaagaaaaataaaggcgtggaaagaaaaggggaagaggtggagccagcacctattgtggactctggaactgtatctgatcaagacagctgccttcagagcttgcctgattgtggagtaaagggcacggaaggcctttcgtcctgtggaaacagaaatgaagaaactggaacaaaatcttctggaatgcccacagaccaggagtccctgagcagtggagatgctgtgcttcagagagacttggtcatggagccaggcacagcccagtattcctctggaggtgaactgggaggcatttcaacaacaaatgtcagtaccccagacactgcaggggaaatggaacatgggctcatgaacccagatgccactgtttggaagaatgtgcttcagggaggggaaagtacaaaggaaagatttgagaactctaatattggcacagctggagcctctgacgtgcacgtcacaagtaagcctgtggataaaatcagtgttccaaactgtgcccctgctgccagttccctggatggtaacaaacctgctgagtcttcacttgcatttagtaatgaagaaacctccactgaaaaaacagcagaaacggaaacttcacgaagtcgtgaggagagtgctgatgctccagtagatcagaattctgtggtgattccagctgctgcaaaagacaagatttcagatggattagaaccttatactctcttagcagcaggcataggtgaggcaatgtcaccctcagatttagcccttcttgggctggaagaagatgtaatgccacaccagaactcagaaacaaattcatctcatgctcaaagccaaaagggcaaatcctcacccatttgttctacaactggagacgataaactttgtgcagactctgcatgtcaacagaacacagtgacttctagtggcgatttggttgcaaaactgtgtgataacatagttagcgagtccgaaagcaccacagcaaggcaacccagctcacaagatccacccgatgcctcccactgtgaagacccacaggctcatacagtcacctctgaccctgtaagggatacccaggaacgtgcggatttttgtcctttcaaagtggtggataacaaaggccaacgaaaagatgtgaaactagataaacctttaacaaatatgcttgaggtggtttcacatccacatccagttgtccctaaaatggagaaagaactggtgccagaccaggcagtaatatcagacagtactttctctctggcaaacagtccaggcagtgaatcagtaaccaaggatgacgcactttcttttgtcccctcccagaaagaaaagggaacagcaactcctgaactacatacagctacagattatagagatggcccagatggaaattcgaatgagcctgatacgcggccactagaagacagggcagtaggcctgtccacatcctccactgctgcagagcttcagcacgggatggggaataccagtctcacaggacttggtggagagcatgagggtcccgcccctccagcaatcccagaagctctgaatatcaaggggaacactgactcttccctgcaaagtgtgggtaaggccactttggctttagattcagttttgactgaagaaggaaaacttctggtggtttcagaaagctctgcagctcaggaacaagataaggataaagcggtgacctgttcctctattaaggaaaatgctctctcttcaggaactttgcaggaagagcagagaacaccacctcctggacaagatactcaacaatttcatgaaaaatcaatctcagctgactgtgccaaggacaaagcacttcagctaagtaattcaccgggtgcatcctctgcctttcttaaggcagaaactgaacataacaaggaagtggccccacaagtctcactgctgactcaaggtggggctgcccagagcctggtgccaccaggagcaagtctggccacagagtcaaggcaggaagccttgggggcagagcacaacagctccgctctgttgccatgtctgttgccagatgggtctgatgggtccgatgctcttaactgcagtcagccttctcctctggatgttggagtgaagaacactcaatcccagggaaaaactagtgcctgtgaggtgagtggagatgtgacggtggatgttacaggggttaatgctctacaaggtatggctgagcccagaagagagaatatatcacacaacacccaagacatcctgattccaaacgtcttgttgagccaagagaagaatgccgttctaggtttgccagtggctctacaggacaaagctgtgactgacccacagggagttggaaccccagagatgatacctcttgattgggagaaagggaagctggagggagcagaccacagctgtaccatgggtgacgctgaggaagcccaaatagacgatgaagcacatcctgtcctactgcagcctgttgccaaggagctccccacagacatggagctctcagcccatgatgatggggccccagctggtgtgagggaagtcatgcgagccccgccttcaggcagggaaaggagcactccctctctaccttgcatggtctctgcccaggacgcacctctgcctaagggggcagacttgatagaggaggctgccagccgtatagtggatgctgtcatcgaacaagtcaaggccgctggagcactgcttactgagggggaggcctgtcacatgtcactgtccagccctgagttgggtcctctcactaaaggactagagagtgcttttacagaaaaagtgagtactttcccacctggggagagcctaccaatgggcagtactcctgaggaagccacggggagccttgcaggatgttttgctggaagggaggagccagagaagatcattttacctgtccaggggcctgagccagcagcagaaatgccagacgtgaaagctgaagatgaagtggattttagagcaagttcaatttctgaagaagtggctgtagggagcatagctgctacactgaagatgaagcaaggcccaatgacccaggcgataaaccgagaaaactggtgtacaatagagccatgccctgatgcagcatctcttctggcttccaagcagagcccagaatgtgagaacttcctggatgttggactgggcagagagtgtacctcaaaacaaggtgtacttaaaagagaatctgggagtgattctgacctctttcactcacccagtgatgacatggacagcatcatcttcccaaagccagaggaagagcatttggcctgtgatatcaccggatccagttcatccaccgatgacacggcttcactggaccgacattcttctcatggcagtgatgtgtctctctcccagattttaaagccaaacaggtcaagagatcggcaaagccttgatggattctacagccatgggatgggagctgagggtcgagaaagtgagagtgagcctgctgacccaggcgacgtggaggaggaggagatggacagtatcactgaagtgcctgcaaactgctctgtcctaaggagctccatgcgctctctttctcccttccggaggcacagctgggggcctgggaaaaatgcagccagcgatgcagaaatgaaccaccggagtatgagctggtgcccctctggtgtgcagtactctgctggcctgagtgctgactttaattacagaagtttcagtctagaaggcttgacaggaggagctggtgtcggaaacaagccatcctcatctctagaagtaagctctgcaaatgccgaagagctcagacacccattcagtggtgaggaacgggttgactctttggtgtcactttcagaagaggatctggagtcagaccagagagaacataggatgtttgatcagcagatatgtcacagatctaagcagcagggatttaattactgtacatcagccatttcctctccattgacaaaatccatctcattaatgacaatcagccatcctggattggacaattcacggcccttccacagtaccttccacaataccagtgctaatctgactgagagtataacagaagagaactataatttcctgccacatagcccctccaagaaagattctgaatggaagagtggaacaaaagtcagtcgtacattcagctacatcaagaataaaatgtctagcagcaagaagagcaaagaaaaggaaaaagaaaaagataagattaaggagaaggagaaagattctaaagacaaggagaaagataagaagactgtcaacgggcacactttcagttccattcctgttgtgggtcccatcagctgtagccagtgtatgaagcccttcaccaacaaagatgcctatacttgtgcaaattgcagtgcttttgtccacaaaggctgccgagaaagtctagcctcctgtgcaaaggtcaaaatgaagcagcccaaagggagccttcaggcacatgacacatcatcactgcccacggtcattatgagaaacaagccctcacagcccaaggagcgtcctcggtccgcagtcctcctggtggatgaaaccgctaccaccccaatatttgccaatagacgatcccagcagagtgtctcgctctccaaaagtgtctccatacagaacattactggagttggcaatgatgagaacatgtcaaacacctggaaattcctgtctcattcaacagactcactaaataaaatcagcaaggtcaatgagtcaacagaatcacttactgatgagggagtaggtacagacatgaatgaaggacaactactgggagactttgagattgagtccaaacagctggaagcagagtcttggagtcggataatagacagcaagtttctaaaacagcaaaagaaagatgtggtcaaacggcaagaagtaatatatgagttgatgcagacagagtttcatcatgtccgcactctcaagatcatgagtggtgtgtacagccaggggatgatggcggatctgctttttgagcagcagatggtagaaaagctgttcccctgtttggatgagctgatcagtatccatagccaattcttccagaggattctggagcggaagaaggagtctctggtggataaaagtgaaaagaactttctcatcaagaggataggggatgtgcttgtaaatcagttttcaggtgagaatgcagaacgtttaaagaagacatatggcaagttttgtgggcaacataaccagtctgtaaactacttcaaagacctttatgccaaggataagcgttttcaagcctttgtaaagaagaagatgagcagttcagttgttagaaggcttggaattccagagtgcatattgcttgtaactcagcggattaccaagtacccagttttattccaaagaatattgcagtgtaccaaagacaatgaagtggagcaggaagatctagcacagtccttgagcctggtgaaggatgtgattggagctgtagacagcaaagtggcaagttatgaaaagaaagtgcgtctcaatgagatttatacaaagacagatagcaagtcaatcatgaggatgaagagtggtcagatgtttgccaaggaagatttgaaacggaagaagcttgtacgtgatgggagtgtgtttctgaagaatgcagcaggaaggttgaaagaggttcaagcagttcttctcactgacattttagttttccttcaagaaaaagaccagaagtacatctttgcatcattggaccagaagtcaacagtgatctctttaaagaagctgattgtgagagaagtggcacatgaggagaaaggtttattcctgatcagcatggggatgacagatccagagatggtagaagtccatgccagctccaaagaggaacgaaacagctggattcagatcattcaggacacaatcaacaccctgaacagagatgaagatgaaggaattcctagtgagaatgaggaagaaaagaaaatgttggacaccagagcccgagaattaaaagaacaacttcaccagaaggaccaaaaaatcctactcttgttggaagagaaggagatgattttccgggacatggctgagtgcagcacccctctcccagaggattgctccccaacacatagccctagagttctcttccgctccaacacagaagaggctctcaaaggaggacctttaatgaaaagtgcaataaatgaggtggagatccttcagggtttggtgagtggaaatctgggaggcacacttgggccgactgtcagcagccccattgagcaagatgtggtcggtcccgtttccctgccccggagagcagagacctttggaggatttgacagccatcagatgaatgcttcaaaaggaggcgagaaggaagagggagatgatggccaagatcttaggagaacggaatcagatagtggcctaaaaaagggtggaaatgctaacctggtatttatgcttaaaagaaacagtgagcaggttgtccagagcgttgttcatctctacgagctcctcagcgctctgcagggtgtggtgctgcagcaggacagctacattgaggaccagaaactggtgctgagcgagagggcgctcactcgcagcttgtcccgcccgagctccctcattgagcaggagaagcagcgcagcctggagaagcagcgccaggacctggccaacctgcagaagcagcaggcccagtacctcgaggagaagcgcaggcgcgagcgtgagtgggaagctcgtgagagggagctgcgggagcgggaggccctcctggcccagcgcgaggaggaggtgcagcaggggcagcaggacctggaaaaggagcgggaggagctccagcagaagaagggcacataccagtatgacctggagcgactgcgtgctgcccagaaacagcttgagagggaacaggagcagctgcgccgggaggcagagcggctcagccagcggcagacagaacgggacctgtgtcaggtttcccatccacataccaagctgatgaggatcccatcgttcttccccagtcctgaggagcccccctcgccatctgcaccttccatagccaaatcagggtcattggactcagaactttcagtgtccccaaaaaggaacagcatctctcggacacacaaagataaggggccttttcacatactgagttcaaccagccagacaaacaaaggaccagaagggcagagccaggcccctgcgtccacctctgcctctacccgcctgtttgggttaacaaagccaaaggaaaagaaggagaaaaaaaagaagaacaaaaccagccgctctcagcccggtgatggtcccgcgtcagaagtatcagcagagggtgaagagatcttctgctgaccctcttcctctctgctgaggcagctgcctcctgatcctggccagcccacctctcctgctgtccccgcgtgcacaagtctcttacactggacgcccactgctcctcagcgtccagtcctcctgggcggccccaggtcctggacaataagcaacagatgatattgagtgtcgggtggggaaggaggcccagactctgcttcggccatgatttgtgactgcccaggactctcaggttgggctggccctactcaggattacactgaaagtaatggcctcgtaagtacaggtgatggttttggacacgtcaggaattcctaaaggctgaaagagtgtatccaagtaaggtctgaacctccgaatgccttttatttgggggaacacaaaaccaaacagcagatgttttggacttgatctgtgtacgtacatggggacctgtctgcatatacacacggggaatgccagaagaaggcccagtctgcaccaggcgtctggtcaacttagcacaagggcagtgcctggacggacccggagcccccgcatatcagcagttcacccagtactcctcagagactggtttccctctaaacccatcccgggcacataccacccgtgttttgcatgtatttctcatttcattttagggatgacaaacatttgtgaaaccagtgagagaaggcttgatgtgtataaaagacgtgatgtgcaccacctcgatctcggtgtttcaggcactaaagcaacaaaacaacccatagtatctcattctgtcatcagatccagaagaaatatcctggttttccagcatgtttacccacatgttttggccatggataaagtgaagaggcctactcaccattatccctgcagcgtgacaccttttgattgtcactgaccactcagaaggggccacggcctcctggctgtgttcctgagcccccgtcgtgcctctcccagacagcagctgtctggcccttgctgggtgagggcacaccactgccaggggtcagcctcgcacccaggccaggcagaagctgtgctctgaagctaggacagctggctgagaagtgggttcaggcgaagggtgaagccatgtgtagcagttcctgccagtgcagatctggagaggagctggcccggaaggcgtggttgtgaaagcgcccttcttatgttaggaggccttggcaaaattggatttcttcaaaaatacatgtaaaggtctgttgttgaattgtactctgcccctggaagcagatacagatggctgcctgctgctcggctttgcttttgcttttcccaccgtgttttcatctttgttcacttgaggctttccccagctggtgtgtgcaggacagttcatggtaatgttgccctctgaggccccgtacaccagaagggaggccctggaaaattttgtgcttccaacgtggccttcaattcttgcttttttgcccctcggaagcatggggcttttgagcacacttaaaaaaagaaaaatctgtaacttggtgcttattgatgaattgcaagctggccttgcagatggagatatttatctttcagtttatttgaaagaggtctggtttaaaatttgtagcctacatttgttttatttattgtatttgtgtgtttgtgtttgtttttttttaagggtgagccaggtctagcccaacagtctaaactatccagtcaataccgagtgaagtggcagccagcactgttcactctgtgtcttttgaagtgccttgaaggcccagatgaaattttaaagggagggggtccatgtccttccctcccccaccccgcctcattctttaatcaaaggatgtcttctcccttgtttgagaatgaagaaactcgccacctctgacctacctttgcctttttctgtcatggagaatactcacccttcagaaacagaccaaaggccaaaacctgctgatttttctattgaaaatatgtccccttgcaaagaccctaaacaaaaagttaagtttctttctttcacctatttgtacaactccaagttacagctgaatctgtcgtgactttcctgagatctacccggggcttggctgtctgttctgggcactggctccgagttcccctcctgggatttgcaggagggcagtactgaacctgcattcttctccttgtaaatgtaggccgggtgcccctgttctccgggtttggaacaatacgaggttggtgctgatgggatttacttgcgtacgtgctcttcacaaaaacaccgtggatgctgaagttagagcacgtcgccacagagcttgacatcaatgttagagggtctcttactccccgcccagctgtgatgtttcatctgctttggttgttttggtggtcttttttaaaaatagagatttcacatctgcccagaccccactcaaaacgatttggtcaggttctggttggacaagtttaaaatcaaagtagtgcccggaattccctcaaaccacccaacttcatccaggaatacagtctgcagtgcagcaacagaaccgcttaccaagaactgtgcttacatacctttgtcatctctcttccccccttggaagttgtcctcagggggatttgttcctgtcctggggatttacctgggatggtggctgcctgtgcttttgctcatggccttgacagtgctctagttgctggatctaatggcctgtcttggtttctatcacatgagaaggggttgtttttttggggtgactcggactgaattccccatactgtttccacgccgggacaccatgttctccatcaagctaaagaaatcacgtgcctgaaactgtgcttaagttttgggggaaagatggagttcctatccagagcccccagatttccagaatcgagtgagcttcctggaaggagactgcgtcttctctcaattccagtcatctcagtcgttgtcgttaggtgacatgtgcactttaaatgctctcatcggttggcttcattttcaagacaatcaaatgtattgactgtgttttcttcttagaaaatggagagggttaaaaacatgcaaactgccactttcaacctttgccagtattccctctacccccgtgagagctatctggggggaagaatccttaccaaggtttttttggaaaggtacgaatcttaacttttttccccttctgtgtctcagggtaatactattcagagtcgcccctttgctcattttctcccgtatttgttaccttcctgaggcctcagtattagtcgtgagcacaaagttttgagacctttggcgttgtttcttgatgtgggaggggaggtgttagtgcatgcaagggttgaactagatagaccctgccttagtagagggtgggactataaccttagaggccagaacttgatccagaagttgctgtccacagaagtgctttctatttcatcatttttgtttctagggctctttttctgtagccaggtcttcccaaggattttagtatttgcattggagttgaggtttactctaatgatggtggcccagctgtgcccagaggacagccaggcaggccctgggagggagtttagaaagacagtcctggtgaatgggcttcaagtggtcacaaagagggtggctgtgaggtgaccccagacactgcagaacgatgtgcaccctctgcgttttggatgtccttggaatgtgggagcctagaaataaccctgtggatggaattggggcagcggctgctggagatctgtgtgccttgccttccttcagcaggaccgtctaggtgcgcagccacctatggatgcgtcccagccagccccgtcgctctcgtccatcctcagagacaaagaagagggcagggagtttgggcttggttttgaactttcctttcaatgtagcaaagcattcctagttaaccagagccttggaatctactgcctgctggccaggctttaaaatgaaaagtgttttaatgctgccataaaagggaggcgggggggaggaagggaaaataaaggcatctttccaagtactcatctaatttaattgtcaaaagattgataggccatgaattacttctccatctcactaagggttaaaggcgtgcaaccccccactggctgtgtcccctgccaccgaagtgagtgacctgccctacaaccaggtgggaccacctgtgctgcagtccggaggggcttctgcaggaagcactcaccccccacaccttccccggcctgagcttcccctacctttcgtcaccacctgagggcatgagcacaggccatggggcgtgcctggtgagtctgcctgtggttcaggcttagcctgtggtctcctgtgtgctgctgcccgcatgggatgcgcaggggaggcgtggggatccgcaggagggtggttgggatacaccggatacctctgctctcattgcttgtttgcaaatgctctatggacatttgtgtgctaaatcctattaaataaaaaagacgggttaaaacccagatgctgtatattcatttgtaattatgtataaagtgaagcagttttaaactgtaaagatttttttcagtgtgttttctcgaattttgccacaacatactggcttcgtattttatttatctttctttctagttaccagcttcagacccttgtaaagtctccctcagccctttcaaaaaataataaatttcctgtgaagtt

SEQ ID NO: 14026 - DNA, 3204 bp, Homo sapiens
cttcgtttccgtctcggccgggcacccgagcgcatcccgccgaggccgggccgtttcagggggaggcgccaactcatcgcggcgccgggcccctgaccgtgcagtaaccgctacccaggaggcggagcggacaaggctccggcctgcgaggagtcacattaactttgctctagaagacaactttacaaggatctaaaaggaacaggattaaagatgactgaatactgggttccagaaatttaaaacaatcagcttagcaaatcatatattcttctgtggagctgagaattgatgtccgctcttccccgtgatttggaactttccaatcccagagaaaagttgacaaagggactgcccaggactgagtccatatggaagaagaacttcctcttttctctggagacagtggcaagccagtacaggctactctgtcatctttgaagatgttagatgtgggaaagtggccaattttttccctttgttctgaagaagaactacagttaattcgtcaggcttgtgtctttggcagtgctggcaatgaagttttatacactacagtaaatgatgagatttttgtgcttggcacaaactgctgtggctgtttggggttaggtgacgtccagagcaccattgaacctcggagactggattctttaaatggcaaaaaaatagcctgcctcagctatgggagtggtccacatattgtccttgcaacaacagaaggagaagtctttacctggggtcataatgcttatagccagctgggcaatgggacaactaatcatggtttagtgccctgtcatatctctactaatctgtcaaacaaacaagtcattgaagttgcctgtgggtcttaccattctttggtgctaacatctgatggagaggtatttgcctggggttataataactctgggcaggtaggatctggatcaacagttaatcagccaatccctcgaagagtcactggctgcctacaaaataaagtagttgtgaccatagcatgtgggcagatgtgctgcatggcagtagtagacacgggggaggtctatgtctggggttacaacggaaacgggcagcttggactcggcaacagtggcaaccagccaaccccttgcagagtggcagctttgcaaggcatccgtgtccagagggtcgcctgtggctacgcacacacattagtattaacagatgaaggccaagtgtatgcttggggcgccaattcttatgggcagttgggcactggcaataaaagcaaccagtcctatcctactcctgtcactgtggaaaaggacaggattatcgagattgcagcctgtcactccacacacacgtctgcggccaagacgcagggtgggcacgtgtacatgtggggccagtgccggggtcagtccgtgatcctcccgcacctcacccacttctcctgcactgacgacgtgtttgcctgctttgccacgcccgccgtcacgtggcgcctcctctccgtggaacctgatgaccacctcacagtggctgagtcactgaagagggaatttgacaacccggacactgcagacctgaagtttctagttgatggaaagtacatttatgcacataaagtccttctcaagattcgatgtgagcattttcgttcgtcattggaagataacgaggatgatattgtagaaatgagtgaattttcatatcctgtttaccgggccttcctggaatacctatacacagacagcatcagcctttctcctgaggaggcagtaggactgctagacttggctacattttatagagaaaatcgtttgaaaaagctctgccaacaaactatcaagcaaggcatctgcgaggagaatgccatcgctctgctctcggctgcggtgaagtatgatgcacaggatttagaagaattctgcttcaggttttgcataaaccatctgactgtagtaacacaaacatcaggttttgcagaaatggaccatgatctcctgaagaactttatcagcaaagcaagcagagttggagcctttaaaaattgatcccatctgcaggaaagtttttgagcctttccatttcccctgcaaaagccagagatgaatcacttctctttaattaatagtatgtatgatgagctatgtttggctgagtacttgtaactgtcagaagaaggatggtggtgagtggtctttgtctgcctaaacccagagtttatgtagaaagcattgaatgttctgatcagatgtgactaaggtcaaggaaaaaaaattgaaatatcttatttaccatttcctctttttgagtcacttaaattggacacctttggtaccctggtctcagtatatgctattctggcccaaatgttccattattcagctggctgataccacatagatagcttgacaaggagtgctgtctgtccttaccacattttcagcactcagcacagtgccttgtgtataataggcactcaatttattataaatcttcagtatgtcctgagaacagctttagtcatggaatactgggagaaggaataactttcacaaaataaacttaaaacagcctgtaattattgaggttcatattcttctggtatatcattctgagaaattgtggctaatttagaacattgtttagaattgacaaaaggccctggcaattaaattgtcaaggcccaagggctaattttaattttctttttacttggagtcattcattaatttctcacatgggattatggagtatgaagtattatctttgaatgaaattcctgggctgatctgccttacataatcacataaggtcctttgcttttctttgtgttaagagggacttgcctctgtaaatgaaaatgacaatgtgcttttcttgtagttgactttcatgtcactcactataaaataggtctcttaacctggcaccagtataactataaagcactagctgagaaggaactgatacttacatttcatggacagcattaacaagaatgagataaatttgtactttttagatcaaaacaaattacctaattgcaaaagagaaactgaaatggaacatagtctcagattcttctaatgtgtatctcacaatgtcatgtaatgtaaaggaaacccttttggaattagaattcttgttctgatgctgaactatttggtaataaagtgcttatttgcagataacagaaaaaaaaaaaaaaaaaaaaaaaaaaaaaaa

SEQ ID NO: 14027 - DNA, 5843 bp, Homo sapiens
atggcggatcctagattggcagcctgcgtctctctagctaccgtctctatggttcggggaatctccaggtcggggcttgaccggtccgacttttgcgcgtgcgcgagtcctggcgcgtgcccgccctcaagcaactgtccgacccagcgggtgggaggggtgggtctgggaacgttgcggcggctgtcgccgcggccccagcacccagagctgttctctggccaagcctgcgcctgtagtccttctttgcctcctggggcggccgccacccacccccagatggtgggtccggaggatgccggagcctgctcgggaagaaaccccaagttgctcccggtgcctgcgccggaccccgtgggccaggacaggaaggtaatccgggccacgggcggctttggcggaggcgtcggcgctgtggagccgccggaggaggctgacgaggaggaggaggctgacgaggaggaggagacgccgcctcggcagctccttcagcgttacctcgcggcggccggggagcagctggagccggggctctgctactgtccgctccccgctggccaggccggcgccccgccgccctcggcagccccacgatcggacgcctgcctgctgggctcgggctccaaacaccgcggcgcggaggtggctgatggccgcgcgccgcggcacgaaggcatgaccaacggcgactcgggttttctgccgggccgggactgtcgcgatctggaagaggctcgcgggctggcgcgcgccggcggccgggagtcgcgccgccgccgcccctacggccgccttcgcctggaggggcctggcgacgaggacgcggacggcgcgggaagcccgtccgattgggcctctccgcttgaggacccgctgcggagctgctgcctggtggccgcggacgcccaggagcccgagggcgcgggcagcgactcgggggacagccccgccagcagctgcagcagtagcgaggactcagagcagcggggagtcggcgccgggggtcccgaggagggcgcgccccctgccacctcggccgagaggactaatgggggtgcggagccgcgcctgggcttttctgacattcacttcaactctcgcaacacgttccaggtgagccgcggtcagagcgcccgcgatcacctgcccccggcggggccgccggtgcccttgcccgccgcggagcagggtcctgcgggggcttcggcccgggctcgacggagtggcggcttcgcggacttcttcaccagaaacctttttccaaaaaggacaaaggaactcaaatcagttgtccatagtgctcctggttggaaattatttggtaaagtccctcctagagagaatcttcagaaaacatccaaaatcattcagcaggaatatgaagcacgaacggggaggacctgtaaaccaccacctcagtcttcaagacgcaagaattttgaatttgagccgctttctaccactgccttgattcttgaggatcgaccatcaaatcttcctgccaaatctgtggaagaagctttacgtcaccgacaagaatacgatgagatggtggctgaggctaaaaaacgagaaattaaggaagcacataaaagaaaaagaatcatgaaagaacgatttaagcaggaagaaaatattgcaagtgcaatggtaatttggatcaatgaaatactgcccaattgggaagtaatgcgtagtacaagaagagttcgagaattgtggtggcagggattgccccctagtgtccgtgggaaagtttggagtctagctgtaggaaatgaactaaatatcactcctgaactttatgaaatcttcctctcaagagcaaaagaacggtggaaaagtttcagtgaaacaagttcagagaatgatacagaaggtgtatctgttgctgatcgagaggccagtctggaattaattaagttggacatatcccgtacatttccatctctctacatctttcagaagggtggtccatatcatgatgtcttgcatagtattttaggggcatacacatgctacaggcctgatgttggttatgtccaagggatgtccttcattgcagcagtactcattctcaatttggaagaggcagatgcctttatcgcatttgccaatctcctgaataagccatgccagttggccttttttcgtgtggatcacagcatgatgttgaaatattttgcaacatttgaagtattctttgaagaaaatctttccaaattatttcttcacttcaaatcttacagtcttacaccagatatatacttgatagactggatcttcacactatatagcaaatcactaccacttgatctggcctgtcgagtctgggatgtattttgcagagatggggaagaatttttatttaggactggattaggaatcctccgattatatgaagatattctcctgcagatggactttattcatatagcacagtttctaactaaattgccagaagatatcacatcggaaaagctgttcagttgtattgcagccattcagatgcagaatagcaccaaaaaatggactcaggtctttgcatctgtaatgaaggatattaaagaaggagacaagaacagtagtcctgctttgaaaagctagtcttcaaaattgacagactaactgacatagaaaaagtggtttttggataaaggttttttgtttcctatgtaaaaggcgtggaagaaaatgttggagatacctaaaagaatcaagaggtggaaaactgctgattttacattttatggctgaagtaaatgaaataagtaacttattgacagtattaataaactattattttgtaggtagagtcatttttcaaaggaaaaagtttaagtggtgagtttatattccacaatttggagtaaacaaaatgcaataaatttttaaaatagctttgaagatacttcaaatttttacatcttttcttttgtaacagttaccacaaagatattctggaggctagagtaggattgttaaatactactgttaacctccaaagtactatagtacagacattgtttccagttctgaccttttgaagatattatagaccagtaatgaacagatttggttgtaaattatttaagtcactgaagatgtcatttatcttcattcacaagttggggcaaattcgagttacctaggaactggaaatgttggtgggagattgtttattgtttgtttagatgtttttccatagtatggtgtccatttgttttttaagggaaattttttgtcttccttaaggaattcctatcactcagagaattttagccattctggttctagtctaacaaattattcatctaataatttgacattaagaaaactataaataactggtagaaggaaagtgctttgcacttcagtggattgaagacttgactttgagagtaagtccaaaaacatatatgatgtttctcagtgataagagtaaaaagtaatgaatcctgagagttcttaaacagcatgctacttggcaagacttcatattttttagttacaattcttccactgtttaactccagtttgaaatttgaaatctaatatgtagctaaatctgtgacttgtaaaactctatgcataatttttcctaatcagtggaaataagaataaaagaaaaaggtaaagttaattttttttctaagtctacatcctatctcttgattcagttgcctgaagaagctgggtaaggagattagtcttgttattgattcttttatgtgtcagtgccatcttaatctcttcacatggtacactaaatgctgcctataacccatcctcatcttctttactcatcattgctttcttcaaggaaggtcttgatactgccctcgtctacctcactatccgctagtctagatagtgactctttggaaaattggtagcctctgaatgagttatccaacttctgcttcctcacattggccactttgcataggttcgggaacttagcaggttttaaatcatcatgcccatggaggtgaaatactttgaggaatgggaacatctcttcactgtgtttttggatcagccttctctcaaccgccaagaaatgcatgatttccctgccaactctaggaagtagtgctgcatgattgaatcattatttgatgaattctttcattgtaacatagggagtcattttcaaaaaggtagatatgaacttaaattaaattgacttatgaatgctttgcctgtgggcccaacagtgtcatgaccctccaattgaaacatagcatgaattatttttatgtcgagttcttgaactgctaatcaggtgtgtgtttccttgaagtccagagcaggatccaggtcagatgaaggaggtggtatgcctggcttaactgctgaaaatagagcattgaaactcttcacaatgtgctgcattgggtttctgcttggctttctcactgaaaagtaaattggggaaaatgctgcttttactattttgcattttatagcaacattaacagtcttttcccagtcaggtgctgtccagggaacatgtttcccttgggaggtctgaacagagtgacctggcttgatgtatttcctgagctctagtaccatatcatagaattagttaaatgtagtcaacagcaatgtcagaacaattgacattgtctttccaagagtgaatgcattggctttcggaactgctactagagacatacatgaggcagcgaacacatctttaggtgggggcaaggctatatctgattgacagagatctctgatctctaatgacatattgctattgtcctattatgtttaaatttgaacctaaatcacttgagtgttatgagtgatggctatataacatgctgtttggttagatttacagtgtgtttttatgttgcagtttagtttgaaacaacacttaagcacactatttctgttagtgtatatagttttcaaactaacaagcctgcgatccttgttagtgtagtgactgcctctttaggagtatggggccctagggtgtccatatatttttaccccatgggtcattctagtctaaggactactagtagaaccctcaaaaggtaattgctattatagggacttacttattggagactggtaatataataaaatattgaaggagtggccatggtcttagcaggttttagaatgaccttttaactccagtaactacttccttggtattggtatccttgatagagggaatataacatctggcagtaatctcattcaggttatactacctgactaaatttaatcatactttcatgtatttgtttcctcagttggacctaagttactgtatttgtttttcttatttttttattattgtacagtttctttacctttcaagtataaatgtgtatataaaatgtaaatacaaagaattcactaaaaaccactcataacaattactgtgtaaataaaactggtaagcagagtaattacttgaaatgagtcttcattactttggggatatctgttttatttaactgcatctcaaggaaacaaaggaaataatctttgtttttgtttgccaaatttgtcttccaaggaatgcactaagccttcagtctttttagactgacagtactggcagctaaaatattgtactgtatcttctcttgagcccagtatgtaggaaatatgtgataattcacatggtcagtatatggcagtttttgttgttgttgttacagtatattttcaattaaaaaaaaacttttcctaaaatactcaaaataatgtgaaatttaatatggtgtttcatttgtttgtctactcaatatatatatttcttacttaatgttcctttagtccaggtctacaatgccttatttaaatgc

SEQ ID NO: 14028 - DNA, 5600 bp, Homo sapiens
ctctccagaggcgggccctgagccggcacctcccctttcggacagctcaagggactcagccaactggctcacgcctccccttcagcttctcttcacgcactccaagatctaaaccgagaatcgaaactaagctggggtccatggagcctgcacccgcccgatctccgaggccccagcaggaccccgcccggccccaggagcccaccatgcctccccccgagaccccctctgaaggccgccagcccagccccagccccagccctacagagcgagcccccgcttcggaggaggagttccagtttctgcgctgccagcaatgccaggcggaagccaagtgcccgaagctgctgccttgtctgcacacgctgtgctcaggatgcctggaggcgtcgggcatgcagtgccccatctgccaggcgccctggcccctaggtgcagacacacccgccctggataacgtctttttcgagagtctgcagcggcgcctgtcggtgtaccggcagattgtggatgcgcaggctgtgtgcacccgctgcaaagagtcggccgacttctggtgctttgagtgcgagcagctcctctgcgccaagtgcttcgaggcacaccagtggttcctcaagcacgaggcccggcccctagcagagctgcgcaaccagtcggtgcgtgagttcctggacggcacccgcaagaccaacaacatcttctgctccaaccccaaccaccgcacccctacgctgaccagcatctactgccgaggatgttccaagccgctgtgctgctcgtgcgcgctccttgacagcagccacagtgagctcaagtgcgacatcagcgcagagatccagcagcgacaggaggagctggacgccatgacgcaggcgctgcaggagcaggatagtgcctttggcgcggttcacgcgcagatgcacgcggccgtcggccagctgggccgcgcgcgtgccgagaccgaggagctgatccgcgagcgcgtgcgccaggtggtagctcacgtgcgggctcaggagcgcgagctgctggaggctgtggacgcgcggtaccagcgcgactacgaggagatggccagtcggctgggccgcctggatgctgtgctgcagcgcatccgcacgggcagcgcgctggtgcagaggatgaagtgctacgcctcggaccaggaggtgctggacatgcacggtttcctgcgccaggcgctctgccgcctgcgccaggaggagccccagagcctgcaagctgccgtgcgcaccgatggcttcgacgagttcaaggtgcgcctgcaggacctcagctcttgcatcacccaggggaaagatgcagctgtatccaagaaagccagcccagaggctgccagcactcccagggaccctattgacgttgacctgcccgaggaggcagagagagtgaaggcccaggttcaggccctggggctggctgaagcccagcctatggctgtggtacagtcagtgcccggggcacaccccgtgccagtgtacgccttctccatcaaaggcccttcctatggagaggatgtctccaatacaacgacagcccagaagaggaagtgcagccagacccagtgccccaggaaggtcatcaagatggagtctgaggaggggaaggaggcaaggttggctcggagctccccggagcagcccaggcccagcacctccaaggcagtctcaccaccccacctggatggaccgcctagccccaggagccccgtcataggaagtgaggtcttcctgcccaacagcaaccacgtggccagtggcgccggggaggcagaggaacgcgttgtggtgatcagcagctcggaagactcagatgccgaaaactcgtcctcccgagagctggatgacagcagcagtgagtccagtgacctccagctggaaggccccagcaccctcagggtcctggacgagaaccttgctgacccccaagcagaagacagacctctggttttctttgacctcaagattgacaatgaaacccagaagattagccagctggctgcggtgaaccgggaaagcaagttccgcgtggtcatccagcctgaagccttcttcagcatctactccaaggccgtgtccctggaggtggggctgcagcacttcctcagctttctgagctccatgcgccgccctatcttggcctgctacaagctgtgggggcctggcctcccaaacttcttccgggccctggaggacattaacaggctgtgggaattccaggaggccatctcgggcttcctggctgccctgcctctcatccgggagcgtgtgcccggggccagcagcttcaaactcaagaacctggcccagacctacctggcgagaaacatgagcgagcgcagcgccatggctgccgtgctggccatgcgtgacctgtgccgcctcctcgaggtctccccgggcccccagctggcccagcatgtctaccccttcagtagcctgcagtgctttgcctccctgcagcccctggtgcaggcagctgtgctgccccgggctgaggcccgcctcctggccctacacaacgtgagcttcatggagctgctgagtgcacaccgccgtgaccggcaggggggcctgaagaagtacagccgctatctaagcctgcagaccaccacgttgccccctgcccagcctgctttcaacctgcaggctctgggcacctactttgaaggcctgttggagggtccggcgctggcacgggcagaaggagtctccaccccacttgctggccgtggcttggcagagagggcctcccagcagagctgagaggagggggtgaccagcttggagtctctggtgggcagagagggatggggtccctgagccaggccccacccatcacagcattcccaggtcctggtacccagccctcagttgtcatttggttcagaatcagttccctttctctgggaccaaatttcccttctctaaacatcctacagagaaggttccaaagctgagcacccatcaccctaggtgtgcaccagactcctattagcccctccttccaggagctagaaccagggaggtcctgagtgaggaaggcatgacctctgggctctctaggtggccctggtcttgccccatccatcccacctgccactaccttgggtgtccttacagctctgccctgaccccagcccctgcccctggacacctgctgacagctcccacacagaacagtctgaggtgatgctggctacagccctggcagcccatggcaactcaaagtgccttccaaaccaaactgcccctcatgaggttagggtcccccaccctccacctgcccagaggccaactctgttcccttctcctttcatcccagaggggcctcatcagcaaagacagaaactgatgttccatgcatgtccctgcttccaaagcctgaccttccaaagcttgcttccttcctcctggctgcacagacacctctgcttggccacagctttgctctttggtcctcaggccaccagacccctcacagcatggcccttggctcttcctgcactgccctcaccctcagccgtcccaaggagtgcccagcactactcagcatgtagtccaggacctgcggcatcagcatcccctgggagcttcttagaaatgcagacctgtgggctctaccacaggcctctggaatcagaatcttcagggtggggcccagcagtctgtgttttaacaggttctcccggtgatgctggtgcatgctcaagtttgagaaccgctgctctcatagactgctcctccaaggggaagcagtgtggaacagcagagaaagtcccgtccctatctctgactgtgcagtgagtgtggcctaggaacaggtcccttcctaagctctagtgtccccatctgtaaaatgggctgattggcctccacggtcagagcggccatctggctgtgccatcctgcatttttaggaatggaaagcaggcctctgaggcagtggacaggaagacttctcatccttgaattctagctcccattccaaactgttagtccccaaccttgtggtcacatcagaggtcaacagcagaacagaggcaggtcagggttgtccgctctgattagcagaacgacagccccttcctcctcctccctccttcccatccctactcattagctccctgctcctgggatgcttcccaagcagcccaggcctctagcctccatggctgatgacctcagctttcacactggtgaagtctgtgtacccatactgcagccccatcccatggggcccctgaagacccactgaggaattccgtagggtcttgttcccacgaccggagtgctggctctcacagtgaattttgatgcatttaaaataagattctgatgccagactgttaaaacaggcgctggttctgaagcaccgatggaaacagattgatgcagatggaaggaggaagggagactgggcccactgatttccagccccaccatgtgtgctgttttcagatgtgattgaggggtgttctgccctgcctccactgtcacagcctttaataaagatgtgaatcttgaaagcctgatgctccaatcacagactctgctcagcatccccagaggaaccactgagaagccttttgcctggataggagggggctctcccaggcataggcttgtggccacttgcccagcacaactgtgttttgtggggcgtcttttaggacttagcagagctgagagccctttgttgctcaatgctgtgagccttaagcatgtgaatccccccacatgacaagtggggagacccagggtaggctttcctttggatcatctccaaatgggagtgccatgtggcaggaaagaagcaccgatttcaagaattacttcctagagaaagtcaggaactagagaccagagtctgcaggaactttgccactgcccttcactggctaatcctgtacttctctctgtgttccttgagtgacaggtggtaaaacccttaaaaagggaggtgtgggaggcccaggactttggtaacaggtgatgaatgtgttgtcttggccatcacaggtggagcttcagttagtacccgagggattcccctggcacaagcattataggaattagtccaccactggcgtgggtgagcagccaggtaatgggaattgatcagtgccaccacccttgaccccaactaccatcccagatgcccagattccagtcctggagttttattctctcagcttgatcctttgaccaagaagatccagtcccaatatgtcacctgtgcttcatctttggactatatctcaggtgtttacgtgtcaactaatgggagcttactgggttagaagtcaggacactgagtttcaatcctcacttagtagtctgtggccctctttggcacattaacctccctccttgatcctcaggctgcacctctggcaaatgggagaatgcggctccttttgacttcaagggatctttgtgggaaccaatgagaaaatgtgtgtgaagatagctttttggtatattttaaaagtgcacaaatttaagatcttactgctttataaagtgctttatgaattataggaaaataaacacattttagatcttagaaaaaaa

SEQ ID NO: 14029 - DNA, 1753 bp, Homo sapiens
ctctgtttacgaatgtttgggcgcgaattactctaagcgcggctctcagaagggtgcaagaagaatcagtgcactgtgtttagatcaagatgtctggtaaagcaaatgcttccaagaaaaacgctcaacagttaaaaagaaatccaaagagaaaaaaggataatgaggaagttgtgttgtcagagaataaggttagaaacacagtgaaaaaaaataaaaatcatctgaaagatctgtcttctgaaggacaaacaaagcacactaacctaaaacacggaaagacagcagccagcaagagaaaaacctggcaacctctgtcaaagagtaccagagaccatttgcaaactatgatggaatcagtaataatgacaattttgagtaacagtattaaagaaaaagaagaaatacaataccatctcaacttcctgaagaaaagattgctacaacagtgtgaaactctgaaagtccctcccaaaaagatggaagatttaactaatgtatcaagtctactgaatatggaaagggcacgagacaaagctaatgaagaaggtctggcattactacaggaagaaatagataaaatggtagagaccacagagttaatgactgggaatattcagagcctaaagaacaaaattcagattctggcaagtgaggtggaagaagaagaggagagagtaaaacagatgcatcaaataaatagtagtggagtactctctcttccggaactttctcagaaaactctcaaagcacccacacttcagaaagaaattttggcgctaattccaaaccagaatgctcttctaaaggacttggatattcttcataattcatcacagatgaagagcatgtcaaccttcattgaagaagcctataagaaactggatgcatcttaaagagtgttttttttttagattgttccatattaatttaatgttcgtgaatttgtaaaactgttaacctatgattatatgtacagaggctaaggcttctgcaggatttattatctcctgatatgcactttaaaattagtctttgtagttctatcattagcatctaatgtagttctgaagactgtttttagcagttgccaaatctaggaaactaacatttatattgctgtatctataagtatttgcctaaaaccataaaataggaattgccttaaggatctaatagtttataatgcctgaatggaactcatttattggttaacagctcatatcaggagctgtgataagtaagtgtttacatacactgtctagtgcataaaaaccttagtgtttgctatcattcattctgtagccaatggcttacagtttctgtctggtcatctggaacttgaaaaatcctcaaatgccttcactcttttacctaactccctagtctttttgggaagtagttaagatatgcctgctatctttaactttggaggtagtatcaaaattttacttctttggttgtttagtgaattaatgttgaatattttctactgtcatcaaaacatattcccaaaaagtattaaaaaggaaccttagcacatttattttattaaaacaagaaaacccaaaatatataaaccttttcttattatgataataagcttatatatgtgaataagttataacctagtgtataaaaaattatttctaacaaactacagtatactgtcttgggtttttttttttttttttagtctgtaaaataaaatgactgcaattactttttaaaaaaaaaaaaaaaaaaaaaaaaa

SEQ ID NO: 14030 - DNA, 3132 bp, Homo sapiens
atgaacttttctgtaatcacctgccccaacggtggtaccaaccaagggcttctgccttacctgatggccctggatcagtatcagctggaggaattcaagctttgcttggaaccccagcagctgatggacttctggtcggccccccaggggcacttcccgcgtatcccctgggcaaacttgagagctgccgaccctttgaatctgtcctttcttttggatgaacacttcccaaaaggtcaggcatggaaagtggtcctcggcatcttccagacaatgaatctgacctcactgtgtgagaaagttagagccgagatgaaagagaatgtgcagacccaagagctgcaagatccaacccaggaagatctagagatgctagaagcagcagcagggaatatgcagacccagggatgccaagatccaaaccaagaagaactagacgagctagaagaagaaacagggaatgtacaggcccagggatgccaagatccaaaccaagaagaaccagagatgctagaggaagcagaccacagaagaaaatacagagagaacatgaaggctgaactactggagacatgggacaacatcagttggcctaaagaccacgtatatatccgtaatacatcaaaggacgaacatgaggaactgcagcgcctactggatcctaataggactagagcccaggcccagacgatagtcttggtggggagggcaggggttgggaagaccaccttggcaatgcgggctatgctgcactgggcaaatggagttctctttcagcaaaggttctcctatgttttctatctcagctgccataaaataaggtacatgaaggaaactacctttgctgaattgatttctttggattggcccgattttgatgcccccattgaagagttcatgtctcaaccagagaagctcctgtttattattgatggctttgaggaaataatcatatctgagtcacgctctgagagcttggatgatggctcgccatgtacagactggtaccaggagctcccagtgaccaaaatcctacacagcttgttgaagaaagaattggttcccctggctaccttactgatcacgatcaagacctggtttgtgagagatcttaaggcctcattagtgaatccatgctttgtacaaattacagggttcacaggggacgacctacgggtatatttcatgagacactttgatgactcaagtgaagttgagaaaatcctgcagcagctaagaaaaaacgaaactctctttcattcctgcagtgcccccatggtgtgttggactgtatgttcctgtctgaagcagccgaaggtgaggtattacgatctccagtcaatcactcagactaccaccagtctgtatgcctattttttctccaacttgttctccacagcagaggtagatttggcagatgacagctggccaggacaatggagggccctctgcagcctggccatagaagggctgtggtctatgaacttcacatttaacaaagaagacactgagattgagggcctggaagtgcctttcattgattctctctacgagttcaatattcttcaaaagatcaatgactgtgggggttgcactactttcacccacctaagtttccaggagttttttgcagccatgtcctttgtgctagaggaacctagagaattccctccccattccacaaagccacaagagatgaagatgttactgcaacacgtcttgcttgacaaagaagcctactggactccagtggttctgttcttctttggtcttttaaataaaaacatagcaagagaactggaagatactttgcattgtaaaatatctcccagggtaatggaggaattattaaagtggggagaagagttaggtaaggctgaaagtgcctctctccaatttcacattctacgactttttcactgcctacatgagtcccaggaggaagacttcacaaagaagatgttgggtcgtatctttgaagttgaccttaatattttggaggacgaagaactccaagcttcttcattttgcctaaagcactgtaaaaggttaaataagctaaggctttctgttagcagtcacatccttgaaagggacttggaaattctggagacaagcaagtttgattccaggatgcacgcatggaacagcatttgctctacgttggtcacaaatgagaatctgcatgagctagacctgagtaacagcaaacttcatgcttcctctgtgaagggtctctgtcttgcactgaaaaatccaagatgcaaagtccagaaactgacgtgcaaatcggtaactcctgagtgggttctgcaggacctcattattgcccttcagggtaacagcaagctgacccatctgaacttcagctctaacaagctgggaatgactgtccccctgattcttaaagctttgagacactcagcttgcaacctcaagtatctgtgcctggagaaatgcaacttgtcggcagccagctgtcaggacctagccttgtttctcaccagcatccaacacgtaactcgattgtgcctgggatttaatcggctccaagatgatggcataaagctattgtgtgcggccctgactcaccccaagtgtgccttagagagactggagctctggttttgccagctggcagcacccgcttgcaagcacttgtcagatgctctcctgcagaacaggagcctgacacacctgaatctgagcaagaacagcctgagagacgagggagtcaagttcctgtgtgaggccttgggtcgcccagatggtaacctgcagagcctgaatttgtcaggttgttctttcacaagagagggctgtggagagctggctaatgccctcagccataatcataatgtgaaaatcttggatttgggagaaaatgatcttcaggatgatggagtgaagctactgtgtgaggctctgaaaccacatcgtgcattgcacacacttgggttggcgaaatgcaatctgacaactgcttgctgccagcatctcttctctgttctcagcagcagtaagagcctggtcaatctgaaccttctaggcaatgaattggatactgatggtgtcaagatgctatgtaaggctttgaaaaagtcgacatgcaggctgcagaaactcgggtga

SEQ ID NO: 14031 - DNA, 6786 bp, Homo sapiens
ctctttctccccaggccgaagcctcgggacggccctggaagccgaccatggcagccgtgaccatgtcggtgcccgggcggaaggcgccccccaggccgggcccagtgcccgaggcggcccagccgttcctgttcacgccccgcgggcccagcgcgggtggcgggcctggctcgggcacctccccgcaggtggagtggacggcccggcgtctcgtgtgggtgccttcggagcttcacgggttcgaggcggcggcgctgcgggacgaaggcgaggaggaggcggaggtggagctggcggagagcgggaggcggctgcgactgccgcgggaccagatccagcgcatgaacccgcccaagttcagcaaggccgaggacatggccgagctgacctgcctcaacgaggcctcggtcctgcacaacctccgggagcggtactactccggcctcatctacacgtactccggccttttctgtgtggtcatcaacccgtacaagcagcttcccatctacacagaagccattgtggagatgtaccggggcaagaagcgccacgaggtgccaccccacgtgtacgcagtgaccgagggggcctatcggagcatgctgcaggatcgtgaggaccagtccattctctgcactggagagtctggagctgggaagacggaaaacaccaagaaggtcatccagtacctcgcccacgtggcatcgtctccaaagggcaggaaggagccgggtgtccccggtgagctggagcggcagctgcttcaggccaaccccatcctagaggcctttggcaatgccaagacagtgaagaatgacaactcctcccgattcggcaaattcatccgcatcaactttgatgttgccgggtacatcgtgggcgccaacattgagacctacctgctggagaagtcgcgggccatccgccaggccaaggacgagtgcagcttccacatcttctaccagctgctggggggcgctggagagcagctcaaagccgacctcctcctcgagccctgctcccactaccggttcctgaccaacgggccgtcatcctctcccggccaggagcgggaactcttccaggagacgctggagtcgctgcgggtcctgggattcagccacgaggaaatcatctccatgctgcggatggtctcagcagttctccagtttggcaacattgccttgaagagagaacggaacaccgatcaagccaccatgcctgacaacacagctgcacagaagctctgccgcctcttgggactgggggtgacggatttctcccgagccttgctcacccctcgcatcaaagttggccgagactatgtgcagaaagcccagactaaggaacaggctgacttcgcgctggaggccctggccaaggccacctacgagcgcctcttccgctggctggttctgcgcctcaaccgggccttggaccgcagcccccgccaaggcgcctccttcctgggcatcctggacatcgcgggctttgagatcttccagctgaactccttcgagcagctctgcatcaactacaccaacgagaagctgcagcagctcttcaaccacaccatgttcgtgctggagcaggaggagtaccagcgtgagggcatcccctggaccttcctcgactttggcctcgacctgcagccctgcatcgacctcatcgagcggccggccaacccccctggactcctggccctgctggatgaggagtgctggttcccgaaggccacagacaagtcgtttgtggagaaggtagcccaggagcagggcggccaccccaagttccagcggccgaggcacctgcgggatcaggccgacttcagtgttctccactacgcgggcaaggtcgactacaaggccaacgagtggctgatgaaaaacatggaccctctgaatgacaacgtcgcagccttgctccaccagagcacagaccggctgacggcagagatctggaaagacgtggagggcatcgtggggctggaacaggtgagcagcctgggcgacggcccaccaggtggccgcccccgtcggggtatgttccggacagtgggacagctctacaaggagtccctgagccgcctcatggccacactcagcaacaccaaccccagttttgtccggtgcattgtccccaaccacgagaagagggccgggaagctggagccacggctggtgctggaccagcttcgctgcaacggggtcctggagggcatccgcatctgtcgccagggcttccccaaccgcatcctcttccaggagttccggcagcgatacgagatcctgacacccaatgccatccccaagggcttcatggatgggaagcaggcctgtgaaaagatgatccaggcgctggaactggaccccaacctctaccgcgtgggacagagcaagatcttcttccgggctggggtcctggcccagctggaagaggagcgagacctgaaggtcaccgacatcatcgtctccttccaggcagctgcccggggatacctggctcgcagggccttccagaagcgccagcagcagcagagcgccctgagggtgatgcagcggaactgcgcggcctacctcaagctgagacactggcagtggtggcggctgtttaccaaggtgaagccactgctgcaggtgacgcggcaggatgaggtgctgcaggcacgggcccaggagctgcagaaagtgcaggagctacagcagcagagcgcccgcgaagttggggagctccagggccgagtggcacagctggaagaggagcgcgcccgcctggcagagcaattgcgagcagaggcagaactgtgtgcagaggccgaggagacgcgggggaggctggcagcccgcaagcaggagctggagctggtggtgtcagagctggaggctcgcgtgggcgaggaggaggagtgcagccgtcaaatgcaaaccgagaagaagaggctacagcagcacatacaggagctagaggcccaccttgaggctgaggagggtgcgcggcagaagctgcagctggagaaggtgacgacagaggcaaaaatgaagaaatttgaagaggacctgctgctcctggaagaccagaattccaagctgagcaagagcggaagctgctggaagatcgtctggccgagttctcatcccaggcagctgaggaggaggagaaggtcaagagcctcaataagctacggctcaaatatgaggccacaatcgcagacatggagggaccgcctacggaaggaggagaagggtcgccaggagctggagaagctgaagcggaggctggatggggagagctcagagctgcaggagcagatggtggagcagcaacagcgggcagaggagctgcgggcccagctgggccggaaggaggaggagctgcaggctgccctggccagggcagaagacgagggtggggcccgggcccagctgctgaaatccctgcgggaggctcaagcagccctggccgaggcccaggaggacctggagtctgagcgtgtggccaggaccaaggcggagaagcagcgccgggacctgggcgaggagctggaggcgctgcggggcgagctggaggacacgctggactccaccaacgcacagcaggagctccggtccaagagggaacaggaggtgacggagctgaagaagactctggaggaggagactcgcatccacgaggcggcagtgcaggagctgaggcagcgccacggccaggccctgggggagctggcggagcagctggagcaggcccggaggggcaaaggtgcatgggagaagacccggctggccctggaggccgaggtgtccgagctgcgggcagaactgagcagcctgcagactgcacgtcaggagggtgagcagcggaggcgccgcctggagttacagctgcaggaggtgcagggccgggctggtgatggggagagggcacgagcggaggctgctgagaagctgcagcgagcccaggctgaactggagaatgtgtctggggcgctgaacgaggctgagtccaaaaccatccgtcttagcaaggagctgagcagcacagaagcccagctgcacgatgcccaggagctgctgcaggaggagaccagggcgaaattggccttggggtcccgggtgcgagccatggaggctgaggcagccgggctgcgtgagcagctggaggaggaggcagctgccagggaacgggcgggccgtgaactgcagactgcccaggcccagctttccgagtggcggcggcgccaggaggaggaggcaggggcactggaggcaggggaggaggcacggcgccgggcagcccgggaggccgaggccctgacccagcgcctggcagaaaagacagagaccgtggatcggctggagcggggccgccgccggctgcagcaggagctggacgacgccaccatggacctggagcagcagcggcagcttgtgagcaccctggagaagaagcagcgcaagtttgaccagcttctggcagaggagaaggcagctgtacttcgggcagtggaggaacgtgagcgggccgaggcagagggccgggagcgtgaggctcgggccctgtcactgacacgggcactggaggaggagcaggaggcacgtgaggagctggagcggcagaaccgggccctgcgggctgagctggaggcactgctgagcagcaaggatgacgtcggcaagagcgtgcatgagctggaacgagcctgccgggtagcagaacaggcagccaatgatctgcgagcacaggtgacagaactggaggatgagctgacagcggccgaggatgccaagctgcgtctggaggtgactgtgcaggctctcaagactcagcatgagcgtgacctgcagggccgtgatgaggctggtgaagagaggcggaggcagctggccaagcagctgagagatgcagaggtggagcgggatgaggagcggaagcagcgcactctggccgtggctgcccgcaagaagctggagggagagctggaggagctgaaggctcagatggcctctgccggccagggcaaggaggaggcggtgaagcagcttcgcaagatgcaggcccagatgaaggagctatggcgggaggtggaggagacacgcacctcccgggaggagatcttctcccagaatcgggaaagtgaaaagcgcctcaagggcctggaggctgaggtgctgcggctgcaggaggaactggccgcctcggaccgtgctcggcggcaggcccagcaggaccgggatgagatggcagatgaggtggccaatggtaaccttagcaaggcagccattctggaggagaagcgtcagctggaggggcgcctggggcagttggaggaagagctggaggaggagcagagcaactcagagctgctcaatgaccgctaccgcaagctgctcctgcaggtagagtcactgaccacagagctgtcagctgagcgcagtttctcagccaaggcagagagcgggcggcagcagctggaacggcagatccaggagctacggggacgcctgggtgaggaggatgctggggcccgtgcccgccacaagatgaccattgctgcccttgagtctaagttggcccaggctgaggagcagctagagcaagagaccagagagcgcatcctctctggaaagctggtgcgcagagctgagaagcggcttaaagaggtggtgctccaggtggaggaggagcggagggtggctgaccagctccgggaccagctggagaagggaaaccttcgagtcaagcagctgaagcggcagctggaggaggccgaggaggaggcatcccgggctcaggctggccgccggaggctgcagcgtgagctggaagatgtcacagagtcggccgagtccatgaaccgtgaagtgaccacactgaggaaccggcttcgacgcggccccctcaccttcaccacccgcacggtgcgccaggtcttccgactagaggagggcgtggcatccgacgaggaggcagaggaagcacagcctgggtctgggccatccccggagcctgaggggtccccaccagcccacccccagtgaccctaccctgtccccagatgcactaacagatggggcccagcccccttcctccctggaccccacgggcccctgtcccaggaaccccgccctctgacttcttgccctttggaaatggtgcagcactctggcatttatcacccccacctgggtcccctgcaacctcccatcaaaggatgacccctaaacacagaggagcggggcaggcagggaggcaaggactggagctaccttgcttgttgggggactgggtacagttggcaagctgtgtttccatcagctccctgtcctcctttcttccctcgttattgatctatagacattaggaagggagtgagacggctcctccaccatcctcagccagtgcaacccattccctctgcttctctctctctctctctctctccctccctctccttccctaccctctcaccatctttcttggcctctctgagggtctctctgtgcatctttttaggaatctcgctctcactctctacgtagccactctccttcccccatttctgcgtccacccctgaactcctgagcgacagaagccccaggcctccaccagccttgaacccttgcaaaggggcaggacaaggggacccctctcactcctgctgctgcccatgctctgccctcccttctggttgctctgagggttcggagcttccctctgggactaaaggagtgtcctttaccctcccagcctccaggctctggcagaaataaactccaacccgactggac

SEQ ID NO: 14032 - DNA, 4018 bp, Homo sapiens
gttccgcccgccgctcttccagctgagactcggcagcggcggtcggagcggctgccacgccgcacctgcccgcgagggggcgcgccaggcccaggccgcagccgactgccgcgctctctgtccccgccctccgccatccccggactgcgctcacctgtctgggccgctggcctgggaggcgggggccggcgggagccaagccgaggaaagggcggagcggctctccgggcgcgtcatcggagcaccatggcggagctaggagctggcggcgacggccacaggggcggcgacggcgcagtgcgaagcgaaacagcacccgacagctacaaagtgcaagataagaaaaatgcctccagccgccctgcctctgcaatttcaggacaaaataacaaccactcaggaaataaaccagaccctccgcctgtgttacgtgttgatgaccggcagcggctggcccgggagcgacgtgaggaacgggagaaacagctagctgcaagagaaatagtgtggttagaaagagaagagcgagccaggcagcactacgagaagcacctggaagagcggaagaagaggttggaggagcagaggcagaaggaggagcggaggagggctgctgtggaggagaagcggaggcagagacttgaggaggacaaagaacgccacgaagctgttgtacggcgcacaatggaaaggagccagaagccaaaacagaagcataaccgttggtcgtggggaggctctctccatgggagccctagcatccacagtgcagatccagacaggcggtcagtttccaccatgaatctttcgaaatatgttgatcccgtcattagcaagcggctctcctcttcatctgcaactttactaaattctccagatagagctcgccgcctgcagctcagcccatgggagagcagcgttgttaacagactcctgacgcccacacattcgttcctggccagaagtaaaagcacagctgccttgtctggagaagcagcatcttgcagccccatcatcatgccctacaaagctgcacactctagaaattcgatggatcgaccaaaactctttgtaacaccacctgagggctcttctcgcaggaggatcattcatggcacagcgagctataaaaaagaaagagagagagaaaatgtactcttcctcacatctggcacccgaagggctgtatctccatctaatcccaaagcaagacaaccagctcgctcccgactttggcttccgtccaagtctcttcctcatttgcctggcacacccagaccgacatcctccttgccacccggctcagtcaaagctgctcctgctcaggtccggcccccatcccccggcaacatccgccctgtcaagagggaagtcaaagtggagcctgagaagaaagatcctgagaaggaacctcagaaagttgccaatgagccctcactaaagggcagagcacctttagtgaaggtagaagaagccacagttgaagagcggacacctgctgaaccagaagttggccctgctgctccagccatggccccagctccagcctcggccccagctccagcctcggccccagctccagccccggtccccaccccagccatggtctcagccccgtcatccactgtgaatgccagtgcttctgttaagacttctgcaggcaccaccgacccagaggaggccacaaggcttctagctgagaagaggcggctggcccgagagcagagagaaaaggaagaaagggagaggagggagcaggaagagcttgaaagacaaaagagagaggaattggctcaacgtgtggctgaagagaggacgactcgccgtgaggaggagtcgcgcaggctggaagccgagcaggcccgggagaaggaggagcagctgcagcggcaggcggaggagcgggcgctgcgcgagcgggaggaggcagagcgcgcccagaggcagaaagaagaagaagctcgcgttcgtgaagaagcagagagggtccggcaggaacgagagaagcatttccagagagaagagcaagagcgcctggagagaaagaagcgacttgaggagattatgaaaagaaccaggagaacagaagctacagataagaaaaccagtgatcagagaaacggtgatatagccaagggagctctcactggaggaacagaggtgtctgcacttccatgtacaacaaacgctccgggaaatggaaagccagttggcagcccacatgtggttacctcacaccagtcaaaagtgacagtggagagcactcccgatttggaaaaacaaccaaatgaaaatggtgtatctgttcagaatgaaaattttgaagaaattataaacttacccattggatctaaaccatccagattagatgtcaccaacagtgagagcccagaaattcctttgaatccaattttggcctttgatgatgaagggacacttgggcccctgcctcaggtagatggtgttcagacacagcagactgcagaagttatatgagtgtttcttctgaagaaccaaagctgaaatttaatgagaatttctacaattaatggaattcctttcctgctataaaggagcatcccctccacccgttttctagagttcttgaccatcattttgaaaagatttattaaaactagctaaagacaacagactggatagcttttctaataattttcatcaataggaaaaaagaaatacgtctcattcttcaatactttaaaatggctttttccagtgtgctccttcttagcaatcaatatttttctgcattctttaaaagacaagagaatttggttataaaagaaatgggctgactaggcatgatttttttggtcttaaaagcttaacatgtaaaattggcaaaaaaaattttttaccttttataatacttgaaaaataagtacctctttgttctacaagtagaatgaataggagaagagtttaagcctgtttttttaaaatattattgcaaagagctctatttgtagaagcaaattataggcagattaccaggttcttataaatacagcttgtacatggacattctgcaaacccagctgtcacatttttcttgcaactccttttgcaaaagcagactaaaatgttttaaaatgtgaaaaaacattattttttcaaagcaagaaaataatttactgccctcttacataatgtatttataaagtttttccagataaactaatcaaataaattagaataatgtgacaacattacaaatttaatttgttagctgcattccttctgatgttaccacgatagaatgttactgatgattcagggctatttctgaagtctgtatgttgctgctgtccccagtgatggtggacttatctttgccttacctgatcacaaattatgttggggaaaataaagatttaatatttctttaaatagaaaaagaatttggttttgctcgtttaagagcaatgagaaaatgatggaatgttgactgtgtttggcacacaggacacggaccttcatggaagtccttgctctgcgtggcatctgtcagcttttcacctttcattcttattcttcacttttgctgctgagcctagctgtacaaacttgcactttcatttgctaatataaattcagttttattttaccattttagagactactaatgattaaatgtagaaggagagggtgcacatgtttttatgtggagtgtttaaaagataaatttataccactgtaatgtgcagcttttattaaaagagaaattggttgaactgctaggttgaatgagagacttcatctattggactattttttttaatccaggcatatggtctttagtaatggcttgtaatttgtgaaaacattaatttgggggttttccctgttttcagttgtccatgtacacatagtcattatattagaaaagaaagctgttcaacaaacttgtttaatttgtttaaatcaacatagcatgaaacaccaaataaaatgtttgacatagttttaaaaaaaaaaaaaaaaaaaaaaaaaaaaa

SEQ ID NO: 14033 - DNA, 2591 bp, Homo sapiens
actggggggtgtgaggaacaggggggaccatggacttcatcagcattcagcagttggtaagtggagaaagagttgaagggaaagtgttgggatttggacatggagttcctgaccctggagcctggcctagtgactggaggaggggcccccaagaggctgtggcccgggagaagctgaaattggaagaagagaagaagaagaaacttgaaagatttaacagtaccagatttaatctggataacctggctgacttggaaaacttggttcaaagacggaaaaagcgactgagacacagagtcccccccaggaaacctgagcccctggttaagccgcagtcccaggcccaggtggagcctgtgggcctggagatgttcctgaaggcagctgctgagaaccaggagtacctgattgacaagtacttgacagacggaggggaccccaatgcccatgacaagctccaccgcaccgccttgcactgggcctgtctgaagggtcacagccagctggtgaacaagctgctggtggcaggtgccacagtggacgcgcgagacttgctggacaggacacctgtgttctgggcctgccgcggaggacatctggtcatcctcaaacagctgcttaaccagggagcccgggtcaatgcccgggacaagatcgggagcacccccctgcacgtggcagtgcgcacccggcaccccgactgcctggagcacctcatcgagtgtggcgcccacctgaacgcacaggataaggaaggggacacggctctgcacgaggccgtgcggcacggcagctacaaagccatgaagctactgctgctctatggggccgagctgggggtgcggaacgcggcctccgtgaccccggtgcagctggctcgagactggcagcgcggcatccgggaggccctgcaggcccacgtggcgcatccccgcacccggtgctgaccgcagcaccgccccccgccgcgcctttcgcactgccaccattccatcctgtgccccgcccccgcgtctgcacctctgtggttcctgccctcagccctggttcctccctctctggcctgtgccgcctcagcagccctggcagaactgaagagcggcaccgggcccagcaggcaaagagagaggcctccctggcttcgagtgtcaggggagccgcgttccctcccagggctggagcagaggaccacaaggcagcagaaagcgcgggtccagatgagggccaggaaggggaggagagtgagggccaagaacgagccttaagggagcagtcccaagctggagccacccagggctgggtctgggagtcctcagtgtccacttgtcccaggttagggggcttgccttgctctctccagggccagtctgtgtgtgtggggactcagcccgtggccggcagatgccatccaggatgtacaaggtgcagccaaggcaggccatgcaggggccgggcctgtctgcagctggtggatgcctgtgggcatggctttctctggggaccccattcctgtcagtagcaaccctggcagtgtccggagcggctctagacaactttggtcataggaactctggaggtgggttctggtcatctgaggtggctactcaacaggtttgaggccccacagcaacagaagtccaggacccactaggttgcctcagaagccctaagactgatgagctggagcgcgcatttgagagaagcctcgcacccactgtgtactggccccgctcaggccggcctggcacaccgttgcctgctggcggctctcatggggaagcgcctgggcactggggattgcttgtggcccactcaactcttggggcagtggcccgtaaccctagtttgcctgaggcccttatgtccccttatgttcctggtactggagcttgagctcttgcctggaacgctgcagctgcacccaccctgcttgatcccacctgggaggccaggacactgaggagctctgaacccagcccacagggaagcagaggaaggtgagcccccgccgccccccagcccttcccatcccttccctgctccctggtggtctaaggacccaagctccctagacttcctcttccaccgtctgtacgtttcaaattacactggtgtaggcctgtactgctggtggggctgggcccctaaacgccagaaagtgaatcttaagaagctctgccctaaactgagaaccacatgctgagggaagggctgaaaggtgaaggctcagcctccctcacatgggtcctgggttacattaggtaccgggctgattgataggcatttggccatggttccttttcgtctacctttgggggccttctcaggcccagaacaaggctgttgttactatgtggaaaagctgaccagtgctgcacactaggggcacacacctttccatgagcagctcctgccctgtggcgacagccagcgtgcacccagacgctggtgccatggcgaagcaggcgttcaagaccatggagaagacaactcctcatctagaaaatgaggacacctcagtgacaaacacacctttttataccaatcagtatcctctgttcattaaaactggctatccattaaaaaaaaaa

SEQ ID NO: 14034 - DNA, 1861 bp, Homo sapiens
gccggacggagggtggagggccctgcgcctgcgcggagctggagtccggctgggccgcagccgctgggagaccggcggttgccgtggggaccggtcgggcccctccctcctccggtcccccgccccaggcccttccccaccgagacgcgccggcggaccgcgggcgagtgcagccggtgacccggcgagaggcggcgccgctcccaagatgtcgcagacggccatgtccgaaacctacgattttttgtttaagttcttggttattggaaatgcaggaactggcaaatcttgcttacttcatcagtttattgaaaaaaaattcaaagatgactcaaatcatacaataggagtggaatttggttcaaagataataaatgttggtggtaaatatgtaaagttacaaatatgggatacagcaggacaagaacgattcaggtccgtgacgagaagttattaccgaggcgcggccggggctctcctcgtctatgatatcaccagccgagaaacctacaatgcgcttactaattggttaacagatgcccgaatgctagcgagccagaacattgtgatcatcctttgtggaaacaagaaggacctggatgcagatcgtgaagttaccttcttagaagcctccagatttgctcaagaaaatgagctgatgtttttggaaacaagtgcgctcacaggggagaatgtagaagaggcttttgtacagtgtgcaagaaaaatacttaacaaaatcgaatcaggtgagctggacccagaaagaatgggctcaggtattcagtacggagatgctgccttgagacagctgaggtcaccgcggcgcgcacaggccccgaacgctcaggagtgtggttgttaggagagcacacaggtgttcatacagtggcatttgggacacaatcgttggaacctgaagaatctgaagttttttttaccaccatctttttctactctgtatggaagtagatctttatggggaaaagagaatttggggtgttctgcaagccagtcaaagtggcacagcaaatcatataaatcgaattaaatggacaacaccgttagatgtgtatgtaaaaattttctgtttcatatttttcctttcactttcggtttaaaacatgctatatgtactgtatgtcctgtagcccagtgcggctccacagcatggaatctgatgtatgatatgatagaatgtggcactaaatgcagtttcagattttattttttttaatcatatgaactaaaattgtcaattgtgaggtgtgcttttctcatcatgttggttatattgcacaattggttatatttatgacctgatattcaaagactctggcattgatagccagtgtgttttcttatttaactccgtttactacattctacatggtgtttacgtgatccacacttgaaatactagatcagtagacattcactaatataccaaaataaaatgaaaaattgagtttttccgtgaactttatactgtccagctctgttgattttaaagcctcttcatccaggtcagttcaggaagtatatctggagtacctgctctgtttttggctgtgagactagcactaaggattctggtacctttacccaaacctactgggctactaatacttctctcagcagttgatcaaatacaatagaccatgtaagctggggccgctcatccacttccagtttgctggtctccctgctagaaaacacattgtactgtgctttttctggaattcagtataatggcatcactgcctgtttttcacatcttttgtttcctgttcattttaaggaaacctactaaatccagttaatattaaatggacaccactcaaaaaaaaaaaaaaaaaaa

SEQ ID NO: 14035 - DNA, 16872 bp, Homo sapiens
gaggtgcgcgcgcccgcgccgatgtgtgtgagtgcgtgtcctgctcgctccatgttgccgcctctcccggtacctgctgctgctcccggggctgcgggaaatgcgagaggctgagccggggaggaggaacccgagcagcagcggcggcggcggcggccgcggcggcgggagccccccaggaggaggaccgggatccatgtgtctttcctggtgactaggatgtcgtcggaggaggacaagagcgtggagcagccgcagccgccgccaccaccccccgaggagcctggagccccggccccgagccccgcagccgcagacaaaagacctcggggccggcctcgcaaagatggcgcttcccctttccagagagccagaaagaaacctcgaagtagggggaaaactgcagtggaagatgaggacagcatggatgggctggagacaacagaaacagaaacgattgtggaaacagaaatcaaagaacaatctgcagaagaggatgctgaagcagaagtggataacagcaaacagctaattccaactcttcagcgatctgtgtctgaggaatcggcaaactccctggtctctgttggtgtagaagccaaaatcagtgaacagctctgcgctttttgttactgtggggaaaaaagttccttaggacaaggagacttaaaacaattcagaataacgcctggatttatcttgccatggagaaaccaaccttctaacaagaaggacattgatgacaacagcaatggaacctatgagaaaatgcaaaactcagcaccacgaaaacaaagaggacagagaaaagaacgatctcctcagcagaatatagtatcttgtgtaagtgtaagcacccagacagcttcagatgatcaagctggtaaactgtgggatgaactcagtctggttgggcttccagatgccattgatatccaagccttatttgattctacaggcacttgttgggctcatcaccgttgtgtggagtggtcactaggagtatgccagatggaagaaccattgttagtgaacgtggacaaagctgttgtctcagggagcacagaacgatgtgcattttgtaagcaccttggagccactatcaaatgctgtgaagagaaatgtacccagatgtatcattatccttgtgctgcaggagccggcacctttcaggatttcagtcacatcttcctgctttgtccagaacacattgaccaagctcctgaaagatcgaaggaagatgcaaactgtgcagtgtgcgacagcccgggagacctcttagatcagttcttttgtactacttgtggtcagcactatcatggaatgtgcctggatatagcggttactccattaaaacgtgcaggttggcaatgtcctgagtgcaaagtgtgccagaactgcaaacaatcgggagaagatagcaagatgctagtgtgtgatacgtgtgacaaagggtatcatactttttgtcttcaaccagttatgaaatcagtaccaaccaatggctggaaatgcaaaaattgcagaatatgtatagagtgtggcacacggtctagttctcagtggcaccacaattgcctgatatgtgacaattgttaccaacagcaggataacttatgtcccttctgtgggaagtgttatcatccagaattgcagaaagacatgcttcattgtaatatgtgcaaaaggtgggttcacctagagtgtgacaaaccaacagatcatgaactggatactcagctcaaagaagagtatatctgcatgtattgtaaacacctgggagctgagatggatcgtttacagccaggtgaggaagtggagatagctgagctcactacagattataacaatgaaatggaagttgaaggccctgaagatcaaatggtattctcagagcaggcagctaataaagatgtcaacggtcaggagtccactcctggaattgttccagatgcggttcaagtccacactgaagagcaacagaagagtcatccctcagaaagtcttgacacagatagtcttcttattgctgtatcatcccaacatacagtgaatactgaattggaaaaacagatttctaatgaagttgatagtgaagacctgaaaatgtcttctgaagtgaagcatatttgtggcgaagatcaaattgaagataaaatggaagtgacagaaaacattgaagtcgttacacaccagatcactgtgcagcaagaacaactgcagttgttagaggaacctgaaacagtggtatccagagaagaatcaaggcctccaaaattagtcatggaatctgtcactcttccactagaaaccttagtgtccccacatgaggaaagtatttcattatgtcctgaggaacagttggttatagaaaggctacaaggagaaaaggaacagaaagaaaattctgaactttctactggattgatggactctgaaatgactcctacaattgagggttgtgtgaaagatgtttcataccaaggaggcaaatctataaagttatcatctgagacagagtcatcattttcatcatcagcagacataagcaaggcagatgtgtcttcctccccaacaccttcttcagacttgccttcgcatgacatgctgcataattacccttcagctcttagttcctctgctggaaacatcatgccaacaacttacatctcagtcactccaaaaattggcatgggtaaaccagctattactaagagaaaattttctcctggtagacctcggtccaaacagggggcttggagtacccataatacagtgagcccaccttcctggtccccagacatttcagaaggtcgggaaatttttaaacccaggcagcttcctggcagtgccatttggagcatcaaagtgggccgtgggtctggatttccaggaaagcggagacctcgaggtgcaggactgtcggggcgaggtggccgaggcaggtcaaagctgaaaagtggaatcggagctgttgtattacctggggtgtctactgcagatatttcatcaaataaggatgatgaagaaaactctatgcacaatacagttgtgttgttttctagcagtgacaagttcactttgaatcaggatatgtgtgtagtttgtggcagttttggccaaggagcagaaggaagattacttgcctgttctcagtgtggtcagtgttaccatccatactgtgtcagtattaagatcactaaagtggttcttagcaaaggttggaggtgtcttgagtgcactgtgtgtgaggcctgtgggaaggcaactgacccaggaagactcctgctgtgtgatgactgtgacataagttatcacacctactgcctagaccctccattgcagacagttcccaaaggaggctggaagtgcaaatggtgtgtttggtgcagacactgtggagcaacatctgcaggtctaagatgtgaatggcagaacaattacacacagtgcgctccttgtgcaagcttatcttcctgtccagtctgctatcgaaactatagagaagaagatcttattctgcaatgtagacaatgtgatagatggatgcatgcagtttgtcagaacttaaatactgaggaagaagtggaaaatgtagcagacattggttttgattgtagcatgtgcagaccctatatgcctgcgtctaatgtgccttcctcagactgctgtgaatcttcacttgtagcacaaattgtcacaaaagtaaaagagctagacccacccaagacttatacccaggatggtgtgtgtttgactgaatcagggatgactcagttacagagcctcacagttacagttccaagaagaaaacggtcaaaaccaaaattgaaattgaagattataaatcagaatagcgtggccgtccttcagacccctccagacatccaatcagagcattcaagggatggtgaaatggatgatagtcgagaaggagaacttatggattgtgatggaaaatcagaatctagtcctgagcgggaagctgtggatgatgaaactaagggagtggaaggaacagatggtgtcaaaaagagaaaaaggaaaccatacagaccaggtattggtggatttatggtgcggcaaagaagtcgaactgggcaagggaaaaccaaaagatctgtgatcagaaaagattcctcaggctctatttccgagcagttaccttgcagagatgatggctggagtgagcagttaccagatactttagttgatgaatctgtttctgttactgaaagcactgaaaaaataaagaagagataccgaaaaaggaaaaataagcttgaagaaactttccctgcctatttacaagaagctttctttggaaaagatcttctagatacaagtagacaaagcaagataagtttagataatctgtcagaagatggagctcagcttttatataaaacaaacatgaacacaggtttcttggatccttccttagatccactacttagttcatcctcggctccaacaaaatctggaactcacggtcctgctgatgacccattagctgatatttctgaagttttaaacacagatgatgacattcttggaataatttcagatgatctagcaaaatcagttgatcattcagatattggtcctgtcactgatgatccttcctctttgcctcagccaaatgtcaatcagagttcacgaccattaagtgaagaacagctagatgggatcctcagtcctgaactagacaaaatggtcacagatggagcaattcttggaaaattatataaaattccagagcttggcggaaaagatgttgaagacttatttacagctgtacttagtcctgcgaacactcagccaactccattgccacagcctcccccaccaacacagctgttgccaatacacaatcaggatgctttttcacggatgcctctcatgaatggccttattggatccagtcctcatctcccacataattctttgccacctggaagcggactgggaactttctctgcaattgcacaatcctcttatcctgatgccagggataaaaattcagcctttaatccaatggcaagtgatcctaacaactcttggacatcatcagctcccactgtggaaggagaaaatgacacaatgtcgaatgcccagagaagcacgcttaagtgggagaaagaggaggctctgggtgaaatggcaactgttgccccagttctctacaccaatattaatttccccaacttaaaggaagaattccctgattggactactagagtgaagcaaattgccaaattgtggagaaaagcaagctcacaagaaagagcaccatatgtgcaaaaagccagagataacagagctgctttacgcattaataaagtacagatgtcaaatgattccatgaaaaggcagcaacagcaagatagcattgatcccagctctcgtattgattcggagctttttaaagatcctttaaagcaaagagaatcagaacatgaacaggaatggaaatttagacagcaaatgcgtcagaaaagtaagcagcaagctaaaattgaagccacacagaaacttgaacaggtgaaaaatgagcagcagcagcagcaacaacagcaatttggttctcagcatcttctggtgcagtctggttcagatacaccaagtagtgggatacagagtcccttgacacctcagcctggcaatggaaatatgtctcctgcacagtcattccataaagaactgtttacaaaacagccacccagtacccctacgtctacatcttcagatgatgtgtttgtaaagccacaagctccacctcctcctccagccccatcccggattcccatccaggatagtctttctcaggctcagacttctcagccaccctcaccgcaagtgttttcacctgggtcctctaactcacgaccaccatctccaatggatccatatgcaaaaatggttggtacccctcgaccacctcctgtgggccatagtttttccagaagaaattctgctgcaccagtggaaaactgtacacctttatcatcggtatctaggccccttcaaatgaatgagacaacagcaaataggccatcccctgtcagagatttatgttcttcttccacgacaaataatgacccctatgcaaaacctccagacacacctaggcctgtgatgacagatcaatttcccaaatccttgggcctatcccggtctcctgtagtttcagaacaaactgcaaaaggccctatagcagctggaaccagtgatcactttactaaaccatctcctagggcagatgtgtttcaaagacaaaggatacctgactcatatgcacgacccttgttgacacctgcacctcttgatagtggtcctggaccttttaagactccaatgcaacctcctccatcctctcaggatccttatggatcagtgtcacaggcatcaaggcgattgtctgttgacccttatgaaaggcctgctttgacaccaagacctatagataatttttctcataatcagtcaaatgatccatatagtcagcctccccttaccccacatccagcagtgaatgaatcttttgcccatccttcaagggctttttcccagcctggaaccatatcaaggccaacatctcaggacccatactcccaacccccaggaactccacgacctgttgtagattcttattcccaatcttcaggaacagctaggtccaatacagacccttactctcaacctcctggaactccccggcctactactgttgacccatatagtcagcagccccaaaccccaagaccatctacacaaactgacttgtttgttacacctgtaacaaatcagaggcattctgatccatatgctcatcctcctggaacaccaagacctggaatttctgtcccttactctcagccaccagcaacaccaaggccaaggatttcagagggttttactaggtcctcaatgacaagaccagtcctcatgccaaatcaggatcctttcctgcaagcagcacaaaaccgaggaccagctttacctggcccgttggtaaggccacctgatacatgttcccagacacctaggccccctggacctggtctttcagacacatttagccgtgtttccccatctgctgcccgtgatccctatgatcagtctccaatgactccaagatctcagtctgactcttttggaacaagtcaaactgcccatgatgttgctgatcagccaaggcctggatcagaggggagcttctgtgcatcttcaaactctccaatgcactcccaaggccagcagttctctggtgtctcccaacttcctggacctgtgccaacttcaggagtaactgatacacagaatactgtaaatatggcccaagcagatacagagaaattgagacagcggcagaagttacgtgaaatcattctccagcagcaacagcagaagaagattgcaggtcgacaggagaaggggtcacaggactcacccgcagtgcctcatccagggcctcttcaacactggcaaccagagaatgttaaccaggctttcaccagacccccacctccctatcctgggaacattaggtctcctgttgcccctcctttaggacctagatatgctgttttcccaaaagatcagcgtggaccctatcctcctgatgttgctagtatggggatgagacctcatggatttagatttggatttccaggaggtagtcatggtaccatgccgagtcaagagcgcttccttgtgcctcctcagcaaatacagggatctggagtttctccacagctaagaagatcagtatctgtagatatgcctaggcctttaaataactcacaaatgaataatccagttggacttcctcagcatttttcaccacagagcttgccagttcagcagcacaacatactgggccaagcatatattgaactgagacatagggctcctgacggaaggcaacggctgcctttcagtgctccacctggcagcgttgtagaggcatcttctaatctgagacatggaaacttcattccccggccagactttccgggccctagacacacagaccccatgcgacgacctccccagggtctacctaatcagctacctgtgcacccagatttggaacaagtgccaccatctcaacaagagcaaggtcattctgtccattcatcttctatggtcatgaggactctgaaccatccactaggtggtgaattttcagaagctcctttgtcaacatctgtaccgtctgaaacaacgtctgataatttacagataaccacccagccttctgatggtctagaggaaaaacttgattctgatgacccttctgtgaaggaactggatgttaaagaccttgagggggttgaagtcaaagacttagatgatgaagatcttgaaaacttaaatttagatacagaggatggcaaggtagttgaattggatactttagataatttggaaactaatgatcccaacctggatgacctcttaaggtcaggagagtttgatatcattgcatatacagatccagaacttgacatgggagataagaaaagcatgtttaatgaggaactagaccttccaattgatgataagttagataatcagtgtgtatctgttgaaccaaaaaaaaaggaacaagaaaacaaaactctggttctctctgataaacattcaccacagaaaaaatccactgttaccaatgaggtaaaaacggaagtactgtctccaaattctaaggtggaatccaaatgtgaaactgaaaaaaatgatgagaataaagataatgttgacactccttgctcacaggcttctgctcactcagacctaaatgatggagaaaagacttctttgcatccttgtgatccagatctatttgagaaaagaaccaatcgagaaactgctggccccagtgcaaatgtcattcaggcatccactcaactacctgctcaagatgtaataaactcttgtggcataactggatcaactccagttctctcaagtttacttgctaatgagaaatctgataattcagacattaggccatcggggtctccaccaccaccaactctgccggcctccccatccaatcatgtgtcaagtttgcctcctttcatagcaccgcctggccgtgttttggataatgccatgaattctaatgtgacagtagtctctagggtaaaccatgttttttctcagggtgtgcaggtaaacccagggctcattccaggtcaatcaacagttaaccacagtctggggacaggaaaacctgcaactcaaactgggcctcaaacaagtcagtctggtaccagtagcatgtctggaccccaacagctaatgattcctcaaacattagcacagcagaatagagagaggccccttcttctagaagaacagcctctacttctacaggatcttttggatcaagaaaggcaagaacagcagcagcaaagacagatgcaagccatgattcgtcagcgatcagaaccgttcttccctaatattgattttgatgcaattacagatcctataatgaaagccaaaatggtggcccttaaaggtataaataaagtgatggcacaaaacaatctgggcatgccaccaatggtgatgagcaggttcccttttatgggccaggtggtaactggaacacagaacagtgaaggacagaaccttggaccacaggccattcctcaggatggcagtataacacatcagatttctaggcctaatcctccaaattttggtccaggctttgtcaatgattcacagcgtaagcagtatgaagagtggctccaggagacccaacagctgcttcaaatgcagcagaagtatcttgaagaacaaattggtgctcacagaaaatctaagaaggccctttcagctaaacaacgtactgccaagaaagctgggcgtgaatttccagaggaagatgcagaacaactcaagcatgttactgaacagcaaagcatggttcagaaacagctagaacagattcgtaaacaacagaaagaacatgctgaattgattgaagattatcggatcaaacagcagcagcaatgtgcaatggccccacctaccatgatgcccagtgtccagccccagccacccctaattccaggtgccactccacccaccatgagccaacccacctttcccatggtgccacagcagcttcagcaccagcagcacacaacagttatttctggccatactagccctgttagaatgcccagtttacctggatggcaacccaacagtgctcctgcccacctgcccctcaatcctcctagaattcagcccccaattgcccagttaccaataaaaacttgtacaccagccccagggacagtctcaaatgcaaatccacagagtggaccaccacctcgggtagaatttgatgacaacaatccctttagtgaaagttttcaagaacgggaacgtaaggaacgtttacgagaacagcaagagagacaacggatccaactcatgcaggaggtagatagacaaagagctttgcagcagaggatggaaatggagcagcatggtatggtgggctctgagataagtagtagtaggacatctgtgtcccagattcccttctacagttccgacttaccttgtgattttatgcaacctctaggaccccttcagcagtctccacaacaccaacagcaaatggggcaggttttacagcagcagaatatacaacaaggatcaattaattcaccctccacccaaactttcatgcagactaatgagcgaaggcaggtaggccctccttcatttgttcctgattcaccatcaatccctgttggaagcccaaatttttcttctgtgaagcagggacatggaaatctttctgggaccagcttccagcagtccccagtgaggccttcttttacacctgctttaccagcagcacctccagtagctaatagcagtctcccatgtggccaagattctactataacccatggacacagttatccgggatcaacccaatcgctcattcagttgtattctgatataatcccagaggaaaaagggaaaaagaaaagaacaagaaagaagaaaagagatgatgatgcagaatccaccaaggctccatcaactccccattcagatataactgccccaccgactccaggcatctcagaaactacctctactcctgcagtgagcacacccagtgagcttcctcaacaagccgaccaagagtcggtggaaccagtcggcccatccactcccaatatggcagcaggccagctatgtacagaattagagaacaaactgcccaatagtgatttctcacaagcaactccaaatcaacagacgtatgcaaattcagaagtagacaagctctccatggaaacccctgccaaaacagaagagataaaactggaaaaggctgagacagagtcctgcccaggccaagaggagcctaaattggaggaacagaatggtagtaaggtagaaggaaacgctgtagcctgtcctgtctcctcagcacagagtcctccccattctgctggggcccctgctgccaaaggagactcagggaatgaacttctgaaacacttgttgaaaaataaaaagtcatcttctcttttgaatcaaaaacctgagggcagtatttgttcagaagatgactgtacaaaggataataaactagttgagaagcagaacccagctgaaggactgcaaactttgggggctcaaatgcaaggtggttttggatgtggcaaccagttgccaaaaacagatggaggaagtgaaaccaagaaacagcgaagcaaacggactcagaggacgggtgagaaagcagcacctcgctcaaagaaaaggaaaaaggacgaagaggagaaacaagctatgtactctagcactgacacgtttacccacttgaaacagcagaataatttaagtaatcctccaacaccccctgcctctcttcctcctacaccacctcctatggcttgtcagaagatggccaatggttttgcaacaactgaagaacttgctggaaaagccggagtgttagtgagccatgaagttaccaaaactctaggacctaaaccatttcagctgcccttcagaccccaggacgacttgttggcccgagctcttgctcagggccccaagacagttgatgtgccagcctccctcccaacaccacctcataacaatcaggaagaattaaggatacaggatcactgtggtgatcgagatactcctgacagttttgttccctcatcctctcctgagagtgtggttggggtagaagtgagcaggtatccagatctgtcattggtcaaggaggagcctccagaaccggtgccgtcccccatcattccaattcttcctagcactgctgggaaaagttcagaatcaagaaggaatgacatcaaaactgagccaggcactttatattttgcgtcaccttttggtccttccccaaatggtcccagatcaggtcttatatctgtagcaattactctgcatcctacagctgctgagaacattagcagtgttgtggctgcattttccgaccttcttcacgtccgaatccctaacagctatgaggttagcagtgctccagatgtcccatccatgggtttggtcagtagccacagaatcaacccgggtttggagtatcgacagcatttacttctccgtgggcctccgccaggatctgcaaaccctcccagattagtgagctcttaccggctgaagcagcctaatgtaccatttcctccaacaagcaatggtctttctggatataaggattctagtcatggtattgcagaaagcgcagcactcagaccacagtggtgttgtcattgtaaagtggttattcttggaagtggtgtgcggaaatctttcaaagatctgacccttttgaacaaggattcccgagaaagcaccaagagggtagagaaggacattgtcttctgtagtaataactgctttattctttattcatcaactgcacaagcgaaaaactcagaaaacaaggaatccattccttcattgccacaatcacctatgagagaaacgccttccaaagcatttcatcagtacagcaacaacatctccactttggatgtgcactgtctcccccagctcccagagaaagcttctccccctgcctcaccacccatcgccttccctcctgcttttgaagcagcccaagtcgaggccaagccagatgagctgaaggtgacagtcaagctgaagcctcggctaagagctgtccatggtgggtttgaagattgcaggccgctcaataaaaaatggagaggaatgaaatggaagaagtggagcattcatattgtaatccctaaggggacatttaaaccaccttgtgaggatgaaatagatgaatttctaaagaaattgggcacttcccttaaacctgatcctgtgcccaaagactatcggaaatgttgcttttgtcatgaagaaggtgatggattgacagatggaccagcaaggctactcaaccttgacttggatctgtgggtccacttgaactgcgctctgtggtccacggaggtctatgagactcaggctggtgccttaataaatgtggagctagctctgaggagaggcctacaaatgaaatgtgtcttctgtcacaagacgggtgccactagtggatgccacagatttcgatgcaccaacatttatcacttcacttgcgccattaaagcacaatgcatgttttttaaggacaaaactatgctttgccccatgcacaaaccaaagggaattcatgagcaagaattaagttactttgcagtcttcaggagggtctatgttcagcgtgatgaggtgcgacagattgctagcatcgtgcaacgaggagaacgggaccatacctttcgcgtgggtagcctcatcttccacacaattggtcagctgcttccacagcagatgcaagcattccattctcctaaagcactcttccctgtgggctatgaagccagccggctgtactggagcactcgctatgccaataggcgctgccgctacctgtgctccattgaggagaaggatgggcgcccagtgtttgtcatcaggattgtggaacaaggccatgaagacctggttctaagtgacatctcacctaaaggtgtctgggataagattttggagcctgtggcatgtgtgagaaaaaagtctgaaatgctccagcttttcccagcgtatttaaaaggagaggatctgtttggcctgaccgtctctgcagtggcacgcatagcggaatcacttcctggggttgaggcatgtgaaaattataccttccgatacggccgaaatcctctcatggaacttcctcttgccgttaaccccacaggttgtgcccgttctgaacctaaaatgagtgcccatgtcaagaggtttgtgttaaggcctcacaccttaaacagcaccagcacctcaaagtcatttcagagcacagtcactggagaactgaacgcaccttatagtaaacagtttgttcactccaagtcatcgcagtaccggaagatgaaaactgaatggaaatccaatgtgtatctggcacggtctcggattcaggggctgggcctgtatgctgctcgagacattgagaaacacaccatggtcattgagtacatcgggactatcattcgaaacgaagtagccaacaggaaagagaagctttatgagtctcagaaccgtggtgtgtacatgttccgcatggataacgaccatgtgattgacgcgacgctcacaggagggcccgcaaggtatatcaaccattcgtgtgcacctaattgtgtggctgaagtggtgacttttgagagaggacacaaaattatcatcagctccagtcggagaatccagaaaggagaagagctctgctatgactataagtttgactttgaagatgaccagcacaagattccgtgtcactgtggagctgtgaactgccggaagtggatgaactgaaatgcattccttgctagctcagcgggcggcttgtccctaggaagaggcgattcaacacaccattggaattttgcagacagaaagagatttttgttttctgttttatgactttttgaaaaagcttctgggagttctgatttcctcagtcctttaggttaaagcagcgccaggaggaagctgacagaagcagcgttcctgaagtggccgaggttaaacggaatcacagaatggtccagcacttttgcttttttttcttttccttttcttttttttttgtttgttttttgttttgtttttcccttgtgggtgggtttcattgttttggttttctagtctcactaaggagaaacttttactggggcaaagagccgatggctgccctgccccgggcaggggccttcctatgaatgtaagactgaaatcaccagcgagggggacagagagtgctggccacggccttattaaaaaggggcaggccctctaacttcaaaatgtttttaaataaagtagacaccactgaacaaggaatgtactgaaatgacttccttagggatagagctaagggataataacttgcactaaatacatttaaatacttgattccatgagtcagtttattgtagtttttgatttctgtaaaataagagaaacttttgtatttattattgaataagtgaatgaagctatttttaaataaagttagaagaaagccaagctgctgctgttacctgcagaactaacaaaccctgttactttgtacagatatgtaaatattttgagaaaaaatacagtataaaaatagttattgaccaaatgctaccaggctctgcagcagctcgggggcttataaaatgttcatagggatgttacaatataattttgtgttataaaatatgccattataattatgtaataaccaaaatttcaacctagagtgttgggggttttttggaaaccgcagtctattagtactcaatggttttatacaccttacttctgacagagcggggcgtatgctacgactacaacttttatagctgttttggtaatttaaactaattttttcatattatattgttgcatccctacttcttcagtcaggtttttttgtgcttacaatttgtgataactgtgaataactgcttaaaaatacacccaaatggaggctgaattttttcttcagcaaaagtagttttgattagaactttgtttcagccacagagaatcatgtaaacgtaataggatcatgtagcagaaacttaaatctaaccctttagccttctatttaacacaaaaatttgaaaaagttaaaaaaaaaaaggagatgtgattatgcttacagctgcaggactctggcaatagggtttttggaagatgtaattttaaaatgtgtttgtatgaactgtttgtttacatttctttaataaaaaaaacactgttttgtgtttgcttgtagaaacttaatcagcattttgaaccaggttagctttttattttgtacttaaaattctggtactgacacttcacaggctaagtataaaatgaagttttgtgtgcacaattcaagtggactgtaaactgttggtatattcagtgatgcagttctgaacttgtatatggcatgatgtatttttatcttacagaataaatcaattgtatatatttttctcttgataaatagctgtatgaaatttgtttcctgaatatttttcttctcttgtacaatatcctgacatcctaccagtatttgtcctaccgggtttttgttgttttctgttctgtataatagtatctaatgttggcaaaaattgaattttttgaagtatacagagtgttatgggttttggaatttgtggacacagatttagaagatcaccatttacaaataaaatattttacatctataaaaaaaaaaaa

SEQ ID NO: 14036 - DNA, 14358 bp, Homo sapiens
aaaattccttagttgctggctttgaccttttatgttgctgagttttacacatctattttctcaactgccatatcctagggggcttggagtacccataatacagtgagcccaccttcctggtccccagacatttcagaaggtcgggaaatttttaaacccaggcagcttcctggcagtgccatttggagcatcaaagtgggccgtgggtctggatttccaggaaagcggagacctcgaggtgcaggactgtcggggcgaggtggccgaggcaggtcaaagctgaaaagtggaatcggagctgttgtattacctggggtgtctactgcagatatttcatcaaataaggatgatgaagaaaactctatgcacaatacagttgtgttgttttctagcagtgacaagttcactttgaatcaggatatgtgtgtagtttgtggcagttttggccaaggagcagaaggaagattacttgcctgttctcagtgtggtcagtgttaccatccatactgtgtcagtattaagatcactaaagtggttcttagcaaaggttggaggtgtcttgagtgcactgtgtgtgaggcctgtgggaaggcaactgacccaggaagactcctgctgtgtgatgactgtgacataagttatcacacctactgcctagaccctccattgcagacagttcccaaaggaggctggaagtgcaaatggtgtgtttggtgcagacactgtggagcaacatctgcaggtctaagatgtgaatggcagaacaattacacacagtgcgctccttgtgcaagcttatcttcctgtccagtctgctatcgaaactatagagaagaagatcttattctgcaatgtagacaatgtgatagatggatgcatgcagtttgtcagaacttaaatactgaggaagaagtggaaaatgtagcagacattggttttgattgtagcatgtgcagaccctatatgcctgcgtctaatgtgccttcctcagactgctgtgaatcttcacttgtagcacaaattgtcacaaaagtaaaagagctagacccacccaagacttatacccaggatggtgtgtgtttgactgaatcagggatgactcagttacagagcctcacagttacagttccaagaagaaaacggtcaaaaccaaaattgaaattgaagattataaatcagaatagcgtggccgtccttcagacccctccagacatccaatcagagcattcaagggatggtgaaatggatgatagtcgagaaggagaacttatggattgtgatggaaaatcagaatctagtcctgagcgggaagctgtggatgatgaaactaagggagtggaaggaacagatggtgtcaaaaagagaaaaaggaaaccatacagaccaggtattggtggatttatggtgcggcaaagaagtcgaactgggcaagggaaaaccaaaagatctgtgatcagaaaagattcctcaggctctatttccgagcagttaccttgcagagatgatggctggagtgagcagttaccagatactttagttgatgaatctgtttctgttactgaaagcactgaaaaaataaagaagagataccgaaaaaggaaaaataagcttgaagaaactttccctgcctatttacaagaagctttctttggaaaagatcttctagatacaagtagacaaagcaagataagtttagataatctgtcagaagatggagctcagcttttatataaaacaaacatgaacacaggtttcttggatccttccttagatccactacttagttcatcctcggctccaacaaaatctggaactcacggtcctgctgatgacccattagctgatatttctgaagttttaaacacagatgatgacattcttggaataatttcagatgatctagcaaaatcagttgatcattcagatattggtcctgtcactgatgatccttcctctttgcctcagccaaatgtcaatcagagttcacgaccattaagtgaagaacagctagatgggatcctcagtcctgaactagacaaaatggtcacagatggagcaattcttggaaaattatataaaattccagagcttggcggaaaagatgttgaagacttatttacagctgtacttagtcctgcgaacactcagccaactccattgccacagcctcccccaccaacacagctgttgccaatacacaatcaggatgctttttcacggatgcctctcatgaatggccttattggatccagtcctcatctcccacataattctttgccacctggaagcggactgggaactttctctgcaattgcacaatcctcttatcctgatgccagggataaaaattcagcctttaatccaatggcaagtgatcctaacaactcttggacatcatcagctcccactgtggaaggagaaaatgacacaatgtcgaatgcccagagaagcacgcttaagtgggagaaagaggaggctctgggtgaaatggcaactgttgccccagttctctacaccaatattaatttccccaacttaaaggaagaattccctgattggactactagagtgaagcaaattgccaaattgtggagaaaagcaagctcacaagaaagagcaccatatgtgcaaaaagccagagataacagagctgctttacgcattaataaagtacagatgtcaaatgattccatgaaaaggcagcaacagcaagatagcattgatcccagctctcgtattgattcggagctttttaaagatcctttaaagcaaagagaatcagaacatgaacaggaatggaaatttagacagcaaatgcgtcagaaaagtaagcagcaagctaaaattgaagccacacagaaacttgaacaggtgaaaaatgagcagcagcagcagcaacaacagcaatttggttctcagcatcttctggtgcagtctggttcagatacaccaagtagtgggatacagagtcccttgacacctcagcctggcaatggaaatatgtctcctgcacagtcattccataaagaactgtttacaaaacagccacccagtacccctacgtctacatcttcagatgatgtgtttgtaaagccacaagctccacctcctcctccagccccatcccggattcccatccaggatagtctttctcaggctcagacttctcagccaccctcaccgcaagtgttttcacctgggtcctctaactcacgaccaccatctccaatggatccatatgcaaaaatggttggtacccctcgaccacctcctgtgggccatagtttttccagaagaaattctgctgcaccagtggaaaactgtacacctttatcatcggtatctaggccccttcaaatgaatgagacaacagcaaataggccatcccctgtcagagatttatgttcttcttccacgacaaataatgacccctatgcaaaacctccagacacacctaggcctgtgatgacagatcaatttcccaaatccttgggcctatcccggtctcctgtagtttcagaacaaactgcaaaaggccctatagcagctggaaccagtgatcactttactaaaccatctcctagggcagatgtgtttcaaagacaaaggatacctgactcatatgcacgacccttgttgacacctgcacctcttgatagtggtcctggaccttttaagactccaatgcaacctcctccatcctctcaggatccttatggatcagtgtcacaggcatcaaggcgattgtctgttgacccttatgaaaggcctgctttgacaccaagacctatagataatttttctcataatcagtcaaatgatccatatagtcagcctccccttaccccacatccagcagtgaatgaatcttttgcccatccttcaagggctttttcccagcctggaaccatatcaaggccaacatctcaggacccatactcccaacccccaggaactccacgacctgttgtagattcttattcccaatcttcaggaacagctaggtccaatacagacccttactctcaacctcctggaactccccggcctactactgttgacccatatagtcagcagccccaaaccccaagaccatctacacaaactgacttgtttgttacacctgtaacaaatcagaggcattctgatccatatgctcatcctcctggaacaccaagacctggaatttctgtcccttactctcagccaccagcaacaccaaggccaaggatttcagagggttttactaggtcctcaatgacaagaccagtcctcatgccaaatcaggatcctttcctgcaagcagcacaaaaccgaggaccagctttacctggcccgttggtaaggccacctgatacatgttcccagacacctaggccccctggacctggtctttcagacacatttagccgtgtttccccatctgctgcccgtgatccctatgatcagtctccaatgactccaagatctcagtctgactcttttggaacaagtcaaactgcccatgatgttgctgatcagccaaggcctggatcagaggggagcttctgtgcatcttcaaactctccaatgcactcccaaggccagcagttctctggtgtctcccaacttcctggacctgtgccaacttcaggagtaactgatacacagaatactgtaaatatggcccaagcagatacagagaaattgagacagcggcagaagttacgtgaaatcattctccagcagcaacagcagaagaagattgcaggtcgacaggagaaggggtcacaggactcacccgcagtgcctcatccagggcctcttcaacactggcaaccagagaatgttaaccaggctttcaccagacccccacctccctatcctgggaacattaggtctcctgttgcccctcctttaggacctagatatgctgttttcccaaaagatcagcgtggaccctatcctcctgatgttgctagtatggggatgagacctcatggatttagatttggatttccaggaggtagtcatggtaccatgccgagtcaagagcgcttccttgtgcctcctcagcaaatacagggatctggagtttctccacagctaagaagatcagtatctgtagatatgcctaggcctttaaataactcacaaatgaataatccagttggacttcctcagcatttttcaccacagagcttgccagttcagcagcacaacatactgggccaagcatatattgaactgagacatagggctcctgacggaaggcaacggctgcctttcagtgctccacctggcagcgttgtagaggcatcttctaatctgagacatggaaacttcattccccggccagactttccgggccctagacacacagaccccatgcgacgacctccccagggtctacctaatcagctacctgtgcacccagatttggaacaagtgccaccatctcaacaagagcaaggtcattctgtccattcatcttctatggtcatgaggactctgaaccatccactaggtggtgaattttcagaagctcctttgtcaacatctgtaccgtctgaaacaacgtctgataatttacagataaccacccagccttctgatggtctagaggaaaaacttgattctgatgacccttctgtgaaggaactggatgttaaagaccttgagggggttgaagtcaaagacttagatgatgaagatcttgaaaacttaaatttagatacagaggatggcaaggtagttgaattggatactttagataatttggaaactaatgatcccaacctggatgacctcttaaggtcaggagagtttgatatcattgcatatacagatccagaacttgacatgggagataagaaaagcatgtttaatgaggaactagaccttccaattgatgataagttagataatcagtgtgtatctgttgaaccaaaaaaaaaggaacaagaaaacaaaactctggttctctctgataaacattcaccacagaaaaaatccactgttaccaatgaggtaaaaacggaagtactgtctccaaattctaaggtggaatccaaatgtgaaactgaaaaaaatgatgagaataaagataatgttgacactccttgctcacaggcttctgctcactcagacctaaatgatggagaaaagacttctttgcatccttgtgatccagatctatttgagaaaagaaccaatcgagaaactgctggccccagtgcaaatgtcattcaggcatccactcaactacctgctcaagatgtaataaactcttgtggcataactggatcaactccagttctctcaagtttacttgctaatgagaaatctgataattcagacattaggccatcggggtctccaccaccaccaactctgccggcctccccatccaatcatgtgtcaagtttgcctcctttcatagcaccgcctggccgtgttttggataatgccatgaattctaatgtgacagtagtctctagggtaaaccatgttttttctcagggtgtgcaggtaaacccagggctcattccaggtcaatcaacagttaaccacagtctggggacaggaaaacctgcaactcaaactgggcctcaaacaagtcagtctggtaccagtagcatgtctggaccccaacagctaatgattcctcaaacattagcacagcagaatagagagaggccccttcttctagaagaacagcctctacttctacaggatcttttggatcaagaaaggcaagaacagcagcagcaaagacagatgcaagccatgattcgtcagcgatcagaaccgttcttccctaatattgattttgatgcaattacagatcctataatgaaagccaaaatggtggcccttaaaggtataaataaagtgatggcacaaaacaatctgggcatgccaccaatggtgatgagcaggttcccttttatgggccaggtggtaactggaacacagaacagtgaaggacagaaccttggaccacaggccattcctcaggatggcagtataacacatcagatttctaggcctaatcctccaaattttggtccaggctttgtcaatgattcacagcgtaagcagtatgaagagtggctccaggagacccaacagctgcttcaaatgcagcagaagtatcttgaagaacaaattggtgctcacagaaaatctaagaaggccctttcagctaaacaacgtactgccaagaaagctgggcgtgaatttccagaggaagatgcagaacaactcaagcatgttactgaacagcaaagcatggttcagaaacagctagaacagattcgtaaacaacagaaagaacatgctgaattgattgaagattatcggatcaaacagcagcagcaatgtgcaatggccccacctaccatgatgcccagtgtccagccccagccacccctaattccaggtgccactccacccaccatgagccaacccacctttcccatggtgccacagcagcttcagcaccagcagcacacaacagttatttctggccatactagccctgttagaatgcccagtttacctggatggcaacccaacagtgctcctgcccacctgcccctcaatcctcctagaattcagcccccaattgcccagttaccaataaaaacttgtacaccagccccagggacagtctcaaatgcaaatccacagagtggaccaccacctcgggtagaatttgatgacaacaatccctttagtgaaagttttcaagaacgggaacgtaaggaacgtttacgagaacagcaagagagacaacggatccaactcatgcaggaggtagatagacaaagagctttgcagcagaggatggaaatggagcagcatggtatggtgggctctgagataagtagtagtaggacatctgtgtcccagattcccttctacagttccgacttaccttgtgattttatgcaacctctaggaccccttcagcagtctccacaacaccaacagcaaatggggcaggttttacagcagcagaatatacaacaaggatcaattaattcaccctccacccaaactttcatgcagactaatgagcgaaggcaggtaggccctccttcatttgttcctgattcaccatcaatccctgttggaagcccaaatttttcttctgtgaagcagggacatggaaatctttctgggaccagcttccagcagtccccagtgaggccttcttttacacctgctttaccagcagcacctccagtagctaatagcagtctcccatgtggccaagattctactataacccatggacacagttatccgggatcaacccaatcgctcattcagttgtattctgatataatcccagaggaaaaagggaaaaagaaaagaacaagaaagaagaaaagagatgatgatgcagaatccaccaaggctccatcaactccccattcagatataactgccccaccgactccaggcatctcagaaactacctctactcctgcagtgagcacacccagtgagcttcctcaacaagccgaccaagagtcggtggaaccagtcggcccatccactcccaatatggcagcaggccagctatgtacagaattagagaacaaactgcccaatagtgatttctcacaagcaactccaaatcaacagacgtatgcaaattcagaagtagacaagctctccatggaaacccctgccaaaacagaagagataaaactggaaaaggctgagacagagtcctgcccaggccaagaggagcctaaattggaggaacagaatggtagtaaggtagaaggaaacgctgtagcctgtcctgtctcctcagcacagagtcctccccattctgctggggcccctgctgccaaaggagactcagggaatgaacttctgaaacacttgttgaaaaataaaaagtcatcttctcttttgaatcaaaaacctgagggcagtatttgttcagaagatgactgtacaaaggataataaactagttgagaagcagaacccagctgaaggactgcaaactttgggggctcaaatgcaaggtggttttggatgtggcaaccagttgccaaaaacagatggaggaagtgaaaccaagaaacagcgaagcaaacggactcagaggacgggtgagaaagcagcacctcgctcaaagaaaaggaaaaaggacgaagaggagaaacaagctatgtactctagcactgacacgtttacccacttgaaacaggtgaggcagctctctctgctccctctaatggaaccaatcattggagtgaactttgcgcactttcttccttatggcagtggccaatttaatagtgggaatcgacttctaggaacttttggcagtgctaccctggaaggggtttcggactactattctcagttgatctacaagcagaataatttaagtaatcctccaacaccccctgcctctcttcctcctacaccacctcctatggcttgtcagaagatggccaatggttttgcaacaactgaagaacttgctggaaaagccggagtgttagtgagccatgaagttaccaaaactctaggacctaaaccatttcagctgcccttcagaccccaggacgacttgttggcccgagctcttgctcagggccccaagacagttgatgtgccagcctccctcccaacaccacctcataacaatcaggaagaattaaggatacaggatcactgtggtgatcgagatactcctgacagttttgttccctcatcctctcctgagagtgtggttggggtagaagtgagcaggtatccagatctgtcattggtcaaggaggagcctccagaaccggtgccgtcccccatcattccaattcttcctagcactgctgggaaaagttcagaatcaagaaggaatgacatcaaaactgagccaggcactttatattttgcgtcaccttttggtccttccccaaatggtcccagatcaggtcttatatctgtagcaattactctgcatcctacagctgctgagaacattagcagtgttgtggctgcattttccgaccttcttcacgtccgaatccctaacagctatgaggttagcagtgctccagatgtcccatccatgggtttggtcagtagccacagaatcaacccgggtttggagtatcgacagcatttacttctccgtgggcctccgccaggatctgcaaaccctcccagattagtgagctcttaccggctgaagcagcctaatgtaccatttcctccaacaagcaatggtctttctggatataaggattctagtcatggtattgcagaaagcgcagcactcagaccacagtggtgttgtcattgtaaagtggttattcttggaagtggtgtgcggaaatctttcaaagatctgacccttttgaacaaggattcccgagaaagcaccaagagggtagagaaggacattgtcttctgtagtaataactgctttattctttattcatcaactgcacaagcgaaaaactcagaaaacaaggaatccattccttcattgccacaatcacctatgagagaaacgccttccaaagcatttcatcagtacagcaacaacatctccactttggatgtgcactgtctcccccagctcccagagaaagcttctccccctgcctcaccacccatcgccttccctcctgcttttgaagcagcccaagtcgaggccaagccagatgagctgaaggtgacagtcaagctgaagcctcggctaagagctgtccatggtgggtttgaagattgcaggccgctcaataaaaaatggagaggaatgaaatggaagaagtggagcattcatattgtaatccctaaggggacatttaaaccaccttgtgaggatgaaatagatgaatttctaaagaaattgggcacttcccttaaacctgatcctgtgcccaaagactatcggaaatgttgcttttgtcatgaagaaggtgatggattgacagatggaccagcaaggctactcaaccttgacttggatctgtgggtccacttgaactgcgctctgtggtccacggaggtctatgagactcaggctggtgccttaataaatgtggagctagctctgaggagaggcctacaaatgaaatgtgtcttctgtcacaagacgggtgccactagtggatgccacagatttcgatgcaccaacatttatcacttcacttgcgccattaaagcacaatgcatgttttttaaggacaaaactatgctttgccccatgcacaaaccaaagggaattcatgagcaagaattaagttactttgcagtcttcaggagggtctatgttcagcgtgatgaggtgcgacagattgctagcatcgtgcaacgaggagaacgggaccatacctttcgcgtgggtagcctcatcttccacacaattggtcagctgcttccacagcagatgcaagcattccattctcctaaagcactcttccctgtgggctatgaagccagccggctgtactggagcactcgctatgccaataggcgctgccgctacctgtgctccattgaggagaaggatgggcgcccagtgtttgtcatcaggattgtggaacaaggccatgaagacctggttctaagtgacatctcacctaaaggtgtctgggataagattttggagcctgtggcatgtgtgagaaaaaagtctgaaatgctccagcttttcccagcgtatttaaaaggagaggatctgtttggcctgaccgtctctgcagtggcacgcatagcggaatcacttcctggggttgaggcatgtgaaaattataccttccgatacggccgaaatcctctcatggaacttcctcttgccgttaaccccacaggttgtgcccgttctgaacctaaaatgagtgcccatgtcaagaggcctcacaccttaaacagcaccagcacctcaaagtcatttcagagcacagtcactggagaactgaacgcaccttatagtaaacagtttgttcactccaagtcatcgcagtaccggaagatgaaaactgaatggaaatccaatgtgtatctggcacggtctcggattcaggggctgggcctgtatgctgctcgagacattgagaaacacaccatggtcattgagtacatcgggactatcattcgaaacgaagtagccaacaggaaagagaagctttatgagtctcagaaccgtggtgtgtacatgttccgcatggataacgaccatgtgattgacgcgacgctcacaggagggcccgcaaggtatatcaaccattcgtgtgcacctaattgtgtggctgaagtggtgacttttgagagaggacacaaaattatcatcagctccagtcggagaatccagaaaggagaagagctctgctatgactataagtttgactttgaagatgaccagcacaagattccgtgtcactgtggagctgtgaactgccggaagtggatgaactgaaatgcattccttgctagctcagcgggcggcttgtccctaggaagaggcgattcaacacaccattggaattttgcagacagaaagagatttttgttttctgttttatgactttttgaaaaagcttctgggagttctgatttcctcagtcctttaggttaaagcagcgccaggaggaagctgacagaagcagcgttcctgaagtggccgaggttaaacggaatcacagaatggtccagcacttttgcttttttttcttttccttttcttttttttttgtttgttttttgttttgtttttcccttgtgggtgggtttcattgttttggttttctagtctcactaaggagaaacttttactggggcaaagagccgatggctgccctgccccgggcaggggccttcctatgaatgtaagactgaaatcaccagcgagggggacagagagtgctggccacggccttattaaaaaggggcaggccctctaacttcaaaatgtttttaaataaagtagacaccactgaacaaggaatgtactgaaatgacttccttagggatagagctaagggataataacttgcactaaatacatttaaatacttgattccatgagtcagtttattgtagtttttgatttctgtaaaataagagaaacttttgtatttattattgaataagtgaatgaagctatttttaaataaagttagaagaaagccaagctgctgctgttacctgcagaactaacaaaccctgttactttgtacagatatgtaaatattttgagaaaaaatacagtataaaaatagttattgaccaaatgctaccaggctctgcagcagctcgggggcttataaaatgttcatagggatgttacaatataattttgtgttataaaatatgccattataattatgtaataaccaaaatttcaacctagagtgttgggggttttttggaaaccgcagtctattagtactcaatggttttatacaccttacttctgacagagcggggcgtatgctacgactacaacttttatagctgttttggtaatttaaactaattttttcatattatattgttgcatccctacttcttcagtcaggtttttttgtgcttacaatttgtgataactgtgaataactgcttaaaaatacacccaaatggaggctgaattttttcttcagcaaaagtagttttgattagaactttgtttcagccacagagaatcatgtaaacgtaataggatcatgtagcagaaacttaaatctaaccctttagccttctatttaacacaaaaatttgaaaaagttaaaaaaaaaaaggagatgtgattatgcttacagctgcaggactctggcaatagggtttttggaagatgtaattttaaaatgtgtttgtatgaactgtttgtttacatttctttaataaaaaaaacactgttttgtgtttgcttgtagaaacttaatcagcattttgaaccaggttagctttttattttgtacttaaaattctggtactgacacttcacaggctaagtataaaatgaagttttgtgtgcacaattcaagtggactgtaaactgttggtatattcagtgatgcagttctgaacttgtatatggcatgatgtatttttatcttacagaataaatcaattgtatatatttttctcttgataaatagctgtatgaaatttgtttcctgaatatttttcttctcttgtacaatatcctgacatcctaccagtatttgtcctaccgggtttttgttgttttctgttctgtataatagtatctaatgttggcaaaaattgaattttttgaagtatacagagtgttatgggttttggaatttgtggacacagatttagaagatcaccatttacaaataaaatattttacatctataaaaaaaaaaaa

SEQ ID NO: 14037 - DNA, 3497 bp, Homo sapiens
gtcagtccccgcgcttttcggaggctgccagcgtcccacaccagccgcaggtgaaaaccggcagaaagacattaagagattttcctgcagtcactgctggcagatgatagagccaggatttgaaagcaggcagcctggctccagaccctgtgctcttaactcccgttttgcatcaagaacagaatcctatgaaaggcttgtacagtgcttggatagcagcatcaaggagcattgtgtacatgcagaagtgcacagtacctggagtgaaactgcttgtgttcgatttctgataccattcataactggctgtgtgatctcaaaacctctaaaatgcagacctccagctctagatctgtgcacctgagtgaatggcagaagaattacttcgcaattacatctggcatatgtaccggaccgaaggcagatgcataccgtgcacagatattacgcattcagtatgcatgggcaaactctgagatttcccaggtctgtgctaccaaactgttcaaaaaatatgcagagaaatattctgcaattattgattctgacaatgttgaatctgggttgaataattatgcagaaaacattttaactttggcaggatctcaacaaacagatagtgacaagtggcagtctggattgtcaataaataatgttttcaaaatgagtagtgtacagaagatgatgcaagctggcaaaaaattcaaagactctctgttggaacctgctcttgcatcagtggtaatccataaggaggccactgtctttgatcttcctaaatttagtgtttgtggtagttctcaagagagtgactcattacctaactcagctcatgatcgagaccggacccaagacttcccggagagcaatcgtttgaaactccttcagaatgcccagccacctatggtgactaacactgctaggacttgtcctacattctcagcacctgtaggtgagtcagctactgcaaaattccatgtcacaccattgtttggaaatgtcaaaaaggaaaatcacagctctgcaaaagaaaacataggacttaatgtgttcttatctaaccagtcttgttttcctgctgcctgtgaaaatccacagaggaagtctttttatggttctggcaccattgatgcactttccaatccaatactgaataaggcttgtagtaaaacagaagataatggcccaaaggaggatagcagcctgcctacatttaaaactgcaaaagaacaattatgggtagatcagcaaaaaaagtaccaccaacctcagcgtgcatcagggtcttcatatggtggtgtaaaaaagtctctaggagctagtagatcccgagggatacttggaaagtttgttcctcctatacccaagcaagatgggggagagcagaatggaggaatgcaatgtaagccttatggggcaggacctacagaaccagcacatccagttgatgagcgtctgaagaacttggagccaaagatgattgaacttattatgaatgagattatggatcatggacctccagtaaattgggaagatattgcaggagtagaatttgctaaagccaccataaaggaaatagttgtgtggcccatgttgaggccagacatctttactggtttaaggggaccccctaaaggaattttgctctttggtcctcctgggactggtaaaactctaattggcaagtgcattgctagtcagtctggggcaacattctttagcatctctgcttcatccttaacttctaaatgggtaggtgagggggagaaaatggtccgtgcattgtttgctgttgcaaggtgtcagcaaccagctgtgatatttattgacgaaattgattccttgttatctcaacggggagatggtgagcatgaatcttctagaaggataaaaacagaatttttagttcaattagatggagcaacaacatcttctgaagatcgtatcctagtggtgggagcaacaaatcggccacaagaaattgatgaggctgcccggagaagattggtgaaaaggctttatattcccctcccagaagcttcagccaggaaacagatagtaattaatctaatgtccaaagagcagtgttgcctcagtgaagaagaaattgaacagattgtacagcagtctgatgcgttttcaggagcagacatgacacagctttgcagggaggcttctcttggtcctattcgcagtttacaaactgctgacattgctaccataacaccggatcaagttcgacccatagcttacattgattttgaaaatgcttttagaactgtgcgacctagtgtttctccaaaagatttagagctttatgaaaactggaacaaaacttttggttgtggaaagtaagtgggatacttggaatcaaggcatctctgtattacagtcttctttattttttagcatagaaagttggggatgtgttaattgtatttttaagaatatattctaaattctgtacttcaaataatagcacagattttacatctgattgacatagtgtatgttaatgtaagttttgctttccagtgattacctgatacgtaagcctatttgaacaaagtgagaatgaacttttgtttctaagaagtctttatcttgaagctatataacatgaaaagtgagctcaaattttttttagttgaagattacatataaagttgtgtctgattaatattcatcttttattgaagaaagtgccttctgatggccacataattcttaatgtcagctagtataatggtttacatttggacaaagtattgcttagtgttatttaagtagatttaagatctcaaagctaaagtgccaatttttactttcttcagccaatttgttacctcttttatggtttttaatttttatcaggactaacattttcagaaatagcaaggtgtgatctagtattagattcacagaactgaaaggttaattaagaatgttggttattttcacgggagcgtgtgatatttaacattaatattttatttgacactacagcctgtaatactgctctctttcaaaagcaagttttcagatttttataacagacccattttgttttatgaaacatgttcattacagaaacatgagaaaatagagataagtaaaaagaataaaagtcactattatcctaccactttgcgggacacactattaatatttaagcatagattcttccagatgttttgttttatacagcagtaggattgtgtaatgtattctctcttgtagcctattcttcaaagcgtatcttcactttccatgttaacataaatgtccttttatgattgtctaggattccatggatggatggaatataattgagtcatctggtagagcgcatataggacaggacgctaggttgtttatcttttgtttattgtaaaggaactatgtgggatgcatttggtgatctttttaaaaaatgtataaatttcttgagtaattcctggattaaagaatatgcactttttaaaaaaaaaaaaaaa

SEQ ID NO: 14038 - DNA, 5113 bp, Homo sapiens
agaaacgcttttctgcggtccagtctagggggtctcagattggcggggatgggcagcagcggcaggtggccttggcttttgctgcagccgtcaacgacctatcatcggggtcctgcgtaaggtccggctggctgggacttggctgtgggtgggatggactggctgccggaccgagtgccctgcagttggtaggagtatgaggcagagtgatgcacacccgggcgcccagcatcgttctaattgccggagacattgcctcagactgtgcgctgctagaggctgcgttcctgagcaggaagcccgtttcctgggattggaactacccttcttggccagcgggaagtccccaaggacggagtcgaaaggtcaaatcttatctgtcagtgctgtgtgacagcatcgcaacgggatctgcagaacctgaactcgatccgtaatgcctcctgcctgcctctttcaagatggaggtgaaacctgtgggagaacctactcaagaggtgtctaaattcaaactttccaccaaggtagaaagcacgggacactggctggtggaagatcatgttcgaatatgggaagttttaaagacagaggagagctcgattcaggactggggtgaagaggtagaggaaggagctgtttaccatgtcaccctcaaaagagtccagattcaacaggctgccaataaaggagcaagatggctaggggttgaaggggaccagctgcctccaggacacacagtcagtcaatatgaaacctgtaagatcaggaccataaaagctggcaccttggagaagcttgtggagaacctgctgacagcttttggggacaatgactttacctatatcagcatctttctttcaacgtacagaggctttgcctccactaaagaagtgctggaactactgctggacaggtatggaaacctgacaagcccaaactgtgaagaagatggaagccaaagttcatcagagtccaaaatggtgatcaggaatgcaatcgcttccatactaagggcctggcttgaccagtgtgcagaagacttccgagagccccctcacttcccttgcttacagaaactgctggattatctcacacggatgatgccgggctctgacccagaaagaagagcacaaaatcttcttgagcagtttcagaagcaagaagtggaaactgacaatgggcttcccaacacgatctccttcagcctggaagaggaagaggaactggagggtggagagtcagcagaattcacgtgcttctcagaagatctcgtggcagagcagctgacctacatggatgcacaactcttcaagaaagtagtgcctcaccactgcctgggctgcatttggtctcgaagggataagaaggaaaacaaacatttggctcctacgatccgtgccaccatctctcagtttaataccctcaccaaatgtgttgtcagcaccatcctggggggcaaagaactcaaaactcagcagagagccaaaatcattgagaagtggatcaacatcgctcatgaatgtagactcctgaagaatttttcctccttgagggccatcgtttcggcactgcagtctaattccatctatcggttaaaaaagacttgggctgccgtcccaagggaccgaatgctgatgtttgaagaactttcagatatcttctcagaccataataaccatttgaccagccgagaactactgatgaaggaaggaacctcaaaatttgcaaacctggacagcagtgtgaaagaaaaccagaagcgtacccagaggcggctgcagctccagaaggacatgggtgtgatgcagggaactgtgccctacctgggcaccttcctgactgacctgaccatgcttgacactgcccttcaggactacatcgagggtggactgataaactttgagaaaaggagaagggaatttgaagtgattgcccagataaagctcttacagtctgcctgcaacagctattgcatgaccccagaccaaaagttcatccagtggttccagaggcagcagctcctgacagaggaggagagctatgccctgtcatgtgagattgaagcagctgctgacgccagcaccacctcgcccaagcctcggaagagcatggtgaagagactcagcctactgtttctagggtctgacatgatcaccagtcccactcccaccaaagagcagcccaagtccactgccagcgggagctctggtgaaagcatggactctgtcagcgtgtcatcctgcgagtcgaaccactcagaggctgaggagggctccattactcccatggacacccctgatgagcctcaaaaaaagctctctgagtcctcctcatcctgttcttctatccattccatggacacaaattcctcagggatgtcttccttaatcaaccccctctcctcccctccgtcctgcaacaacaaccccaaaatccacaagcgctctgtctcggtgacgtccattacctcgactgtgctgcctcctgtttacaaccaacagaatgaagacacctgcataatccgcatcagtgtggaagacaataacggcaacatgtacaagagcatcatgttgacgagccaggataaaacccccgctgtgatccagagagccatgctgaagcacaatctggactcagaccccgccgaggagtacgagctggtgcaggtcatctcggaggacaaagaacttgtgattccagactcagcaaatgtcttttatgccatgaacagccaagtgaactttgacttcattttgcgcaaaaagaactccatggaagaacaagtgaaactgcgtagccggaccagcttgacgttgcccaggacagctaaacggggctgctggagtaacagacacagcaaaatcaccctctgaagggagggaccagtggccccttgtttgccaaaggcagagtggggctgagaaacaggctgcggtgattgcaattaccatccggtgttcgaggatcattggtgaagtcagcagatatttattgagttcctgtggtgtgcaaagcattatgataggcaccgtggggaaactggaaatgaatttgacatgaaaaggatgaacgattcactgattctctttgactcatttgagactaaaatgcagaattaccaacatttaaaacatatatatgcacatgtatttggtatgcatgtgtatctatataaaaatatataagagggactttatgggatagtatggactatggaaaaacaaatttgcacaatggcctgggaagttgaggtcactttttacagggaaatagaagaaactgagaacctagtctcgtatattctgagtaaatggaatcagtcctgggaatagagagtgtcctttgtgccagtattacaagaagcccaaactttatttttataaagggagaggatgactttctcaatcaagtgccaccagataaaaacaactgcagaggctggaactgccacaggctgtatgaaaggccactttggaaagggtttggatgagctggtggccttcaacctctgcctgcatctgccactttctgctaccctagggaggccaggaggagcttcggaggaccatcgccccactggtctagccatcatgacacctctggaggtgtcaagctcctgaaacaagctcatttcagtttctggcaaccccgtgtatttccgttttccccctaaagaacatatcataatcattgcacaaataaccatgttctttggtaatgaagccagaaaagaaagcgcaaaagaatggtgactcatttggactcttatctgtcttggaatgtcactgcttcattgccttctctgattgccttttgcatgtaaaactatgtgtctggagtcttttgccatctggatcttagtacctctttattatgtgcaatttattcctcaggtgtggaaatttctactgcaattgactacgtttgattattttgagcttgtgaaagatttctgaacagtgattgtcccgttaatagcccctcagaagatgttccctgctgataacagcatcctattttacttacttttatagcattactgtgcctagtcgtggggaaagagatggggctgtatagattatctgaatcatttgtctaagaggtacattcttccagatggaatcaataacttttttttttccaggttcccgtgcttgctatcacagtatcattgttaagtgacacttttgtctctcataacaccatcacactcttccttccaagtctgagctgtgctggggtttgaactaaaagccatatgtggaatattgacatgtgtaagaagcactttcagaatgttgtcctttttaagaaatgattctcaaaataccagtttttattccaaaaatttagagaacaaacccggaatatgaagtgcagattgtaacatggagctatttttttttcttaatcccataatacagctcctaaaagttgtgtgggatttgcgttgcataaatagccatgtgaattccacaagaagcaccagggaaagtttagagatttgcggcaatggaccgaagaacgggccaggaagtcctccaatttcctttggtctttccaggagattggactacacattgtaaagactgactgggtttcaactagtcaaaaagcactttcttctgttttcaatccctgttcgatttgtgcttctgtgcttgtaggagagatggccagggtggcagccctcatgcaggttgaagtatatgtagcctcagcctgatattcttggtgcgaaggtaaaaaaaaaaaaataaataaaaccattggcctggttgagggcgtgaccaccaagacatatatgttgtgcccgtgttcatcctgtgtatttatactgtatatgtagagtctagatttatatactgcaatgtaaaatatatatatatttaccttttttaaagacaatggaaattccaagtagctaaaacttagcttcatttatttaatgccactttaaatgtcttaaatttgtttcctggtggacagccgggtaatgcttttagctgctcgcatgcttgtctttctgcatctccatcatctgtttaccttttggttaaactaataaactagtttgggacttggctggcatgtgctgccagacccaaaggga

SEQ ID NO: 14039 - DNA, 2600 bp, Homo sapiens
aggggtggttgctgcttttgctacatgacttgccagcgcccgagcctgcggtccaactgcgctgctgccggagcgctcagtgccgccgctgccgcccgcgccccccgcgccccgttcggcacccaccggtcgccgccgcccgccgcgccgctgtcccgctcccgcgccgccgccgccgtttccccccgacgactgggtgatgctggacatgggagataggaaagaggtgaaaatgatccccaagtcctcgttcagcatcaacagcctggtgcccgaggcggtccagaacgacaaccaccacgcgagccacggccaccacaacagccaccacccccagcaccaccaccaccaccaccaccatcaccaccacccgccgccgcccgccccgcaaccgccgccgccgccgcagcagcagcagccgccgccgccgccgcccccggcaccgcagcccccccagacgcggggcgccccggccgccgacgacgacaagggcccccagcagctgctgctcccgccgccgccaccgccaccaccggccgccgccctggacggggctaaagcggacgggctgggcggcaagggcgagccgggcggcgggccgggggagctggcgcccgtcgggccggacgagaaggagaagggcgccggcgccgggggggaggagaagaagggggcgggcgagggcggcaaggacggggaggggggcaaggagggcgagaagaagaacggcaagtacgagaagccgccgttcagctacaacgcgctcatcatgatggccatccggcagagccccgagaagcggctcacgctcaacggcatctacgagttcatcatgaagaacttcccttactaccgcgagaacaagcagggctggcagaactccatccgccacaatctgtccctcaacaagtgcttcgtgaaggtgccgcgccactacgacgacccgggcaagggcaactactggatgctggacccgtcgagcgacgacgtgttcatcggcggcaccacgggcaagctgcggcgccgctccaccacctcgcgggccaagctggccttcaagcgcggtgcgcgcctcacctccaccggcctcaccttcatggaccgcgccggctccctctactggcccatgtcgcccttcctgtccctgcaccacccccgcgccagcagcactttgagttacaacggcaccacgtcggcctaccccagccaccccatgccctacagctccgtgttgactcagaactcgctgggcaacaaccactccttctccaccgccaacggcctgagcgtggaccggctggtcaacggggagatcccgtacgccacgcaccacctcacggccgccgcgctagccgcctcggtgccctgcggcctgtcggtgccctgctctgggacctactccctcaacccctgctccgtcaacctgctcgcgggccagaccagttactttttcccccacgtcccgcacccgtcaatgacttcgcagagcagcacgtccatgagcgccagggccgcgtcctcctccacgtcgccgcaggccccctcgaccctgccctgtgagtctttaagaccctctttgccaagttttacgacgggactgtctgggggactgtctgattatttcacacatcaaaatcaggggtcttcttccaaccctttaatacattaacatccctgggaccagactgtaagtgaacgttttacacacatttgcattgtaaatgataattaaaaaaataagtccaggtattttttattaagcccccccctcccatttctgtacgtttgttcagtctctagggttgtttattattctaacaaggtgtggagtgtcagcgaggtgcaatgtggggagaatacattgtagaatataaggtttggaagtcaaattatagtagaatgtgtatctaaatagtgactgctttgccatttcattcaaacctgacaagtctatctctaagagccgccagatttccatgtgtgcagtattataagttatcatggaactatatggtggacgcagaccttgagaacaacctaaattatggggagaattttaaaatgttaaactgtaatttgtatttaaaaagcattcgtagtaaaggtgcccaagaaattattttggccatttattgttttgtccttttctttaaagaactgtttttttttcttttgtttacttttagaccaaagattgggttctagaaaatgcacttggtatactaagtattaaaacaaacaaaaaggaaagttgtttcagttggcaacactgcccattcaattgaatcagaaggggacaaaattaacgattgccttcagtttgtgttgtgtatattttgatgtatgtggtcactaacaggtcacttttattttttctaaatgtagtgaaatgttaatacctattgtacttataggtaaaccttgcaaatatgtaacctgtgttgcgcaaatgccgcataaatttgagtgattgttaatgttgtcttaaaatttcttgattgtgatactgtggtcatatgcccgtgtttgtcacttacaaaaatgtttactatgaacacacagaaataaaaaataggctaaattcaaaaaaaaaaaaaaaa

SEQ ID NO: 14040 - DNA, 3080 bp, Homo sapiens
agtgcgtggccgcccggggccatggcgacactcagcttcgtcttcctgctgctgggggcagtgtcctggcctccggcttctgcctccggccaggagttctggcccggacaatcggcggccgatattctgtcgggggcggcttcccgcagacggtatcttctgtatgacgtcaaccccccggaaggcttcaacctgcgcagggatgtctatatccgaatcgcctctctcctgaagactctgctgaagacggaggagtgggtgcttgtcctgcctccatggggccgcctctatcactggcagagtcctgacatccaccaggtccggattccctggtctgagttttttgatcttccaagtctcaataaaaacatccccgtcatcgagtatgagcagttcatcgcagaatctggtgggccctttattgaccaggtttacgtcctgcaaagttacgcagaggggtggaaagaagggacctgggaagagaaggtggacgagcggccgtgtattgatcagctcctgtactcccaggacaagcacgagtactacagaggatggttttggggttatgaggagaccaggggtctaaacgtctcctgtctgtccgtccagggctcagcctccatcgtggcgcccctgctgctgagaaacacatcagcccggtccgtgatgttagacagagccgagaacctacttcacgaccactatggagggaaagaatactgggatacccgtcgcagcatggtgtttgccaggcacctgcgggaggtgggagacgagttcaggagcagacatctcaactccacggacgacgcagacaggatccccttccaggaggactggatgaagatgaaggtcaagctgggctccgcgctagggggcccctacctgggagtccacctgagaagaaaagatttcatctggggtcacagacaggatgtacccagtctggaaggggccgtgaggaagatccgcagcctcatgaagacccaccggctggacaaggtgtttgtggccacagatgccgtcagaaaggaatatgaagagctaaaaaagctgttacccgagatggtgaggtttgaacccacgtgggaggagctggagctctacaaggacggaggcgttgcgattattgaccagtggatctgcgcacacgccagttcatgaagtgccgctggagagccagagaccagctgcgcaggagccggaggaacgggcaggccgctgacctgaggtctggagaaacccctggagaagggtgtccccaccagcccatacagcgtgtgtgtggagggggccttgacctccgtgatgtctactgtgcctcaggataaggacccgccatgccctggctagacagtgtgtggttttttattggcacctcagtctcaacattttcttttcggattcatgaggaaagagaaatcctggggttggaccccaagacgacgtacaacaggttctgcggagaccaagagaaggcgtgtgagcaacccacccactggaagatcacctactgaggaggatcctccagggccgctccccggacccgacaggcgcgggtggatgcaggttctgtcgccgtggagtcaccgtctactgccagccgggagctgggcggacaggaccgtccctcgcagggtcccaggcccagaagaggccccacgcctctagagctgggctccgtcctcggcgttgccagccgccatggctgatgaagaggctccgctgctctcgggggtggcggttgttttcaggcagcgtctgtgaacccacagctcggttgccagcagtgcccgcgtggtgacccagaagcaggagtgtttgtcaggctcccgctctggcctttccagccacctttcatgtcttcatattttaagtgcattgaggatagatgcaggcgggtgagctgccctccgtcaggtggacccgggctgacatttccctgggagctggtgcaaggagaagcgtcattttaaatgtctgcagagcgaccaggggcctcatgaatctctccgttgccctccgcgcagcaggaggctgcctgtgtgtttcctcctgggatgcgtgcaaggcagacctggtgctgcaaaggaaagggcctgaggcctcagggagccccgtggagggatgacagttcaggccctactgctggcacgtcagagcactgggaagtttttcagtgacgtctctggggcactcagtggattgtctgtaggaaacttgcagctctgctcctcacaccaggcccggctggccacccaccctcgcccccactggccacccctccctcgccccgactgccccgccccaccctcaccccgactgccccgccctcgcccggctggccgtccctgccctcgccccggctggcaggtgcacatggggcctccaggtctgccattcgctattgagaactagaaatgaggaaggacagttacgctaactccaaaaggctgtctaggatgagctgctttatcagggagctccttgtacccattttacagaaatcatttttaggtctttgtgccaccaccacgaggggcatctgcaaagagggcaacgctagacacagaatccgtggaaggtgcagcagtgcctcaggggtcctcagggtcagggagcccccctcaccctcttggcccgttaccctttgtgactttccaccatggtgtcgtgtgaccctcagtcaggttggtgggggctgagtcctcactgagcagccactttccacatctgctagaggaacagtgacatggacacctgtgacagagagaggacagttaggagggacagacagctcttcctttcggagcctggctagtctaggacatcaccttgctgtgtcttctcaagcttttaaaattgaccctgaacgtgtgacagggtcctatggtgttactcaaagctgtgcagggtaaatgatgacatatttattctttttccatttgttctagaaacagtgcctttttcatcagttgcattttccaggctgagagctgtataaaacattttggactgtgaccatgtaccttcctttttaagaaaaataaactgctttatggaagttggtaaaaaaaaaa

SEQ ID NO: 14041 - DNA, 4828 bp, Homo sapiens
agtgcgtggccgcccggggccatggcgacactcagcttcgtcttcctgctgctgggggcagtgtcctggcctccggcttctgcctccggccaggagttctggcccggacaatcggcggccgatattctgtcgggggcggcttcccgcagacggtatcttctgtatgacgtcaaccccccggaaggcttcaacctgcgcagggatgtctatatccgaatcgcctctctcctgaagactctgctgaagacggaggagtgggtgcttgtcctgcctccatggggccgcctctatcactggcagagtcctgacatccaccaggtccggattccctggtctgagttttttgatcttccaagtctcaataaaaacatccccgtcatcgagtatgagcagttcatcgcagaatctggtgggccctttattgaccaggtttacgtcctgcaaagttacgcagaggggtggaaagaagggacctgggaagagaaggtggacgagcggccgtgtattgatcagctcctgtactcccaggacaagcacgagtactacagaggatggttttggggttatgaggagaccaggggtctaaacgtctcctgtctgtccgtccagggctcagcctccatcgtggcgcccctgctgctgagaaacacatcagcccggtccgtgatgttagacagagccgagaacctacttcacgaccactatggagggaaagaatactgggatacccgtcgcagcatggtgtttgccaggcacctgcgggaggtgggagacgagttcaggagcagacatctcaactccacggacgacgcagacaggatccccttccaggaggactggatgaagatgaaggtcaagctgggctccgcgctagggggcccctacctgggagtccacctgagaagaaaagatttcatctggggtcacagacaggatgtacccagtctggaaggggccgtgaggaagatccgcagcctcatgaagacccaccggctggacaaggtgtttgtggccacagatgccgtcagaaaggaatatgaagagctaaaaaagctgttacccgagatggtgaggtttgaacccacgtgggaggagctggagctctacaaggacggaggcgttgcgattattgaccagtggatctgcgcacacgccaggtgcctgcccacgtcactgtcggccgagagcgggtcgggtggctttcaaaggttcttctgtcccaagtactcggtgtcagagcagatggtcgcctgtgttcacagtggtcatttccatactgtttgcctcctcgtctgagtctcctgtagcatctggttcagtgtttccctgggctgaagttaattgttcatcttgcccctttagttctcatgcacagaattcctccatagcaggctgttggcatagctggcctcgtctcagaacctcttcttgtgtcgcattttcccatcattcccggtttctgcccctgtctgccccctgccctgagagttgcccgtgccctggacttgggcatgtccttgttgctgtgttgttgagcatccgtgagcgtccccgaggccgggagcgtgggccctcgtgtgatcattctcgtggggctgccatgagcgtccccaaggctgggagcatgggccctcgtgtgatcgttcttgtggggctgccgtgagcgtccccgaggccgggagcgtgggccctcgtgtgatcattctcgtggggctgccgtgagcgtcccagaggccgggagcgtgggccctgcgtgcagtcattcctctggggttgctgtgggaggtacgcctgggcctctgttcctccaaagacctgcctgcccatctgcataggagatgaaggctggggttagggtgaaacggtttgagttaaatggaaaatgaaagtagagggaatgatcttccccgtggttagcactgtgcacacgcgtgcgtctctgtgggttagtctgtctctctcctgcccgaggaatgctgagcgccctgagccggtgcctcttcacacatctgctatttcctgtggtgttctgggcatggtgtgtaagacccacagaggctccgggtgatgctgtctgctgggtgtgggtccctttccctgttaagcagacaggatgcagcgctgacttcttaggtcagggcggaggtgtgcaggagcccagtcacgagctcacccctgcttctcaggtgtggccttgggattttgactgcgaccttggcggtgctgtctccgcagcccaggaagcctgctgtggggaggcttcgcactgagctctcagcctcctgccctcagctgcgcgaagcgctcggcccagctcactgaagctgccctgcctccgggccggcgcggcctgctctggcaggcccctgtgtgtggggtggtgagggtctccccaccagtgctgcaccccgcagcagcatacaggcctgtgtggcctgctggccctgtggctctgtgtacagcgctgtgcatgttacatttgctctggaaacatctctggggtttgcttgttcacgaagttcatgaagtgccgctggagagccagagaccagctgcgcaggagccggaggaacgggcaggccgctgacctgaggtctggagaaacccctggagaagggtgtccccaccagcccatacagcgtgtgtgtggagggggccttgacctccgtgatgtctactgtgcctcaggataaggacccgccatgccctggctagacagtgtgtggttagtaggaatctctcattgttcaccatgtgacccccaggaggtattcgacctgcactggcgtgcctggcctgggatttggtgacggagaggagggctcccagggggacatgcggtgggacaggagcgtggcggctgctgactgtggggtgtggatggggctgcagcaccaggcagagcccctcagggcgccgatgtcgagggcacctgagcgaggggtgccagcaagggggcggccggctggtgggtgctcgggggacggccgtgttggttccatgtaactgtggaactcatttcactcagctgctcctctcagttctccctgactctggaacctctgtgaccccagttctccctgactctggaacctctgtgatcctttgcaggttttttattggcacctcagtctcaacattttcttttcggattcatgaggaaagagaaatcctggggttggaccccaagacgacgtacaacaggttctgcggagaccaagagaaggcgtgtgagcaacccacccactggaagatcacctactgaggaggatcctccagggccgctccccggacccgacaggcgcgggtggatgcaggttctgtcgccgtggagtcaccgtctactgccagccgggagctgggcggacaggaccgtccctcgcagggtcccaggcccagaagaggccccacgcctctagagctgggctccgtcctcggcgttgccagccgccatggctgatgaagaggctccgctgctctcgggggtggcggttgttttcaggcagcgtctgtgaacccacagctcggttgccagcagtgcccgcgtggtgacccagaagcaggagtgtttgtcaggctcccgctctggcctttccagccacctttcatgtcttcatattttaagtgcattgaggatagatgcaggcgggtgagctgccctccgtcaggtggacccgggctgacatttccctgggagctggtgcaaggagaagcgtcattttaaatgtctgcagagcgaccaggggcctcatgaatctctccgttgccctccgcgcagcaggaggctgcctgtgtgtttcctcctgggatgcgtgcaaggcagacctggtgctgcaaaggaaagggcctgaggcctcagggagccccgtggagggatgacagttcaggccctactgctggcacgtcagagcactgggaagtttttcagtgacgtctctggggcactcagtggattgtctgtaggaaacttgcagctctgctcctcacaccaggcccggctggccacccaccctcgcccccactggccacccctccctcgccccgactgccccgccccaccctcaccccgactgccccgccctcgcccggctggccgtccctgccctcgccccggctggcaggtgcacatggggcctccaggtctgccattcgctattgagaactagaaatgaggaaggacagttacgctaactccaaaaggctgtctaggatgagctgctttatcagggagctccttgtacccattttacagaaatcatttttaggtctttgtgccaccaccacgaggggcatctgcaaagagggcaacgctagacacagaatccgtggaaggtgcagcagtgcctcaggggtcctcagggtcagggagcccccctcaccctcttggcccgttaccctttgtgactttccaccatggtgtcgtgtgaccctcagtcaggttggtgggggctgagtcctcactgagcagccactttccacatctgctagaggaacagtgacatggacacctgtgacagagagaggacagttaggagggacagacagctcttcctttcggagcctggctagtctaggacatcaccttgctgtgtcttctcaagcttttaaaattgaccctgaacgtgtgacagggtcctatggtgttactcaaagctgtgcagggtaaatgatgacatatttattctttttccatttgttctagaaacagtgcctttttcatcagttgcattttccaggctgagagctgtataaaacattttggactgtgaccatgtaccttcctttttaagaaaaataaactgctttatggaagttggtaaaaaaaaaa

SEQ ID NO: 14042 - DNA, 2874 bp, Homo sapiens
agtgcgtggccgcccggggccatggcgacactcagcttcgtcttcctgctgctgggggcagtgtcctggcctccggcttctgcctccggccaggagttctggcccggacaatcggcggccgatattctgtcgggggcggcttcccgcagacggtatcttctgtatgacgtcaaccccccggaaggcttcaacctgcgcagggatgtctatatccgaatcgcctctctcctgaagactctgctgaagacggaggagtgggtgcttgtcctgcctccatggggccgcctctatcactggcagagtcctgacatccaccaggtccggattccctggtctgagttttttgatcttccaagtctcaataaaaacatccccgtcatcgagtatgagcagttcatcgcagaatctggtgggccctttattgaccaggtttacgtcctgcaaagttacgcagaggggtggaaagaagggacctgggaagagaaggtggacgagcggccgtgtattgatcagctcctgtactcccaggacaagcacgagtactacagaggatggttttggggttatgaggagaccaggggtctaaacgtctcctgtctgtccgtccagggctcagcctccatcgtggcgcccctgctgctgagaaacacatcagcccggtccgtgatgttagacagagccgagaacctacttcacgaccactatggagggaaagaatactgggatacccgtcgcagcatggtgtttgccaggcacctgcgggaggtgggagacgagttcaggagcagacatctcaactccacggacgacgcagacaggatccccttccaggaggactggatgaagatgaaggtcaagctgggctccgcgctagggggcccctacctgggagtccacctgagaagaaaagatttcatctggggtcacagacaggatgtacccagtctggaaggggccgtgaggaagatccgcagcctcatgaagacccaccggctggacaaggtgtttgtggccacagatgccgtcagaaaggaatatgaagagctaaaaaagctgttacccgagatggtgaggtttgaacccacgtgggaggagctggagctctacaaggacggaggcgttgcgattattgaccagtggatctgcgcacacgccaggttttttattggcacctcagtctcaacattttcttttcggattcatgaggaaagagaaatcctggggttggaccccaagacgacgtacaacaggttctgcggagaccaagagaaggcgtgtgagcaacccacccactggaagatcacctactgaggaggatcctccagggccgctccccggacccgacaggcgcgggtggatgcaggttctgtcgccgtggagtcaccgtctactgccagccgggagctgggcggacaggaccgtccctcgcagggtcccaggcccagaagaggccccacgcctctagagctgggctccgtcctcggcgttgccagccgccatggctgatgaagaggctccgctgctctcgggggtggcggttgttttcaggcagcgtctgtgaacccacagctcggttgccagcagtgcccgcgtggtgacccagaagcaggagtgtttgtcaggctcccgctctggcctttccagccacctttcatgtcttcatattttaagtgcattgaggatagatgcaggcgggtgagctgccctccgtcaggtggacccgggctgacatttccctgggagctggtgcaaggagaagcgtcattttaaatgtctgcagagcgaccaggggcctcatgaatctctccgttgccctccgcgcagcaggaggctgcctgtgtgtttcctcctgggatgcgtgcaaggcagacctggtgctgcaaaggaaagggcctgaggcctcagggagccccgtggagggatgacagttcaggccctactgctggcacgtcagagcactgggaagtttttcagtgacgtctctggggcactcagtggattgtctgtaggaaacttgcagctctgctcctcacaccaggcccggctggccacccaccctcgcccccactggccacccctccctcgccccgactgccccgccccaccctcaccccgactgccccgccctcgcccggctggccgtccctgccctcgccccggctggcaggtgcacatggggcctccaggtctgccattcgctattgagaactagaaatgaggaaggacagttacgctaactccaaaaggctgtctaggatgagctgctttatcagggagctccttgtacccattttacagaaatcatttttaggtctttgtgccaccaccacgaggggcatctgcaaagagggcaacgctagacacagaatccgtggaaggtgcagcagtgcctcaggggtcctcagggtcagggagcccccctcaccctcttggcccgttaccctttgtgactttccaccatggtgtcgtgtgaccctcagtcaggttggtgggggctgagtcctcactgagcagccactttccacatctgctagaggaacagtgacatggacacctgtgacagagagaggacagttaggagggacagacagctcttcctttcggagcctggctagtctaggacatcaccttgctgtgtcttctcaagcttttaaaattgaccctgaacgtgtgacagggtcctatggtgttactcaaagctgtgcagggtaaatgatgacatatttattctttttccatttgttctagaaacagtgcctttttcatcagttgcattttccaggctgagagctgtataaaacattttggactgtgaccatgtaccttcctttttaagaaaaataaactgctttatggaagttggtaaaaaaaaaa

SEQ ID NO: 14043 - DNA, 5077 bp, Homo sapiens
ctcatgcatatgcaggtgcgcgggtgacgaatgggcgagcgagctgtcagtctcgttccgaacttgttggctgcggtgccgggagcgcgggcgcgcagagccgaggccgggacccgctgccttcaccgccgccgccgtcgccgccgggtgggagccgggccgggcagccggagcgcggccgccagcgagccggagctgccgccgcccctgcacgcccgccgcccaggcccgcgcgccgcggcgctgcgctcgaccccgcccgcgccgccgccgccgccgcctctgccgctgccgctgcctctgcgggcgctcggagggcgggcgggcgctgggaggccggcgcggcggctgggagccgggcgcgggcggcggcggcggggccgggcgggcgggtcgcgggggcaatgcgggcgcagggccgggggcgccttccccggcggctgctgctgctgctggcgctctgggtgcaggcggcgcggcccatgggctatttcgagctgcagctgagcgcgctgcggaacgtgaacggggagctgctgagcggcgcctgctgtgacggcgacggccggacaacgcgcgcggggggctgcggccacgacgagtgcgacacgtacgtgcgcgtgtgccttaaggagtaccaggccaaggtgacgcccacggggccctgcagctacggccacggcgccacgcccgtgctgggcggcaactccttctacctgccgccggcgggcgctgcgggggaccgagcgcgggcgcgggcccgggccggcggcgaccaggacccgggcctcgtcgtcatccccttccagttcgcctggccgcgctcctttaccctcatcgtggaggcctgggactgggacaacgataccaccccgaatgaggagctgctgatcgagcgagtgtcgcatgccggcatgatcaacccggaggaccgctggaagagcctgcacttcagcggccacgtggcgcacctggagctgcagatccgcgtgcgctgcgacgagaactactacagcgccacttgcaacaagttctgccggccccgcaacgactttttcggccactacacctgcgaccagtacggcaacaaggcctgcatggacggctggatgggcaaggagtgcaaggaagctgtgtgtaaacaagggtgtaatttgctccacgggggatgcaccgtgcctggggagtgcaggtgcagctacggctggcaagggaggttctgcgatgagtgtgtcccctaccccggctgcgtgcatggcagttgtgtggagccctggcagtgcaactgtgagaccaactggggcggcctgctctgtgacaaagacctgaactactgtggcagccaccacccctgcaccaacggaggcacgtgcatcaacgccgagcctgaccagtaccgctgcacctgccctgacggctactcgggcaggaactgtgagaaggctgagcacgcctgcacctccaacccgtgtgccaacgggggctcttgccatgaggtgccgtccggcttcgaatgccactgcccatcgggctggagcgggcccacctgtgcccttgacatcgatgagtgtgcttcgaacccgtgtgcggccggtggcacctgtgtggaccaggtggacggctttgagtgcatctgccccgagcagtgggtgggggccacctgccagctggacgccaatgagtgtgaagggaagccatgccttaacgctttttcttgcaaaaacctgattggcggctattactgtgattgcatcccgggctggaagggcatcaactgccatatcaacgtcaacgactgtcgcgggcagtgtcagcatgggggcacctgcaaggacctggtgaacgggtaccagtgtgtgtgcccacggggcttcggaggccggcattgcgagctggaacgagacgagtgtgccagcagcccctgccacagcggcggcctctgcgaggacctggccgacggcttccactgccactgcccccagggcttctccgggcctctctgtgaggtggatgtcgacctttgtgagccaagcccctgccggaacggcgctcgctgctataacctggagggtgactattactgcgcctgccctgatgactttggtggcaagaactgctccgtgccccgcgagccgtgccctggcggggcctgcagagtgatcgatggctgcgggtcagacgcggggcctgggatgcctggcacagcagcctccggcgtgtgtggcccccatggacgctgcgtcagccagccagggggcaacttttcctgcatctgtgacagtggctttactggcacctactgccatgagaacattgacgactgcctgggccagccctgccgcaatgggggcacatgcatcgatgaggtggacgccttccgctgcttctgccccagcggctgggagggcgagctctgcgacaccaatcccaacgactgccttcccgatccctgccacagccgcggccgctgctacgacctggtcaatgacttctactgtgcgtgcgacgacggctggaagggcaagacctgccactcacgcgagttccagtgcgatgcctacacctgcagcaacggtggcacctgctacgacagcggcgacaccttccgctgcgcctgcccccccggctggaagggcagcacctgcgccgtcgccaagaacagcagctgcctgcccaacccctgtgtgaatggtggcacctgcgtgggcagcggggcctccttctcctgcatctgccgggacggctgggagggtcgtacttgcactcacaataccaacgactgcaaccctctgccttgctacaatggtggcatctgtgttgacggcgtcaactggttccgctgcgagtgtgcacctggcttcgcggggcctgactgccgcatcaacatcgacgagtgccagtcctcgccctgtgcctacggggccacgtgtgtggatgagatcaacgggtatcgctgtagctgcccacccggccgagccggcccccggtgccaggaagtgatcgggttcgggagatcctgctggtcccggggcactccgttcccacacggaagctcctgggtggaagactgcaacagctgccgctgcctggatggccgccgtgactgcagcaaggtgtggtgcggatggaagccttgtctgctggccggccagcccgaggccctgagcgcccagtgcccactggggcaaaggtgcctggagaaggccccaggccagtgtctgcgaccaccctgtgaggcctggggggagtgcggcgcagaagagccaccgagcaccccctgcctgccacgctccggccacctggacaataactgtgcccgcctcaccttgcatttcaaccgtgaccacgtgccccagggcaccacggtgggcgccatttgctccgggatccgctccctgccagccacaagggctgtggcacgggaccgcctgctggtgttgctttgcgaccgggcgtcctcgggggccagtgccgtggaggtggccgtgtccttcagccctgccagggacctgcctgacagcagcctgatccagggcgcggcccacgccatcgtggccgccatcacccagcgggggaacagctcactgctcctggctgtcaccgaggtcaaggtggagacggttgttacgggcggctcttccacaggtctgctggtgcctgtgctgtgtggtgccttcagcgtgctgtggctggcgtgcgtggtcctgtgcgtgtggtggacacgcaagcgcaggaaagagcgggagaggagccggctgccgcgggaggagagcgccaacaaccagtgggccccgctcaaccccatccgcaaccccatcgagcggccggggggccacaaggacgtgctctaccagtgcaagaacttcacgccgccgccgcgcagggcggacgaggcgctgcccgggccggccggccacgcggccgtcagggaggatgaggaggacgaggatctgggccgcggtgaggaggactccctggaggcggagaagttcctctcacacaaattcaccaaagatcctggccgctcgccggggaggccggcccactgggcctcaggccccaaagtggacaaccgcgcggtcaggagcatcaatgaggcccgctacgccggcaaggagtaggggcggctgccagctgggccgggacccagggccctcggtgggagccatgccgtctgccggacccggaggccgaggccatgtgcatagtttctttattttgtgtaaaaaaaccaccaaaaacaaaaaccaaatgtttattttctacgtttctttaaccttgtataaattattcagtaactgtcaggctgaaaacaatggagtattctcggatagttgctatttttgtaaagtttccgtgcgtggcactcgctgtatgaaaggagagagcaaagggtgtctgcgtcgtcaccaaatcgtagcgtttgttaccagaggttgtgcactgtttacagaatcttccttttattcctcactcgggtttctctgtggctccaggccaaagtgccggtgagacccatggctgtgttggtgtggcccatggctgttggtgggacccgtggctgatggtgtggcctgtggctgtcggtgggactcgtggctgtcaatgggacctgtggctgtcggtgggacctacggtggtcggtgggaccctggttattgatgtggccctggctgccggcacggcccgtggctgttgacgcacctgtggttgttagtggggcctgaggtcatcggcgtggcccaaggccggcaggtcaacctcgcgcttgctggccagtccaccctgcctgccgtctgtgcttcctcctgcccagaacgcccgctccagcgatctctccactgtgctttcagaagtgcccttcctgctgcgcagttctcccatcctgggacggcggcagtattgaagctcgtgacaagtgccttcacacagacccctcgcaactgtccacgcgtgccgtggcaccaggcgctgcccacctgccggccccggccgcccctcctcgtgaaagtgcatttttgtaaatgtgtacatattaaaggaagcactctgtatatttgattgaataatgccacca

SEQ ID NO: 14044 - DNA, 4963 bp, Homo sapiens
ctcatgcatatgcaggtgcgcgggtgacgaatgggcgagcgagctgtcagtctcgttccgaacttgttggctgcggtgccgggagcgcgggcgcgcagagccgaggccgggacccgctgccttcaccgccgccgccgtcgccgccgggtgggagccgggccgggcagccggagcgcggccgccagcgagccggagctgccgccgcccctgcacgcccgccgcccaggcccgcgcgccgcggcgctgcgctcgaccccgcccgcgccgccgccgccgccgcctctgccgctgccgctgcctctgcgggcgctcggagggcgggcgggcgctgggaggccggcgcggcggctgggagccgggcgcgggcggcggcggcggggccgggcgggcgggtcgcgggggcaatgcgggcgcagggccgggggcgccttccccggcggctgctgctgctgctggcgctctgggtgcaggcggcgcggcccatgggctatttcgagctgcagctgagcgcgctgcggaacgtgaacggggagctgctgagcggcgcctgctgtgacggcgacggccggacaacgcgcgcggggggctgcggccacgacgagtgcgacacgtacgtgcgcgtgtgccttaaggagtaccaggccaaggtgacgcccacggggccctgcagctacggccacggcgccacgcccgtgctgggcggcaactccttctacctgccgccggcgggcgctgcgggggaccgagcgcgggcgcgggcccgggccggcggcgaccaggacccgggcctcgtcgtcatccccttccagttcgcctggccgcgctcctttaccctcatcgtggaggcctgggactgggacaacgataccaccccgaatgaggagctgctgatcgagcgagtgtcgcatgccggcatgatcaacccggaggaccgctggaagagcctgcacttcagcggccacgtggcgcacctggagctgcagatccgcgtgcgctgcgacgagaactactacagcgccacttgcaacaagttctgccggccccgcaacgactttttcggccactacacctgcgaccagtacggcaacaaggcctgcatggacggctggatgggcaaggagtgcaaggaagctgtgtgtaaacaagggtgtaatttgctccacgggggatgcaccgtgcctggggagtgcaggtgcagctacggctggcaagggaggttctgcgatgagtgtgtcccctaccccggctgcgtgcatggcagttgtgtggagccctggcagtgcaactgtgagaccaactggggcggcctgctctgtgacaaagacctgaactactgtggcagccaccacccctgcaccaacggaggcacgtgcatcaacgccgagcctgaccagtaccgctgcacctgccctgacggctactcgggcaggaactgtgagaaggctgagcacgcctgcacctccaacccgtgtgccaacgggggctcttgccatgaggtgccgtccggcttcgaatgccactgcccatcgggctggagcgggcccacctgtgcccttgacatcgatgagtgtgcttcgaacccgtgtgcggccggtggcacctgtgtggaccaggtggacggctttgagtgcatctgccccgagcagtgggtgggggccacctgccagctggacgtcaacgactgtcgcgggcagtgtcagcatgggggcacctgcaaggacctggtgaacgggtaccagtgtgtgtgcccacggggcttcggaggccggcattgcgagctggaacgagacgagtgtgccagcagcccctgccacagcggcggcctctgcgaggacctggccgacggcttccactgccactgcccccagggcttctccgggcctctctgtgaggtggatgtcgacctttgtgagccaagcccctgccggaacggcgctcgctgctataacctggagggtgactattactgcgcctgccctgatgactttggtggcaagaactgctccgtgccccgcgagccgtgccctggcggggcctgcagagtgatcgatggctgcgggtcagacgcggggcctgggatgcctggcacagcagcctccggcgtgtgtggcccccatggacgctgcgtcagccagccagggggcaacttttcctgcatctgtgacagtggctttactggcacctactgccatgagaacattgacgactgcctgggccagccctgccgcaatgggggcacatgcatcgatgaggtggacgccttccgctgcttctgccccagcggctgggagggcgagctctgcgacaccaatcccaacgactgccttcccgatccctgccacagccgcggccgctgctacgacctggtcaatgacttctactgtgcgtgcgacgacggctggaagggcaagacctgccactcacgcgagttccagtgcgatgcctacacctgcagcaacggtggcacctgctacgacagcggcgacaccttccgctgcgcctgcccccccggctggaagggcagcacctgcgccgtcgccaagaacagcagctgcctgcccaacccctgtgtgaatggtggcacctgcgtgggcagcggggcctccttctcctgcatctgccgggacggctgggagggtcgtacttgcactcacaataccaacgactgcaaccctctgccttgctacaatggtggcatctgtgttgacggcgtcaactggttccgctgcgagtgtgcacctggcttcgcggggcctgactgccgcatcaacatcgacgagtgccagtcctcgccctgtgcctacggggccacgtgtgtggatgagatcaacgggtatcgctgtagctgcccacccggccgagccggcccccggtgccaggaagtgatcgggttcgggagatcctgctggtcccggggcactccgttcccacacggaagctcctgggtggaagactgcaacagctgccgctgcctggatggccgccgtgactgcagcaaggtgtggtgcggatggaagccttgtctgctggccggccagcccgaggccctgagcgcccagtgcccactggggcaaaggtgcctggagaaggccccaggccagtgtctgcgaccaccctgtgaggcctggggggagtgcggcgcagaagagccaccgagcaccccctgcctgccacgctccggccacctggacaataactgtgcccgcctcaccttgcatttcaaccgtgaccacgtgccccagggcaccacggtgggcgccatttgctccgggatccgctccctgccagccacaagggctgtggcacgggaccgcctgctggtgttgctttgcgaccgggcgtcctcgggggccagtgccgtggaggtggccgtgtccttcagccctgccagggacctgcctgacagcagcctgatccagggcgcggcccacgccatcgtggccgccatcacccagcgggggaacagctcactgctcctggctgtcaccgaggtcaaggtggagacggttgttacgggcggctcttccacaggtctgctggtgcctgtgctgtgtggtgccttcagcgtgctgtggctggcgtgcgtggtcctgtgcgtgtggtggacacgcaagcgcaggaaagagcgggagaggagccggctgccgcgggaggagagcgccaacaaccagtgggccccgctcaaccccatccgcaaccccatcgagcggccggggggccacaaggacgtgctctaccagtgcaagaacttcacgccgccgccgcgcagggcggacgaggcgctgcccgggccggccggccacgcggccgtcagggaggatgaggaggacgaggatctgggccgcggtgaggaggactccctggaggcggagaagttcctctcacacaaattcaccaaagatcctggccgctcgccggggaggccggcccactgggcctcaggccccaaagtggacaaccgcgcggtcaggagcatcaatgaggcccgctacgccggcaaggagtaggggcggctgccagctgggccgggacccagggccctcggtgggagccatgccgtctgccggacccggaggccgaggccatgtgcatagtttctttattttgtgtaaaaaaaccaccaaaaacaaaaaccaaatgtttattttctacgtttctttaaccttgtataaattattcagtaactgtcaggctgaaaacaatggagtattctcggatagttgctatttttgtaaagtttccgtgcgtggcactcgctgtatgaaaggagagagcaaagggtgtctgcgtcgtcaccaaatcgtagcgtttgttaccagaggttgtgcactgtttacagaatcttccttttattcctcactcgggtttctctgtggctccaggccaaagtgccggtgagacccatggctgtgttggtgtggcccatggctgttggtgggacccgtggctgatggtgtggcctgtggctgtcggtgggactcgtggctgtcaatgggacctgtggctgtcggtgggacctacggtggtcggtgggaccctggttattgatgtggccctggctgccggcacggcccgtggctgttgacgcacctgtggttgttagtggggcctgaggtcatcggcgtggcccaaggccggcaggtcaacctcgcgcttgctggccagtccaccctgcctgccgtctgtgcttcctcctgcccagaacgcccgctccagcgatctctccactgtgctttcagaagtgcccttcctgctgcgcagttctcccatcctgggacggcggcagtattgaagctcgtgacaagtgccttcacacagacccctcgcaactgtccacgcgtgccgtggcaccaggcgctgcccacctgccggccccggccgcccctcctcgtgaaagtgcatttttgtaaatgtgtacatattaaaggaagcactctgtatatttgattgaataatgccacca

SEQ ID NO: 14045 - DNA, 2292 bp, Homo sapiens
ccatgggttccccttcagcctgtccatacagagtgtgcattccctggcaggggctcctgctcacagcctcgcttttaaccttctggaacctgccaaacagtgcccagaccaatattgatgtcgtgccgttcaatgtcgcagaagggaaggaggtccttctagtagtccataatgagtcccagaatctttatggctacaactggtacaaaggggaaagggtgcatgccaactatcgaattataggatatgtaaaaaatataagtcaagaaaatgccccagggcccgcacacaacggtcgagagacaatataccccaatggaaccctgctgatccagaacgttacccacaatgacgcaggattctataccctacacgttataaaagaaaatcttgtgaatgaagaagtaaccagacaattctacgtattctcggagccacccaagccctccatcaccagcaacaacttcaatccggtggagaacaaagatattgtggttttaacctgtcaacctgagactcagaacacaacctacctgtggtgggtaaacaatcagagcctcctggtcagtcccaggctgctgctctccactgacaacaggaccctcgttctactcagcgccacaaagaatgacataggaccctatgaatgtgaaatacagaacccagtgggtgccagccgcagtgacccagtcaccctgaatgtccgctatgagtcagtacaagcaagttcacctgacctctcagctgggaccgctgtcagcatcatgattggagtactggctgggatggctctgatatagcagccttggtgtagtttctgcatttcgggaagagtgtttttattatccacctgcagactggactggattcttctagctccttcaatcccattttctcctgtggcatcactaagtataagacctgctctcttcctgaagacctataagctggaggtggacaactcaatgtaaatttcaaggaaaaaccctcatgcctgagatgtgggccactcagagctaaccaaaatgttcaacaccataactagagacactcaaattgccaaccaggacaagaagttgatgacttcatgctgtggacagtttttcccaagatgtcccaagcctcatcgtgacgaggctcttatcccactccatttttccctgctcatgcctgcctctttaatttggtaagataatgctgtaactagaatttcacaatcagcgccttgtgcaggcaatttgacagagtgttggatgtgtcatgtcatcatgtcaaacccaaatatttgacctaagggatcctttattctgcccagtggctaactttaacaacatccctaatacaactgtttattcaaatgcacggtggtccctgttagagttagacctctagactcacctgttctcacgccctgttttaatttaacccagctatgggatgccagataacagaattgctgcctacgagctgaacagggaggagtttgtgcagttgctgacacttcttgttgcacataaataaatacagtgggtactatagagactcagttgcaaaaattaacaaatatgctgcttgattaaaatgggtaggcttctcatgtggctcattctttaatctattctcttttatttggtttggttcatggggtctctgcctatggatcatacttcaaactcttggtgtgatcctcctgattgtcacaatattagttaccctggtgtgctgtattctctaaaacctttaaatgtttgcatgcagccattcgtcaaatgtcaaatattctctctttggctggaatgacaaaaactcaaataaatgtatgattaggaggacatcataacctatgaatgatggaagtccaaaatgatggtaactgacagtagtgttaatgccttatgtttagtcaaactctcatttaggtgacagcctggtgactccagaatggagccagtcatgctaaatgccatatactcacactgaaacatgaggaagcaggtagatcccagaacagacaaaactttcctaaaaacatgagagtccaggctgtctgagtcagcacagtaagaaagtcctttctgctttaactcttagaaaaaagtaatatgaagtattctgaaattaaccaatcagtttatttaaatcaatttatttatattcttctgttcctggattcccattttacaaaacccactgttctactgttgtattgcccagtaggagctatcactatattttgcagaatggaaactgccctgactcttgaatcacaaataaaagccaattgtatctgtt

SEQ ID NO: 14046 - DNA, 1352 bp, Homo sapiens
ctcctctccacagaggaggacagagcaggcagcagagaccatggggcccccctcagcttgtccccacagagaatgcatcccctggcaggggctcttgctcacagcctcacttttaactttctggaacgcacccaccactgcctggctctttattgcatcagcgccctttgaagttgctgaaggggagaatgttcatctctctgtggtttatctgcccgagaatctttacagctatggctggtacaaagggaaaacggtggagcccaaccagctaatcgcagcatatgtaatagacactcacgttaggactccagggcctgcatacagcggtcgagagacaatatcacccagtggagatctgcatttccagaacgtcaccctagaggacacgggatactacaacctacaagtcacatacagaaattctcagattgaacaggcatctcaccatctccgtgtatacgagtcagtggctcagccctccatccaagccagcagcaccacagtcacagagaagggctccgtggtcctgacctgccacacaaataacactggaacctctttccagtggattttcaacaaccagcgtctgcaggtcacgaagaggatgaagctgtcctggtttaaccatgtgctcaccatagaccccatcaggcaggaggacgctggggagtatcagtgtgaggtctccaacccagtcagctccaacaggagcgaccccctcaagctgactgtaaaatatgacaacactctaggcatcctgatcggggtcctggttgggagtcttctggtggctgcacttgtgtgtttcctgctcctccgaaaaactggcagggccagcgatcagagtgacttcagggagcagcagcccccagcctccacccccggccatggaccctctgacagctccatctcctaggaattgctacactctgacacaaacatttactgctggatcgaccacaaagcagatgtggcttcttaggttcctctgggagctgctcctgtgggttgatggagcgtccctgaagcccccagccctggggatggggaaggacatggagcctgagccagagaaccagctctgagtcctgaggagacacaggcctggggacaggaagggatgggggtccctgctgaatatatagagacctcaacagactgccccgggctctgggtgggccaaggcgaaggcttcccatcaccacaggaagtgggggcttgcagggaaagtgaatgggcctatggcccacccggggtcacctggaaaggatctgaataaaggggaaacttcctctcaaaaaaaaaaaaaaaaaaaaaaaaaaaaaaaaaaaaaaaaaaaaaaaaaaaaa

SEQ ID NO: 14047 - DNA, 1732 bp, Homo sapiens
gaggggcgggggctggaggcagcagcgcccccgcactccccgcgtctcgcacacttgcaccggtcgctcgcgcgcagcccggcgtcgccccacgccgcgctcgctcctccctccctcctcccgctccgtggctcccgtgctcctggcgaggctcaggcgcggagcgcgcggacgggcgcaccgacagacggccccggggacgcctcggctcgcgcctcccgggcgggctatgttgattgccccgccggggccggcccgcgggatcagcacagcccggcccgcggccccggcggccaatcgggactatgaaccggaaagcgcggcgctgcctgggccacctctttctcagcctgggcatggtctacctccggatcggtggcttctcctcagtggtagctctgggcgcaagcatcatctgtaacaagatcccaggcctggctcccagacagcgggcgatctgccagagccggcccgacgccatcatcgtcataggagaaggctcacaaatgggcctggacgagtgtcagtttcagttccgcaatggccgctggaactgctctgcactgggagagcgcaccgtcttcgggaaggagctcaaagtggggagccgggaggctgcgttcacctacgccatcattgccgccggcgtggcccacgccatcacagctgcctgtacccagggcaacctgagcgactgtggctgcgacaaagagaagcaaggccagtaccaccgggacgagggctggaagtggggtggctgctctgccgacatccgctacggcatcggcttcgccaaggtctttgtggatgcccgggagatcaagcagaatgcccggactctcatgaacttgcacaacaacgaggcaggccgaaagatcctggaggagaacatgaagctggaatgtaagtgccacggcgtgtcaggctcgtgcaccaccaagacgtgctggaccacactgccacagtttcgggagctgggctacgtgctcaaggacaagtacaacgaggccgttcacgtggagcctgtgcgtgccagccgcaacaagcggcccaccttcctgaagatcaagaagccactgtcgtaccgcaagcccatggacacggacctggtgtacatcgagaagtcgcccaactactgcgaggaggacccggtgaccggcagtgtgggcacccagggccgcgcctgcaacaagacggctccccaggccagcggctgtgacctcatgtgctgtgggcgtggctacaacacccaccagtacgcccgcgtgtggcagtgcaactgtaagttccactggtgctgctatgtcaagtgcaacacgtgcagcgagcgcacggagatgtacacgtgcaagtgagccccgtgtgcacaccaccctcccgctgcaagtcagattgctgggaggactggaccgtttccaagctgcgggctccctggcaggatgctgagcttgtcttttctgctgaggagggtacttttcctgggtttcctgcaggcatccgtgggggaaaaaaaatctctcagagccctcaactattctgttccacacccaatgctgctccaccctcccccagacacagcccaggtccctccgcggctggagcgaagccttctgcagcaggaactctggacccctgggcctcatcacagcaatatttaacaatttattctgataaaaataatattaatttatttaattaaaaagaattcttccacaaaaaaaaaaaaaaaaaa

SEQ ID NO: 14048 - DNA, 1322 bp, Homo sapiens
aactcattctgaagaggctgacgattttactgtctcatttttttcctttctccagaatgggttctgggtgggtcccctgggtggtggctctgctagtgaatctgacccgactggattcctccatgactcaaggcacagactctccagaagattttgtgattcaggcaaaggctgactgttacttcaccaacgggacagaaaaggtgcagtttgtggtcagattcatctttaacttggaggagtatgtacgtttcgacagtgatgtggggatgtttgtggcattgaccaagctggggcagccagatgctgagcagtggaacagccggctggatctcttggagaggagcagacaggccgtggatggggtctgtagacacaactacaggctgggcgcacccttcactgtggggagaaaagtgcaaccagaggtgacagtgtacccagagaggaccccactcctgcaccagcataatctgctgcactgctctgtgacaggcttctatccaggggatatcaagatcaagtggttcctgaatgggcaggaggagagagctggggtcatgtccactggccctatcaggaatggagactggacctttcagactgtggtgatgctagaaatgactcctgaacttggacatgtctacacctgccttgtcgatcactccagcctgctgagccctgtttctgtggagtggagagctcagtctgaatattcttggagaaagatgctgagtggcattgcagccttcctacttgggctaatcttccttctggtgggaatcgtcatccagctaagggctcagaaaggatatgtgaggacgcagatgtctggtaatgaggtctcaagagctgttctgctccctcagtcatgctaaggtcctcactgaagcttctctctctggagcctgaagtagtgatgagtagtctgggccctgggtgaggtaaaggacattcatgaggtcaatgttctgggaataactctcttccctgatccttggaggagcccgaactgattctggagctctgtgttctgagatcatgcatctcccacccatctgcccttctcccttctacgtgtacatcattaatccccattgccaagggcattgtccagaaactcccctgagaccttactccttccagccccaaatcatttacttttctgtggtccagccctactcctataagtcatgatctccaaagctttctgtcttccaactgcagtctccacagtcttcagaagacaaatgctcaggtagtcactgtttccttttcactgtttttaaaaaccttttattgtcaaataaaatggagataca

SEQ ID NO: 14049 - DNA, 3332 bp, Homo sapiens
acttggctctcgccctccggccgggaagcatggggcttcccaggctggtctgcgccttcttgctcgccgcctgctgctgctgtcctcgcgtcgcgggtgtgcccggagaggctgagcagcctgcgcctgagctggtggaggtggaagtgggcagcacagcccttctgaagtgcggcctctcccagtcccaaggcaacctcagccatgtcgactggttttctgtccacaaggagaagcggacgctcatcttccgtgtgcgccagggccagggccagagcgaacctggggagtacgagcagcggctcagcctccaggacagaggggctactctggccctgactcaagtcaccccccaagacgagcgcatcttcttgtgccagggcaagcgccctcggtcccaggagtaccgcatccagctccgcgtctacaaagctccggaggagccaaacatccaggtcaaccccctgggcatccctgtgaacagtaaggagcctgaggaggtcgctacctgtgtagggaggaacgggtaccccattcctcaagtcatctggtacaagaatggccggcctctgaaggaggagaagaaccgggtccacattcagtcgtcccagactgtggagtcgagtggtttgtacaccttgcagagtattctgaaggcacagctggttaaagaagacaaagatgcccagttttactgtgagctcaactaccggctgcccagtgggaaccacatgaaggagtccagggaagtcaccgtccctgttttctacccgacagaaaaagtgtggctggaagtggagcccgtgggaatgctgaaggaaggggaccgcgtggaaatcaggtgtttggctgatggcaaccctccaccacacttcagcatcagcaagcagaaccccagcaccagggaggcagaggaagagacaaccaacgacaacggggtcctggtgctggagcctgcccggaaggaacacagtgggcgctatgaatgtcagggcctggacttggacaccatgatatcgctgctgagtgaaccacaggaactactggtgaactatgtgtctgacgtccgagtgagtcccgcagcccctgagagacaggaaggcagcagcctcaccctgacctgtgaggcagagagtagccaggacctcgagttccagtggctgagagaagagacaggccaggtgctggaaagggggcctgtgcttcagttgcatgacctgaaacgggaggcaggaggcggctatcgctgcgtggcgtctgtgcccagcatacccggcctgaaccgcacacagctggtcaacgtggccatttttggccccccttggatggcattcaaggagaggaaggtgtgggtgaaagagaatatggtgttgaatctgtcttgtgaagcgtcagggcacccccggcccaccatctcctggaacgtcaacggcacggcaagtgaacaagaccaagatccacagcgagtcctgagcaccctgaatgtcctcgtgaccccggagctgttggagacaggtgttgaatgcacggcctccaacgacctgggcaaaaacaccagcatcctcttcctggagctggtcaatttaaccaccctcacaccagactccaacacaaccactggcctcagcacttccactgccagtcctcataccagagccaacagcacctccacagagagaaagctgccggagccggagagccggggcgtggtcatcgtggctgtgattgtgtgcatcctggtcctggcggtgctgggcgctgtcctctatttcctctataagaagggcaagctgccgtgcaggcgctcagggaagcaggagatcacgctacccccgtctcgtaagagcgaacttgtagttgaagttaagtcagataagctcccagaagagatgggcctcctgcagggcagcagcggtgacaagagggctccgggagaccagggagagaaatacatcgatctgaggcattagccccgaatcacttcagctcccttccctgcctggaccattcccagctccctgctcactcttctctcagccaaagcctccaaagggactagagagaagcctcctgctcccctcgcctgcacaccccctttcagagggccactgggttaggacctgaggacctcacttggccctgcaaggcccgcttttcagggaccagtccaccaccatctcctccacgttgagtgaagctcatcccaagcaaggagccccagtctcccgagcgggtaggagagtttcttgcagaacgtgttttttctttacacacattatggctgtaaatacctggctcctgccagcagctgagctgggtagcctctctgagctggtttcctgccccaaaggctggcttccaccatccaggtgcaccactgaagtgaggacacaccggagccaggcgcctgctcatgttgaagtgcgctgttcacacccgctccggagagcaccccagcagcatccagaagcagctgcagtgttgctgccaccaccctcctgtctgcctcttcaaagtctcctgtgacattttttctttggtcagaagccaggaactggtgtcattccttaaaagatacgtgccggggccaggtgtggtggctcacgcctgtaatcccagcactttgggaggccgaggcgggcggatcacaaagtcaggacgagaccatcctggctaacacggtgaaaccctgtctctactaaaaatacaaaaaaaaattagctaggcgtagtggttggcacctatagtcccagctactcggaaggctgaagcaggagaatggtatgaatccaggaggtggagcttgcagtgagccgagaccgtgccactgcactccagcctgggcaacacagcgagactccgtctcgaggaaaaaaaaagaaaagatacgtgcctgcggtgaggaagctgggcgctgttttcgagttcaggtgaattagcctcaatcccccgtgttcacttggctcccatagccctcttgatggatcacgtaaaactgaaaggcagcggggagcagacaaagatgaggtctacactgtccttcatggggattaaagctatggttatattagcaccaaacttctacaaaccaagctcagggccccaaccctagaagggcccaaatgagagaatggtacttagggatggaaaacgggcctggctagagcttcgggtgtgtgtgtctgtctgtgtgtatgcatacatatgtgtgtatatatggttttgtcaggtgtgtaaatttgcaaattgtttcctttatatatgtatgtatatatatatatgaaaatatatatatatatgaaaaataaagcttaattgtcccagaaatcata

SEQ ID NO: 14050 - DNA, 3699 bp, Homo sapiens
gctgccgccgcggcggccgctgctgctgctgcttctgccgccgctgccgccgccgctgcctggatatagtgcggcaagagcggagcttgcagtcactttgcgaggaggagcgcgcgggctgcgggcggctggggcaccgcgggagcggcggcggcggctctagcagaggcggccggggcagcgaaaggttctctctccagggctggacttaataactttgaaactgtccaccggtgtcacgtcctgaacatgagcctcctcctctccttctacctgctggggttgcttgtcagtagcgggcaagctcttcttcaagtgacaatttcacttagcaaagtagagcttagtgttggagaatctaaattcttcacatgtacagcgattggtgaacctgaaagtatagattggtataatcctcaaggagagaagataatttcaacacagagggtagtagtgcaaaaggaaggtgttaggtcacggttaaccatctacaatgcaaatatagaagatgcagggatatatcgttgtcaagcaacagatgccaaaggacaaacacaagaagctacagtagttttggaaatttaccaaaaactcactttcagagaagtggtatctccacaagaattcaaacaaggagaagatgcagaagtggtttgccgagttagcagttcacctgcacctgctgtcagctggttgtatcataatgaggaagtcaccactatttccgacaatcggttcgctatgttagcaaacaataacctgcagattctcaacatcaataaaagtgatgaaggtatatacagatgtgaaggaagagtggaggccaggggagaaattgacttccgtgatatcattgttattgttaatgtgccgccagcaatctcaatgcctcagaaatcttttaatgccacagcagagagaggagaagaaatgacattttcctgcagggcctcaggctctccagaacccgccatctcctggttcaggaatggcaagctcattgaagaaaatgagaagtacatattgaaagggagcaatacagaactcactgtcaggaacataatcaatagtgatggtggtccttatgtctgcagggccacaaataaggcaggagaagatgaaaagcaagctttcctccaagtctttgtacagcctcacataatacagcttaaaaatgaaactacatatgagaatggtcaagtcacactcgtatgtgatgcggaaggggagcctattccagaaatcacttggaaaagagctgtggatggcttcacgttcactgaaggcgataagagcctggacggccgtatcgaagtcaaagggcagcatggaagctcatcactgcatattaaagatgtgaagttgtcagattcagggagatatgactgtgaagctgcaagcagaattggagggcatcaaaagagcatgtaccttgatattgaatatgcccccaagtttatatcaaaccaaacaatttattactcttgggaaggaaatcctatcaatataagttgtgatgtgaaatcgaatccaccagcatcaattcactggagaagagataaattagtcttacctgctaaaaacacgaccaatttaaagacttatagtacaggaagaaagatgatattagagattgcacctacatctgacaatgactttggacgctataattgcacagccactaatcatataggaacaagatttcaagaatatattcttgctttggctgacgtgccatccagtccctatggagtgaagatcatagagctgtcgcagaccacggccaaggtttccttcaacaaaccggactcccatggaggtgtacctattcatcactatcaggtggatgtcaaagaagtagcgtcagaaatctggaaaattgtacgctcccatggagttcaaacaatggttgttttgaacaacctggaaccaaatacaacttatgaaatcagggttgcagctgtaaatggaaagggacaaggagactacagtaaaatagaaatcttccaaacattaccagttcgtgaaccaagtcctccatccatacatggacagccaagcagtggaaagagctttaaactcagcatcaccaaacaggacgatggaggggcccctattttggaatacattgtgaaatatagaagtaaagataaggaagaccaatggctagagaaaaaagtgcaaggaaataaagaccacatcattttggagcatctccagtggaccatggggtatgaagttcagattacagctgccaatagattgggatattctgaaccgacagtttatgaattcagcatgccaccaaagcccaacattattaaagacacgctgtttaatggtcttgggcttggagcagtaattggcctgggagttgctgcactgctgctaattcttgtggtaacagacgtcagctgcttctttattcggcaatgtgggttgctgatgtgcatcactaggagaatgtgtggaaagaaaagtggctccagtggcaaaagtaaagaactcgaagaaggaaaagctgcatacctgaaagatggatcaaaagaaccaatagtggagatgagaacagaggatgaaagagttactaatcacgaagatgggagcccagtaaatgagccaaatgaaaccacaccactgacagaacctgaaaaattgcctttaaaggaagaagatgggaaagaagctctaaatccagaaactatagaaattaaagtttctaacgacatcattcaatcaaaagaagacgacagcaaagcataacaacaatattacaggggcttgaacaacactacgaagagtatttggattgcgtgaccctatgaccaaaactattccattgaccttaatttcttgggaaacttctagcttggaatagcttgtacacatatacatatgatcaaatactcctgcccatgatccattcccttttgttattgttgttgttgttgctgttgttgttaattttgttaagaatttcaatatcaagactgactggcaccaacactttggtattcaatttgattctatgactgaagtactggaatttattatgtggctaaagtgctctatttattaagaactatatttaataccaccaacaaatataggggttaaggaaaaaaaacgtgagctacatgtgtaagaaggccctgcatgtgtatgagtcctattctgggcaaatagattcttaaagtggctttcaacttcaagatgaaggagcttaataatggttactcattttatcaggggaatttcagggaacgtaggcgtcaaagagccagttatctttagcagatattaaaaattgaaaactttggagaactcatttcaagttatgattcagtgcattttcaacattgatttttgatagactgaagtgccagatcaaaattgttacccatttgaaagaatattagttgtatataaaattagattagaaagactttctaaatctctatctctttatatatgtcctattcattcacaatggattatacaaaaaaaagtgtattgcaagtgaaataatattgatttctgccctcagcttcaaataaagtaaattgaaatgggaacaatatcaatatggtgtcttgatatatttataaatatgtgattatcatttatttttaaaataatttatcaaaaaacaagtctttagtgttcaaatacttcaaatcatatcctcagatatatttt

SEQ ID NO: 14051 - DNA, 5054 bp, Homo sapiens
atgggagacgtaaaagcgttgctgtttgtcgttgctgcccgggccagacgtttaggaggagccgctgcatccgagtccctggctgtctccgaagccttctgcagggtccgaagctgccagcccaaaaagtgtgcaggcccccagcggtgcctgaacccagtgcctgcagtgcccagtcccagccccagcgtgaggaagagacaggtgtccctcaactggcagccactgacgctccaggaggccagagctctactgaagcggcggcggccccgggggccagggggccggggactactgagaaggaggcccccacagcgtgcccccgctggcaaggccccggtcctgtgtcccttgatctgtcacaatggcggtgtgtgcgtgaagcctgaccgctgcttctgtcccccggacttcgctggcaagttctgccagttgcactcctcgggcgcccggcccccggccccggctgtaccaggcctcacccgctccgtgtacactatgccactggccaaccaccgcgacgacgagcacggcgtggcatctatggtgagcgtccacgtggagcacccgcaggaggcgtcggtggtggtgcaccaggtggagcgtgtgtctggcccttgggaggaggcggacgctgaggcggtggcgcgggcggaagcggcggcgcgggcggaggcggcagcgccctacacggtgttggcacagagcgcgccgcgggaggacggctactcagatgcctcgggcttcggttactgctttcgggagctgcgcggaggcgaatgcgcgtccccgctgcccgggctccggacgcaggaggtctgctgccgaggggccggcttggcctggggcgttcacgactgtcagctgtgctccgagcgcctggggaactccgaaagagtgagcgccccagatggaccttgtccaaccggctttgaaagagttaatgggtcctgcgaagatgtggatgagtgcgcgactggcgggcgctgccagcacggcgagtgtgcaaacacgcgcggcgggtacacgtgtgtgtgccccgacggctttctgctcgactcgtcccgcagcagctgcatctcccaacacgtgatctcagaggccaaagggccctgcttccgcgtgctccgcgacggcggctgttcgctgcccattctgcggaacatcactaaacagatctgctgctgcagccgcgtaggcaaggcctggggccggggctgccagctctgcccacccttcggctcagagggtttccgggagatctgcccggctggtcctggttaccactactcggcctccgacctccgctacaacaccagacccctgggccaggagccaccccgagtgtcactcagccagcctcgtaccctgccagccacctctcggccatctgcaggctttctgcccacccatcgcctggagccccggcctgaaccccggcccgatccccggcccggccctgagcttcccttgcccagcatccctgcctggactggtcctgagattcctgaatcaggtccctcctccggcatgtgtcagcgcaacccccaggtctgcggcccaggacgctgcatttcccggcccagcggctacacctgcgcttgcgactctggcttccggctcagcccccagggcacccgatgcattgatgtggacgaatgtcgccgcgtgcccccgccctgtgctcccgggcgctgcgagaactcaccaggcagcttccgctgcgtgtgcggcccgggcttccgagccggcccacgggctgcggaatgcctggatgtggacgagtgccaccgcgtgccgccgccgtgtgacctcgggcgctgcgagaacacgccaggcagcttcctgtgcgtgtgccccgccgggtaccaggctgcaccgcacggagccagctgccaggatgtggatgaatgcacccagagcccaggcctgtgtggccgagggggctgcaagaacctgcctggctctttccgctgtgtttgcccggctggcttccggggctcggcgtgtgaagaggatgtggatgagtgtgcccaggaaccgccgccctgtgggcccggccgctgtgacaacacggcaggctcctttcactgtgcctgccctgctggcttccgctcccgagggcccggggccccctgccaagatgtggatgagtgtgcccgaagccccccaccctgcacctacgggcggtgtgagaacacagaaggcagcttccagtgtgtctgccccatgggcttccaacccaacactgctggctccgagtgcgaagatgtggatgaatgtgaaaaccacctcgcatgccctgggcaggaatgtgtgaactcgcccggctccttccagtgcaggacctgtccttctggccaccacctgcaccgtggcagatgcactgatgtggacgaatgcagttcgggtgcccctccctgtggtccccacggccactgcactaacaccgaaggctccttccgctgcagctgcgcgccaggctaccgggcgccgtcgggtcggcccgggccctgcgcagacgtgaacgagtgcctggagggcgatttctgcttccctcacggcgagtgcctcaacactgacggctcctttgcctgtacttgtgcccctggctaccgacccggaccccgcggagcctcttgcctcgacgttgacgagtgcagcgaggaggacctttgccagagcggcatctgtaccaacaccgacggctccttcgagtgcatctgtcctccgggacaccgcgctggtccggacctcgcctcctgtctcgacgtggacgaatgtcgcgagcgaggtccagccctgtgcgggtcgcagcgttgtgagaactctcccggctcctaccgctgtgtccgggactgcgatcctgggtaccacgcgggccccgagggcacctgtgacgatgtggatgagtgccaagaatatggtcccgagatttgtggagcccagcgttgtgagaacacccctggctcctaccgctgtacaccagcctgtgaccctggctatcagcccacgccagggggcggatgccaggatgtggacgaatgccggaaccggtccttctgcggtgcccacgccgtgtgccagaacctgcccggctccttccagtgcctctgtgaccagggttacgagggggcacgggatgggcgtcactgcgtggatgtgaacgagtgtgaaacactacagggtgtatgtggagctgccctgtgtgaaaatgtcgaaggctccttcctctgtgtctgccccaacagcccggaagagtttgaccccatgactggacgctgtgttcccccacgaacttctgttggcatgtccccaggctcgcagccccaggcacctgttagccccgttctgcccgccaggccacctccgccacccctgtcccgccgacccagaaaacctaggaagggccctgtggggagtgggtgccgggagtgctattttgacacagcggccccggatgcatgtgacaacatcctggctcggaatgtgacatggcaggagtgctgctgtactgtgggtgagggctggggcagcggctgccgcatccagcagtgcccgggcaccgagacagctgagtaccagtcattgtgccctcacggccggggctacctggcgcccagtggagacctgagcctccggagagacgtggacgaatgtcagctcttccgagaccaggtgtgcaagagtggcgtgtgtgtgaacacggccccgggctactcatgctattgcagcaacggctactactaccacacacagcggctggagtgcatcgataatgacgagtgcgccgatgaggaaccggcctgtgagggcggccgctgtgtcaacactgtgggctcttatcactgtacctgcgagcccccactggtgctggatggctcgcagcgccgctgcgtctccaacgagagccagagcctcgatgacaatctgggagtgtgctggcaggaagtgggggctgacctcgtgtgcagccaccctcggctggaccgtcaggccacctacacagagtgctgctgcctgtatggagaggcctggggcatggactgcgccctctgccctgcgcaggactcagatgacttcgaggccctgtgcaatgtgctacgcccccccgcatatagccccccgcgaccaggtggctttggactcccctacgagtacggcccagacttaggtccaccttaccagggcctcccatatgggcctgagttgtacccaccacctgcgctaccctacgacccctacccaccgccacctgggcccttcgcccgccgggaggctccttatggggcaccccgcttcgacatgccagactttgaggacgatggtggcccctatggcgaatctgaggctcctgcgccacctggcccgggcacccgctggccctatcggtcccgggacacccgccgctccttcccagagcccgaggagcctcctgaaggtggaagctatgctggttccctggctgagccctacgaggagctggaggcggaggagtgcgggatcctggacggctgcaccaacgaccgctgcgtgcgcgtccccgaaggcttcacctgccgttgcttcgacggctaccgcctggacatgacccgcatggcctgcgttgacatcaacgagtgtgatgaggccgaggctgcctccccgctgtgcgtcaacgcgcgttgcctcaacacggatggctccttccgctgcatctgccgcccgggattcgcacccacgcaccagccgcaccactgtgcgcccgcacggccccgggcctgagccctggcacccgctggccacccacccgcgcccgccactcggggcccctgccgcgcatcctgcagcccgcttatgcgtatgtgcacggggccgcccgcctggacctggagaagggacctacggacgcctggaagctgcgacgccctgcactgctcccgcctccaccagcgcctcccactgatgtcgtggtcccgggcctggcccaggggcccctttacatgccctctcccttttataaaattttccattaaaaaccacctattttctaaaaaaaaaaaaaaaaaaaaaaa

SEQ ID NO: 14052 - DNA, 3189 bp, Homo sapiens
tttccagccatggctgccattacctgaccagcgccacagccggtctctctgcaggcgccgggagaagtgaccagagcaatttctgcttttcacagggcgggtttctcaacggtgacttgtgggcagtgccttctgctgagcgagtcatggcccgaaggcagaactaactgtgcctgcagtcttcactctcaggatgcagccgaggtgggcccaaggggccacgatgtggcttggagtcctgctgacccttctgctctgttcaagccttgagggtcaagaaaactctttcacaatcaacagtgttgacatgaagagcctgccggactggacggtgcaaaatgggaagaacctgaccctgcagtgcttcgcggatgtcagcaccacctctcacgtcaagcctcagcaccagatgctgttctataaggatgacgtgctgttttacaacatctcctccatgaagagcacagagagttattttattcctgaagtccggatctatgactcagggacatataaatgtactgtgattgtgaacaacaaagagaaaaccactgcagagtaccaggtgttggtggaaggagtgcccagtcccagggtgacactggacaagaaagaggccatccaaggtgggatcgtgagggtcaactgttctgtcccagaggaaaaggccccaatacacttcacaattgaaaaacttgaactaaatgaaaaaatggtcaagctgaaaagagagaagaattctcgagaccagaattttgtgatactggaattccccgttgaggaacaggaccgcgttttatccttccgatgtcaagctaggatcatttctgggatccatatgcagacctcagaatctaccaagagtgaactggtcaccgtgacggaatccttctctacacccaagttccacatcagccccaccggaatgatcatggaaggagctcagctccacattaagtgcaccattcaagtgactcacctggcccaggagtttccagaaatcataattcagaaggacaaggcgattgtggcccacaacagacatggcaacaaggctgtgtactcagtcatggccatggtggagcacagtggcaactacacgtgcaaagtggagtccagccgcatatccaaggtcagcagcatcgtggtcaacataacagaactattttccaagcccgaactggaatcttccttcacacatctggaccaaggtgaaagactgaacctgtcctgctccatcccaggagcacctccagccaacttcaccatccagaaggaagatacgattgtgtcacagactcaagatttcaccaagatagcctcaaagtcggacagtgggacgtatatctgcactgcaggtattgacaaagtggtcaagaaaagcaacacagtccagatagtcgtatgtgaaatgctctcccagcccaggatttcttatgatgcccagtttgaggtcataaaaggacagaccatcgaagtccgttgcgaatcgatcagtggaactttgcctatttcttaccaacttttaaaaacaagtaaagttttggagaatagtaccaagaactcaaatgatcctgcggtattcaaagacaaccccactgaagacgtcgaataccagtgtgttgcagataattgccattcccacgccaaaatgttaagtgaggttctgagggtgaaggtgatagccccggtggatgaggtccagatttctatcctgtcaagtaaggtggtggagtctggagaggacattgtgctgcaatgtgctgtgaatgaaggatctggtcccatcacctataagttttacagagaaaaagagggcaaacccttctatcaaatgacctcaaatgccacccaggcattttggaccaagcagaaggctaacaaggaacaggagggagagtattactgcacagccttcaacagagccaaccacgcctccagtgtccccagaagcaaaatactgacagtcagagtcattcttgccccatggaagaaaggacttattgcagtggttatcatcggagtgatcattgctctcttgatcattgcggccaaatgttattttctgaggaaagccaaggccaagcagatgccagtggaaatgtccaggccagcagtaccacttctgaactccaacaacgagaaaatgtcagatcccaatatggaagctaacagtcattacggtcacaatgacgatgtcggaaaccatgcaatgaaaccaataaatgataataaagagcctctgaactcagacgtgcagtacacggaagttcaagtgtcctcagctgagtctcacaaagatctaggaaagaaggacacagagacagtgtacagtgaagtccggaaagctgtccctgatgccgtggaaagcagatactctagaacggaaggctcccttgatggaacttagacagcaaggccagatgcacatccctggaaggacatccatgttccgagaagaacagatgatccctgtatttcaagacctctgtgcacttatttatgaacctgccctgctcccacagaacacagcaattcctcaggctaagctgccggttcttaaatccatcctgctaagttaatgttgggtagaaagagatacagaggggctgttgaatttcccacatacactccttccaccaagttggaacatccttggaaattggaagagcacaagaggagatccagggcaaggccattgggatattctgaaacttgaatattttgttttgtgcagagataaagaccttttccatgcaccctcatacacagaaaccaattttcttttttatactcaatcatttctagcgcatggcctggttagaggctggttttttctcttttcctttggtccttcaaaggcttgtagttttgggtagtccttgttctttggaaatacacagtgctgaccagacagcctccccctgtcccctctatgacctcgccctccacaaatgggaaaaccagactacttgggagcaccgcctgtgaaataccaacctgaagacacggttcattcaggcaacgcacaaaacagaaaatgaaggtggaacaagcacagatgttcttcaactgtttttgtctacactctttctcttttcctctaccatgctgaaggctgaaagacaggaagatggtgccatcagcaaatattattcttaattgaaaacttgaaaaaaaaaaaaaaaa

SEQ ID NO: 14053 - DNA, 5669 bp, Homo sapiens
tcctgtggcgcgccgcctggttcccgggaagactcgccagcaccagggggtgggggagtgcgagctgaaagctgctggagagtgagcagccctagcagggatggacatgatgctgttggtgcagggtgcttgttgctcgaaccagtggctggcggcggtgctcctcagcctgtgctgcctgctaccctcctgcctcccggctggacagagtgtggacttcccctgggcggccgtggacaacatgatggtcagaaaaggggacacggcggtgcttaggtgttatttggaagatggagcttcaaagggtgcctggctgaaccggtcaagtattatttttgcgggaggtgataagtggtcagtggatcctcgagtttcaatttcaacattgaataaaagggactacagcctccagatacagaatgtagatgtgacagatgatggcccatacacgtgttctgttcagactcaacatacacccagaacaatgcaggtgcatctaactgtgcaagttcctcctaagatatatgacatctcaaatgatatgaccgtcaatgaaggaaccaacgtcactcttacttgtttggccactgggaaaccagagccttccatttcttggcgacacatctccccatcagcaaaaccatttgaaaatggacaatatttggacatttatggaattacaagggaccaggctggggaatatgaatgcagtgcggaaaatgatgtgtcattcccagatgtgaggaaagtaaaagttgttgtcaactttgctcctactattcaggaaattaaatctggcaccgtgacccccggacgcagtggcctgataagatgtgaaggtgcaggtgtgccgcctccagcctttgaatggtacaaaggagagaagaagctcttcaatggccaacaaggaattattattcaaaattttagcacaagatccattctcactgttaccaacgtgacacaggagcacttcggcaattatacctgtgtggctgccaacaagctaggcacaaccaatgcgagcctgcctcttaaccctccaagtacagcccagtatggaattaccgggagcgctgatgttcttttctcctgctggtaccttgtgttgacactgtcctctttcaccagcatattctacctgaagaatgccattctacaataaattcaaagacccataaaaggcttttaaggattctctgaaagtgctgatggctggatccaatctggtacagtttgttaaaagcagcgtgggatataatcagcagtgcttacatggggatgatcgccttctgtagaattgctcattatgtaaatactttaattctactcttttttgattagctacattaccttgtgaagcagtacacattgtcctttttttaagacgtgaaagctctgaaattacttttagaggatattaattgtgatttcatgtttgtaatctacaacttttcaaaagcattcagtcatggtctgctaggttgcaggctgtagtttacaaaaacgaatattgcagtgaatatgtgattctttaaggctgcaatacaagcattcagttccctgtttcaataagagtcaatccacatttacaaagatgcatttttttcttttttgataaaaaagcaaataatattgccttcagattatttcttcaaaatataacacatatctagatttttctgctcgcatgatattcaggtttcaggaatgagccttgtaatataactggctgtgcagctctgcttctctttcctgtaagttcagcatgggtgtgccttcatacaataatatttttctctttgtctccaactaatataaaatgttttgctaaatcttacaatttgaaagtaaaaataaaccagagtgatcaagttaaaccatacactatctctaagtaacgaaggagctattggactgtaaaaatctcttcctgcactgacaatggggtttgagaattttgccccacactaactcagttcttgtgatgagagacaatttaataacagtatagtaaatataccatatgatttctttagttgtagctaaatgttagatccaccgtgggaaatcattccctttaaaatgacagcacagtccactcaaaggattgcctagcaatacagcatcttttcctttcactagtccaagccaaaaattttaagatgatttgtcagaaagggcacaaagtcctatcacctaatattacaagagttggtaagcgctcatcattaattttattttgtggcagctaagttagtatgacagaggcagtgctcctgtggacaggagcattttgcatattttccatctgaaagtatcactcagttgatagtctggaatgcatgttatatattttaaaacttccaaaatatattataacaaacattctatatcggtatgtagcagaccaatctctaaaatagctaattcttcaataaaatctttctatatagccatttcagtgcaaacaagtaaaatcaaaaaagaccatcctttatttttccttacatgatatatgtaagatgcgatcaaataaagacaaaacaccagtgatgagaatatcttaagataagtaattatcaaattattgtgaatgttaaattatttctactataaagaagcaaaactacatttttgaaggaaaatgctgttactctaacattaatttacaggaatagtttgatggtttcactctttactaaagaaaggccatcaccttgaaagccattttacaggtttgatgaagttaccaatttcagtacacctaaatttctacaaatagtccccttttacaagttgtaacaacaaagaccctataataaaattagatacaagaaattttgcagtggttatacatatttgagatatctagtatgttgccctagcagggatggcttaaaaactgtgattttttttcttcaagtaaaacttagtcccaaagtacatcataaatcaattttaattagaaaaatgaatcttaaatgaggggacataagtatactctttccacaaaatggcaataataaggcataaagctagtaaatctactaactgtaataaatgtatgacattattttgattgatacattaaaaaagagtttttagaacaaatatggcatttaactttattatttatttgcttttaagaaatattctttgtggaattgttgaataaactataaaatattattttgtattgcagctttaaagtggcacactccataataatctacttactagaaatagtggtgctaccacaaaaaatgttaaccatcagtaccattgtttgggagaaagaaacagatcaagaatgcatattattcagtgaccgctttcctagagttaaaatacctcctctttgtaaggtttgtaggtaaattgaggtataaactatggatgaaccaaataattagttcaaagtgttgtcatgattccaaatttgtggagtctggtgtttttaccatagaatgtgacagaagtacagtcatagctcagtagctatatgtatttgcctttatgttagaagagactttcttgagtgacatttttaaatagaggaggtattcactatgtttttctgtatcacagcagcattcctagtccttaggccctcggacagagtgaaatcatgagtatttatgagttcaatattgtcaaataaggctacagtatttgcttttttgtgtgaatgtattgcatataatgttcaagtagatgattttacatttatggacatataaaatgtctgattaccccattttatcagtcctgactgtacaagattgttgcaatttcagaatagcagttttataaattgatttatcttttaatctataacaatttgtgttagctgttcatttcaggattatattttctacaagttccacttgtgggactccttttgttgcccctatttttttttaaagaaggaagaaagaaaaataagtagcagtttaaaaatgagaatggagagaaaagaaaaagaatgaaaaggaaaggcagtaaagagggaaaaaaaggaaggatggaaggaatgaaggaaggaagggaggaaggggagaaggtaggaagaaagaaaggatgagagggaaggaagaatcagagtattagggtagttaacttacacatttgcattcttagtttaactgcaagtggtgtaactacgtttttcaatgatcgcatttgaaacataagtcctattataccattaagttcctattatgcagcaattatataataaaaagtactgcccaagttatagtaatgtgggtgtttttgagacactaaaagatttgagagggagaatttcaaacttaaagccacttttggggggtttataacttaactgaaaaattaatgcttcatcataacatttaagctatatctagaaagtagactggagaactgagaaaattacccaggtaattcagggaaaaaaaaaaatatatatatatataaatacccctacatttgaagtcagaaaactctgaaaaactgaattatcaaagtcaatcatctataatgatcaaatttactgaacaattgttaatttatccattgtgcttagctttgtgacacagccaaaagttacctatttaatcttttcaataaaaattgttttttgaaatccagaaatgatttaaaaagaggtcaggtttttaactatttattgaagtatgtggatgtacagtatttcaatagatatgaatatgaataaatggtatgccttaagattctttgaatatgtatttactttaaagactggaaaaagctcttcctgtcttttagtaaaacatccatatttcataacctgatgtaaaatatgttgtactgtttccaataggtgaatataaactcagtttatcaattaaaatatgtatttgactcattttaaaactctattagcttaagagaaagaaggaagaaataataatttgaagatatttctgctattctctttatttcctgtattacactcatctttctgcttactctaaagcagtacagggtaaaaattctagatgctacagtttcaaatgactccacactatattctttcttgctgttgctgattcctaaaaggtttgatgagctgaactacatctaaactaaaaataaattttctggaaacattttattattaattatttagaacctttacctggtaaaatacagcagagttagcaacagagactaaatatcctgttgataaaatcctgatgatcttacaggctaaacaactgaaaactcaaacgcttgtaagagccaggcagagtgtaatttcttaacagctgggtataaaacaacgggcacctgaaggtattcagatacaatttccttaaaaataccttggtttccaagcaaaacacgttatttggctgagaacctttagtttgtaaataccaaaccataatatacaaatgagatctcaagccaaatgaattttttaagccctctttcccatatctgttcatctatgatagtcaactgaataaatgagaacaatgtgatagataaaacaacaaagcataaaaaagattcatgcttggttttataagctattttgaaatataagtatcattgctattctgagaaatctatatacaccaaagccctccctccacaaaaaaactggaaatgttctaataaatgtctgatttccccca

SEQ ID NO: 14054 - DNA, 2893 bp, Homo sapiens
acccagaagcgtgtgtgtggagggaacacagccccagtagttacccccagacctcaggggctgaagtcaccgctggggctgaagtcatccttcatggatgcccaggcctgctccagttcccgccttttgccctcctcctcccagtttctccctcttattccacactagaccagctttgtccactcagcactcttctctctccatctctccttcctccccctccctccccttcccccctttcctctccctccctctcggctcccgcatttcccctcggctgccggcggctccgacatcatgctccggctcctccggccgctgctgctactgctgctgctgcctcccccggggtcccctgagccccccggcctgacccagctgtccccgggggcgcccccgcaggcccccgacttgctctacgctgacgggctgcgcgcctacgcggccggggcttgggcgccggccgtggcgctgctgcgggaggcgctgcggagccaggcggcgctgggccgggtgcggctggattgcggggcgagctgcgcggccgatccgggcgccgcgctccccgccgtgcttctcggggccccggagcccgactccgggccgggacccacgcaggggtcctgggagcgacagcttctccgtgcagcgctccgccgcgcagactgcctgacccagtgcgcagcacggaggctgggccccgggggcgcggcgcggcttcgcgtggggagcgcgctccgggacgccttccgccgtcgggagccctacaactacctgcagagggcctattaccagttgaagaagctggatctggcagctgcggcagcacacaccttctttgtagcaaaccccatgcacctgcagatgcgggaggacatggctaagtacagacgaatgtcgggagttcggccccagagcttccgggacctggagacgcccccacactgggcagcctatgacactggcctggagctactggggcgccaggaggcaggactggcactgcccaggctagaggaggctcttcaggggagcctggcccagatggagagctgccgtgctgactgtgaggggcctgaggagcagcagggggctgaagaagaggaggatggggctgcgagccaggggggcctctatgaggccattgcaggacactggattcaggtcctgcagtgccggcaacgctgtgtgggggaaacagccacacgccctggtcgcagcttccctgtcccagacttccttcccaaccagctgaggcggctacatgaggcccatgctcaggtgggcaatctgtcccaggctatagaaaatgtcctgagtgtcctgctcttctacccggaggatgaggctgccaagagggctctgaaccagtaccaggcccagctgggagagccgagacctggcctcggacccagagaggacatccagcgcttcatcctccgatccctgggggagaagaggcagctctactatgccatggagcacctggggaccagcttcaaggatcctgacccctggacccctgcagctctcatccctgaggcacttagagaaaagctcagagaggatcaagagaagaggccttgggaccatgagcccgtgaagccaaagcccttgacctactggaaggatgtccttctcctggagggtgtgaccttgacccaggattccaggcagctgaatgggtcggagcgggcggtgttggatgggctgctcaccccagccgagtgtggggtgctgctgcagctggctaaggatgcagctggggctggagccaggtctggctatcgtggtcgccgctcccctcacaccccccatgaacgcttcgaggggctcacggtgcttaaggctgcgcagctggcccgggctgggacagtgggcagtcagggtgctaagctgcttctggaggtgagcgagcgggtgcggaccttgacccaggcctacttctccccggaacggcccctgcatctgtccttcacccacctggtgtgccgcagcgccatagaaggagagcaagagcagcgcatggacctgagtcacccagtgcacgcagacaactgcgtcctggaccctgacacgggagagtgctggcgggagcccccagcctacacctatcgggactacagcggactcctctacctcaacgatgacttccagggtggggacctgttcttcacggagcccaacgccctcactgtcacggctcgggtgcgtcctcgctgtgggcgccttgtggccttcagctccggtgtcgagaatccccatggggtgtgggccgtgactcggggacggcgctgtgccctggcactgtggcacacgtgggcacctgagcacagggagcaggagtggatagaagccaaagaactgctgcaggagtcacaggaggaggaggaagaggaagaggaagaaatgcccagcaaagacccttccccagagccccctagccgcaggcaccagagggtccaagacaagactggaagggcacctcgggttcgggaggagctgtgagtggctgagccagctccttgaggatgtggccacttgacttgtggaaggccatcttgatgccaggacacacaggaagcccctgtgtgacatcaggagcagaacagcaagctctctgtccctgcacccccaccatcttggggacctacaagggcctggactcagaggacagtgcacaggctagcctggagctcaccaggcctggggagctgggacggggccccgctgccggacctgcagccctggacagatggggaacactgtgcctccctgaacagaaatggcaggggaggaggctgatgctttaaatgaagaggatggtggggttgggaggtataaccctgctcctctctcccagtctgtgcaataaaggtcgtgaagatctctc

SEQ ID NO: 14055 - DNA, 3678 bp, Homo sapiens
agatgctgcccccacccccttaggcccgagggatcaggagctatgggaccagaggccctgtcatctttactgctgctgctcttggtggcaagtggagatgctgacatgaagggacattttgatcctgccaagtgccgctatgccctgggcatgcaggaccggaccatcccagacagtgacatctctgcttccagctcctggtcagattccactgccgcccgccacagcaggttggagagcagtgacggggatggggcctggtgccccgcagggtcggtgtttcccaaggaggaggagtacttgcaggtggatctacaacgactgcacctggtggctctggtgggcacccagggacggcatgccgggggcctgggcaaggagttctcccggagctaccggctgcgttactcccgggatggtcgccgctggatgggctggaaggaccgctggggtcaggaggtgatctcaggcaatgaggaccctgagggagtggtgctgaaggaccttgggccccccatggttgcccgactggttcgcttctacccccgggctgaccgggtcatgagcgtctgtctgcgggtagagctctatggctgcctctggagggatggactcctgtcttacaccgcccctgtggggcagacaatgtatttatctgaggccgtgtacctcaacgactccacctatgacggacataccgtgggcggactgcagtatgggggtctgggccagctggcagatggtgtggtggggctggatgactttaggaagagtcaggagctgcgggtctggccaggctatgactatgtgggatggagcaaccacagcttctccagtggctatgtggagatggagtttgagtttgaccggctgagggccttccaggctatgcaggtccactgtaacaacatgcacacgctgggagcccgtctgcctggcggggtggaatgtcgcttccggcgtggccctgccatggcctgggagggggagcccatgcgccacaacctagggggcaacctgggggaccccagagcccgggctgtctcagtgccccttggcggccgtgtggctcgctttctgcagtgccgcttcctctttgcggggccctggttactcttcagcgaaatctccttcatctctgatgtggtgaacaattcctctccggcactgggaggcaccttcccgccagccccctggtggccgcctggcccacctcccaccaacttcagcagcttggagctggagcccagaggccagcagcccgtggccaaggccgaggggagcccgaccgccatcctcatcggctgcctggtggccatcatcctgctcctgctgctcatcattgccctcatgctctggcggctgcactggcgcaggctcctcagcaaggctgaacggagggtgttggaagaggagctgacggttcacctctctgtccctggggacactatcctcatcaacaaccgcccaggtcctagagagccacccccgtaccaggagccccggcctcgtgggaatccgccccactccgctccctgtgtccccaatggctctgcgttgctgctctccaatccagcctaccgcctccttctggccacttacgcccgtccccctcgaggcccgggcccccccacacccgcctgggccaaacccaccaacacccaggcctacagtggggactatatggagcctgagaagccaggcgccccgcttctgcccccacctccccagaacagcgtcccccattatgccgaggctgacattgttaccctgcagggcgtcaccgggggcaacacctatgctgtgcctgcactgcccccaggggcagtcggggatgggccccccagagtggatttccctcgatctcgactccgcttcaaggagaagcttggcgagggccagtttggggaggtgcacctgtgtgaggtcgacagccctcaagatctggttagtcttgatttcccccttaatgtgcgtaagggacaccctttgctggtagctgtcaagatcttacggccagatgccaccaagaatgccagcttctccttgttctccaggaatgatttcctgaaagaggtgaagatcatgtcgaggctcaaggacccaaacatcattcggctgctgggcgtgtgtgtgcaggacgaccccctctgcatgattactgactacatggagaacggcgacctcaaccagttcctcagtgcccaccagctggaggacaaggcagccgagggggcccctggggacgggcaggctgcgcaggggcccaccatcagctacccaatgctgctgcatgtggcagcccagatcgcctccggcatgcgctatctggccacactcaactttgtacatcgggacctggccacgcggaactgcctagttggggaaaatttcaccatcaaaatcgcagactttggcatgagccggaacctctatgctggggactattaccgtgtgcagggccgggcagtgctgcccatccgctggatggcctgggagtgcatcctcatggggaagttcacgactgcgagtgacgtgtgggcctttggtgtgaccctgtgggaggtgctgatgctctgtagggcccagccctttgggcagctcaccgacgagcaggtcatcgagaacgcgggggagttcttccgggaccagggccggcaggtgtacctgtcccggccgcctgcctgcccgcagggcctatatgagctgatgcttcggtgctggagccgggagtctgagcagcgaccacccttttcccagctgcatcggttcctggcagaggatgcactcaacacggtgtgaatcacacatccagctgcccctccctcagggagcgatccaggggaagccagtgacactaaaacaagaggacacaatggcacctctgcccttcccctcccgacagcccatcacctctaatagaggcagtgagactgcaggtgggctgggcccacccagggagctgatgccccttctccccttcctggacacactctcatgtccccttcctgttcttccttcctagaagcccctgtcgcccacccagctggtcctgtggatgggatcctctccaccctcctctagccatcccttggggaagggtggggagaaatataggatagacactggacatggcccattggagcacctgggccccactggacaacactgattcctggagaggtggctgcgcccccagcttctctctccctgtcacacactggaccccactggctgagaatctgggggtgaggaggacaagaaggagaggaaaatgtttccttgtgcctgctcctgtacttgtcctcagcttgggcttcttcctcctccatcacctgaaacactggacctgggggtagccccgccccagccctcagtcacccccacttcccacttgcagtcttgtagctagaacttctctaagcctatacgtttctgtggagtaaatattgggattggggggaaagagggagcaacggcccatagccttggggttggacatctctagtgtagctgccacattgatttttctataatcacttggggtttgtacatttttggggggagagacacagatttttacactaatatatggacctagcttgaggcaattttaatcccctgcactaggcaggtaataataaaggttgagttttccacaaaaaaaaaaaaaaaaaa

SEQ ID NO: 14056 - DNA, 3877 bp, Homo sapiens
tgctctcgggagccgcctcccgacacccgagccccgccggcgcctcccgctcccggctcccggctcctggctccctccgcctcccccgcccctcgccccgccgccgaagaggccccgctcccgggtcggacgcctgggtctgccgggaagagcgatgagaggtgtctgaaggtggctattcactgagcgatggggttggacttgaaggaatgccaagagatgctgcccccacccccttaggcccgagggatcaggagctatgggaccagaggccctgtcatctttactgctgctgctcttggtggcaagtggagatgctgacatgaagggacattttgatcctgccaagtgccgctatgccctgggcatgcaggaccggaccatcccagacagtgacatctctgcttccagctcctggtcagattccactgccgcccgccacagcaggttggagagcagtgacggggatggggcctggtgccccgcagggtcggtgtttcccaaggaggaggagtacttgcaggtggatctacaacgactgcacctggtggctctggtgggcacccagggacggcatgccgggggcctgggcaaggagttctcccggagctaccggctgcgttactcccgggatggtcgccgctggatgggctggaaggaccgctggggtcaggaggtgatctcaggcaatgaggaccctgagggagtggtgctgaaggaccttgggccccccatggttgcccgactggttcgcttctacccccgggctgaccgggtcatgagcgtctgtctgcgggtagagctctatggctgcctctggagggatggactcctgtcttacaccgcccctgtggggcagacaatgtatttatctgaggccgtgtacctcaacgactccacctatgacggacataccgtgggcggactgcagtatgggggtctgggccagctggcagatggtgtggtggggctggatgactttaggaagagtcaggagctgcgggtctggccaggctatgactatgtgggatggagcaaccacagcttctccagtggctatgtggagatggagtttgagtttgaccggctgagggccttccaggctatgcaggtccactgtaacaacatgcacacgctgggagcccgtctgcctggcggggtggaatgtcgcttccggcgtggccctgccatggcctgggagggggagcccatgcgccacaacctagggggcaacctgggggaccccagagcccgggctgtctcagtgccccttggcggccgtgtggctcgctttctgcagtgccgcttcctctttgcggggccctggttactcttcagcgaaatctccttcatctctgatgtggtgaacaattcctctccggcactgggaggcaccttcccgccagccccctggtggccgcctggcccacctcccaccaacttcagcagcttggagctggagcccagaggccagcagcccgtggccaaggccgaggggagcccgaccgccatcctcatcggctgcctggtggccatcatcctgctcctgctgctcatcattgccctcatgctctggcggctgcactggcgcaggctcctcagcaaggctgaacggagggtgttggaagaggagctgacggttcacctctctgtccctggggacactatcctcatcaacaaccgcccaggtcctagagagccacccccgtaccaggagccccggcctcgtgggaatccgccccactccgctccctgtgtccccaatggctctgcgttgctgctctccaatccagcctaccgcctccttctggccacttacgcccgtccccctcgaggcccgggcccccccacacccgcctgggccaaacccaccaacacccaggcctacagtggggactatatggagcctgagaagccaggcgccccgcttctgcccccacctccccagaacagcgtcccccattatgccgaggctgacattgttaccctgcagggcgtcaccgggggcaacacctatgctgtgcctgcactgcccccaggggcagtcggggatgggccccccagagtggatttccctcgatctcgactccgcttcaaggagaagcttggcgagggccagtttggggaggtgcacctgtgtgaggtcgacagccctcaagatctggttagtcttgatttcccccttaatgtgcgtaagggacaccctttgctggtagctgtcaagatcttacggccagatgccaccaagaatgccaggaatgatttcctgaaagaggtgaagatcatgtcgaggctcaaggacccaaacatcattcggctgctgggcgtgtgtgtgcaggacgaccccctctgcatgattactgactacatggagaacggcgacctcaaccagttcctcagtgcccaccagctggaggacaaggcagccgagggggcccctggggacgggcaggctgcgcaggggcccaccatcagctacccaatgctgctgcatgtggcagcccagatcgcctccggcatgcgctatctggccacactcaactttgtacatcgggacctggccacgcggaactgcctagttggggaaaatttcaccatcaaaatcgcagactttggcatgagccggaacctctatgctggggactattaccgtgtgcagggccgggcagtgctgcccatccgctggatggcctgggagtgcatcctcatggggaagttcacgactgcgagtgacgtgtgggcctttggtgtgaccctgtgggaggtgctgatgctctgtagggcccagccctttgggcagctcaccgacgagcaggtcatcgagaacgcgggggagttcttccgggaccagggccggcaggtgtacctgtcccggccgcctgcctgcccgcagggcctatatgagctgatgcttcggtgctggagccgggagtctgagcagcgaccacccttttcccagctgcatcggttcctggcagaggatgcactcaacacggtgtgaatcacacatccagctgcccctccctcagggagcgatccaggggaagccagtgacactaaaacaagaggacacaatggcacctctgcccttcccctcccgacagcccatcacctctaatagaggcagtgagactgcaggtgggctgggcccacccagggagctgatgccccttctccccttcctggacacactctcatgtccccttcctgttcttccttcctagaagcccctgtcgcccacccagctggtcctgtggatgggatcctctccaccctcctctagccatcccttggggaagggtggggagaaatataggatagacactggacatggcccattggagcacctgggccccactggacaacactgattcctggagaggtggctgcgcccccagcttctctctccctgtcacacactggaccccactggctgagaatctgggggtgaggaggacaagaaggagaggaaaatgtttccttgtgcctgctcctgtacttgtcctcagcttgggcttcttcctcctccatcacctgaaacactggacctgggggtagccccgccccagccctcagtcacccccacttcccacttgcagtcttgtagctagaacttctctaagcctatacgtttctgtggagtaaatattgggattggggggaaagagggagcaacggcccatagccttggggttggacatctctagtgtagctgccacattgatttttctataatcacttggggtttgtacatttttggggggagagacacagatttttacactaatatatggacctagcttgaggcaattttaatcccctgcactaggcaggtaataataaaggttgagttttccacaaaaaaaaaaaaaaaaaa

SEQ ID NO: 14057 - DNA, 2438 bp, Homo sapiens
acttcaagaaggagtcagagatcagcttaagggcaaaggctggaagcagagcgaactgggagcagagcacacagagccgtggagcgagagatgccggccctgggctgggccgtggctgccatcctgatgctgcagacggccatggcggagccctccccggggactctgcccaggaaggcaggggtgttttcagacctaagcaaccaagagctgaaggcagtgcacagcttcctctggtccaagaaggagctgaggctgcagccctccagtaccaccaccatggccaagaacaccgtgtttctcatcgagatgctgctgcccaagaagtaccatgtgctgaggtttctggataaaggtgaaaggcatcctgtgcgggaagcccgtgccgtcatcttctttggtgaccaggagcatcccaatgtcaccgagtttgctgtggggcccctgccagggccctgctacatgcgagcactgtcccccaggcctgggtaccagtcctcctgggcatcgaggcccatctccacagcagagtatgccctcctctaccacaccctgcaggaagccaccaagcccctgcatcagttcttcctcaataccacaggcttctcattccaagactgccatgacagatgcctggccttcaccgatgtggccccccggggtgtggcttctggccagcgccgcagttggcttatcatacagcgctatgtagaaggctactttctgcaccccactgggctggagctcctcgtggatcatgggagcacagatgctgggcactgggccgtggagcaggtgtggtacaacgggaagttctatgggagcccagaggaactggctcggaagtatgcagatggagaggtggacgtggtggtcctggaggacccgctgcctgggggcaaggggcatgacagcacagaggagccgcccctcttctcctcccacaagccccgcggggacttccccagccccatccatgtgagcggcccccgcttggtccagccccacggccctcgcttcaggctggagggcaacgctgtgctctacggcggctggagctttgccttccggctgcgctcctcctccgggctgcaggtcctgaacgtgcacttcggcggagagcgcattgcctatgaggtcagcgtgcaagaggcagtggcgctgtatggaggacacacacctgcaggcatgcagaccaagtacctcgatgtcggctggggcctgggcagcgtcactcatgagttagcccccggcatcgactgcccggagaccgccaccttcctggacactttccactactatgatgccgatgacccggtccattatccccgagccctctgcctctttgaaatgcccacaggggtgccccttcggcggcactttaattccaactttaaaggtggcttcaacttctatgcggggctgaagggccaggtgctggtgctgcggacaacttcaactgtctacaattatgattacatttgggactttatcttctaccccaacggggtgatggaggccaagatgcatgccactggctacgtccacgccaccttctacacccccgaggggctgcgccacggcactcgcctgcacacccacctgattggcaacatacacactcacttggtgcactaccgcgtagacctggatgtggcaggcaccaagaacagcttccagacactgcagatgaagctagaaaacatcaccaacccctggagcccaagacaccgcgtggtccagccaactctggagcagacgcagtactcctgggagcgccaggcggccttccgcttcaaaaggaagctgcctaagtacctgctctttaccagcccccaggagaacccctggggccacaagcgcacgtaccgcctgcagatccactccatggccgaccaggtgctgcccccaggctggcaggaggagcaggccatcacctgggcaaggtaccccctggcagtgaccaagtaccgggagtcggagctgtgcagcagcagcatctaccaccagaacgacccctggcacccgcccgtggtctttgagcagtttcttcacaacaacgagaacattgaaaatgaggacctggtggcctgggtgacggtgggcttcctgcacatcccccactcagaggacattcccaacacagccacacctgggaactccgtgggcttcctgctccggccattcaacttcttcccagaggacccctccctggcatccagagacactgtgatcgtgtggcctcgggacaacggccccaactacgtccagcgctggatccctgaggacagggactgctcgatgcctcccccttttagctacaatgggacctatagacctgtgtgaccagcccccagttcctcccccagttcctcccaggaagcccaggagcctcactggggcagacaataaaccctcagagcctcgcaaaaaaaaaa

SEQ ID NO: 14058 - DNA, 2178 bp, Homo sapiens
ccgcctgtcgcctgtgcgcctgcgcgcggcgccgaggggacggggtccgactcagaaatggcggcctccatgttctacggcaggctagtggccgtggccacccttcggaaccaccggcctcggacggcccagcgggctgctgctcaggttctgggaagttctggattgtttaataaccatggactccaagtacagcagcaacagcaaaggaatctctcactacatgaatacatgagtatggaattattgcaagaagctggtgtctccgttcccaaaggatatgtggcaaagtcaccagatgaagcttatgcaattgccaaaaaattaggttcaaaagatgtcgtgataaaggcacaggttttagctggtggtagaggaaaaggaacatttgaaagtggcctcaaaggaggagtgaagatagttttctctccagaagaagcaaaagctgtttcttcacaaatgattgggaaaaaattgtttaccaagcaaacgggagaaaagggcagaatatgcaatcaagtattggtctgtgagcgaaaatatcccaggagagaatactactttgcaataacaatggaaaggtcatttcaaggtcctgtattaataggaagttcacatggtggtgtcaacattgaagatgttgctgctgagtctcctgaagcaataattaaagaacctattgatattgaagaaggcatcaaaaaggaacaagctctccagcttgcacagaagatgggatttccacctaatattgtggaatcagcagcagaaaacatggtcaagctttacagcctttttctgaaatacgatgcaaccatgatagaaataaatccaatggtggaagattcagatggagctgtattgtgtatggatgcaaagatcaattttgactctaattcagcctatcgccaaaagaaaatctttgatctacaggactggacccaggaagatgaaagggacaaagatgctgctaaggcaaatctcaactacattggcctcgatggaaatataggctgcctagtaaatggtgctggtttggctatggccacaatggatataataaaacttcatggagggactccagccaacttccttgatgttggtggtggtgctacagtccatcaagtaacagaagcatttaagcttatcacttcagataaaaaggtactggctattctggtcaacatttttggaggaatcatgcgctgtgatgttattgcacagggtatagtcatggcagtaaaagacttggaaattaaaatacctgttgtggtacggttacaaggtacacgagtcgatgatgctaaggcactgatagcggacagtggacttaaaatacttgcttgtgatgacttggatgaagctgctagaatggttgtaaagctctctgaaatagtgaccttagcgaagcaagcacatgtggatgtgaaatttcagttgccaatatgatctgaaaacccagtggatggctgaaggtgttaaatgtgctataatcattaagaatactgtgttctgtgttattgttctttttctttttagtgtgtggagattgtaattgccatctaggcacacaaacatttaaaaggatttggactgcatttaattgtaccattcagaatggactgtttgtacgaagcatgtataatgcagttatcttctttctttcgtcgcagccagtcttttttgcttctcctacaaaacgtaacttgcaatttgccagtttattattgttggatacaaagttcttcattgataagagtcctataaataagataaatacgaagataaagctttattctttagtgttaaaatacagtatatctaataactagcctcattagtagagcagtatattaaaacaatgttttatgtaaaaagtgtttatcttcagcaccaaatacatgataaatgtatcaatcactatttataaacagagctttcaaacactcctcagaatattcttctaagtattttgatgaagtaactttgtaattatttgaacattgttttaatcattaggaaacactgattaactgcaagtcttcatgattctgtcatattaagaaacacctgtaggtttgcttcaaataaaggcatatataccaaggacttacagacaaaattaagaatgtcaatttaagttaataaaaatctcccaatatgaaaaaaaaaaaaaaa

SEQ ID NO: 14059 - DNA, 2819 bp, Homo sapiens
ctgggcccagctcccccgagaggtggtcggatcctctgggctgctcggtcgatgcctgtgccactgacgtccaggcatgaggtggttcctgccctggacgctggcagcagtgacagcagcagccgccagcaccgtcctggccacggccctctctccagcccctacgaccatggactttaccccagctccactggaggacacctcctcacgcccccaattctgcaagtggccatgtgagtgcccgccatccccaccccgctgcccgctgggggtcagcctcatcacagatggctgtgagtgctgtaagatgtgcgctcagcagcttggggacaactgcacggaggctgccatctgtgacccccaccggggcctctactgtgactacagcggggaccgcccgaggtacgcaataggagtgtgtgcacaggtggtcggtgtgggctgcgtcctggatggggtgcgctacaacaacggccagtccttccagcctaactgcaagtacaactgcacgtgcatcgacggcgcggtgggctgcacaccactgtgcctccgagtgcgccccccgcgtctctggtgcccccacccgcggcgcgtgagcatacctggccactgctgtgagcagtgggtatgtgaggacgacgccaagaggccacgcaagaccgcaccccgtgacacaggagccttcgatgctgtgggtgaggtggaggcatggcacaggaactgcatagcctacacaagcccctggagcccttgctccaccagctgcggcctgggggtctccactcggatctccaatgttaacgcccagtgctggcctgagcaagagagccgcctctgcaacttgcggccatgcgatgtggacatccatacactcattaaggcagggaagaagtgtctggctgtgtaccagccagaggcatccatgaacttcacacttgcgggctgcatcagcacacgctcctatcaacccaagtactgtggagtttgcatggacaataggtgctgcatcccctacaagtctaagactatcgacgtgtccttccagtgtcctgatgggcttggcttctcccgccaggtcctatggattaatgcctgcttctgtaacctgagctgtaggaatcccaatgacatctttgctgacttggaatcctaccctgacttctcagaaattgccaactaggcaggcacaaatcttgggtcttggggactaacccaatgcctgtgaagcagtcagcccttatggccaataacttttcaccaatgagccttagttaccctgatctggacccttggcctccatttctgtctctaaccattcaaatgacgcctgatggtgctgctcaggcccatgctatgagttttctccttgatatcattcagcatctactctaaagaaaaatgcctgtctctagctgttctggactacacccaagcctgatccagcctttccaagtcactagaagtcctgctggatcttgcctaaatcccaagaaatggaatcaggtagacttttaatatcactaatttcttctttagatgccaaaccacaagactctttgggtccattcagatgaatagatggaatttggaacaatagaataatctattatttggagcctgccaagaggtactgtaatgggtaattctgacgtcagcgcaccaaaactatcctgattccaaatatgtatgcacctcaaggtcatcaaacatttgccaagtgagttgaatagttgcttaattttgatttttaatggaaagttgtatccattaacctgggcattgttgaggttaagtttctcttcacccctacactgtgaagggtacagattaggtttgtcccagtcagaaataaaatttgataaacattcctgttgatgggaaaagcccccagttaatactccagagacagggaaaggtcagcccgtttcagaaggaccaattgactctcacactgaatcagctgctgactggcagggctttgggcagttggccaggctcttccttgaatcttctcccttgtcctgcttggggttcataggaattggtaaggcctctggactggcctgtctggcccctgagagtggtgccctggaacactcctctactcttacagagccttgagagacccagctgcagaccatgccagacccactgaaatgaccaagacaggttcaggtaggggtgtgggtcaaaccaagaagtgggtgcccttggtagcagcctggggtgacctctagagctggaggctgtgggactccaggggcccccgtgttcaggacacatctattgcagagactcatttcacagcctttcgttctgctgaccaaatggccagttttctggtaggaagatggaggtttaccggttgtttagaaacagaaatagacttaataaaggtttaaagctgaagaggttgaagctaaaaggaaaaggttgttgttaatgaatatcaggctattatttattgtattaggaaaatataatatttactgttagaattcttttatttagggccttttctgtgccagacattgctctcagtgctttgcatgtattagctcactgaatcttcacgacaatgttgagaagttcccattattatttctgttcttacaaatgtgaaacggaagctcatagaggtgagaaaactcaaccagagtcacccagttggtgactgggaaagttaggattcagatcgaaattggactgtctttataacccatattttccccctgtttttagagcttccaaatgtgtcagaataggaaaacattgcaataaatggcttgattttttaaaaaaaaaaaaaaaaaaaaaaa

SEQ ID NO: 14060 - DNA, 1035 bp, Homo sapiens
ctgggcccagctcccccgagaggtggtcggatcctctgggctgctcggtcgatgcctgtgccactgacgtccaggcatgaggtggttcctgccctggacgctggcagcagtgacagcagcagccgccagcaccgtcctggccacggccctctctccagcccctacgaccatggactttaccccagctccactggaggacacctcctcacgcccccaattctgcaagtggccatgtgagtgcccgccatccccaccccgctgcccgctgggggtcagcctcatcacagatggctgtgagtgctgtaagatgtgcgctcagcagcttggggacaactgcacggaggctgccatctgtgacccccaccggggcctctactgtgactacagcggggaccgcccgaggtacgcaataggagtgtgtgcacatgctgtgggtgaggtggaggcatggcacaggaactgcatagcctacacaagcccctggagcccttgctccaccagctgcggcctgggggtctccactcggatctccaatgttaacgcccagtgctggcctgagcaagagagccgcctctgcaacttgcggccatgcgatgtggacatccatacactcattaaggcagggaagaagtgtctggctgtgtaccagccagaggcatccatgaacttcacacttgcgggctgcatcagcacacgctcctatcaacccaagtactgtggagtttgcatggacaataggtgctgcatcccctacaagtctaagactatcgacgtgtccttccagtgtcctgatgggcttggcttctcccgccaggtcctatggattaatgcctgcttctgtaacctgagctgtaggaatcccaatgacatctttgctgacttggaatcctaccctgacttctcagaaattgccaactaggcaggcacaaatcttgggtcttggggactaacccaatgcctgtgaagcagtcagcccttatggccaataacttttcaccaatgagccttagttaccctgaaaaaaaaaaaaaaaaa

SEQ ID NO: 14061 - DNA, 4125 bp, Homo sapiens
cggctatccgcgcgggagtgcgccacgcggggccggagcgcctattagccgccaggacctcggagcgccccgaccacccctgagcccctctggcttcggagccccccagcaccccttcccgggtcccctcgcccaccctaatccactctccctccctttcccggattccctcgctcaccccatcctctctcccgccccttcctggattccctcacccgtctcgatcccctctccgccctttcccagagacccagagcccctgaccccccgcgccctccccggagccccccgcgcgtgccgcggccatggcggccgtgcgcggggcgcccctgctcagctgcctcctggcgttgctggccctgtgccctggagggcgcccgcagacggtgctgaccgacgacgagatcgaggagttcctcgagggcttcctgtcagagctagaacctgagccccgggaggacgacgtggaggccccgccgcctcccgagcccaccccgcgggtccgaaaagcccaggcggggggcaagccagggaagcggccagggacggccgcagaagtgcctccggaaaagaccaaagacaaagggaagaaaggcaagaaagacaaaggccccaaggtgcccaaggagtccttggaggggtcccccaggccgcccaagaaggggaaggagaagccacccaaggccaccaagaagcccaaggagaagccacctaaggccaccaagaagcccaaggagaagccacccaaggccaccaagaagcccaaagagaagccacccaaggccaccaagaagcccccgtcagggaagaggccccccattctggctccctcagaaaccctggagtggccactgcccccaccccccagccctggccccgaggagctaccccaggagggaggggcgcccctctcaaataactggcagaatccaggagaggagacccatgtggaggcacgggagcaccagcctgagccggaggaggagaccgagcaacccacactggactacaatgaccagatcgagagggaggactatgaggactttgagtacattcggcgccagaagcaacccaggccacccccaagcagaaggaggaggcccgagcgggtctggccagagccccctgaggagaaggccccggccccagccccggaggagaggattgagcctcctgtgaagcctctgctgcccccgctgccccctgactatggtgatggttacgtgatccccaactacgatgacatggactattactttgggcctcctccgccccagaagcccgatgctgagcgccagacggacgaagagaaggaggagctgaagaaacccaaaaaggaggacagcagccccaaggaggagaccgacaagtgggcagtggagaagggcaaggaccacaaagagccccgaaagggcgaggagttggaggaggagtggacgcctacggagaaagtcaagtgtccccccattgggatggagtcacaccgtattgaggacaaccagatccgagcctcctccatgctgcgccacggcctgggggcacagcgcggccggctcaacatgcagaccggtgccactgaggacgactactatgatggtgcgtggtgtgccgaggacgatgccaggacccagtggatagaggtggacaccaggaggactacccggttcacaggcgtcatcacccagggcagagactccagcatccatgacgattttgtgaccaccttcttcgtgggcttcagcaatgacagccagacatgggtgatgtacaccaacggctatgaggaaatgacctttcatgggaacgtggacaaggacacacccgtgctgagtgagctcccagagccggtggtggctcgtttcatccgcatctacccactcacctggaatggcagcctgtgcatgcgcctggaggtgctggggtgctctgtggcccctgtctacagctactacgcacagaatgaggtggtggccaccgatgacctggatttccggcaccacagctacaaggacatgcgccagctcatgaaggtggtgaacgaggagtgccccaccatcacccgcacttacagcctgggcaagagctcacgaggcctcaagatctatgccatggagatctcagacaaccctggggagcatgaactgggggagcccgagttccgctacactgctgggatccatggcaacgaggtgctgggccgagagctgttgctgctgctcatgcagtacctgtgccgagagtaccgcgatgggaacccacgtgtgcgcagcctggtgcaggacacacgcatccacctggtgccctcactgaaccctgatggctacgaggtggcagcgcagatgggctcagagtttgggaactgggcgctgggactgtggactgaggagggctttgacatctttgaagatttcccggatctcaactctgtgctctggggagctgaggagaggaaatgggtcccctaccgggtccccaacaataacttgcccatccctgaacgctacctttcgccagatgccacggtatccacggaggtccgggccatcattgcctggatggagaagaaccccttcgtgctgggagcaaatctgaacggcggcgagcggctagtatcctacccctacgatatggcccgcacgcctacccaggagcagctgctggccgcagccatggcagcagcccggggggaggatgaggacgaggtctccgaggcccaggagactccagaccacgccatcttccggtggcttgccatctccttcgcctccgcacacctcaccttgaccgagccctaccgcggaggctgccaagcccaggactacaccggcggcatgggcatcgtcaacggggccaagtggaacccccggaccgggactatcaatgacttcagttacctgcataccaactgcctggagctctccttctacctgggctgtgacaagttccctcatgagagtgagctgccccgcgagtgggagaacaacaaggaggcgctgctcaccttcatggagcaggtgcaccgcggcattaagggggtggtgacggacgagcaaggcatccccattgccaacgccaccatctctgtgagtggcattaatcacggcgtgaagacagccagtggtggtgattactggcgaatcttgaacccgggtgagtaccgcgtgacagcccacgcggagggctacaccccgagcgccaagacctgcaatgttgactatgacatcggggccactcagtgcaacttcatcctggctcgctccaactggaagcgcatccgggagatcatggccatgaacgggaaccggcctatcccacacatagacccatcgcgccctatgaccccccaacagcgacgcctgcagcagcgacgcctacaacaccgcctgcggcttcgggcacagatgcggctgcggcgcctcaacgccaccaccaccctaggcccccacactgtgcctcccacgctgccccctgcccctgccaccaccctgagcactaccatagagccctggggcctcataccgccaaccaccgctggctgggaggagtcggagactgagacctacacagaggtggtgacagagtttgggaccgaggtggagcccgagtttgggaccaaggtggagcccgagtttgagacccagttggagcctgagtttgagacccagctggaacccgagtttgaggaagaggaggaggaggagaaagaggaggagatagccactggccaggcattccccttcacaacagtagagacctacacagtgaactttggggacttctgagatcagcgtcctaccaagaccccagcccaactcaagctacagcagcagcacttcccaagcctgctgaccacagtcacatcacccatcagcacatggaaggcccctggtatggacactgaaaggaagggctggtcctgcccctttgagggggtgcaaacatgactgggacctaagagccagaggctgtgtagaggctcctgctccacctgccagtctcgtaagagatggggttgctgcagtgttggagtaggggcagagggagggagccaaggtcactccaataaaacaagctcatggcaaaaaaaaaaaaaaaaaaaaaaaaaaaaaaaaaaaaaaaaaaaaa

SEQ ID NO: 14062 - DNA, 1064 bp, Homo sapiens
tttgaggccatataaagtcacctgaggccctctccaccacagcccaccagtgaccatgaaggctgtgctgcttgccctgttgatggcaggcttggccctgcagccaggcactgccctgctgtgctactcctgcaaagcccaggtgagcaacgaggactgcctgcaggtggagaactgcacccagctgggggagcagtgctggaccgcgcgcatccgcgcagttggcctcctgaccgtcatcagcaaaggctgcagcttgaactgcgtggatgactcacaggactactacgtgggcaagaagaacatcacgtgctgtgacaccgacttgtgcaacgccagcggggcccatgccctgcagccggctgctgccatccttgcgctgctccctgcactcggcctgctgctctggggacccggccagctctaggctctggggggccccgctgcagcccacactgggtgtggtgccccaggcctctgtgccactcctcacacacccggcccagtgggagcctgtcctggttcctgaggcacatcctaacgcaagtctgaccatgtatgtctgcgcccctgtcccccaccctgaccctcccatggccctctccaggactcccacccggcagatcggctctattgacacagatccgcctgcagatggcccctccaaccctctctgctgctgtttccatggcccagcattctccacccttaaccctgtgctcaggcacctcttcccccaggaagccttccctgcccaccccatctatgacttgagccaggtctggtccgtggtgtcccccgcacccagcaggggacaggcactcaggagggcccggtaaaggctgagatgaagtggactgagtagaactggaggacaggagtcgacgtgagttcctgggagtctccagagatggggcctggaggcctggaggaaggggccaggcctcacattcgtggggctccctgaatggcagcctcagcacagcgtaggcccttaataaacacctgttggataagccaaaaaaaaaaaaaaaaaaaaaaaaaaaaaaaaaaaaaaaaaaaaa

SEQ ID NO: 14063 - DNA, 7522 bp, Homo sapiens
aaagattgctttcttctgggacgctgcttgaacgctaaccgcgttgattggaacagattttgtgtcttggctggctttgggtgaagaccggggagaaaaggttgcgctgcgattctcaagatctctggacctggattatcattgcaaatccattaaagaaggagaagcaagcggatttcagagaggttgttcttcagaaaaaaatggttatttctttgaactcatgcctgagctttatttgtttattgttatgccactggattgggacagcatcacctctgaatcttgaagaccctaatgtgtgtagccactgggaaagctactcagtgactgtgcaagagtcatacccacatccctttgatcaaatttactacacgagctgcactgacattctaaactggtttaaatgcacgcggcacagagtcagctatcggacagcctatcgacatggggagaagactatgtataggcgcaagtctcagtgttgtcctggattttatgaaagcggggaaatgtgtgtcccccactgtgctgataaatgtgtccatggtcgctgtattgctccaaacacctgtcagtgtgagcctggctggggagggaccaactgctccagtgcctgcgatggtgatcactggggtccccactgcaccagccggtgccagtgcaaaaatggggctctgtgcaaccccatcaccggggcttgccactgtgctgcgggcttccggggctggcgctgcgaggaccgctgtgagcagggcacctatggtaacgactgtcatcagagatgccagtgccagaatggagccacctgcgaccacgtcacgggggaatgccgctgcccaccaggatacaccggagccttctgtgaggatctttgtcctcctggtaaacatggtccacagtgtgagcagagatgcccttgtcaaaatggaggagtgtgtcatcacgtcactggagaatgctcttgcccttctggctggatgggcacagtgtgtggtcagccttgccccgagggtcgctttggaaagaactgttcccaagaatgccagtgccataatggagggacgtgtgatgctgccacaggccaatgtcattgcagtccaggatacacaggggaacggtgccaggatgagtgtcctgttgggacctatggcgttctctgtgctgagacctgccagtgtgtcaacggagggaagtgttaccacgtgagcggcgcatgcctctgtgaagcaggctttgctggcgagcgctgcgaagcacgcctgtgtcctgaggggctctacggcatcaaatgtgacaaacggtgtccctgccacttggaaaacactcatagctgtcaccccatgtctggagagtgtgcctgcaagccgggctggtcaggactctactgtaatgagacatgttctcctggattctacggggaagcttgccagcagatctgcagctgccaaaatggggcagactgtgacagtgtgactggaaagtgcacctgtgccccaggattcaaaggaattgactgctctaccccatgccctctgggaacctatgggataaactgttcctctcgctgtggctgtaaaaatgatgcagtctgctctcctgtggacgggtcttgtacttgcaaggcaggctggcacggggtggactgctccatcagatgtcccagtggcacatggggctttggctgtaacttaacatgccagtgcctcaacgggggagcctgcaacaccctggacgggacctgcacgtgtgcacctggatggcgcggggagaaatgcgaacttccctgccaggatggcacgtacgggctgaactgtgctgagcgctgcgactgcagccacgcagatggctgccaccctaccacgggccattgccgctgcctccccggatggtcaggtgtccactgtgacagcgtgtgtgctgagggacgctggggccccaactgctccctgccctgctactgtaaaaatggggcttcatgctcccctgatgatggcatctgcgagtgtgcaccaggcttccgaggcaccacttgtcagaggatctgctcccctggtttttatgggcatcgctgcagccagacatgcccacagtgcgttcacagcagcgggccctgccaccacatcaccggcctgtgtgactgcttgcctggcttcacaggcgccctctgcaatgaagtgtgtcccagtggcagatttgggaaaaactgtgcaggaatttgtacctgcaccaacaacggaacctgtaaccccattgacagatcttgtcagtgttaccccggttggattggcagtgactgctctcaaccatgtccacctgcccactggggcccaaactgcatccacacgtgcaactgccataatggagctttctgcagcgcctacgatggggaatgtaaatgcactcctggctggacagggctctactgcactcagagatgtcctctagggttttatggaaaagattgtgcactgatatgccaatgtcaaaacggagctgactgcgaccacatttctgggcagtgtacttgccgcactggattcatgggacggcactgtgagcagaagtgcccttcaggaacatatggctatggctgtcgccagatatgtgattgtctgaacaactccacctgcgaccacatcactgggacctgttactgcagccccggatggaagggagcgagatgtgatcaagctggtgttatcatagttggaaatctgaacagcttaagccgaaccagtactgctctccctgctgattcctaccagatcggggccattgcaggcatcatcattcttgtcctagttgttctcttcctactggcattgttcattatttatagacacaagcagaagggaaaggaatcaagcatgccagcagttacctacacccctgctatgagggtcgtcaatgcagattataccatttcaggaacccttcctcacagcaatggtggaaacgctaatagccactacttcaccaatcccagttaccacacgctcacccagtgtgccacatcccctcacgtcaacaacagggacaggatgactgtcacgaagtcaaaaaacaatcaactgtttgtgaatcttaaaaatgtgaaccctgggaagagaggccctgtgggggactgcactgggacattgccggctgactggaaacatggcggctacctcaacgagctcggtgcttttggacttgacagaagctatatgggaaaatccttaaaagacctgggaaagaattctgaatataattcaagtaactgctccctaagcagttctgagaacccatatgccactattaaagacccacctgtacttatcccgaaaagctcagagtgtggttatgtggagatgaaatcgccggcacgaagagattccccatatgcagagatcaataactcaacttcagccaacaggaatgtctatgaagttgaacctacagtgagtgttgtccaaggagtattcagcaataatgggcgtctctcccaggatccatatgacctcccaaagaacagtcacatcccttgtcattatgacctgctgccagtccgagacagttcatcctcccctaagcaagaggacagtggaggtagcagcagcaacagcagcagcagcagtgaatgacaccaaaggaccgcttggtagccactggaaccctttccagaactgctgtttggttcttctccatcctcaattttgccactttcatgtgaatgttagtcaattcggtgggcaatttttggacatgaaccagaaagctgaaagctgaggctgacacggactgtaggtgctttttgttcaggtggattcgaaggagttagagatgtgatttgccattgctgttagttttagaactatacccgtgaagcatgacttattgtaagatgttggctgaaagcatgaacttgcagaactccctcggagacgcaggttgcagtggacattgggattgttgcttgaaaaattaaaatttgaatattttctctctcatttgcatcatacagctctacctaggattgtacagtttaccataaaatttacttcatgaaagtgggaatcactgaacatgtagaagacaaggaacatattgttaactcctgattcttaactttattcaactggactcagaattgtagggataatatgaatgcaggaggaaacattctgtcaggcggtatgactggacagactttgaatatactctaaaagtggacagaaaatttacgaaaatcttagattttgtttagaatgagaaaatatacaattagaattattttagaaatagtaggaagtattgcagaagtcaatacacaaatgtgccaggcagaggtggttttctctgtttgactctcaaccaacttcagatctatgacattattctgatcactggctccatcatacatattcaccacttgagattcataacatatcaatagttatttcataaatatagaaatgaaataattttatttttgacagactggatggaatgagtgtgtaatgattgataaaggttgtaaattttaaatgcaagatgacgcttacgttctgtaaaccattagtaatacatgctgtaatatagaattagtggaacattttgattaatctttccctagaagtgactgaaatatttttgtgcatatttgagaaagggaactttccttttattaattgtcaatttagagaaactatgcttaagctggtcttttgcattgctaatgtgacatgtacccaacttttcattaatttgtatttccatttttaaattgcatattctatgttttgtagtgtttggattgttaatgaaaaaatattatatgttcgttattccttgtattattgccacttatcttttgcttgataaaaatgcgttgttcttttttcttttggagggacaagatgaaaatatataatttgaattgattaaaattggtcgttactaaaatagtatagtaaccacaagtgattggcttataaatgaagtagaaatgctttttaatattccaaaatagagttccttttgatctgttggtgctgagccttggttaaaccagggagaaggggagcagaaaggaaacgttgttactgatgagtaccacagactcatcttaaaaaaaactctcattatggtgatcatagaattgaccatccaaactgggacactcttgagagtaaatggagggcattattaataattatcttgtaatgaacttaaatctggactgttccaggcaaaccagacttatcttgcaatatgagaatgctgacacaatgcaggaaagccagtttcccttttgttgatctacttgaccaagcaaaggggctgaaaaactgaataaggaaacaactttataagagaaacagtggtcttcaatcttttaaagacatgaaatcctatatggcattctgtctcagtgagtcagttaacaaatacgtatgtgcaacccttctgctagtagtgcacataagtgattatccctgccaggtatcgagttggaatatccagttatttcatgtcacacatcggcacgtatgatggtggtttggtcagatggataatacagcagacacacttagaacactcactgcactggtggctgttcattttgaggaactccaaagtcaattcaaggaaataaggaatgacctggaacaggccttagaaacaattgatttattccaatagttaaccactggctggctcccaactctaggtgataggcatctaattgagacatgtgtgagtcaatagccatcggggtcctttttggtgagaagaaataagacattttctcccttttaaagatcatctcttcagagctgcatggtaaatttgaatttccccattgttctctagagataggtcaaaaaaacaactgtttcttttcttattccactattaataaattgaaagcttgctgtacaaaggcaacagcaacttaaaaaagaaaatctggacaatagatgtggactccaaggggccactgccatcccttcctgtgtgctctttttgacaagtaaatcactccagttagctgatgtcctgaaatgacatttgtacctgaggcaattcttattagagcttactcaggacttttcaaacatcaggacacacatagcaatttggatgttgtaaaactacgtgttacatttggagaggtcttgttgagaaggcaaaattttctaaatattttgatatcaatttgggtaaagaaaggaatacttttgttagaatgagaattaaagagaaaacaaaagaatcttggcaaaattttccctctgaaattacaaactttaggaacttttccagatgtatcgaatttaatttgacattgatgtcactcttcataccaagtgaatctattctcatgaactttgaacccatgttaattttggaccctataactaatttcctttctgtatcccatggtggtcaaagcagtaaaggagtttagagatacttagcaaatgccattcatatagtattgttagccaaactattattccttccttagaagttgatgtatcagaaaatttataagttatttgtatttatatataagtacatcagaacttgcccacatgataactcatgtttgctttaataaggaaaatatgttatttgaggttaattatatgatagtgaggaacattttacaattatttacagtgtttgacattaattgctgtcctatgatacagtagtaatgttaacagagagtttaatatgtttagcattatctttatggaatttatattcaccaatttcaggaaaaccaaccatagaactttataataggacagttataacctgactgaaccaaatccatcagcataatgactgtgtgttctgagaaatgcaaacaactttatgaaagtgtggtcatcttgacccccaaagagccacagtagctgtcaattattgagatttttaaatggtaaatattgcaaaagttaaacaagggtaccacaatatcatttataattgatgtcaatattagtagtccactttatgcttaaaataaaatcataaaaaatcaagttttaaggttatattttttaaaataatgaattttctatctctaggcaacatgtctttattattcaagctgaatgtttaagagagattttggtcttaaaggcttcatcatgaaagtgtacatgcatatgcaagtgtgaattacgtggtatggatggttgcttgtttattaactaaagatgtacagcaaactgcccgtttagagtcctgttaatattgatgtcctaacactgggtctgcttatgctagttcagtatttggtctaggcttcattttgatatgactgaattgcaatctatatttttaaaaagaaaaatcaaaatacattagggtttacttggttgtggcaaacaaacaaaaaatgctttcagtgttgaaatatctctattttccaaagatgataaactttcatcgttcttagcctacattgtcatttatatcaccaaatgagtttatagattaatgcaataaactttctaat

SEQ ID NO: 14064 - DNA, 8266 bp, Homo sapiens
gccatttttcctttctgaaggcaggtctcacctatctcctggttcgatctaggaaaaaggaaaggaagggatttaaaagtaaacagtgaaatgagaaagaattcactgggagtttatcaaactaagttaaaatagctaagtcagcctgacaggtgcttggcacagagaaggagcaaatatttcctcatgatgctacaacatttagtaattttttgtcttggattggttgtacaaaatttctgctccccagctgaaaccacagggcaggcaagaagatgtgataggaagtctcttcttacaattaggaccgagtgccgatcctgcgctctcaaccttggagtcaagtgcccggatggttacaccatgattaccagtggctctgtaggggttcgagattgcaggtacacctttgaggtcagaacatactctctgtctctccccggatgccgccatatttgtaggaaggactatctccaacctcggtgttgtcctggccgctggggcccagactgtatagagtgcccaggtggagcggggtcaccctgcaatggcagaggcagttgtgctgaaggcatggaaggaaatggaacctgctcctgccaagaagggtttggtggaacagcctgtgaaacctgtgctgacgacaacttatttggacccagctgttcatcagtgtgcaactgtgtgcatggggtgtgcaacagtggactagatggcgatggaacctgtgagtgctactctgcgtacactggccccaagtgtgacaagcccatccctgaatgtgcagccttgctctgcccagaaaattccagatgttcgccttccactgaagatgaaaacaaactggaatgcaaatgccttcccaattaccgaggcgatggcaaatactgcgaccccatcaatccatgtttacgaaaaatctgccaccctcatgctcattgtacgtacctgggaccaaatcggcacagttgtacatgccaagaaggctaccgtggggatggccaagtgtgcttgcctgtggacccctgccaaattaactttggaaactgccctacaaagtctacagtgtgcaaatatgatgggcctggacagtctcactgcgagtgtaaggagcattaccagaatttcgtacctggagtggggtgcagtatgactgatatatgtaaatcagataacccgtgtcataggaatgcaaattgcaccaccgtcgcaccaggccgaactgaatgcatttgccagaaaggttacgtgggtgatggcttaacgtgttatggaaacattatggagcgactcagagaattaaatactgaacccagaggaaaatggcaaggaaggctgacctctttcatctcactcctagacaaagcttatgcctggccactgagtaagctgggacccttcacggtgctgttacctacagacaagggactgaaaggattcaatgtaaatgagcttttggtggataataaagctgctcaatactttgtgaaactccacataattgctggtcagatgaacatcgaatatatgaataacacagacatgttctacaccttgactggaaagtcgggggaaatcttcaacagcgataaggacaatcaaataaagcttaaactccatggaggcaaaaagaaggtaaaaattatacaaggggacatcattgcttccaatgggcttctgcacatccttgacagagccatggacaagttagaacccacatttgagagcaacaatgagcaaaccataatgacaatgctacaaccaaggtacagcaagttcagatctttgttagaggaaaccaatttgggacatgccttagatgaggatggagttggtggaccatacaccatttttgttccaaataatgaagcattgaataacatgaaggacggcactctcgattacctcctttctccagagggatctcggaagcttctggaactcgtcagataccacattgtcccatttacccagcttgaagtggccactctcatctccacccctcacatcaggagcatggccaaccagctcatacagttcaacaccaccgacaatggacagattctggcaaatgatgtggcaatggaagaaattgagatcactgccaaaaatggccgaatttacacactgacaggagttctcattcctccctccattgtcccgattctgccccatcgatgtgatgaaacaaagagagagatgaaactgggcacttgtgtgagctgttctctggtgtactggagcagatgtcctgctaactctgagcccacagcactcttcacacacagatgtgtctacagtggcaggtttgggagcctgaagagcggctgtgcccggtactgcaatgccactgtgaagattccaaagtgctgcaaaggcttctatggacctgactgcaaccagtgtccaggaggcttctcaaatccatgctcaggaaatggacagtgtgcagatagcctcggcggcaacgggacatgcatttgtgaggagggcttccaaggctcccagtgtcagttctgctctgatcccaataaatacggacctcggtgtaacaaaaaatgcctgtgcgttcacggaacatgcaataacaggatagacagcgatggggcctgcctcactggcacatgcagagacggctctgccgggagactctgtgataagcagacctcagcctgtgggccctacgtgcagttctgtcacatccacgccacctgtgaatacagcaatgggacagccagttgtatttgcaaagcaggatatgaaggagatggaactctgtgttctgagatggacccttgcacaggactaactccaggaggctgtagccgcaatgcagaatgcatcaaaactggcacgggcacccacacctgcgtgtgtcagcagggttggacagggaatgggagagactgctcggagatcaacaactgcctgctgcccagtgcaggcggctgccacgacaacgcatcctgtttgtatgtgggtcccgggcagaatgagtgtgagtgcaagaaaggatttcgaggaaatgggattgactgtgaaccaataacttcatgcttggaacaaaccgggaaatgtcatccattggcaagctgtcaatctacttcgtctggtgtctggagctgtgtttgtcaagagggctatgaaggagatggctttctgtgctatggaaacgcagcagtggaattgtcatttctctccgaagcagctatatttaaccgatggataaataatgcttctctacaacccacactgtcagccacctcaaacctcactgtcctcgtgccttcccaacaagctactgaggacatggaccaggatgagaaaagcttctggttgtcacagagcaatattccagccctaataaagtaccatatgctactaggcacatacagagtggcagatctgcagaccctgtcttcttctgacatgttggcaacatctttgcagggcaacttccttcacttggcaaaggtggatgggaatatcacaattgaaggggcctccattgtcgatggggacaacgcagccacaaatggagtgatacacatcatcaacaaggtgctggtcccacaaagacgtctaactggctccttaccaaacctgctcatgcggctggaacagatgcctgactattccatcttccggggctacatcattcaatataatctggcgaatgcaattgaggctgccgatgcctacacagtgtttgctccaaacaacaatgccatcgagaattacatcagggagaagaaagtcttgtctctagaggaggacgtcctccggtatcatgtggtcctggaggagaaactcctgaagaatgacctgcacaatggcatgcatcgtgagaccatgctgggtttctcctatttccttagcttctttctccataatgaccagctctatgtaaatgaggctccaataaactacaccaatgtagccactgataagggagtgatccatggcttgggaaaagttctggaaattcagaagaacagatgtgataataatgacactactattatacgaggaagatgtaggacatgctcctcagagctgacctgcccattcggaactaaatctctaggtaatgagaagaggagatgcatctatacctcctatttcatgggaagacgaaccctgtttattgggtgccagccaaaatgtgtgagaaccgtcattacgagagaatgctgtgccggcttctttggcccccaatgccagccctgcccagggaatgcccagaatgtctgctttggtaatggcatctgtttggatggagtgaatggcacaggtgtgtgtgagtgtggggagggcttcagcggcacagcctgcgagacctgcaccgagggcaagtacggcatccactgtgaccaagcatgttcttgtgtccatgggagatgcaaccaaggacccttgggagatggctcctgtgactgtgatgttggctggcgaggagtgcattgtgacaatgcaaccacagaagacaactgcaatgggacatgccataccagcgccaactgcctcaccaactcagatggtacagcttcatgcaagtgtgcagcaggattccaaggaaacgggaccatctgcacagcaatcaatgcctgtgagatcagcaatggaggttgctctgccaaggctgactgtaagagaaccaccccaggaaggcgagtgtgcacgtgcaaagcaggctacacgggtgatggcattgtgtgcctggaaatcaacccgtgtttggagaaccatggtggctgtgacaagaatgcggagtgcacacagacaggacccaaccaggctgcctgtaactgtttgccagcatacactggagatggaaaggtctgcacactcatcaatgtctgcttaactaaaaatggcggctgtagtgaatttgccatctgcaaccacactgggcaagtagaaaggacttgtacttgcaagccaaactacattggagatggatttacctgccgcggcagcatttatcaggagcttcccaagaacccgaaaacttcccagtatttcttccagttgcaggagcatttcgtgaaagatctggtcggcccaggccccttcactgtttttgcacctttatctgcagcctttgatgaggaagctcgggttaaagactgggacaaatacggtttaatgccccaggttcttcggtaccatgtggtcgcctgccaccagctgcttctggaaaacctgaaattgatctcaaatgctacttccctccaaggagagccaatagtcatctccgtctctcagagcacggtgtatataaacaataaggctaagatcatatccagtgatatcatcagtactaatgggattgttcatatcatagacaaattgctatctcccaaaaatttgcttatcactcccaaagacaactctggaagaattctgcaaaatcttacgactttggcaacaaacaatggctacatcaaatttagcaacttaatacaggactcaggtttgctgagtgtcatcaccgatcccatccacaccccagtcactctcttctggcccaccgaccaagccctccatgccctacctgctgaacaacaggacttcctgttcaaccaagacaacaaggacaagctgaaggagtatttgaagtttcatgtgatacgagatgccaaggttttagctgtggatcttcccacatccactgcctggaagaccctgcaaggttcagagctgagtgtgaaatgtggagctggcagggacatcggtgacctctttctgaatggccaaacctgcagaattgtgcagcgggagctcttgtttgacctgggtgtggcctacggcattgactgtctgctgattgatcccaccctggggggccgctgtgacacctttactactttcgatgcctcgggggagtgtgggagctgtgtcaatactcccagctgcccaaggtggagtaaaccaaagggtgtgaagcagaagtgtctctacaacctgcccttcaagaggaacctggaaggctgccgggagcggtgcagcctggtgatacagatccccaggtgctgcaagggctacttcgggcgagactgtcaggcctgccctggaggaccagatgccccgtgtaataaccggggtgtctgccttgatcagtactcggccaccggagagtgtaaatgcaacaccggcttcaatgggacggcgtgtgagatgtgctggccggggagattcgggcctgattgtctgccctgtggctgctcagaccacggacagtgcgatgatggcatcacgggctccgggcagtgcctctgtgaaacggggtggacaggcccctcgtgtgacactcaggcagttttgcctgcagtgtgtacgcctccttgttctgctcatgccacctgtaaggagaacaacacgtgtgagtgtaacctggattatgaaggtgacggaatcacatgcacagttgtggatttctgcaaacaggacaacgggggctgtgcaaaggtggccagatgctcccagaagggcacgaaggtctcctgcagctgccagaagggatacaaaggggacgggcacagctgcacagagatagacccctgtgcagacggccttaacggagggtgtcacgagcacgccacctgtaagatgacaggcccgggcaagcacaagtgtgagtgtaaaagtcactatgtcggagatgggctgaactgtgagccggagcagctgcccattgaccgctgcttacaggacaatgggcagtgccatgcagacgccaaatgtgtcgacctccacttccaggataccactgttggggtgttccatctacgctccccactgggccagtataagctgacctttgacaaagccagagaggcctgtgccaacgaagctgcgaccatggcaacctacaaccagctctcctatgcccagaaggccaagtaccacctgtgctcagcaggctggctggagaccgggcgggttgcctaccccacagccttcgcctcccagaactgtggctctggtgtggttgggatagtggactatggacctagacccaacaagagtgaaatgtgggatgtcttctgctatcggatgaaagatgtgaactgcacctgcaaggtgggctatgtgggagatggcttctcatgcagtgggaacctgctgcaggtcctgatgtccttcccctcactcacaaacttcctgacggaagtgctggcctattccaacagctcagctcgaggccgtgcatttctagaacacctgactgacctgtccatccgcggcaccctctttgtgccacagaacagtgggctgggggagaatgagaccttgtctgggcgggacatcgagcaccacctcgccaatgtcagcatgtttttctacaatgaccttgtcaatggcaccaccctgcaaacgaggctgggaagcaagctgctcatcactgccagccaggacccactccaaccgacggagaccaggtttgttgatggaagagccattctgcagtgggacatctttgcctccaatgggatcattcatgtcatttccaggcctttaaaagcaccccctgcccccgtgaccttgacccacactggcttgggagcagggatcttctttgccatcatcctggtgactggggctgttgccttggctgcttactcctactttcggataaaccggagaacaatcggcttccagcattttgagtcggaagaggacattaatgttgcagctcttggcaagcagcagcctgagaatatctcgaaccccttgtatgagagcacaacctcagctcccccagaaccttcctacgaccccttcacggactctgaagaacggcagcttgagggcaatgaccccttgaggacactgtgagggcctggacgggagatgccagccatcactcactgccacctgggccatcaactgtgaattctcagcaccagttgccttttaggaacgtaaagtcctttaagcactcagaagccatacctcatctctctggctgatctgggggttgtttctgtgggtgagagatgtgttgctgtgcccacccagtacagcttcctcctctgaccctttggctcttcttcctttgtactcttcagctggcacctgctccattctgccctacatgatgggtaactgtgatctttcttccctgttagattgtaagcctccgtctttgtatcccagcccctagcccagtgcctgacacaggaactgtgcacaataaaggtttatggaacagaaacaaagtcaaaaaaaaaaaaaaaaaaaaaaaaaaaaaaaaaaaaaa

SEQ ID NO: 14065 - DNA, 6157 bp, Homo sapiens
gagctgaggaactgcgtgtggagtcagcccagtctggatgcacaggaggatgctggcggcacagtgagtgaggcctggtgccagagctgtgcggaccccttgttggccatggagcagcaggcccagaggccctctccccagccctgcttgcctgcctcggagaggacagaggcctaggcccacgggggagggtgttggcagacagatgccctccaggccctggggcctccttaacggccccttaacgacacgcgtgccaagggtggaggatgccagccaaggggcgctacttcctcaacgagggcgaggagggccctgaccaagatgcgctctacgagaagtaccagctcaccagccagcatgggccgctgctgctcacgctcctgctggtggccgccactgcctgcgtggccctcatcatcattgccttcagccagggggacccctccagacaccaggccattctgggcatggcgttcctggtgctggcggtgtttgcggccctctctgtgctgatgtacgtcgagtgtctcctgcggcgctggctcagggccttggcgctgctcacctgggcctgcttggtggcgctgggctatgtgctggtgttcgacgcatggacaaaggcggcctgtgcgtgggagcaggtgcccttcttcctgttcattgtcttcgtggtgtacacactactgcccttcagcatgcggggcgctgtcgccgttggggccgtctccactgcctcccacctcctggtgctcggttctttgatgggaggcttcacgacacccagtgtccgggtggggctgcagctgctggccaacgcagtcatcttcctgtgtgggaacctgacaggcgccttccacaagcaccaaatgcaggatgcgtcccgggacctcttcacctacactgtgaagtgcatccagatccgccggaagctgcgcatcgagaagcgccagcaggagaacctgctgctgtcagtgcttccggcccacatctccatgggcatgaagctggccatcatcgaacggctcaaggagcatggtgaccgtcgctgcatgcctgacaacaacttccacagcctctacgtcaagaggcaccagaatgtcagcatcctctatgcggacatcgtgggcttcacgcagctggccagcgactgttctcccaaggagctggtggtggtgctgaatgagctctttggcaagttcgaccagatcgccaaggccaacgagtgcatgcgaatcaagatcctcggcgactgctactactgtgtatcgggcctgcccgtgtcgctgcctacccacgcccggaactgcgtgaagatggggctggacatgtgccaggccatcaagcaggtgcgggaggccacgggcgtggacatcaacatgcgtgtgggcatacactcggggaatgtgctgtgcggggtcatcgggctgcgcaagtggcagtatgacgtgtggtcccacgacgtgtccctggccaaccggatggaggcagccggagtacccggccgggtgcacatcacggaggccacgctaaagcacctggacaaggcgtacgaggtggaggatgggcacgggcagcagcgggacccctacctcaaggagatgaacatccgcacctacctggtcatcgacccccggagccagcagccacccccgcccagccaacacctccccaggcccaagggggacgcggccctgaagatgcgggcgtcagtgcgcatgacccggtacctcgagtcctggggggcggcacggccctttgcacatctcaaccaccgtgagagcgtgagcagtggtgagacccacgtccccaacgggcggaggcctaagagcgttccccagcgccaccgccggaccccagacagaagcatgtcccccaaggggcggtcggaggatgactcgtacgatgacgagatgctgtcagccattgaggggctcagctccacgaggccctgctgctccaagtccgatgacttctacacctttgggtccatcttcctggagaagggctttgagcgcgagtaccgcctggcacccatcccccgggcccgccacgactttgcctgcgccagcctgatcttcgtctgcatcctgctcgtccatgtcctgctcatgcccaggacggcggcactgggtgtgtccttcgggctggtggcctgtgtactggggctggtgctgggcctgtgctttgccaccaagttctcgaggtgctgcccagctcgggggacgctctgcactatctctgagagggtggagacacagcccctgctgaggctgaccctggccgtcctgaccatcggcagcctgctcactgtggccatcatcaacctgcccctgatgcctttccaagttccagagctgcctgttggcaatgagacaggcctactggccgcgagcagcaagacaagagccctgtgtgagcccctcccgtactacacctgcagctgtgtcctgggcttcatcgcctgctcggtcttcctgaggatgagcctggagccaaaggttgtgctgctgacagtggccctggtggcctacctggtgctcttcaacctctccccatgctggcagtgggactgctgcggccaaggcctgggcaacctcaccaagcccaacggcaccaccagtggcacccctagctgttcctggaaggacctgaagaccatgaccaatttctacctggtcctgttctacatcaccctgcttacactctccagacagattgactattactgccgcttggactgcctatggaagaagaagttcaagaaggagcacgaggagtttgagaccatggagaacgtgaaccgccttcttctggagaacgtcctgccagcccacgtggctgcccactttatcggtgacaagttaaacgaggactggtaccatcagtcctatgactgcgtctgtgtcatgtttgcctccgtgccggacttcaaagtgttctacacagagtgcgatgtcaacaaagaagggctggagtgcctacgcctgctcaatgagatcattgccgacttcgacgagctcctactgaagcccaagttcagcggcgtggagaagatcaagaccatcggcagcacgtacatggcagctgcagggctcagcgtcgcctcagggcacgagaaccaggagctggagcggcagcatgcccacattggtgtcatggtggagttcagcatcgccctgatgagtaagctggacggcatcaacaggcactccttcaactccttccgcctccgcgtcggcataaaccatgggcctgtgattgctggagtgattggggcccgaaaacctcagtatgacatctggggaaacactgtcaatgtggccagccgaatggaaagcactggagaacttgggaaaatccaggttaccgaggagacctgcaccatcctccagggcctcgggtactcttgtgaatgccgtggcctgatcaacgtcaaaggcaaaggcgagctgaggacttactttgtctgtacggacactgccaagtttcaggggctggggctgaactgagggctcctgctggattccgaaaaggccgggaagccagtctccttccctgaagcaagcccaggagaagactctccgccccacgccaatcccaaaggcatgcagatggctgtgcatgttggcttctttggacctgcactggaggatttctcagacacatgcaccagattctggctcgaagcagccactgagccataatgcgcaggggaggccagaagctctgtgcctggtctgtaacagtttccaggccagctggagaatgttcactggttcggggctgactttgagatctttgttccctgaggtgccaggcaggcaactttagcacatgatgaaaacagacttccacctcagtggcctgtgggcacgcacaagtgaggtctgtttttctagacaccaagggggagtaagctgagctgtctagcacggattggagactccctctccctggtgggcctggcaatgacagcatttctcacagaggcattctggtaaatgaagctgaaaggggtgttttacatctgtaaacggtttcaaacaggtagagagaaaaacaccacaattaacactgttactttttgccttgtctggcatgtttgttttaaatgaatacattaatggggtttttatccttttgaatgacttttcagacactagacataaatctcttccctccagtgtatgctctgcctttttaaccactgacatgtaaggaggactactgtctagcatcagcttatggggtcagctggctgtggggatagagtcctgaggaatgtggtcacagcaagaaggcggggagcagcagagccttgcctttgaatgaggcagcttgtgaggcaagcattctggagagaggtgctttgaaagtaaggtgcggcctttcacctcttccttgattactcacacatctttgcgttctcccctgccgtccttcaactgtatcttacttttcttaccagaaaggaatggagtctgtttagagacaacttggacaacctgtgagtgcatctcttctttcctttagtcttcacagctaactctggagagcttcaaaactagaaggatctactccgcatgggtgcatgcagaggctcctggatctgggaagcccgccccctcacaaatgctgagccgttcttgctctgaaactgcgtgagtcaaggcaaatgcaaaaagccaggttttggggatgtgtcttactgtgcttcaacttcccaaggaattgaaagtcaacctaactgtaacaacagggtgagaaatgaccaaactgcccgtgactttttctgaatggacttcataaccggaagacttaaccggtggcctcatcaccagagcatcgccaggatttctaatgcactcagtttccctacatagcagggattcttagctaggtgtccccatgaaccccgtaaagttctacacaaagtcttgcatacaggagcctttacaagatgattatacagggttgcagattgggtgactgaccagacttgttggggtcctgggatgagttgccccgggctgcaaattaagagtacagctaagtgcgggggtggcggtggagggaacgaaaattgaacctgtctgcctgtgctgtgtcgtgtggctttatcagcccgaggaagggcaggtgtattctaatttgcacaaaggtgctgggtagactagtggcagctctcatgtgctgcacataagtggaatcagtatgaatagaagaacttgctgtataaaggaatttcatggcaacaatgctggtaagggcaattagcctcgcttaagttgccttttttacacaccaaaactttttacatgaagggctggtttcacatgaatactatactgaaatctgtgctctcaagatctagcagtgaccagggctgcccggcgggggctctcctggcaagtcaggaaggtttctgttgctaatataacatagaaacacattagtgcactgggcctctctgaggtcagcatatttgtactcttggaatatttgtttttttcttcagtaacaacagaaaccccagttgggagtttaacaaataactgactaccactcactcatgcatttttatttccaattaaagcaaagcactgtgctgtgctcagataataatagtttgtaagtaaaagtttttagttttcagtgttcaggttatagaatataactgaccataaaaattacctgcaggtattttctttttatgaacttgtttttaaattaccaagtaattactggtgtcattttgttttatgacagacacacgtatctaacaaacaaacaaacagtgaccttctccatgggtcaaggacttccttacaatttctcctgagttaacttttgtgaaaataatacctaaggttttctggcttattgaggaaatttcctaacaaacaaacaaacaaacaaacagaagagaagatcattaaccactgtatactttgtgtatataataggtcagtgtaaagaaatatgatttgaggtggtgcatgcaagtaactagggtttattctatataatgaatatttatagatctgtaacatttgtttcaaaatgctgtttcatttttataaagtaccagtgtttagctgctttttatacattaaattagcaatttgaaaaactcaaaaaaaaaaaaaaaaaa

SEQ ID NO: 14066 - DNA, 3003 bp, Homo sapiens
agcggagagcgtcccccggcgaggacgagcgagcacggcgcccgcacctccccgcaccgcccgcgctgcgcgcccggaggagcgaccgccgcagttctcgagctccagctgcattccctccgcgtccgccccacgcttctcccgctccgggccccgcaatggcccaggcagtgtggtcgcgcctcggccgcatcctctggcttgcctgcctcctgccctgggccccggcaggggtggccgcaggcctgtatgaactcaatctcaccaccgatagccctgccaccacgggagcggtggtgaccatctcggccagcctggtggccaaggacaacggcagcctggccctgcccgctgacgcccacctctaccgcttccactggatccacaccccgctggtgcttactggcaagatggagaagggtctcagctccaccatccgtgtggtcggccacgtgcccggggaattcccggtctctgtctgggtcactgccgctgactgctggatgtgccagcctgtggccaggggctttgtggtcctccccatcacagagttcctcgtgggggaccttgttgtcacccagaacacttccctaccctggcccagctcctatctcactaagaccgtcctgaaagtctccttcctcctccacgacccgagcaacttcctcaagaccgccttgtttctctacagctgggacttcggggacgggacccagatggtgactgaagactccgtggtctattataactattccatcatcgggaccttcaccgtgaagctcaaagtggtggcggagtgggaagaggtggagccggatgccacgagggctgtgaagcagaagaccggggacttctccgcctcgctgaagctgcaggaaacccttagaggcatccaagtgttggggcccaccctaattcagaccttccaaaagatgaccgtgaccttgaacttcctggggagccctcctctgactgtgtgctggcgtctcaagcctgagtgcctcccgctggaggaaggggagtgccaccctgtgtccgtggccagcacagcgtacaacctgacccacaccttcagggaccctggggactactgcttcagcatccgggccgagaatatcatcagcaagacacatcagtaccacaagatccaggtgtggccctccagaatccagccggctgtctttgctttcccatgtgctacacttatcactgtgatgttggccttcatcatgtacatgaccctgcggaatgccactcagcaaaaggacatggtggagaacccggagccaccctctggggtcaggtgctgctgccagatgtgctgtgggcctttcttgctggagactccatctgagtacctggaaattgttcgtgagaaccacgggctgctcccgcccctctataagtctgtcaaaacttacaccgtgtgagcactccccctccccaccccatctcagtgttaactgactgctgacttggagtttccagcagggtggtgtgcaccactgaccaggaggggttcatttgcgtggggctgttggcctggatcatccatccatctgtacagttcagccactgccacaagcccctccctctctgtcacccctgaccccagccattcacccatctgtacagtccagccactgacataagccccactcggttaccacccccttgaccccctacctttgaagaggcttcgtgcaggactttgatgcttggggtgttccgtgttgactcccaggtgggcctggctgcccactgcccattcctctcatattggcacatctgctgtccattgggggttctcagtttcctcccccagacagccctacctgtgccagagagctagaaagaaggtcataaagggttaaaaatccataactaaaggttgtacacatagatgggcacactcacagagagaagtgtgcatgtacacacaccacacacacacacacacacacacacacagaaatataaacacatgtgtcacatgggcatttcagatgatcagctctgtatctggttaagtcggttgctgggatgcaccctgcactagagctgaaaggaaatttgacctccaagcagccctgacaggttctgggcccgggccctccctttgtgctttgtctctgcagttcttgcgccctttataaggccatcctagtccctgctggctggcagggggctggatggggggcaggactaatactgagtgattgcagagtgctttataaatatcaccttattttatcgaaacccatctgtgaaactttcactgaggaaaaggccttgcagcggtagaagaggttgagtcaaggccgggcgcggtggctcacgcctgtaatcccagcactttgggaggccgaggcgggtggatcacgagatcaggagatcgagaccaccctggctaacacggtgaaaccccgtctctactaaaaaaatacaaaaagttagccgggcgtggtggtgggtgcctgtagtcccagctactcgggaggctgaggcaggagaatggtgcgaacccgggaggcggagcttgcagtgagcccagatggcgccactgcactccagcctgagtgacagagcgagactctgtctccaaaaaaaaaaaaagaagaggttgagtcagcagggacttgggttccctgtgtgtgaggggggcattcttgcctgccagctgctcccgaggtggccttgagaaggaagaagcaggatgacagagcctgagcagcggaaccagcctgcaccctcccttctggcccagcgacctgggctgtggctgagacaataatgaggccagaagtagccggagcctgtcaggaagggcaggggaggactgtggggtctgggctctgtcgctgtaaccatctgctcccaggctgtgtgcagaaaatggcatttacactattgtgcagctcattctcatgaaatactgccattgttgctaaataaagcttgtgtgctctgaatatagccaagcatagaaaaaaaaaaaaaaaa

SEQ ID NO: 14067 - DNA, 5486 bp, Homo sapiens
gattgccccctgtgggtcactttctcagtcattttgagctcagcctaatcaaagactgaggttatgaagtcgatcctagatggccttgcagataccaccttccgcaccatcaccactgacctcctgtacgtgggctcaaatgacattcagtacgaagacatcaaaggtgacatggcatccaaattagggtacttcccacagaaattccctttaacttcctttaggggaagtcccttccaagagaagatgactgcgggagacaacccccagctagtcccagcagaccaggtgaacattacagaattttacaacaagtctctctcgtccttcaaggagaatgaggagaacatccagtgtggggagaacttcatggacatagagtgtttcatggtcctgaaccccagccagcagctggccattgcagtcctgtccctcacgctgggcaccttcacggtcctggagaacctcctggtgctgtgcgtcatcctccactcccgcagcctccgctgcaggccttcctaccacttcatcggcagcctggcggtggcagacctcctggggagtgtcatttttgtctacagcttcattgacttccacgtgttccaccgcaaagatagccgcaacgtgtttctgttcaaactgggtggggtcacggcctccttcactgcctccgtgggcagcctgttcctcacagccatcgacaggtacatatccattcacaggcccctggcctataagaggattgtcaccaggcccaaggccgtggtggcgttttgcctgatgtggaccatagccattgtgatcgccgtgctgcctctcctgggctggaactgcgagaaactgcaatctgtttgctcagacattttcccacacattgatgaaacctacctgatgttctggatcggggtcaccagcgtactgcttctgttcatcgtgtatgcgtacatgtatattctctggaaggctcacagccacgccgtccgcatgattcagcgtggcacccagaagagcatcatcatccacacgtctgaggatgggaaggtacaggtgacccggccagaccaagcccgcatggacattaggttagccaagaccctggtcctgatcctggtggtgttgatcatctgctggggccctctgcttgcaatcatggtgtatgatgtctttgggaagatgaacaagctcattaagacggtgtttgcattctgcagtatgctctgcctgctgaactccaccgtgaaccccatcatctatgctctgaggagtaaggacctgcgacacgctttccggagcatgtttccctcttgtgaaggcactgcgcagcctctggataacagcatgggggactcggactgcctgcacaaacacgcaaacaatgcagccagtgttcacagggccgcagaaagctgcatcaagagcacggtcaagattgccaaggtaaccatgtctgtgtccacagacacgtctgccgaggctctgtgagcctgatgcctccctggcagcacaggaaaagaatttttttttttaagctcaaaatctagaagagtctattgtctccttggttatatttttttaactttaccatgctcaatgaaaaggtgattgtcaccatgatcacttatcagtttgctaatgtttccatagtttaggtactcaaactccattctccaggggtttacagtgaagaaagcctgttgtttaagtgactgaacgatccttcaaagtctcaatgaaataggagggaaacctttggctacacaattggaagtctaagaacccatggaaaaatgccatcaaatgaataatgcctttgtaaccacaactttcactataatgtgaaatgtaactgtccgtagtatcagagatgtccatttttacaagttatagtactagagatattttgtaaaatgtattatgtcctgtgagatgtgtatcagtgtttatgtgctattaatatttgtttagttcagcaaaactgaaaggtagacttttatgagaacaatggacaagcagtggatacgtgtcaatgtgtgcactttttttctatattattgcccatgatataactttagaaataaaccttaatatttcttcaaatatctctatttaattttgacactgaaataaccgtaaaggtttatttttctgttacctcaacaagaagaatttgaagacttcaaaatattgagcagaattcattcatacttaaaaatttattagccctgcattttcataggaagacacattatcttctggactatagctgttctaatggattataatcagaatggaagagagaaagcatattgactttttttgagcgacatctctgactttctttagtctttagctattactggatctcttaagacagcatgtgttaatcttaatgtatatcgttatcactgtgcagttgctgtttacttgaatagtattgtgttcctatattccaggtttaagtagatttcatgcctgggtggccaaacaacagtcttcattttttttaattgaaaagaagtagtgtctggatcagtaaaattatactgtgtgtgagtgtgaatataaatgtgtgtatgtgtgtttctgtcctgtaactgttacagtaatgtcataaagtgagaaaactgtgaccaagtataaacttttaccacttgctgcactcttgcacatggattcagtttctaaaattgagttcttcctgtaatcttgttgataaaaatactgactccaaccattcaaaaatttcaccccatccctccttaagagattggatcaagtattactaaattgacctttaggtattacacaagaccagtgcttagcaaaaaataatgacaggcatccaaggaagggatgtatttgtagtgttattgccaggaaaggagagtactttggtttctgagcaccgaatattgagcaatatgtcagtcactaaaaggaagacagttctacagaaaaacaatggtaacatttttcaatagcgtgtgtagatagtatgcactatatacatcacgttaaagtaggactatcacacccagcccatgtggctaaaaaagctgaatcagacagtggatgagacacacaacggcagtgaagaaccgatacacttggcattgacgtctagctatgctgtatctgtgctttgcccacatgcccttggtgacagctgagcacccagctctgtcttggtaggtttgggctaaggaacaaatctctcctttgctcgtggttagcaagatacactcaagcatgaagataaacacagctgctttcttcttacaccccggtctcatgctccttaatggcgccatgggtgcttgttgggcctttttccagtaaggaatgatattgctgaagaatctacttaaccctgacaaattttaattataatctcttcttatacagataaaacatgactcctacaaggccccaaggtttacatagtctgaagtgaagtacagagctggcatctatctggtgatttctagctctcgagatacccaagcagcctgatggggcagttccccttcttacggttcacgctctaaggcaggatgtggcttatgagatactttgcattgtctgtctgcacaccttgaatctgcctgctggctcccttactttacctctctgtcatgtgcagatgaaggctcagggtgctagaggattagtaagatctctttctaaagacaggagagattatttacaagaagaactcaccagggtttagtttgcatttaagaattgccagtcttttgtcctgcatcatcttgaacattaatccacatgtttcagagctcaccaggcagtaccaatgctcttttcacagctatgaagagctagagaaattcttgttatggtagaaaaatttcacgattcatttttgaaactgcatttgtgcgtatgcagtgtagattttatagtgtgttgtgctttcaagatctaaatcatatataataaattaagggacaatggggctgacagcactaaacttggtgcttattgatattctaagaaatatctgtgaaatatcatcacgtatgttatacaaccttcatttaaaaaggtttaaaactagttagattcactttgacacttttcatatcatttcttaacccaagtgacgaaaacattgtccccaatgaatatactcattagaattaccatttgttaatatcactcattaattaaccccataattagatccattaatttaaatgatttaaatttaagtaagttttataaggtctgacatcagaggtatcttactttcctctgaggatgatgtacttgccctgaccatgcattttaccatcacacatgttcagaaagggccaaattcccaacctgctcattttttttttatcagagtcatgatgaatcagtcctagaatgtttcatttgcacaagtagggctgcctccaagaggaacctctgatttattttgtatgaaatatatgtgaaaggatatgaatctgagagatgctgtagacatctgtcctacacttgagatgatttccaagcctctctggcactttgagttaagtctatctggtattaaatgccaaggaccttttgctgcctaaatccactctgcaggaaataggcccaaccaccagatgagaattaggccctggatgagtagcgctatagttactgtcctgttgattaatttctgccatttcatgtccataaaagagaccacccatatcatgcacacaattagatttctcacactctaactgtatatttgtatgatattttaaaatctcctaaatgctgggcaatggctattaacaattaattgtcttgcactggccttctgatgaaatgttaacaatgcctattgtaatatagaaaaaaacattctatctactgatttgggctgaatgtatgtaaataggtttctaaaaagtcagatgtttgagcagtggcctacaaatcagtaattttcggatgggagagtttctttacattgccgtggcatcttaaaagctatcttcatgtaaattgactgtactaggcctactggggatcagagttcccaagaaaggaaaccttttcttgtatctggattcaaatttatttccaatgtttcaagcgggaaacatgactctttattgtctgtaaatctaacattattacttttcctcttagaagaatattgtattgttagatgtttgttgagctggtaacatcgttgcaaccactgcaatatcttcgttagtaatctgtataatactttgtatacaagtactggtaagattgttattaaatgtagcttcagtcattaaattactatagcaaagtagtacttcttctgtaatatttacaatgtattaagcccacagtatattttatttcaatgtaattaaactgttaacttattcaaagagaaaacatctcatcatgtctattgtccaaagttacctggaatcaaataaaaattctagattaccatgaagaacataaaaaaaaaaaaaaaa

SEQ ID NO: 14068 - DNA, 5307 bp, Homo sapiens
gattgccccctgtgggtcactttctcagtcattttgagctcagcctaatcaaagactgaggttatgaagtcgatcctagatggccttgcagataccaccttccgcaccatcaccactgacctcctgtacgtgggctcaaatgacattcagtacgaagacatcaaaggagaatgaggagaacatccagtgtggggagaacttcatggacatagagtgtttcatggtcctgaaccccagccagcagctggccattgcagtcctgtccctcacgctgggcaccttcacggtcctggagaacctcctggtgctgtgcgtcatcctccactcccgcagcctccgctgcaggccttcctaccacttcatcggcagcctggcggtggcagacctcctggggagtgtcatttttgtctacagcttcattgacttccacgtgttccaccgcaaagatagccgcaacgtgtttctgttcaaactgggtggggtcacggcctccttcactgcctccgtgggcagcctgttcctcacagccatcgacaggtacatatccattcacaggcccctggcctataagaggattgtcaccaggcccaaggccgtggtggcgttttgcctgatgtggaccatagccattgtgatcgccgtgctgcctctcctgggctggaactgcgagaaactgcaatctgtttgctcagacattttcccacacattgatgaaacctacctgatgttctggatcggggtcaccagcgtactgcttctgttcatcgtgtatgcgtacatgtatattctctggaaggctcacagccacgccgtccgcatgattcagcgtggcacccagaagagcatcatcatccacacgtctgaggatgggaaggtacaggtgacccggccagaccaagcccgcatggacattaggttagccaagaccctggtcctgatcctggtggtgttgatcatctgctggggccctctgcttgcaatcatggtgtatgatgtctttgggaagatgaacaagctcattaagacggtgtttgcattctgcagtatgctctgcctgctgaactccaccgtgaaccccatcatctatgctctgaggagtaaggacctgcgacacgctttccggagcatgtttccctcttgtgaaggcactgcgcagcctctggataacagcatgggggactcggactgcctgcacaaacacgcaaacaatgcagccagtgttcacagggccgcagaaagctgcatcaagagcacggtcaagattgccaaggtaaccatgtctgtgtccacagacacgtctgccgaggctctgtgagcctgatgcctccctggcagcacaggaaaagaatttttttttttaagctcaaaatctagaagagtctattgtctccttggttatatttttttaactttaccatgctcaatgaaaaggtgattgtcaccatgatcacttatcagtttgctaatgtttccatagtttaggtactcaaactccattctccaggggtttacagtgaagaaagcctgttgtttaagtgactgaacgatccttcaaagtctcaatgaaataggagggaaacctttggctacacaattggaagtctaagaacccatggaaaaatgccatcaaatgaataatgcctttgtaaccacaactttcactataatgtgaaatgtaactgtccgtagtatcagagatgtccatttttacaagttatagtactagagatattttgtaaaatgtattatgtcctgtgagatgtgtatcagtgtttatgtgctattaatatttgtttagttcagcaaaactgaaaggtagacttttatgagaacaatggacaagcagtggatacgtgtcaatgtgtgcactttttttctatattattgcccatgatataactttagaaataaaccttaatatttcttcaaatatctctatttaattttgacactgaaataaccgtaaaggtttatttttctgttacctcaacaagaagaatttgaagacttcaaaatattgagcagaattcattcatacttaaaaatttattagccctgcattttcataggaagacacattatcttctggactatagctgttctaatggattataatcagaatggaagagagaaagcatattgactttttttgagcgacatctctgactttctttagtctttagctattactggatctcttaagacagcatgtgttaatcttaatgtatatcgttatcactgtgcagttgctgtttacttgaatagtattgtgttcctatattccaggtttaagtagatttcatgcctgggtggccaaacaacagtcttcattttttttaattgaaaagaagtagtgtctggatcagtaaaattatactgtgtgtgagtgtgaatataaatgtgtgtatgtgtgtttctgtcctgtaactgttacagtaatgtcataaagtgagaaaactgtgaccaagtataaacttttaccacttgctgcactcttgcacatggattcagtttctaaaattgagttcttcctgtaatcttgttgataaaaatactgactccaaccattcaaaaatttcaccccatccctccttaagagattggatcaagtattactaaattgacctttaggtattacacaagaccagtgcttagcaaaaaataatgacaggcatccaaggaagggatgtatttgtagtgttattgccaggaaaggagagtactttggtttctgagcaccgaatattgagcaatatgtcagtcactaaaaggaagacagttctacagaaaaacaatggtaacatttttcaatagcgtgtgtagatagtatgcactatatacatcacgttaaagtaggactatcacacccagcccatgtggctaaaaaagctgaatcagacagtggatgagacacacaacggcagtgaagaaccgatacacttggcattgacgtctagctatgctgtatctgtgctttgcccacatgcccttggtgacagctgagcacccagctctgtcttggtaggtttgggctaaggaacaaatctctcctttgctcgtggttagcaagatacactcaagcatgaagataaacacagctgctttcttcttacaccccggtctcatgctccttaatggcgccatgggtgcttgttgggcctttttccagtaaggaatgatattgctgaagaatctacttaaccctgacaaattttaattataatctcttcttatacagataaaacatgactcctacaaggccccaaggtttacatagtctgaagtgaagtacagagctggcatctatctggtgatttctagctctcgagatacccaagcagcctgatggggcagttccccttcttacggttcacgctctaaggcaggatgtggcttatgagatactttgcattgtctgtctgcacaccttgaatctgcctgctggctcccttactttacctctctgtcatgtgcagatgaaggctcagggtgctagaggattagtaagatctctttctaaagacaggagagattatttacaagaagaactcaccagggtttagtttgcatttaagaattgccagtcttttgtcctgcatcatcttgaacattaatccacatgtttcagagctcaccaggcagtaccaatgctcttttcacagctatgaagagctagagaaattcttgttatggtagaaaaatttcacgattcatttttgaaactgcatttgtgcgtatgcagtgtagattttatagtgtgttgtgctttcaagatctaaatcatatataataaattaagggacaatggggctgacagcactaaacttggtgcttattgatattctaagaaatatctgtgaaatatcatcacgtatgttatacaaccttcatttaaaaaggtttaaaactagttagattcactttgacacttttcatatcatttcttaacccaagtgacgaaaacattgtccccaatgaatatactcattagaattaccatttgttaatatcactcattaattaaccccataattagatccattaatttaaatgatttaaatttaagtaagttttataaggtctgacatcagaggtatcttactttcctctgaggatgatgtacttgccctgaccatgcattttaccatcacacatgttcagaaagggccaaattcccaacctgctcattttttttttatcagagtcatgatgaatcagtcctagaatgtttcatttgcacaagtagggctgcctccaagaggaacctctgatttattttgtatgaaatatatgtgaaaggatatgaatctgagagatgctgtagacatctgtcctacacttgagatgatttccaagcctctctggcactttgagttaagtctatctggtattaaatgccaaggaccttttgctgcctaaatccactctgcaggaaataggcccaaccaccagatgagaattaggccctggatgagtagcgctatagttactgtcctgttgattaatttctgccatttcatgtccataaaagagaccacccatatcatgcacacaattagatttctcacactctaactgtatatttgtatgatattttaaaatctcctaaatgctgggcaatggctattaacaattaattgtcttgcactggccttctgatgaaatgttaacaatgcctattgtaatatagaaaaaaacattctatctactgatttgggctgaatgtatgtaaataggtttctaaaaagtcagatgtttgagcagtggcctacaaatcagtaattttcggatgggagagtttctttacattgccgtggcatcttaaaagctatcttcatgtaaattgactgtactaggcctactggggatcagagttcccaagaaaggaaaccttttcttgtatctggattcaaatttatttccaatgtttcaagcgggaaacatgactctttattgtctgtaaatctaacattattacttttcctcttagaagaatattgtattgttagatgtttgttgagctggtaacatcgttgcaaccactgcaatatcttcgttagtaatctgtataatactttgtatacaagtactggtaagattgttattaaatgtagcttcagtcattaaattactatagcaaagtagtacttcttctgtaatatttacaatgtattaagcccacagtatattttatttcaatgtaattaaactgttaacttattcaaagagaaaacatctcatcatgtctattgtccaaagttacctggaatcaaataaaaattctagattaccatgaagaacataaaa

SEQ ID NO: 14069 - DNA, 9517 bp, Homo sapiens
gttgctgtcggagagagaaagccgcacccgagaggaggtgtgggtgttccgcttccatcctaacggaacgagctccctcttcgcggacatgggattacccagcggctgctaacccctctcctcgccctgctcccccaaaccggcgtggctccccgggcaccaaggagctgactacagaggagcaggatttgcacccctcgctgggcttgctttggcaacagagtgcctgacccaggtcaggattttcaagaaagacatgtctgacaaaatgtctagcttcctacatattggagacatttgttctctgtacgcggagggatcgacaaatggatttattagcaccttgggcctggttgatgatcgttgtgttgtacagccagaaaccggggaccttaacaatccacctaagaaattcagagactgcctctttaagctatgtcccatgaaccgctactctgcccaaaagcagttctggaaagccgctaagcctggggccaacagcaccacagacgcagtgctactcaacaaactgcaccacgctgcagacttggaaaagaagcagaatgagacagaaaacaggaaattgctggggaccgtaatccagtatggcaatgtgatccagctcctgcatttgaaaagtaataaatacctaacagtgaataagaggcttcctgctctgttggagaagaatgccatgagagtcacattggacgaggctggaaatgaagggtcctggttttatattcagccattctacaagctgcgatccattggagacagcgtggtcataggtgacaaggtggttctgaaccccgtcaatgctggtcagcccctacatgctagcagccatcaactggtagataacccaggctgcaatgaggtcaattccgtcaactgcaatacaagctggaaaatagtccttttcatgaaatggagtgataacaaagacgacatattaaaggggggtgacgtggtgaggctgtttcatgctgagcaggagaagtttctcacctgtgacgaacacaggaagaagcagcacgtcttcctgagaaccacgggccggcagtcggccacatctgccaccagttcaaaagccctgtgggaggtggaggtggtccagcatgacccatgtcggggcggagcagggtattggaacagccttttccgtttcaagcatctggccacggggcattacttggcagcagaggtggaccctgatcaggacgcctctcgaagtaggttgcggaatgcccaagaaaagatggtatactccctggtctctgtgcctgaaggcaatgacatctcctccattttcgagctagatcccaccactctgcgtggaggtgacagccttgtcccaaggaactcttatgttcggctcagacacctatgtactaatacctgggttcacagcacaaatattcctattgacaaggaagaagaaaagcccgtgatgctgaaaattggcacctctcctgtgaaggaggataaggaagcatttgccatagttccggtttctcctgctgaagttcgggacctggactttgccaatgatgccagcaaggtgctgggctccattgctgggaagctagagaagggcaccatcacccagaatgaaaggaggtctgtaaccaagctgctagaagatttggtttacttcgtcactggtggaactaattctggtcaagatgttctcgaagttgtcttctccaagcccaacagagaacggcagaaactgatgagagaacagaatattctcaagcagatcttcaagttgttacaagccccattcacagactgcggtgatggcccaatgcttcggctggaagagctcggggaccagcggcacgctcctttcagacacatctgccggctctgctacagggtgctgagacactcgcagcaagactacaggaagaaccaggagtatatagccaagcagtttggcttcatgcagaagcagattggctatgatgtgttggctgaagacactatcactgccctgctccacaataatcggaaactcctggaaaaacacattaccgcggcagagattgacacatttgtcagcctggtgcgaaagaacagggagcccagattcttagattacctctccgacctctgtgtctccatgaacaaatcaattccagtgacccaggaactgatatgtaaagctgtgctgaaccccaccaacgctgacatcctgattgagaccaaattggttctttctcgttttgaatttgaaggtgtctcttccactggagagaatgctctggaggcaggagaagacgaggaagaggtgtggctgttttggagggacagcaacaaagagattcgcagcaagagtgtgagggaattggctcaggatgctaaagaagggcagaaggaggaccgagacgttctcagctactacagatatcagctgaacctctttgcgaggatgtgtctggaccgccaatacctggccatcaacgaaatctcaggccagctggatgtcgatctcattctccgctgcatgtctgacgagaacctgccctatgacctcagggcgtccttctgccgcctcatgcttcacatgcatgtggaccgagatccccaggaacaagtcacccccgtgaaatatgcccgcctctggtcggagattccctcggagatcgccattgacgactatgatagtagtggagcttccaaagatgaaattaaggagagatttgctcagaccatggagtttgtggaggagtatttaagagatgtggtttgtcagaggttccctttctctgataaagagaagaataagcttacgtttgaggttgtaaatttagctaggaatctcatatactttggtttctacaacttctctgaccttctccgattaactaagatccttctggccatattggactgtgtacatgtgacaacaatcttccccattagcaagatggcgaaaggagaagagaataaaggcagtaacgtgatgagatctattcatggcgtgggagagctgatgacccaggtggtgctccggggaggaggctttttgcccatgactcccatggctgctgcccctgaaggcaatgtgaagcaggcagagcctgagaaggaggacatcatggtcatggacaccaagctgaagatcattgagatactccagtttattttgaatgtgaggttggattataggatctcctgcctcctgtgtatatttaagcgagagtttgatgaaagcaattcccagacttcagaaacatcctccggaaacagcagccaagaagggccaagtaatgtaccaggtgctcttgactttgaacacattgaagaacaagcagaaggcatctttggaggaagtgaggagaacaccccactggacttggatgaccacggcggcagaacctttctccgtgtcctgctccacttgacgatgcatgactacccacccctggtgtcaggggccctgcagctcctcttccggcacttcagccagaggcaggaggtgctccaggccttcaaacaggttcaactgctggttaccagccaagatgtggacaactacaaacagatcaaacaagacttggatcaactgaggtccatcgtggaaaagtcagagctttgggtgtacaaagggcagggccccgatgagactatggatggtgcatctggagaaaatgaacataagaaaacggaggagggaaataacaagccacaaaagcatgaaagcaccagcagctacaactacagagtggtcaaagagattttgattcggcttagcaaactctgtgttcaagagagtgcctcagtgagaaagagcaggaagcagcaacagcgtctgctccggaacatgggcgcgcacgccgtggtgctggagctgctgcagattccctatgagaaggccgaagataccaagatgcaagagataatgaggttggctcatgaatttttgcagaatttctgcgcaggcaaccagcagaatcaagctttgctacataaacacataaacctgtttctcaacccagggatcctggaggcagtaaccatgcagcacatcttcatgaacaatttccagctttgcagtgagatcaacgagagagttgttcagcacttcgttcactgcatagagactcacggtcggaatgtccagtatataaagttcttacagacaattgtcaaggcagaagggaaatttattaaaaaatgccaagacatggttatggccgagctggtcaattcgggagaggatgtcctcgtgttctacaacgacagagcctctttccagactctgatccagatgatgcggtcagaacgggatcggatggatgagaacagccctctcatgtaccacatccacttggtcgagctcctggctgtgtgcacggagggtaagaatgtctacacagagatcaagtgcaactccctgctcccgctggatgacatcgttcgcgtggtgacccacgaggactgcatccctgaggttaaaattgcatacattaacttcctgaatcactgctatgtggatacagaggtggaaatgaaggagatttataccagcaatcacatgtggaaattgtttgagaatttccttgtagacatctgcagggcctgtaacaacactagtgacaggaaacatgcagactcgattttggagaagtatgtcaccgaaatcgtcatgagtattgttactactttcttcagctctcccttctcagaccagagtacgactttgcagactcgccagcctgtctttgtgcaactgctgcaaggcgtgttcagggtttaccactgcaactggttaatgccaagccaaaaagcctccgtggagagctgtattcgggtgctgtctgatgtagccaagagccgggccattgccattcccgtggacctggacagccaagtcaacaacctctttctcaagtcccacagcattgtgcagaaaacagccatgaactggcggctctcagcccgcaatgccgcacgcagggactctgttctggcagcttccagagactaccggaatatcattgagagattgcaggacatcgtctccgcgctggaggaccgtctcaggcccctggtgcaggcagagttatctgtgctcgtggatgttctccacagacccgagctgcttttcccagagaacacagacgccagaaggaaatgtgaaagtggcggtttcatttgcaagttaataaagcatacaaaacagctgctagaagaaaatgaagagaagctctgcattaaggtcctacagaccctgagggaaatgatgaccaaagatagaggctatggagaaaagggtgaggcgctcaggcaagttctggtcaaccgttactatggaaacgtcagaccttcgggacgaagagagagccttaccagctttggcaatggcccactgtcagcaggaggacccggcaagcccgggggaggagggggaggttccggatccagctctatgagcaggggtgagatgagtctggccgaggttcagtgtcaccttgacaaggagggggcttccaatctagttatcgacctcatcatgaacgcatccagtgaccgagtgttccatgaaagcattctcctggccattgcccttctggaaggaggcaacaccaccatccagcactcctttttctgtcgcttgacagaagataagaagtcagagaaattctttaaggtgttttatgaccggatgaaggtggcccagcaagaaatcaaagcaacagtgacagtgaacaccagtgacttgggaaataaaaagaaagacgatgaggtagacagggatgccccatcacggaaaaaagctaaagagcccacaacacagataacagaagaggtccgggatcagctcctggaggcctccgctgccaccaggaaagccttcaccactttcaggagggaggctgatcccgacgaccactaccagcctggagagggcacccaggccactgccgacaaggccaaggacgacctggagatgagcgcggtcatcaccatcatgcagcccatcctccgcttccttcagctcctgtgtgaaaaccacaaccgagacctgcagaacttcctccgttgccaaaataacaagaccaactacaatttggtatgtgagaccctgcagtttctggactgtatttgtggaagcacaactggaggccttggtcttctgggcttgtatataaatgaaaagaacgtagcgcttatcaaccaaaccctggaaagtctgaccgaatactgtcaaggaccttgccatgagaaccagaactgcatagccacccatgaatccaatggcattgacatcatcacagccctgatcctcaatgatatcaatcctttgggaaagaagaggatggaccttgtgttagaactgaagaacaatgcctcgaagttgctcctggccatcatggaaagcaggcacgacagtgaaaacgcagagaggatactttataacatgaggcccaaggaactggtggaagtgatcaagaaagcctacatgcaaggtgaagtggaatttgaggatggagaaaacggtgaggatggggcggcgtcccccaggaacgtggggcacaacatctacatattagcccatcagttggctcggcataacaaagaacttcagagcatgctgaaacctggtggccaagtggacggagatgaagccctggagttttatgccaagcacacggcgcagatagagattgtcagattagaccgaacaatggaacagatagtctttcccgtgcccagcatatgtgaattcctaaccaaggagtcaaaactacgaatttactatactacagagagagacgaacaaggcagcaaaatcaatgatttctttctgcggtctgaagacctcttcaatgaaatgaattggcagaagaaactgagagcccagcccgtgttgtactggtgtgcccgcaacatgtctttctggagcagcatttcgtttaacctggccgtcctgatgaacctgctggtggcgtttttctacccgtttaagggagtccgaggaggaaccctggagccccactggtcgggactcctgtggacagccatgctcatctctctggccatcgtcattgccctccccaagccccatggcatccgggccttaattgcctccacaattctacgactgatattttcagtcgggttacaacccacgttgtttcttctgggcgctttcaatgtatgcaataaaatcatctttctaatgagctttgtgggcaactgtgggacattcacaagaggctaccgagccatggttctggatgttgagttcctctatcatttgttgtatctggtgatctgtgccatggggctctttgtccatgaattcttctacagtctgctgctttttgatttagtgtacagagaagagactttgcttaatgtcattaaaagtgtcactcgcaatggacggtccatcatcctgacagcagttctggctctgatcctcgtttacctgttctcaatagtgggctatcttttcttcaaggatgactttatcttggaagtagataggctgcccaatgaaacagctgttccagaaaccggcgagagtttggcaagcgagttcctgttctccgatgtgtgtagggtggagagtggggagaactgctcctctcctgcacccagagaagagctggtccctgcagaagagacggaacaggataaagagcacacatgtgagacgctgctgatgtgcattgtcaccgtgctgagtcacgggctgcggagcgggggtggagtaggagatgtactcaggaaaccgtccaaagaggaacccctgtttgctgctagagttatttatgacctcttgttcttcttcatggtcatcatcattgttcttaacctgatttttggggttatcattgacacttttgctgacctgaggagtgagaagcagaagaaggaagagatcttgaagaccacgtgctttatctgtggcttggaaagagacaagtttgacaacaagactgtcacctttgaagagcacatcaaggaagaacacaacatgtggcactatctgtgcttcatcgtcctggtgaaagtaaaggactccaccgaatatactgggcctgagagttacgtggcagaaatgatcaaggaaagaaaccttgactggttccccaggatgagagccatgtcattggtcagcagtgattctgaaggagaacagaatgagctgagaaacctgcaggagaagctggagtccaccatgaaacttgtcacgaacctttctggccagctgtcggaattaaaggatcagatgacagaacaaaggaagcagaaacaaagaattggtcttctaggacatcctcctcacatgaatgtcaacccacaacaaccagcataagcaaatgaaagaaaggaattgtatttaccttttataattattattagtgtgggtatggctaatgagttctgattcacccacgaaggttacatttatgctgaatacatttgtaaatactcagttttatactgtatgtatatgattgctactctaaaggtttggatatatgtattgtaattagaattgttggcatgatgacatttcatttgtgccaaaaatattaaaaatgccttttttggaaggactaacagaaagcacctgatttgcacttgaaccagattatagatttaaaagtatatgacatgtattttgtatttaaaactagaatagccagtatttatgttttttataaaactgtgcaatacgaattatgcaatcacaatacatttgtagctcccgagtgtcctaaagggagtgcacttctttgaagctggtgtgttaatactatgtaataaatggttaactttcaaatgatgctgctgccaaaattatattaatagtgagtttcaggcccctgggcattttgtaccatgtaattatcctctggtgatgctgtttctcgttagtggcagtagtgcctccgtctcctagtgataatgctccaagtctatgaactgttaaatcagcattcattttaagaaaagcaactttagtttcaaagatacttttaagcttctaaattgatcatttaaactatttctttaaataagagagccaaattagaggctcatactttagcttgtgaagaagataatgaattttttaaagggaactttctatgcaatgttcaggataaatcgatactgctggccaatcagtgtcatctcctgggtaaattttgatgtcgcattataaagacatgcataattgatggtttctagattatctagtccaaacaatagagtttattttttcttcatctgaaccaacatgctacagtagctaagaagtattaaaactatatacatccatataaagatgaaatatgaactatctcattagaagtcatagttgaccacagacatgttattcttctgaaagagccacattttggttttatttcttgtcacatgatttcttttcttgatggatgaaaaatatgaaatgaaatcttttatatctgttgcctagttttgtacatggatctcattttacaagagaatctctctgcta

SEQ ID NO: 14070 - DNA, 4190 bp, Homo sapiens
caacctccagccagtccctgggtcgggcggatcctcccagaggtggcacaatggagcgatctccaggagagggccccagccccagccccatggaccagccctctgctccctccgaccccactgaccagccccccgctgctcacgcaaagccagacccaggttctgggggccaacctgctggccctggcgcggcgggtgaggccctggcggtgctgacttcattcgggaggcggttgctggtgctgatacctgtgtatttggccggggcagtgggactcagcgtgggtttcgtgctcttcggcctcgccctctacctgggctggcgccgggtccgcgacgagaaagaacggagccttcgagcagcgaggcagctactggacgacgaggagcagctcactgcgaaaactctctatatgagtcatcgagagctacctgcctgggtcagcttcccagacgtggaaaaggctgaatggctcaataagattgtggcccaggtctggcccttcctgggccagtatatggagaagcttctggctgaaactgtggctccggctgttaggggatctaacccccatctgcaaacatttacatttacacgagtggaactgggtgaaaagccattgcgcatcattggagtcaaggttcacccaggtcagagaaaagagcagatcctgctggacttgaacatcagctatgtaggtgatgtgcagattgatgtggaagtgaagaaatatttttgcaaagcaggagtcaagggcatgcagctacatggcgttttgcgggtgatactggagccactcattggggaccttcccttcgtgggggctgtgtcaatgttcttcatccgacgcccgaccctagacatcaactggacagggatgaccaacctgctggatatcccaggacttagctcactctctgacaccatgatcatggactccattgctgccttcctcgtgttgcccaaccgattactggtgccccttgtgcctgaccttcaagatgtggctcagttgcgttcccctctgcccaggggcattattcgaattcacctgctggctgctcgagggctgagttccaaggacaaatatgtgaagggcctgattgagggcaagtcagacccatatgcacttgtgcgtttgggtacccagacattctgcagtcgtgtcattgatgaagaactcaacccacagtggggagagacttatgaggtgatggtacacgaggtcccagggcaggagattgaagtggaggtgttcgacaaggatccagataaagatgactttctgggcagaatgaagctggatgtagggaaggtgttacaggctagcgttctggatgattggttccctctacaaggtgggcaaggccaagttcacttgaggctagaatggctgtcacttttgtcagatgcagagaaactggagcaggttctacagtggaattggggagtctcctctcgaccagatcccccgtcagctgccatcttagttgtctacctggatcgggcccaggatcttcctctgaagaaggggaacaaggaacccaaccctatggtacaactgtcaattcaggatgtgactcaggagagcaaggctgtctacagtaccaactgcccagtgtgggaggaagcgttccggttcttcctacaagaccctcaaagccaggagctcgatgtgcaagtgaaggatgattccagggccctgactttaggagcactgacgctgcctctggcccgcctgctgactgccccagaactcatcctggaccagtggttccagctcagcagctctggtccaaactccagactctatatgaaactagtcatgaggatcctgtacttggattcatcagaaatatgcttccccacggtgcctggttgtcctggtgcttgggacgtggacagtgagaatccccagagaggcagcagtgtggatgccccacctcgaccctgtcacacgactcctgatagccagtttgggactgagcatgtgcttcggatccatgtattagaggcccaggacctgattgccaaagaccgtttcttggggggactggtgaagggcaagtcagacccctatgtcaaactaaagttggcaggacgaagcttccggagccatgttgttcgggaagatctcaatccccgctggaatgaggtttttgaggtgatcgtcacatcagttccaggccaagagctagaggttgaagtctttgacaaggacttggacaaggatgattttctgggcaggtgtaaagtgcgtctcaccacagtcttaaacagtggcttccttgatgagtggctgaccctggaggatgtcccatctggccgcctgcacttgcgcctggagcgtctcaccccccgtcccactgctgctgagttagaggaggtgctgcaggtgaatagtttgatccagactcagaagagtgcggagctggctgcggccctgctatccatctatatggagcgggcagaggacctcccgctgcgaaaaggcaccaagcacctcagcccttatgctactctcactgtgggagatagttctcataaaaccaagactatttcgcaaacttcagcccctgtctgggatgagagtgcctcctttctcatcaggaaaccacacactgagagcctagagttgcaggttcggggtgagggcactggcgtgctgggctcattatccctgcccctctcagagctcctcgtggctgaccagctctgcttggaccgctggtttacactcagcagtggtcaggggcaggtgctactgagagcacagctagggatcctggtgtcccagcactcgggagtggaagctcatagccacagctacagccacagctcctcatcgctgagtgaagaaccagagctctcggggggaccccctcacatcacctcctcagccccagagctccggcagcgcctaacacatgttgacagtccccttgaggctccagccgggcctctgggccaggtgaaactgactctgtggtactacagtgaagaacgaaagctggtcagcattgttcatggttgccggtcccttcgacagaatggacgtgatcctcctgatccctatgtgtcactgttgctactgccagacaagaaccgaggcaccaagaggaggacctcacagaagaagaggaccctgagtcctgaatttaatgaacggtttgagtgggaactccccctggatgaggcccagagacgaaagctggatgtctctgtcaagtctaattcctccttcatgtcaagagagcgtgagctgctggggaaggtgcagctggacctagctgagacagacctttcccagggtgtagcccggtggtatgacctgatggacaacaaggacaagggcagctcctaggagctggcgagtcccagcctgactgctctgtcttcctgccttcgtctcgctccatcaccgcctcaatgtgatgagcctaaagctagggtccaagggcagagcctgtgcccttcagccctttcacctaacaggcccatattcgggcctttgcctgaccaaagagaagaaccgtatgttccctttactgcacggcctttatccttctgggcccctggggcggggacctgagctggctgtttcctgctttgcctgcacattgttctcccttcctcccaactcctcagggccttctgtatctgtgcctggccagtggcagcactagcagtggtattagcttatgccaaatacagctttggaaggatctttttttctttaactagatggtcaccttcttccctaccacacatgggtgggaaggtggacaggctaacctctccagctgtgagcctcttagactactgcatgtagcaaatgttcagcagctcaggcccccatgtccagttctgtccccactgtcctcaaccctgtcctgaaaattctactgctttgatggctggggccagtctcttgtcactttggaaactgaggacgcgtggattctactcaagcctccaagtagtggcatatcagtcttggagctcctagctggtgatacggagagggctttggaggacttgggacagcagggccaatttttttgcccaagtgcctaggctgctaactcactgactagaacttaatctggtactttacagttttgcaccaactctgccaagccactggatcttacattaaacatcatactcaaaaaaaaaaaaaaaaaaa

SEQ ID NO: 14071 - DNA, 2916 bp, Homo sapiens
attcttctgatttggtagaggaaatagtttaaaaatgatctcacagcgtgatttatgtaaacggcgcttctttctttggatgagacaattgagatagagtctgaaaccctggcaagccacagcttcctgcagtgtcctgttgccatgggttacgaagggagcgagagggaacttcatcggaaatgcctttaaacttttctcacacgcacaagctgcggtgttgaatggtgtgtcttagacccgggtgcctagtgtggctcggtgccttacaatgaatttggggaaagagttgtcaaacgaaacccatgtttctaatgaccagcagtctgcaactgtgtctgatggcgagttgacgggcgccgacctgaaggactgcgtcagcaacaacagcctgagcagcaatgccagcctccccagcgtgcagagctgccggcgcctgcgtgagaggagggtcgccagctgggccgtgtcctttgagcgcctgctgcaggaccccgtcggtgtccgctacttctctgattttctaaggaaagaattcagtgaagaaaacattttattctggcaggcctgtgaatattttaatcatgttcctgcacatgacaaaaaggagctttcctacagggcccgggagattttcagtaagtttctctgcagcaaagccaccaccccggtcaacatcgacagccaggcccagctagcagacgacgtcctccgcgcacctcacccagacatgttcaaggagcagcagctgcagatcttcaatctcatgaagtttgatagctacactcgctttctgaagtccccgctgtaccaggaatgcatcctggcggaagtggagggccgtgcactcccggactcgcagcaggtccccagcagcccggcttccaagcacagcctcggttcagaccactccagtgtgtccacgccaaaaaagttaagtggaaaatcaaaatccggccgatccctgaatgaagagctgggggatgaggacagcgagaagaagcggaaaggcgcgtttttctcgtggtcgcggaccaggagcaccgggaggtcccagaaaaagagggagcacggggaccacgcagacgacgccctgcatgccaatggaggcctgtgtcgccgagagtcgcagggctctgtgtcctctgcggggagcctggacctgtcggaggcctgcaggactttggcacccgagaaggacaaggccaccaagcactgctgcattcatctcccggatgggacatcctgcgtggtggctgtcaaggcgggcttctccatcaaagacatcctgtccggactctgtgagcggcatggcatcaacggggcggccgcggacctcttcctggtgggcggggacaagcctctggtgctgcaccaagacagtagcatcttggagtcaagggacctgcgcctagaaaagcgcaccttgtttcggctggatcttgttccgattaaccggtcagtgggactcaaggccaagcccaccaagcccgtcacggaggtgctgcggcccgtggtggccagatacggcctggacctcagtggcctgctggtgaggctgagtggagagaaggagcccctggaccttggcgcccctatatcgagtctggacggacagcgggttgtcttggaggagaaggatccttccagaggaaaggcatccgcagataaacagaaaggtgtgccagtgaaacagaacacagctgtaaattccagctccagaaaccactcggctacgggagaggaaagaacactaggcaagtctaattctattaaaataaaaggagaaaatggaaaaaatgctagggatccccggctttcaaagagagaagaatctattgcaaagattgggaaaaaaaaatatcagaaaattaatttggacgaagcagaggagttttttgagcttatttccaaagctcagagcaacagagcagatgaccaacgtgggctgctaaggaaggaagacctggtgttgccagagttcctccgtttacctcctggttccacagaactcaccctccccactccagctgctgtggccaagggctttagcaagagaagcgccacaggcaacggccgggagagcgcctcccagcctggcgagcagtgggagccagtccaggagagcagcgacagcccgtccaccagcccgggctcagcctccagcccccctggacctcctgggacgaccccccccgggcagaagtctcccagcgggcccttctgcactccccagtcccccgtctccctcgcgcaggagggcaccgcccagatctggaagaggcagtctcaggaagtggaggccgggggcatccagacggtggaggatgagcacgtggccgagctgaccctgatgggggagggggacatcagcagccccaacagcaccttgctgccgccgccctccaccccccaggaagtgccaggaccttccagaccaggaagtgggacccatggcagccgagacctcccagtcaacagaatcatcgatgtggatcttgtaactggctcggcgcccgggcgggatggtggcatagcgggggcacaggctggccctgggaggtcgcaggccagtggtgggcctcctacatcagacctccctggcttgggccccgtcccgggtgagcctgctaagcccaagaccagcgctcaccacgccaccttcgtctgagctgccctggcctggccaactctcctgtggacatgtcggggtggggcagcccaggtggattctgtgggcctcaggggggccaccctggccaccacaccctcaggagcccagccaggagggcagggggtgacctcgctggaggcactggccccggacattcgccatgctggccatggggctccctggccctggcctcctgctgcccaataaagcatttctgaggacccaaaaaaaaaaaaaaaaaa

SEQ ID NO: 14072 - DNA, 2947 bp, Homo sapiens
acttttacttttgacgaccaccatgactgagatcactgctgaaggaaatgcatctacaaccacaactgtgatagacagcaaaaatggatctgtgcccaaatcccccggaaaagtgctgaagaggacagtcacagaagacatagtgacgacgttcagctcccctgcagcctggcttctggtcattgccctgataatcacgtggtcagctgttgccatcgttatgtttgatttagtggattacaaaaacttttcagcaagctctattgccaagattggctcagatcctttaaaactggtacgtgatgctatggaggaaaccacggactggatctatggcttcttttctttgttatctgacatcatctcatctgaagatgaagaagatgatgatggtgacgaagatactgataaaggagaaatagatgagcctcccttgagaaaaaaagaaatacacaaagataagactgaaaaacaagagaaacctgaaaggaaaatacaaactaaagttacacacaaagaaaaagaaaaaggaaaagaaaaagtaagagaaaaagaaaaacctgaaaagaaagcaactcacaaggaaaaaattgagaaaaaagaaaaaccagaaacaaagacagtggcgaaagaacagaagaaagctaagactgcagaaaagagtgaagaaaagactaaaaaggaagtgaaaggtggaaaacaggagaaagtgaagcaaacagctgcaaaagtaaaagaagtacagaaaacaccatcaaaacccaaagaaaaggaggacaaagagaaagcagctgtgtcaaagcatgaacagaaagatcagtatgcattctgtcgatatatgattgacatatttgtccatggggatttaaaaccaggacaaagcccagccattccacctcccttaccgacagaacaagcttccagacccactccggcatcacctgcccttgaagaaaaagaaggggaaaagaagaaggctgagaagaaagttacttctgaaacaaaaaagaaagaaaaagaagatatcaaaaagaaaagtgagaaggaaactgccattgatgtggaaaaaaaagagccgggaaaagcttctgaaaccaaacaagggactgtaaaaattgcagcacaagcagcagctaagaaggatgaaaagaaggaagattccaagaaaacaaaaaaacctgcagaagtagaacaacccaagggaaaaaagcaggaaaagaaagaaaaacatgtggaaccagcaaagtcaccaaagaaagaacactcagttccaagtgacaaacaagtaaaagcaaaaactgaacgagccaaagaggagattggtgcggtttcaagtaaaaaagctgtacctggaaagaaggaagagaaaacaaccaagacagtggagcaagaaattagaaaagaaaaatctgggaagacttcttcaattctgaaagataaagaacctattaaagggaaagaagagaaagttccagcttccctaaaggaaaaagaacctgaaactaaaaaagatgaaaagatgtccaaagcaggcaaagaagtcaagcctaaacctccacaactacaaggaaaaaaggaagagaagccagagccccaaattaaaaaagaagcaaaaccagctatatctgaaaaagtgcaaatacacaaacaagacatagtgaaaccagaaaagactgtttctcatggtaaaccagaagaaaaagttctcaagcaggtaaaagctgtcacaatagaaaaaacagccaagcccaaaccaacaaaaaaagctgaacatcgagaaagagaacctccatctataaaaacagacaaaccaaaaccaactccaaaaggaacatcagaagtcacagaatcaggaaagaagaaaactgaaatatctgaaaaagaaagtaaagaaaaagcagacatgaagcatcttagagaagaaaaagtctcaacaagaaaagaaagtcttcaattacacaatgtgacaaaagcagaaaaacctgcaagagtatcaaaagatgttgaagatgtaccagcttcaaagaaagctaaagaaggaactgaagatgtgtctcccacaaagcagaaaagtcccatcagtttcttccagtgtgtctacttggatgggtacaatggctatggatttcagtttcctttcactcctgcagaccgccctggagagagctctggtcaagcaaattctccaggacagaagcaacaaggacagtaaacacacatgtatgacccttacaagtgctttaagattttaaaaatgtgatgttttgtccacagtagttcaggcaattaagaatatgcaacccagagaatttctgtgaaaacattttgctctttggcctggtgtggacggaaagggtggccaaatggattgagtgatgagcagacatgtttaagggtctaagtctcaagaatctgttatgtgtgtttgctgcggtgggagggggtgcttgtatttatcttatttccagtcactataaggttgtacacaaactaatttaaagtttacttaataatggtatctttaaaataattgacacaattgcaaaatgaattcctggcttcagttagctattatttttttaatgacaacatagactgtgctctaagtttaaaagatggggaagcttatataaaagtgacccttttgcatcatatgggtatctaaacttaatttacccaataagttgatgcttaatgattttattttatttttgtctattttctattttagttgtggctttgctctaagaatgggtaatagttgtactacagactgctataaatttcttgtgatactcttttagagctcaaaatatctctgagctttagacatggtaaggtggagagtaaatgcttgataaatctttaagatatgtcttgaatgataattaggacattcagtccagtggaaatacaccattcaattagtcaggtctggtgaatttcc

SEQ ID NO: 14073 - DNA, 2588 bp, Homo sapiens
gttttccggcgccggccctaggtcccggcagcggtggtgacggcggtgccggaggttgtccttggcaggttttcctcggcgcttctccatggaggaggcggtgcgaacggcttcagccccgaatgctcgcatctcccactggacggcgacgaaggcggtggccgtgcgagcgcaggactgggcggcctgtgtgggggtgtgagccgcggtgcccaaggctgcgccggcgaggggaagccgcgcggccggccggccgactagggctggagctactcggccagggtttaagactttaaatgagaataaagggtggtatttacgaggaaatgagagtgaataagtcatctctaacctctcccagcctttttttcataagagagaccatattaaacttacatgctctcccggctgtgatagaccttcagttacagagagagggagcagagtgggaccaggtctgagaatagtgaagcaactcattcctttcaggacattccctctgatgtcctattttcaaactgtttgaagactgcttcattctgcctctagtaccagcggtttctctgttctgtgatcaatgtgattcacaggaactccttaagtaacaaacgaaatgagccaggggcgtggaaaatatgacttctatattggtctgggattggctatgagctccagcattttcattggaggaagtttcattttgaaaaaaaagggcctccttcgacttgccaggaaaggctctatgagagcaggtcaaggtggccatgcatatcttaaggaatggttgtggtgggctggactgctgtcaatgggagctggtgaggtggccaacttcgctgcgtatgcgtttgcaccagccactctagtgactccactaggagctctcagcgtgctagtaagtgccattctttcttcatactttctcaatgaaagacttaatcttcatgggaaaattgggtgtttgctaagtattctaggatctacagttatggtcattcatgctccaaaggaagaggagattgagactttaaatgaaatgtctcacaagctaggtgatccaggttttgtggtctttgcaacccttgtggtcattgtggccttgatattaatcttcgtggtgggtcctcgccatggacagacaaacattcttgtgtacataacaatctgctctgtaatcggcgcgttttcagtctcctgtgtgaagggcctgggcattgctatcaaggagctgtttgcagggaagcctgtgctgcggcatcccctggcttggattctgctgctgagcctcatcgtctgtgtgagcacacagattaattacctaaatagggccctggatatattcaacacttccattgtgactccaatatattatgtattctttacaacatcagttttaacttgttcagctattctttttaaggagtggcaagatatgcctgttgacgatgtcattggtactttgagtggcttctttacaatcattgtggggatattcttgttgcatgcctttaaagacgtcagctttagtctagcaagtctgcctgtgtcttttcgaaaagacgagaaagcaatgaatggcaatctctctaatatgtatgaagttcttaataataatgaagaaagcttaacctgtggaatcgaacaacacactggtgaaaatgtctcccgaagaaatggaaatctgacagctttttaagaaaggtgtaattaaaggttaatctgtgattgttatgaagtgaatttgaatatcatcagaatgtgtctgaaaaaacattgtcctcaaataatgttctttaaaggcaatctttttaaagatttcactaatttggaccaagaaattacttttcttgtatttaaacaaacaatggtagctcactaaaatgacctcagcacatgacgatttctattaacattttattgttgtagaagtattttacattttcatcccttctccaaaagccgaatgcactaatgacagttttaagtctatgaaaatgctttattttttcattggtgatgaaagtctgaaatgtgcatttgtcatccccactccatcaatccctgaccatgtaaggcttttttattttaaaaaaacagagttatcccaatacattatcctgtgatttaccttacctacaaaagtggctcctgtttgtttgatgatgattggttttatttttgaaatatttattaagggaaaactaagttactgaatgaaggaacctctttcttacaaaacaaaaaaaagggcagaaatcaccccaaggaacgatttctcaggttgagatgatcaccgtgaatccggcttcctctgagcattcgatggccttagcacctcatcaagccagcacatcctgcctgctgttgcagcctggctgggtttattcttcagttaccctaatcccatgatgcctggaaccttgattaccgttttacatcagctcttgtacttttcagtatattttcataatgagttatattgtcatttagactttgaacagctctgggaaatagaagactagggttgtttcttaaatttagctcatgttataataaaaagttgaaatgaaaaaaaaaaaaaaaaaaaa

SEQ ID NO: 14074 - DNA, 4562 bp, Homo sapiens
cccgcactctgcgcctctcctcgcctttctcgcacctgctcctgcgccaggccgcgagacccccggggcggcttcccagaacctgcggagcacaactggccgaccgacccattcattgggaaccccgtcttttgccagagcccacgtcccctgccacctctagctcggagcggcgtgtagcgccatggagaagagcaacgagaccaacggctaccttgacagcgctcaggcggggcctgcggccgggcccggagctccggggaccgcggcgggacgcgcacggcgttgcgcgggcttcctgcggcgccaagcgctggtgctgctcaccgtgtccggggtgctggcgggcgcgggcctgggcgcggcgttgcgcgggctcagcctgagccgcacgcaggtcacctacctggccttccccggcgagatgctgctccgcatgctgcgcatgatcatcctgccgctggtggtctgcagcctggtgtcgggcgccgcctccctcgatgccagctgcctcgggcgtctgggcggcatcgctgtcgcctactttggcctcaccacactgagtgcctcggcgctcgccgtggccttggcgttcatcatcaagccaggatccggtgcgcagacccttcagtccagcgacctggggctggaggactcggggcctcctcctgtccccaaagagacggtggactctttcctcgacctggccagaaacctgtttccctccaatcttgtggttgcagctttccgtacgtatgcaaccgattataaagtcgtgacccagaacagcagctctggaaatgtaacccatgaaaagatccccataggcactgagatagaagggatgaacattttaggattggtcctgtttgctctggtgttaggagtggccttaaagaaactaggctccgaaggagaagacctcatccgtttcttcaattccctcaacgaggcgacgatggtgctggtgtcctggattatgtggtacgtacctgtgggcatcatgttccttgttggaagcaagatcgtggaaatgaaagacatcatcgtgctggtgaccagcctggggaaatacatcttcgcatctatattgggccatgttattcatggaggaattgttctgccacttatttattttgttttcacacgaaaaaacccattcagattcctcctgggcctcctcgccccatttgcgacagcatttgctacctgctccagctcagcgacccttccctctatgatgaagtgcattgaagagaacaatggtgtggacaagaggatcagcaggtttattctccccatcggggccaccgtgaacatggacggagcagccatcttccagtgtgtggccgcggtgttcattgcgcaactcaacaacgtagagctcaacgcaggacagattttcaccattctagtgactgccacagcgtccagtgttggagcagcaggcgtgccagctggaggggtcctcaccattgccattatcctggaggccattgggctgcctactcatgacctgcctctgatcctggctgtggactggattgtggaccggaccaccacggtggtgaatgtggaaggggatgccctgggtgcaggcattctccaccacctgaatcagaaggcaacaaagaaaggcgagcaggaacttgctgaggtgaaagtggaagccatccccaactgcaagtctgaggaggagacatcgcccctggtgacacaccagaaccccgctggccccgtggccagtgccccagaactggaatccaaggagtcggttctgtgatggggctgggctttgggcttgcctgccagcagtgatgtcccaccctgttcacccagccgccagtcatggacacagggcactgcccttgccaacttttaccctcccaagcaatgctttggcccagtcgctggcctgaggcttacctctcggcactggcattgggctccccagccggaactggttaccaaggacaaggacactctgacattcggcttgatccatgtccaggtgcaactgtgtgtacaccagggatctgtttggaaacaaccccttgagctgccaggctcaagaaatcatggactcacagggtcctgtgtggttacatcttggaaaaaatgcagatgtatttcactctccccggtcagctctgcatcaggtgttttctgagcaaaccaagggggtttatagtcatctgtcgcattgcctcgagttgcagtaattgaaaaaatgctcaaattcttagccatggctggcctttgctgagctgggactcaggtgtttaaagagtttgtgctatagctaggtgtggatagcttctgatccctgggttctgggagactgcaggtgccgcacattgtcaagttagaaatactccaggtgggtgttagcactgtggtggtctctggtccacagccttaggtaaacaacttagattctgaggtcaaagaaaaaaggagagggaatgcagccttgtgggggagaagcggggcagagggttctctaatctaatcaggacaggacaggtttcacatacaattgtcccagttcgcatcccagccctggggcacttttctgcttccttccagaggcctgggcctctgataacactttggctttttctccattcacgctgatttggcaaaaggccagagatgggcctccttccctggggaggtgtgatgtagttatcacattcaggacccttgttgatttatcatctattatttgaattcaactggacactctgtaaaatgctgcactgcagcaaaaacaaaaccaccaccaccccagagaaaaccatgtactaattggagtggggtacccccattcacaggttcccaggtcccctggctttggctgatttcaaaatatagagccctttcttgccagtacatccaagtttaaaattatcagcgaaatggtccatgtttttccaattacctgctgacacggttctaagctaagtgaaggggaagatctgagagcgtgctgtttgtggctgttgatgcatattcgtgatgtaacaggtcctggggcctcactttaccccatttgtaaaatggggctaatgtcacctgcctcttacctacctcagagggatttggtgaagcaaactgttaatcttcgaaaacgaccatttcacttcttggatatcaagtgctaacccagtatgttcttcttttttatgtaagggacagctttggagaaaggactgctctgtggagcagagtcctttctgctggtgaggacagcatttctgagcagggctttgttctctatgtgcattaggacttttatcatgcccttgttctgtgtgtagttacttgacagcatcaaatgccgcctcttcctaatgtccttcaagttttcatgaactagcaaccccaccttccaccatggttctgggcgcctgattttgctgtgactcccagacccagccactgtttctgccaccctgtaacaggccattaaagctccccagtgttcagcctccttcactcccttgttttccctgttgctatgtgtcacctgggccctacagacaggggcacacgcttatggatgtgtgtaccattgagatgagaatgggtagatggaacggagaccatcaagccacacccccttcttaaaactggggacatgagcctgagcagaaagggtgaagaagagccatgggacacagagttgacccagccagggggaaagcccagctctctttaaaccagctaagccattccagtctcctgtgaagccaaaagggaccaggaaccgtgcaaaggaaactggaaacttttccccgctgggtagagcatgttgctgatactcttctgttttcaagggaaacaatcacattgtttgattccaaatggtaaatgaacactcactattcttcaggcttcagtaaatctttttttcttccttcatatatatatacacaacacacacacacatatgtatatctatacacacatgtgtgttgtgtatatgcatgtgtgtgtgtgtgcgtgtgtgtatagttttagctccaagccaagcaagtttgtgtttggatagaggggaacttaactattaactacaagttgtatgtctgtggtatcttgattttcccatttctaaagatgaatttcacaaagccataaagcgtgaaattagagctggacttaagactcattggccgaccatcctgtgtcctggcctggccctgcagtaagaagcgtgtctgggtctggagaagggtgcttccgagagtgtgcaggtggcccttccccttggaggcgagaagagagaatgtgctgtctatcttcctggttttcagtccacagagtcggtagaccaggggttacgtgactggggaaaatctcacatctccttgtctgaaaacatttcccctgctgttctctttctaacatgttgtggtaaatctgttcagatactgctcatctgactgttttgtacatgtgacaattgccttaaaacctagcacagtcctcagaaatgaataccgtgtttccactggaaaaaaaaaaaaaaaaaaaaaaaaaaaaaaaaaaaaaaaaaa

SEQ ID NO: 14075 - DNA, 4576 bp, Homo sapiens
gtgtatttgaataaaccaggttggcaaatcatactatagctgaaagaattggcaggaactgaaaatgactaggaagaggacatactgggtgcccaactcttctggtggcctcgtgaatcgtggcatcgacataggcgatgacatggtttcaggacttatttataaaacctatactctccaagatggcccctggagtcagcaagagagaaatcctgaggctccagggagggcagctgtcccaccgtgggggaagtatgatgctgccttgagaaccatgattcccttccgtcccaagccgaggtttcctgccccccagcccctggacaatgctggcctgttctcctacctcaccgtgtcatggctcaccccgctcatgatccaaagcttacggagtcgcttagatgagaacaccatccctccactgtcagtccatgatgcctcagacaaaaatgtccaaaggcttcaccgcctttgggaagaagaagtctcaaggcgagggattgaaaaagcttcagtgcttctggtgatgctgaggttccagagaacaaggttgattttcgatgcacttctgggcatctgcttctgcattgccagtgtactcgggccaatattgattataccaaagatcctggaatattcagaagagcagttggggaatgttgtccatggagtgggactctgctttgccctttttctctccgaatgtgtgaagtctctgagtttctcctccagttggatcatcaaccaacgcacagccatcaggttccgagcagctgtttcctcctttgcctttgagaagctcatccaatttaagtctgtaatacacatcacctcaggagaggccatcagcttcttcaccggtgatgtaaactacctgtttgaaggggtgtgctatggacccctagtactgatcacctgcgcatcgctggtcatctgcagcatttcttcctacttcattattggatacactgcatttattgccatcttatgctatctcctggttttcccactggcggtattcatgacaagaatggctgtgaaggctcagcatcacacatctgaggtcagcgaccagcgcatccgtgtgaccagtgaagttctcacttgcattaagctgattaaaatgtacacatgggagaaaccatttgcaaaaatcattgaagacctaagaaggaaggaaaggaaactattggagaagtgcgggcttgtccagagcctgacaagtataaccttgttcatcatccccacagtggccacagcggtctgggttctcatccacacatccttaaagctgaaactcacagcgtcaatggccttcagcatgctggcctccttgaatctccttcggctgtcagtgttctttgtgcctattgcagtcaaaggtctcacgaattccaagtctgcagtgatgaggttcaagaagtttttcctccaggagagccctgttttctatgtccagacattacaagaccccagcaaagctctggtctttgaggaggccaccttgtcatggcaacagacctgtcccgggatcgtcaatggggcactggagctggagaggaacgggcatgcttctgaggggatgaccaggcctagagatgccctcgggccagaggaagaagggaacagcctgggcccagagttgcacaagatcaacctggtggtgtccaaggggatgatgttaggggtctgcggcaacacggggagtggtaagagcagcctgttgtcagccatcctggaggagatgcacttgctcgagggctcggtgggggtgcagggaagcctggcctatgtcccccagcaggcctggatcgtcagcgggaacatcagggagaacatcctcatgggaggcgcatatgacaaggcccgatacctccaggtgctccactgctgctccctgaatcgggacctggaacttctgccctttggagacatgacagagattggagagcggggcctcaacctctctggggggcagaaacagaggatcagcctggcccgcgccgtctattccgaccgtcagatctacctgctggacgaccccctgtctgctgtggacgcccacgtggggaagcacatttttgaggagtgcattaagaagacactcagggggaagacggtcgtcctggtgacccaccagctgcagtacttagaattttgtggccagatcattttgttggaaaatgggaaaatctgtgaaaatggaactcacagtgagttaatgcagaaaaaggggaaatatgcccaacttatccagaagatgcacaaggaagccacttcggacatgttgcaggacacagcaaagatagcagagaagccaaaggtagaaagtcaggctctggccacctccctggaagagtctctcaacggaaatgctgtgccggagcatcagctcacacaggaggaggagatggaagaaggctccttgagttggagggtctaccaccactacatccaggcagctggaggttacatggtctcttgcataattttcttcttcgtggtgctgatcgtcttcttaacgatcttcagcttctggtggctgagctactggttggagcagggctcggggaccaatagcagccgagagagcaatggaaccatggcagacctgggcaacattgcagacaatcctcaactgtccttctaccagctggtgtacgggctcaacgccctgctcctcatctgtgtgggggtctgctcctcagggattttcaccaaggtcacgaggaaggcatccacggccctgcacaacaagctcttcaacaaggttttccgctgccccatgagtttctttgacaccatcccaataggccggcttttgaactgcttcgcaggggacttggaacagctggaccagctcttgcccatcttttcagagcagttcctggtcctgtccttaatggtgatcgccgtcctgttgattgtcagtgtgctgtctccatatatcctgttaatgggagccataatcatggttatttgcttcatttattatatgatgttcaagaaggccatcggtgtgttcaagagactggagaactatagccggtctcctttattctcccacatcctcaattctctgcaaggcctgagctccatccatgtctatggaaaaactgaagacttcatcagccagtttaagaggctgactgatgcgcagaataactacctgctgttgtttctatcttccacacgatggatggcattgaggctggagatcatgaccaaccttgtgaccttggctgttgccctgttcgtggcttttggcatttcctccaccccctactcctttaaagtcatggctgtcaacatcgtgctgcagctggcgtccagcttccaggccactgcccggattggcttggagacagaggcacagttcacggctgtagagaggatactgcagtacatgaagatgtgtgtctcggaagctcctttacacatggaaggcacaagttgtccccaggggtggccacagcatggggaaatcatatttcaggattatcacatgaaatacagagacaacacacccaccgtgcttcacggcatcaacctgaccatccgcggccacgaagtggtgggcatcgtgggaaggacgggctctgggaagtcctccttgggcatggctctcttccgcctggtggagcccatggcaggccggattctcattgacggcgtggacatttgcagcatcggcctggaggacttgcggtccaagctctcagtgatccctcaagatccagtgctgctctcaggaaccatcagattcaacctagatccctttgaccgtcacactgaccagcagatctgggatgccttggagaggacattcctgaccaaggccatctcaaagttccccaaaaagctgcatacagatgtggtggaaaacggtggaaacttctctgtgggggagaggcagctgctctgcattgccagggctgtgcttcgcaactccaagatcatccttatcgatgaagccacagcctccattgacatggagacagacaccctgatccagcgcacaatccgtgaagccttccagggctgcaccgtgctcgtcattgcccaccgtgtcaccactgtgctgaactgtgaccacatcctggttatgggcaatgggaaggtggtagaatttgatcggccggaggtactgcggaagaagcctgggtcattgttcgcagccctcatggccacagccacttcttcactgagataaggagatgtggagacttcatggaggctggcagctgagctcagaggttcacacaggtgcagcttcgaggcccacagtctgcgaccttcttgtttggagatgagaacttctcctggaagcaggggtaaatgtagggggggtggggattgctggatggaaaccctggaataggctacttgatggctctcaagaccttagaaccccagaaccatctaagacatgggattcagtgatcatgtggttctccttttaacttacatgctgaataattttataataaggtaaaagcttatagttttctgatctgtgttagaagtgttgcaaatgctgtactgactttgtaaaatataaaactaaggaaaactc

SEQ ID NO: 14076 - DNA, 4862 bp, Homo sapiens
actgggataaagcaagaagactgattttatgagcaggggtttgatacatcaaaggagattgcccaggatcaagggtgcggtgttgggggtgggttggggagggtggttagagaaggtttcactaagtgatttgggcctgaggcctgagaagatgtttaaaaagagggatcaagcacaggctaaggagaggaaagagcaggcacccaaacctctgcatggccccaatatgctccctgcagggtagtgccccctcttctggctgctcaaggcgagatctaagcttcttctaactcctgctgtcttttcatattctctgattctgggaaacgaagaattggcaggaactgaaaatgactaggaagaggacatactgggtgcccaactcttctggtggcctcgtgaatcgtggcatcgacataggcgatgacatggtttcaggacttatttataaaacctatactctccaagatggcccctggagtcagcaagagagaaatcctgaggctccagggagggcagctgtcccaccgtgggggaagtatgatgctgccttgagaaccatgattcccttccgtcccaagccgaggtttcctgccccccagcccctggacaatgctggcctgttctcctacctcaccgtgtcatggctcaccccgctcatgatccaaagcttacggagtcgcttagatgagaacaccatccctccactgtcagtccatgatgcctcagacaaaaatgtccaaaggcttcaccgcctttgggaagaagaagtctcaaggcgagggattgaaaaagcttcagtgcttctggtgatgctgaggttccagagaacaaggttgattttcgatgcacttctgggcatctgcttctgcattgccagtgtactcgggccaatattgattataccaaagatcctggaatattcagaagagcagttggggaatgttgtccatggagtgggactctgctttgccctttttctctccgaatgtgtgaagtctctgagtttctcctccagttggatcatcaaccaacgcacagccatcaggttccgagcagctgtttcctcctttgcctttgagaagctcatccaatttaagtctgtaatacacatcacctcaggagaggccatcagcttcttcaccggtgatgtaaactacctgtttgaaggggtgtgctatggacccctagtactgatcacctgcgcatcgctggtcatctgcagcatttcttcctacttcattattggatacactgcatttattgccatcttatgctatctcctggttttcccactggcggtattcatgacaagaatggctgtgaaggctcagcatcacacatctgaggtcagcgaccagcgcatccgtgtgaccagtgaagttctcacttgcattaagctgattaaaatgtacacatgggagaaaccatttgcaaaaatcattgaagacctaagaaggaaggaaaggaaactattggagaagtgcgggcttgtccagagcctgacaagtataaccttgttcatcatccccacagtggccacagcggtctgggttctcatccacacatccttaaagctgaaactcacagcgtcaatggccttcagcatgctggcctccttgaatctccttcggctgtcagtgttctttgtgcctattgcagtcaaaggtctcacgaattccaagtctgcagtgatgaggttcaagaagtttttcctccaggagagccctgttttctatgtccagacattacaagaccccagcaaagctctggtctttgaggaggccaccttgtcatggcaacagacctgtcccgggatcgtcaatggggcactggagctggagaggaacgggcatgcttctgaggggatgaccaggcctagagatgccctcgggccagaggaagaagggaacagcctgggcccagagttgcacaagatcaacctggtggtgtccaaggggatgatgttaggggtctgcggcaacacggggagtggtaagagcagcctgttgtcagccatcctggaggagatgcacttgctcgagggctcggtgggggtgcagggaagcctggcctatgtcccccagcaggcctggatcgtcagcgggaacatcagggagaacatcctcatgggaggcgcatatgacaaggcccgatacctccaggtgctccactgctgctccctgaatcgggacctggaacttctgccctttggagacatgacagagattggagagcggggcctcaacctctctggggggcagaaacagaggatcagcctggcccgcgccgtctattccgaccgtcagatctacctgctggacgaccccctgtctgctgtggacgcccacgtggggaagcacatttttgaggagtgcattaagaagacactcagggggaagacggtcgtcctggtgacccaccagctgcagtacttagaattttgtggccagatcattttgttggaaaatgggaaaatctgtgaaaatggaactcacagtgagttaatgcagaaaaaggggaaatatgcccaacttatccagaagatgcacaaggaagccacttcggacatgttgcaggacacagcaaagatagcagagaagccaaaggtagaaagtcaggctctggccacctccctggaagagtctctcaacggaaatgctgtgccggagcatcagctcacacaggaggaggagatggaagaaggctccttgagttggagggtctaccaccactacatccaggcagctggaggttacatggtctcttgcataattttcttcttcgtggtgctgatcgtcttcttaacgatcttcagcttctggtggctgagctactggttggagcagggctcggggaccaatagcagccgagagagcaatggaaccatggcagacctgggcaacattgcagacaatcctcaactgtccttctaccagctggtgtacgggctcaacgccctgctcctcatctgtgtgggggtctgctcctcagggattttcaccaaggtcacgaggaaggcatccacggccctgcacaacaagctcttcaacaaggttttccgctgccccatgagtttctttgacaccatcccaataggccggcttttgaactgcttcgcaggggacttggaacagctggaccagctcttgcccatcttttcagagcagttcctggtcctgtccttaatggtgatcgccgtcctgttgattgtcagtgtgctgtctccatatatcctgttaatgggagccataatcatggttatttgcttcatttattatatgatgttcaagaaggccatcggtgtgttcaagagactggagaactatagccggtctcctttattctcccacatcctcaattctctgcaaggcctgagctccatccatgtctatggaaaaactgaagacttcatcagccagtttaagaggctgactgatgcgcagaataactacctgctgttgtttctatcttccacacgatggatggcattgaggctggagatcatgaccaaccttgtgaccttggctgttgccctgttcgtggcttttggcatttcctccaccccctactcctttaaagtcatggctgtcaacatcgtgctgcagctggcgtccagcttccaggccactgcccggattggcttggagacagaggcacagttcacggctgtagagaggatactgcagtacatgaagatgtgtgtctcggaagctcctttacacatggaaggcacaagttgtccccaggggtggccacagcatggggaaatcatatttcaggattatcacatgaaatacagagacaacacacccaccgtgcttcacggcatcaacctgaccatccgcggccacgaagtggtgggcatcgtgggaaggacgggctctgggaagtcctccttgggcatggctctcttccgcctggtggagcccatggcaggccggattctcattgacggcgtggacatttgcagcatcggcctggaggacttgcggtccaagctctcagtgatccctcaagatccagtgctgctctcaggaaccatcagattcaacctagatccctttgaccgtcacactgaccagcagatctgggatgccttggagaggacattcctgaccaaggccatctcaaagttccccaaaaagctgcatacagatgtggtggaaaacggtggaaacttctctgtgggggagaggcagctgctctgcattgccagggctgtgcttcgcaactccaagatcatccttatcgatgaagccacagcctccattgacatggagacagacaccctgatccagcgcacaatccgtgaagccttccagggctgcaccgtgctcgtcattgcccaccgtgtcaccactgtgctgaactgtgaccacatcctggttatgggcaatgggaaggtggtagaatttgatcggccggaggtactgcggaagaagcctgggtcattgttcgcagccctcatggccacagccacttcttcactgagataaggagatgtggagacttcatggaggctggcagctgagctcagaggttcacacaggtgcagcttcgaggcccacagtctgcgaccttcttgtttggagatgagaacttctcctggaagcaggggtaaatgtagggggggtggggattgctggatggaaaccctggaataggctacttgatggctctcaagaccttagaaccccagaaccatctaagacatgggattcagtgatcatgtggttctccttttaacttacatgctgaataattttataataaggtaaaagcttatagttttctgatctgtgttagaagtgttgcaaatgctgtactgactttgtaaaatataaaactaaggaaaactc

SEQ ID NO: 14077 - DNA, 4462 bp, Homo sapiens
gtgtatttgaataaaccaggttggcaaatcatactatagctgaaagaattggcaggaactgaaaatgactaggaagaggacatactgggtgcccaactcttctggtggcctcgtgaatcgtggcatcgacataggcgatgacatggtttcaggacttatttataaaacctatactctccaagatggcccctggagtcagcaagagagaaatcctgaggctccagggagggcagctgtcccaccgtgggggaagtatgatgctgccttgagaaccatgattcccttccgtcccaagccgaggtttcctgccccccagcccctggacaatgctggcctgttctcctacctcaccgtgtcatggctcaccccgctcatgatccaaagcttacggagtcgcttagatgagaacaccatccctccactgtcagtccatgatgcctcagacaaaaatgtccaaaggcttcaccgcctttgggaagaagaagtctcaaggcgagggattgaaaaagcttcagtgcttctggtgatgctgaggttccagagaacaaggttgattttcgatgcacttctgggcatctgcttctgcattgccagtgtactcgggccaatattgattataccaaagatcctggaatattcagaagagcagttggggaatgttgtccatggagtgggactctgctttgccctttttctctccgaatgtgtgaagtctctgagtttctcctccagttggatcatcaaccaacgcacagccatcaggttccgagcagctgtttcctcctttgcctttgagaagctcatccaatttaagtctgtaatacacatcacctcaggagaggccatcagcttcttcaccggtgatgtaaactacctgtttgaaggggtgtgctatggacccctagtactgatcacctgcgcatcgctggtcatctgcagcatttcttcctacttcattattggatacactgcatttattgccatcttatgctatctcctggttttcccactggcggtattcatgacaagaatggctgtgaaggctcagcatcacacatctgaggtcagcgaccagcgcatccgtgtgaccagtgaagttctcacttgcattaagctgattaaaatgtacacatgggagaaaccatttgcaaaaatcattgaagacctaagaaggaaggaaaggaaactattggagaagtgcgggcttgtccagagcctgacaagtataaccttgttcatcatccccacagtggccacagcggtctgggttctcatccacacatccttaaagctgaaactcacagcgtcaatggccttcagcatgctggcctccttgaatctccttcggctgtcagtgttctttgtgcctattgcagtcaaaggtctcacgaattccaagtctgcagtgatgaggttcaagaagtttttcctccaggagagccctgttttctatgtccagacattacaagaccccagcaaagctctggtctttgaggaggccaccttgtcatggcaacagacctgtcccgggatcgtcaatggggcactggagctggagaggaacgggcatgcttctgaggggatgaccaggcctagagatgccctcgggccagaggaagaagggaacagcctgggcccagagttgcacaagatcaacctggtggtgtccaaggggatgatgttaggggtctgcggcaacacggggagtggtaagagcagcctgttgtcagccatcctggaggagatgcacttgctcgagggctcggtgggggtgcagggaagcctggcctatgtcccccagcaggcctggatcgtcagcgggaacatcagggagaacatcctcatgggaggcgcatatgacaaggcccgatacctccaggtgctccactgctgctccctgaatcgggacctggaacttctgccctttggagacatgacagagattggagagcggggcctcaacctctctggggggcagaaacagaggatcagcctggcccgcgccgtctattccgaccgtcagatctacctgctggacgaccccctgtctgctgtggacgcccacgtggggaagcacatttttgaggagtgcattaagaagacactcagggggaagacggtcgtcctggtgacccaccagctgcagtacttagaattttgtggccagatcattttgttggaaaatgggaaaatctgtgaaaatggaactcacagtgagttaatgcagaaaaaggggaaatatgcccaacttatccagaagatgcacaaggaagccacttcggacatgttgcaggacacagcaaagatagcagagaagccaaaggtagaaagtcaggctctggccacctccctggaagagtctctcaacggaaatgctgtgccggagcatcagctcacacaggaggaggagatggaagaaggctccttgagttggagggtctaccaccactacatccaggcagctggaggttacatggtctcttgcataattttcttcttcgtggtgctgatcgtcttcttaacgatcttcagcttctggtggctgagctactggttggagcagggctcggggaccaatagcagccgagagagcaatggaaccatggcagacctgggcaacattgcagacaatcctcaactgtccttctaccagctggtgtacgggctcaacgccctgctcctcatctgtgtgggggtctgctcctcagggattttcaccaaggtcacgaggaaggcatccacggccctgcacaacaagctcttcaacaaggttttccgctgccccatgagtttctttgacaccatcccaataggccggcttttgaactgcttcgcaggggacttggaacagctggaccagctcttgcccatcttttcagagcagttcctggtcctgtccttaatggtgatcgccgtcctgttgattgtcagtgtgctgtctccatatatcctgttaatgggagccataatcatggttatttgcttcatttattatatgatgttcaagaaggccatcggtgtgttcaagagactggagaactatagccggtctcctttattctcccacatcctcaattctctgcaaggcctgagctccatccatgtctatggaaaaactgaagacttcatcagccagtttaagaggctgactgatgcgcagaataactacctgctgttgtttctatcttccacacgatggatggcattgaggctggagatcatgaccaaccttgtgaccttggctgttgccctgttcgtggcttttggcatttcctccaccccctactcctttaaagtcatggctgtcaacatcgtgctgcagctggcgtccagcttccaggccactgcccggattggcttggagacagaggcacagttcacggctgtagagaggatactgcagtacatgaagatgtgtgtctcggaagctcctttacacatggaaggcacaagttgtccccaggggtggccacagcatggggaaatcatatttcaggattatcacatgaaatacagagacaacacacccaccgtgcttcacggcatcaacctgaccatccgcggccacgaagtggtgggcatcgtgggaaggacgggctctgggaagtcctccttgggcatggctctcttccgcctggtggagcccatggcaggccggattctcattgacggcgtggacatttgcagcatcggcctggaggacttgcggtccaagctctcagtgatccctcaagatccagtgctgctctcaggaaccatcagattcaacctagatccctttgaccgtcacactgaccagcagatctgggatgccttggagaggacattcctgaccaaggccatcatccttatcgatgaagccacagcctccattgacatggagacagacaccctgatccagcgcacaatccgtgaagccttccagggctgcaccgtgctcgtcattgcccaccgtgtcaccactgtgctgaactgtgaccacatcctggttatgggcaatgggaaggtggtagaatttgatcggccggaggtactgcggaagaagcctgggtcattgttcgcagccctcatggccacagccacttcttcactgagataaggagatgtggagacttcatggaggctggcagctgagctcagaggttcacacaggtgcagcttcgaggcccacagtctgcgaccttcttgtttggagatgagaacttctcctggaagcaggggtaaatgtagggggggtggggattgctggatggaaaccctggaataggctacttgatggctctcaagaccttagaaccccagaaccatctaagacatgggattcagtgatcatgtggttctccttttaacttacatgctgaataattttataataaggtaaaagcttatagttttctgatctgtgttagaagtgttgcaaatgctgtactgactttgtaaaatataaaactaaggaaaactc

SEQ ID NO: 14078 - DNA, 987 bp, Homo sapiens
atggacaacgcctcgttctcggagccctggcccgccaacgcatcgggcccggacccggcgctgagctgctccaacgcgtcgactctggcgccgctgccggcgccgctggcggtggctgtaccagttgtctacgcggtgatctgcgccgtgggtctggcgggcaactccgccgtgctgtacgtgttgctgcgggcgccccgcatgaagaccgtcaccaacctgttcatcctcaacctggccatcgccgacgagctcttcacgctggtgctgcccatcaacatcgccgacttcctgctgcggcagtggcccttcggggagctcatgtgcaagctcatcgtggctatcgaccagtacaacaccttctccagcctctacttcctcaccgtcatgagcgccgaccgctacctggtggtgttggccactgcggagtcgcgccgggtggccggccgcacctacagcgccgcgcgcgcggtgagcctggccgtgtgggggatcgtcacactcgtcgtgctgcccttcgcagtcttcgcccggctagacgacgagcagggccggcgccagtgcgtgctagtctttccgcagcccgaggccttctggtggcgcgcgagccgcctctacacgctcgtgctgggcttcgccatccccgtgtccaccatctgtgtcctctataccaccctgctgtgccggctgcatgccatgcggctggacagccacgccaaggccctggagcgcgccaagaagcgggtgaccttcctggtggtggcaatcctggcggtgtgcctcctctgctggacgccctaccacctgagcaccgtggtggcgctcaccaccgacctcccgcagacgccgctggtcatcgctatctcctacttcatcaccagcctgagctacgccaacagctgcctcaaccccttcctctacgccttcctggacgccagcttccgcaggaacctccgccagctgataacttgccgcgcggcagcctga

SEQ ID NO: 14079 - DNA, 2641 bp, Homo sapiens
gagccagttctgggaggcggggggaaggaggttggtggcgactccctcgctcgccctcactgccggcggtcccaactccaggcaccatgttccccgcgggcccccccagccacagcctcctccggctccccctgctgcagttgctgctactggtggtgcaggccgtggggagggggctgggccgcgccagcccggccgggggccccctggaagatgtggtcatcgagaggtaccacatccccagggcctgtccccgggaagtgcagatgggggattttgtgcgctaccactacaacggcacttttgaagatggcaagaagtttgattcaagctatgatcgcaacaccttggtggccatcgtggtgggtgtggggcgcctcatcactggcatggaccgaggcctcatgggcatgtgtgtcaacgagcggcgacgcctcattgtgcctccccacctgggctatgggagcatcggcctggcggggctcattccaccggatgccaccctctacttcgatgtggttctgctggatgtgtggaacaaggaagacaccgtgcaggtgagcacattgctgcgcccgccccactgcccccgcatggtccaggacggcgactttgtccgctaccactacaatggcaccctgctggacggcaccttcttcgacaccagctacagtaagggcggcacttatgacacctacgtcggctctggttggctgatcaagggcatggaccaggggctgctgggcatgtgtcctggagagagaaggaagattatcatccctccattcctggcctatggcgagaaaggctatgggacagtgatccccccacaggcctcgctggtctttcacgtcctcctgattgacgtgcacaacccgaaggacgctgtccagctagagacgctggagctcccccccggctgtgtccgcagagccggggccggggacttcatgcgctaccactacaatggctccttgatggacggcaccctcttcgattccagctactcccgcaaccacacctacaatacctatatcgggcagggttacatcatccccgggatggaccaggggctgcagggtgcctgcatgggggaacgccggagaattaccatccccccgcacctcgcctatggggagaatggaactggagacaagatccctggctctgccgtgctaatcttcaacgtccatgtcattgacttccacaaccctgcggatgtggtggaaatcaggacactgtcccggccatctgagacctgcaatgagaccaccaagcttggggactttgttcgataccattacaactgttctttgctggacggcacccagctgttcacctcgcatgactacggggccccccaggaggcgactctcggggccaacaaggtgatcgaaggcctggacacgggcctgcagggcatgtgtgtgggagagaggcggcagctcatcgtgcccccgcacctggcccacggggagagtggagcccggggagtcccaggcagtgctgtgctgctgtttgaggtggagctggtgtcccgggaggatgggctgcccacaggctacctgtttgtgtggcacaaggaccctcctgccaacctgtttgaagacatggacctcaacaaggatggcgaggtccctccggaggagttctccaccttcatcaaggctcaagtgagtgagggcaaaggacgcctcatgcctgggcaggaccctgagaaaaccataggagacatgttccagaaccaggaccgcaaccaggacggcaagatcacagtcgacgagctcaagctgaagtcagatgaggacgaggagcgggtccacgaggagctctgaggggcagggagcctggccaggcctgagacacagaggcccactgcgagggggacagtggcggtgggactgacctgctgacagtcaccctccctctgctgggatgaggtccaggagccaactaaaacaatggcagaggagacatctctggtgttcccaccaccctagatgaaaatccacagcacagacctctaccgtgtttctcttccatccctaaaccacttccttaaaatgtttggatttgcaaagccaatttggggcctgtggagcctggggttggatagggccatggctggtcccccaccatacctcccctccacatcactgacacagctgagcttgttatccatctccccaaactttctctttctttgtacttcttgtcatccccactcccagcccctattcctctatgtgacagctggctaggacccctctgccttcctccccaatcctgactggctcctagggaaggggaaggctcctggagggcagccctacctctcccatgccctttgccctcctccctcgcctccagtggaggctgagctgaccctgggctgctggaggccagactgggctgtagttagcttttcatccctaaagaaggctttccctaaggaaccatagaagagaggaagaaaacaaagggcatgtgtgagggaagctgcatgggtgggtgttagggctatgaaatcttggatttggggctgaggggtgggagggagggcagagctctgcacactcaaaggctaaactggtgtcagtccttttttcctttgttccaaataaaagattaaaccaatggc

SEQ ID NO: 14080 - DNA, 1609 bp, Homo sapiens
ttcggcttagtctgcggtcctcttgcattgcgactccgagtttaacttccaacacacactttcaacctccaagagacgcccccacctgtgtcgccccaatagcgacttttctcaccgtggtcgccgcggaacttcaagggtccttcctacccgcgttgctgagagtctgggtttacgcgtcacctcgggcgggacccgatcctccgctcctgaggcccccacaatgaagcagtcggacgcgtctccccaagaaagggtggactccgacgaccagtggggagagtactcctgcgtcttcctccccgagcccatgggcacggccaacatccagctccacgggcctcccagagtgaaggctgtgaagtcgtcagaacacatcaacgagggggagacggccatgctggtctgcaagtcagagtccgtgccacctgtcactgactgggcctggtacaagatcactgactctgaggacaaggccctcatgaacggctccgagagcaggttcttcgtgagttcctcgcagggccggtcagagctacacattgagaacctgaacatggaggccgaccccggccagtaccggtgcaacggcaccagctccaagggctccgaccaggccatcatcacgctccgcgtgcgcagccacctggccgccctctggcccttcctgggcatcgtggctgaggtgctggtgctggtcaccatcatcttcatctacgagaagcgccggaagcccgaggacgtcctggatgatgacgacgccggctctgcacccctgaagagcagcgggcagcaccagaatgacaaaggcaagaacgtccgccagaggaactcttcctgaggcaggtggcccgaggacgctccctgctccacgtctgcgccgccgccggagtccactcccagtgcttgcaagattccaagttctcacctcttaaagaaaacccaccccgtagattcccatcatacacttccttcttttttaaaaaagttgggttttctccattcaggattctgttccttaggtttttttccttctgaagtgtttcacgagagcccgggagctgctgccctgcggccccgtctgtggctttcagcctctgggtctgagtcatggccgggtgggcggcacagccttctccactggccggagtcagtgccaggtccttgccctttgtggaaagtcacaggtcacacgaggggccccgtgtcctgcctgtctgaagccaatgctgtctggttgcgccatttttgtgcttttatgtttaattttatgagggccacgggtctgtgttcgactcagcctcagggacgactctgacctcttggccacagaggactcacttgcccacaccgagggcgaccccgtcacagcctcaagtcactcccaagccccctccttgtctgtgcatccgggggcagctctggagggggtttgctggggaactggcgccatcgccgggactccagaaccgcagaagcctccccagctcacccctggaggacggccggctctctatagcaccagggctcacgtgggaacccccctcccacccaccgccacaataaagatcgcccccacctccaccctcaaaaaaaaaaaaaaaaaaaa

SEQ ID NO: 14081 - DNA, 1766 bp, Homo sapiens
ttcggcttagtctgcggtcctcttgcattgcgactccgagtttaacttccaacacacactttcaacctccaagagacgcccccacctgtgtcgccccaatagcgacttttctcaccgtggtcgccgcggaacttcaagggtccttcctacccgcgttgctgagagtctgggtttacgcgtcacctcgggcgggacccgatcctccgctcctgaggcccccacaatgaagcagtcggacgcgtctccccaagaaagccggcacagtcttcactaccgtagaagaccttggctccaagatactcctcacctgctccttgaatgacagcgccacagaggtcacagggcaccgctggctgaaggggggcgtggtgctgaaggaggacgcgctgcccggccagaaaacggagttcaaggtggactccgacgaccagtggggagagtactcctgcgtcttcctccccgagcccatgggcacggccaacatccagctccacgggcctcccagagtgaaggctgtgaagtcgtcagaacacatcaacgagggggagacggccatgctggtctgcaagtcagagtccgtgccacctgtcactgactgggcctggtacaagatcactgactctgaggacaaggccctcatgaacggctccgagagcaggttcttcgtgagttcctcgcagggccggtcagagctacacattgagaacctgaacatggaggccgaccccggccagtaccggtgcaacggcaccagctccaagggctccgaccaggccatcatcacgctccgcgtgcgcagccacctggccgccctctggcccttcctgggcatcgtggctgaggtgctggtgctggtcaccatcatcttcatctacgagaagcgccggaagcccgaggacgtcctggatgatgacgacgccggctctgcacccctgaagagcagcgggcagcaccagaatgacaaaggcaagaacgtccgccagaggaactcttcctgaggcaggtggcccgaggacgctccctgctccacgtctgcgccgccgccggagtccactcccagtgcttgcaagattccaagttctcacctcttaaagaaaacccaccccgtagattcccatcatacacttccttcttttttaaaaaagttgggttttctccattcaggattctgttccttaggtttttttccttctgaagtgtttcacgagagcccgggagctgctgccctgcggccccgtctgtggctttcagcctctgggtctgagtcatggccgggtgggcggcacagccttctccactggccggagtcagtgccaggtccttgccctttgtggaaagtcacaggtcacacgaggggccccgtgtcctgcctgtctgaagccaatgctgtctggttgcgccatttttgtgcttttatgtttaattttatgagggccacgggtctgtgttcgactcagcctcagggacgactctgacctcttggccacagaggactcacttgcccacaccgagggcgaccccgtcacagcctcaagtcactcccaagccccctccttgtctgtgcatccgggggcagctctggagggggtttgctggggaactggcgccatcgccgggactccagaaccgcagaagcctccccagctcacccctggaggacggccggctctctatagcaccagggctcacgtgggaacccccctcccacccaccgccacaataaagatcgcccccacctccaccctcaaaaaaaaaaaaaaaaaaaa

SEQ ID NO: 14082 - DNA, 7037 bp, Homo sapiens
gctgcgtggagcggcggagccggagggaagcaaaggaccgtctgcgctgctgtccccgccccgcgcgctctgcgcccctcgtccctggcggtcgctccgaagctcagccctcttgcctgccccggagctgtcccgggctagccgagaagagagcggccggcaagtttgggcgcgcgcaggcggcgggccgcgggcactgggcgcctcgctggggcggggggaggtggctaccgctcccggcttggcgtcccgcgcgcacttcggcgatggcttttccgccgcggcgacggctgcgcctcggtccccgcggcctcccgcttcttctctcgggactcctgctacctctgtgccgcgccttcaacctagacgtggacagtcctgccgagtactctggccccgagggaagttacttcggcttcgccgtggatttcttcgtgcccagcgcgtcttcccggatgtttcttctcgtgggagctcccaaagcaaacaccacccagcctgggattgtggaaggagggcaggtcctcaaatgtgactggtcttctacccgccggtgccagccaattgaatttgatgcaacaggcaatagagattatgccaaggatgatccattggaatttaagtcccatcagtggtttggagcatctgtgaggtcgaaacaggataaaattttggcctgtgccccattgtaccattggagaactgagatgaaacaggagcgagagcctgttggaacatgctttcttcaagatggaacaaagactgttgagtatgctccatgtagatcacaagatattgatgctgatggacagggattttgtcaaggaggattcagcattgattttactaaagctgacagagtacttcttggtggtcctggtagcttttattggcaaggtcagcttatttcggatcaagtggcagaaatcgtatctaaatacgaccccaatgtttacagcatcaagtataataaccaattagcaactcggactgcacaagctatttttgatgacagctatttgggttattctgtggctgtcggagatttcaatggtgatggcatagatgactttgtttcaggagttccaagagcagcaaggactttgggaatggtttatatttatgatgggaagaacatgtcctccttatacaattttactggcgagcagatggctgcatatttcggattttctgtagctgccactgacattaatggagatgattatgcagatgtgtttattggagcacctctcttcatggatcgtggctctgatggcaaactccaagaggtggggcaggtctcagtgtctctacagagagcttcaggagacttccagacgacaaagctgaatggatttgaggtctttgcacggtttggcagtgccatagctcctttgggagatctggaccaggatggtttcaatgatattgcaattgctgctccatatgggggtgaagataaaaaaggaattgtttatatcttcaatggaagatcaacaggcttgaacgcagtcccatctcaaatccttgaagggcagtgggctgctcgaagcatgccaccaagctttggctattcaatgaaaggagccacagatatagacaaaaatggatatccagacttaattgtaggagcttttggtgtagatcgagctatcttatacagggccagaccagttatcactgtaaatgctggtcttgaagtgtaccctagcattttaaatcaagacaataaaacctgctcactgcctggaacagctctcaaagtttcctgttttaatgttaggttctgcttaaaggcagatggcaaaggagtacttcccaggaaacttaatttccaggtggaacttcttttggataaactcaagcaaaagggagcaattcgacgagcactgtttctctacagcaggtccccaagtcactccaagaacatgactatttcaagggggggactgatgcagtgtgaggaattgatagcgtatctgcgggatgaatctgaatttagagacaaactcactccaattactatttttatggaatatcggttggattatagaacagctgctgatacaacaggcttgcaacccattcttaaccagttcacgcctgctaacattagtcgacaggctcacattctacttgactgtggtgaagacaatgtctgtaaacccaagctggaagtttctgtagatagtgatcaaaagaagatctatattggggatgacaaccctctgacattgattgttaaggctcagaatcaaggagaaggtgcctacgaagctgagctcatcgtttccattccactgcaggctgatttcatcggggttgtccgaaacaatgaagccttagcaagactttcctgtgcatttaagacagaaaaccaaactcgccaggtggtatgtgaccttggaaacccaatgaaggctggaactcaactcttagctggtcttcgtttcagtgtgcaccagcagtcagagatggatacttctgtgaaatttgacttacaaatccaaagctcaaatctatttgacaaagtaagcccagttgtatctcacaaagttgatcttgctgttttagctgcagttgagataagaggagtctcgagtcctgatcatatctttcttccgattccaaactgggagcacaaggagaaccctgagactgaagaagatgttgggccagttgttcagcacatctatgagctgagaaacaatggtccaagttcattcagcaaggcaatgctccatcttcagtggccttacaaatataataataacactctgttgtatatccttcattatgatattgatggaccaatgaactgcacttcagatatggagatcaaccctttgagaattaagatctcatctttgcaaacaactgaaaagaatgacacggttgccgggcaaggtgagcgggaccatctcatcactaagcgggatcttgccctcagtgaaggagatattcacactttgggttgtggagttgctcagtgcttgaagattgtctgccaagttgggagattagacagaggaaagagtgcaatcttgtacgtaaagtcattactgtggactgagacttttatgaataaagaaaatcagaatcattcctattctctgaagtcgtctgcttcatttaatgtcatagagtttccttataagaatcttccaattgaggatatcaccaactccacattggttaccactaatgtcacctggggcattcagccagcgcccatgcctgtgcctgtgtgggtgatcattttagcagttctagcaggattgttgctactggctgttttggtatttgtaatgtacaggatgggcttttttaaacgggtccggccacctcaagaagaacaagaaagggagcagcttcaacctcatgaaaatggtgaaggaaactcagaaacttaactgcagtttttaagttatgctacatcttgacccactagaattagcaactttattatagatttaaactttcttcatgaggagtaaaaatccaaggctttactgctgatagtgctaattggcattaaccacaaaatgagaattatatttgtcaaccttctccttataaataagttcagacatacatttaataacatagggtgacttgtgtttttaggtatttaaataataaaatttcaagggatagtttttattcaatgtatataagacaggtagtgcctgatttactactttatataaaatagtacctccttcagttactgtttctgatttaatgtacggaactttatttgttgttgttgttgttgttgttgttgttgttttaaagcagtccaaatttggaccttagcaatcatgtcttttgtataggtacttaatgttaatacatattacactacagtttacttttcagaatactaaagactttataactgcatgaacttggatttttttaatcactcatatggtagaattttataaacacatacatgataccatccaaattcttgcttttaataacaaaggtacaatattttgttttagtatgaaaatctggtagatcctattacacttctgtttatattaaatccacaatattttattacatttttaacttgtataaattttaggtcaaatccttcaagccaacctatactaaaaattagttccataatcacaaatggctcttttgtgtaattgtttaatttcacctgaatatcataatgcttaaagccatatggagttggaaattatttccaaagcatatttattccattgttttagtctggctatttacagtataaaaaaagcatttttattaaaatactgtgtagttctttgagatagttgcttatgcatatagtaagtattacattcttagagtagagcagagtttttagttagtattaatttattttcctccattcatgtacttttccttatatttccaaaactgttactgagaatgggtcaagatcagtgagaaatctttacagttgacaggaacctggaccccttaccccaactttatgagtaatgcttggaataaaaactcttaaggcaactcactgatttacttctagcaatagcatgatgttacaggaatattacctctgtttaagcaaggtaatgtgtaaaatcagtctcggctgtcagaataacttctaaaaggtatttttataagcagttcaagttactgaaaaccttttaaacctttctgaagttcgttagtataaattacttttctaggattattaataaaagccacataggtggcaagttgtagttttatatggctctgtagagtggtgaaccttctagaggaatatatgatttattcacagttcctcaaggcctggggatgatgatcagttatacctatttttgtgcaattacatcatgttgtacattagaaatggagagtttaatagctctttaactgctgtcctcattaggtaatgataaatatttcccttaaataattgactattttgctgtgttttaaaaatgattgaaatttatcttgccatatctcataatttcatgcacaagttgactgagctaatcttgagaatatattcgtaaaataggagcacatttagttgaggtatacaaggtaggactctagacaaaaccttctattttagctttagtgaatttcaaaagtaatgggtcttggagtatagatttttattagtagcttgaaagagcttaatcatatgcagtaagtatttttattaccaataaatttaaaattttttaagaaaaatatttttatcctagggccaagtgttgcctgccaccaatcagtaagttagtctataacaaattttaccctaacagttttaccacctagtaacagtcatttctgaaaatatgttggatagaaagtcactctttggcaaaagtgttagaatttgcttttgtgccatctattccttttatggcatctatcttgaaagtaatcttgtattggagattgaaagatgctgtaatttagaaattaacatgatatcttaaattacctttatgaaatatagttttgtataatagcatagattttccttcaaaaaatgaacatttatatatctacaaaaatatggagaagagtaatttgaaagcctactttctgaagaaaatggtgggatttttttttatcatgattaaatatcaaaaaattgccctatgaaaactttaaatctctaaaacatttgaaatactaccatatttgtgatttattgagaataaaaatccattttgaaatgtaaaatttttatgatctgattcagttttaagaaaacatgaatgaactagaagatattaaaaacatttgacattggtaagaaatattgatactgatattgatttttatataggtatttatttcagaattgatattttgagaaaaatacatgtgagtcattttttctgtttctcttttctcttaacgattatcactgtaattctgaatctgaaaggtaaaacaattagtcaaaatattattgccatcattctacctgtgttatgaaactacttattcatagttaattctcattaacacttacatttccataaagaaaactcaagtattaataaaagagactttactggcttaagagggctgtgaaagatttttgatagtgaatcatgaccctaagggagagatttgtgtgataaaagtattgtatataatagatcagcgatttttgtaaggcaaacagaatttgtaagttggcagatcttcctaagttgcaaaatgtaatgatgagcttggtggagaagaatgagtcgttcttggaatacctatgtgcagccactacccatctcaatgtcaccttgtttgcattcttggatagcttgtatatgtagtagtttgatgaataatttaaagaaaaacacctaaaatttgaaaaatgattgtaggatcaaaaaaggcagatgaaattacttaatactcagtgttttggagagtattccttttagtttgttggttggctggtttgaacgatagaaatatgcagcatgcaatatatgcttatatttcattttaatttctgatatataatgaacttcttgggagaggtactgaatctttgatgttttttgtcattgttctcaagtgcaatataacaatgtaaccaaatctagataatttcaaagttgtcattaatttagtaagcctaatataaacaaatatttgtattatttttgttagcaggaaagagtgattaagtgaggttatttacccctaaatggtccattctgcattgtatttcaggctggaaatgaattattctttaccagttttgaaacactttgaaatatcctaaggtaacttggaagctgtgtagtatatcaaattaatttgctacctaataacatagaaagtaaatatctttgtggtcacccacattgggtgagacagaaaatgaatctgttctaaaatttgtaatttgctaacttgatttgagttagtgaaaactggtacagtgttctgcttgatttacaacatgtaacttgtgactgtacaataaacataagcatatggtaccaaaaaaaaaaaaaaaa

SEQ ID NO: 14083 - DNA, 1402 bp, Homo sapiens
aagatggctgtggagctgggcgtgctgctcgtccggccccggcccggaaccgggctgggtagagtgatgcggaccctcctgctggtgctgtggctggcgacgcgcggaagcgcgctctactttcacatcggagagacggagaagaagtgctttattgaggagatcccggacgagaccatggtcataggaaactaccggacgcagctgtatgacaagcagcgggaggagtaccagccggccaccccggggcttggcatgtttgtggaggtgaaggacccagaggacaaggtcatcctggcccggcagtatggctccgagggcaggttcactttcacttcccatacccctggtgagcaccagatctgtcttcactccaattccaccaagttctccctctttgctggaggcatgctgagagttcacctggacatccaggtaggtgaacatgccaatgactatgcagaaattgctgctaaagacaagttgagtgagttgcagctacgagtgcgacagctggtggaacaagtggagcagatccagaaagagcagaactaccagcggtggcgagaggagcgcttccggcagaccagtgagagcaccaaccagcgggtgctgtggtggtccattctgcagaccctcatcctcgtggccatcggtgtctggcagatgcggcacctcaagagcttctttgaagccaagaagcttgtgtagctgtcccaggcgtcacaacccatcctcccaggctgggggagaaaggacctcctggaactgacttcttctgtcaggaggactggtttccagccatacctgttctggaagggagaggggctggaggcacccacaggcacaagctgaaggcagcagcttggctaatactgagcaggtagtggggcaaattcctgccctctctctctggcctctgggccgtttggtagtaatcacccaagggctggtaaagcccctcctcttggcacctcagaatcacagtgttactgatcagggatgtgaggctgctgttgggggtggggggaggggaatgggcaggcaagccagtcttctgtcttcctttgctaacttagggttttgagcaggttggggtatggtgcctgtcatacccacctgccaccctgggaacctcactgttctctctttcagcctagacctgctgatccagggtgtgtgtgagttgagggtgggtggaggggtttgcagtgtgggaatgtggccctgcagttgacctgagctgcttcacatggttgtccattctggggcttaaagaactgggaccagaccaagtagaggccttggtgctggttggggtggggcctgcagagtcttagttactgatttcattttcaataaatgtaggtttgttacatgagtttcccaataaaaaaaaaaa

SEQ ID NO: 14084 - DNA, 1093 bp, Homo sapiens
ggctctcttcctgtctttgtggctccggaaaggcgtttgggatgccaacgatgaggctgctgtcatttgtggtgttggctctatttgctgtcactcaagcagaggaaggagccaggcttttggcttccaaatcactgctgaacagatacgccgtggagggacgagacctgaccttgcagtacaacatctacaatgttggctcaagtgctgcattagacgtggaactatctgatgattccttccctccagaagactttggcattgtgtctggaatgctcaatgtcaaatgggaccggattgcccctgctagcaatgtctcccacactgtggtcctgcgccctctcaaggctggttatttcaacttcacctcggcaacaattacttacctggcccaggaggatgggcccgttgtgattggctctaccagtgcacctggacagggaggaatcctggctcagcgggagtttgacaggcgattctcccctcattttctggactgggcagcctttggggtcatgacccttccctccatcggcatccccctgctattgtggtactccagcaagaggaaatatgacactcccaaaacgaagaagaactgattggggcttccacagccctcctctcccaagaaatccaggctcctctcccaagaaatccaggtgctttccagactccaaagggtatcttaaatgcaatctcttctctcttagcccttggccactttctcctggatcctgccctgctctcagccatagtgaaggaccagccctaggagtctgcgagagcctccttggttccatcgtgaagccataaacaggaatgcctttggcaatagccttgagcctagagggccctctgatgccccactgaggtgctgttggtttattgctggcaacgtgaattctctcaggggtctaggaggggcattttggagactgcctgacaccacccctatcccctgcctccccctctcagaagagggtggaagatgaaatgaaagctatgggactcttggaggatacccagtgtctattctgggttagagaagtgcttactaaggggttttctaataaaaacaaatgccaattgc

SEQ ID NO: 14085 - DNA, 3502 bp, Homo sapiens
acatgacagcagatccgcggaagggcagaatgggactccaagcctgcctcctagggctctttgccctcatcctctctggcaaatgcagttacagcccggagcccgaccagcggaggacgctgcccccaggctgggtgtccctgggccgtgcggaccctgaggaagagctgagtctcacctttgccctgagacagcagaatgtggaaagactctcggagctggtgcaggctgtgtcggatcccagctctcctcaatacggaaaatacctgaccctagagaatgtggctgatctggtgaggccatccccactgaccctccacacggtgcaaaaatggctcttggcagccggagcccagaagtgccattctgtgatcacacaggactttctgacttgctggctgagcatccgacaagcagagctgctgctccctggggctgagtttcatcactatgtgggaggacctacggaaacccatgttgtaaggtccccacatccctaccagcttccacaggccttggccccccatgtggactttgtggggggactgcaccgttttcccccaacatcatccctgaggcaacgtcctgagccgcaggtgacagggactgtaggcctgcatctgggggtaaccccctctgtgatccgtaagcgatacaacttgacctcacaagacgtgggctctggcaccagcaataacagccaagcctgtgcccagttcctggagcagtatttccatgactcagacctggctcagttcatgcgcctcttcggtggcaactttgcacatcaggcatcagtagcccgtgtggttggacaacagggccggggccgggccgggattgaggccagtctagatgtgcagtacctgatgagtgctggtgccaacatctccacctgggtctacagtagccctggccggcatgagggacaggagcccttcctgcagtggctcatgctgctcagtaatgagtcagccctgccacatgtgcatactgtgagctatggagatgatgaggactccctcagcagcgcctacatccagcgggtcaacactgagctcatgaaggctgccgctcggggtctcaccctgctcttcgcctcaggtgacagtggggccgggtgttggtctgtctctggaagacaccagttccgccctaccttccctgcctccagcccctatgtcaccacagtgggaggcacatccttccaggaacctttcctcatcacaaatgaaattgttgactatatcagtggtggtggcttcagcaatgtgttcccacggccttcataccaggaggaagctgtaacgaagttcctgagctctagcccccacctgccaccatccagttacttcaatgccagtggccgtgcctacccagatgtggctgcactttctgatggctactgggtggtcagcaacagagtgcccattccatgggtgtccggaacctcggcctctactccagtgtttggggggatcctatccttgatcaatgagcacaggatccttagtggccgcccccctcttggctttctcaacccaaggctctaccagcagcatggggcaggactctttgatgtaacccgtggctgccatgagtcctgtctggatgaagaggtagagggccagggtttctgctctggtcctggctgggatcctgtaacaggctggggaacacccaacttcccagctttgctgaagactctactcaacccctgaccctttcctatcaggagagatggcttgtcccctgccctgaagctggcagttcagtcccttattctgccctgttggaagccctgctgaaccctcaactattgactgctgcagacagcttatctccctaaccctgaaatgcggtgagcttgacttgactcccaaccctaccatgctccatcatactcaggtctccctactcctgccttagattcctcaataagatgctgtaactagcattttttgaatgcctctccctccgcatctcatctttctcttttcaatcaggcttttccaaagggttgtatacagactctgtgcactatttcacttgatattcattccccaattcactgcaaggagacctctactgtcaccgtttactctttcctaccctgacatccagaaacaatggcctccagtgcatacttctcaatctttgctttatggcctttccatcatagttgcccactccctctccttacttagcttccaggtcttaacttctctgactactcttgtcttcctctctcatcaatttctgcttcttcatggaatgctgaccttcattgctccatttgtagatttttgctcttctcagtttactcattgtcccctggaacaaatcactgacatctacaaccattaccatctcactaaataagactttctatccaataatgattgatacctcaaatgtaagatgcgtgatactcaacatttcatcgtccaccttcccaaccccaaacaattccatctcgtttcttcttggtaaatgatgctatgctttttccaaccaagccagaaacctgtgtcatcttttcaccccaccttcaatcaacaagtcctcaatcaacaagtcctactgactgcacatcttaaatatatctttatcagtccacaagtccttccaattatatttcccaagtatatctagaacttatccacttatatccccactgctactaccttagtttagggctatattctcttgaaaaaaagtgtccttacttcctgccaatccccaagtcatcttccagagtaaaatgcaaatcccatcaggccacttggatgaaaacccttcaaggattactggatagaattcaggctttcccctccagcccccaatcatagctcacaaaccttccttgctatttgttcttaagtaaaaaatcatttttcctcctccctccccaaaccccaaggaactctcactcttgctcaagctgttccgtccccttaccacccctgatacaactgccaggttaatttccagaattcttgcaagactcagttcagaagtcaccttctttcgtgaatgttttgattccctgaggctactttattttggtatggctgaaaaatcctagattttctaaacaaaacctgtttgaatcttggttctgatatggactaggagagagactgggtcaagtaagcttatctccctgaggctgtttcctcgtctgttaagtgtgaatatcaatacctgcctttcataatcaccagggaataaagtggaataatgttgataacagtgcttggcacctggaagtaggtggcagatgttaacgcccttcctcccttgcactgcgccccctgtgcctacctctagcattgtaacgaccacatagtattgaaatggccagtttacttgtctgccttcctttccaagaccgttggtgcctagaggactagaatcgtgtcctatttaactttgtgttcccaggtcctagctcaggagttggcaaataagaattaaatgtctgctacaccgaaacaaa

SEQ ID NO: 14086 - DNA, 2944 bp, Homo sapiens
cgcctggaaacacgaacttccggtctcttaggctccgggccacagagacggtgtcagtggtagcctagagaggccgctaacagacaggagccgaacgggggcttccgctcagcagagaggcaagatggctacggcagggggtggctctggggctgacccgggaagtcggggtctccttcgccttctgtctttctgcgtcctactagcaggtttgtgcaggggaaactcagtggagaggaagatatatatccccttaaataaaacagctccctgtgttcgcctgctcaacgccactcatcagattggctgccagtcttcaattagtggagacacaggggttatccacgtagtagagaaagaggaggacctacagtgggtattgactgatggccccaaccccccttacatggttctgctggagagcaagcattttaccagggatttaatggagaagctgaaagggagaaccagccgaattgctggtcttgcagtgtccttgaccaagcccagtcctgcctcaggcttctctcctagtgtacagtgcccaaatgatgggtttggtgtttactccaattcctatgggccagagtttgctcactgcagagaaatacagtggaattcgctgggcaatggtttggcttatgaagactttagtttccccatctttcttcttgaagatgaaaatgaaaccaaagtcatcaagcagtgctatcaagatcacaacctgagtcagaatggctcagcaccaaccttcccactatgtgccatgcagctcttttcacacatgcatgctgtcatcagcactgccacctgcatgcggcgcagctccatccaaagcaccttcagcatcaacccagaaatcgtctgtgaccccctgtctgattacaatgtgtggagcatgctaaagcctataaatacaactgggacattaaagcctgacgacagggttgtggttgctgccacccggctggatagtcgttcctttttctggaatgtggccccaggggctgaaagcgcagtggcttcctttgtcacccagctggctgctgctgaagctttgcaaaaggcacctgatgtgaccaccctgccccgcaatgtcatgtttgtcttctttcaaggggaaacttttgactacattggcagctcgaggatggtctacgatatggagaagggcaagtttcccgtgcagttagagaatgttgactcatttgtggagctgggacaggtggccttaagaacttcattagagctttggatgcacacagatcctgtttctcagaaaaatgagtctgtacggaaccaggtggaggatctcctggccacattggagaagagtggtgctggtgtccctgctgtcatcctcaggaggccaaatcagtcccagcctctcccaccatcttccctgcagcgatttcttcgagctcgaaacatctctggcgttgttctggctgaccactctggtgccttccataacaaatattaccagagtatttacgacactgctgagaacattaatgtgagctatcccgaatggctgagccctgaagaggacctgaactttgtaacagacactgccaaggccctggcagatgtggccacggtgctgggacgtgctctgtatgagcttgcaggaggaaccaacttcagcgacacagttcaggctgatccccaaacggttacccgcctgctctatgggttcctgattaaagccaacaactcatggttccagtctatcctcaggcaggacctaaggtcctacttgggtgacgggcctcttcaacattacatcgctgtctccagccccaccaacaccacttatgttgtacagtatgccttggcaaatttgactggcacagtggtcaacctcacccgagagcagtgccaggatccaagtaaagtcccaagtgaaaacaaggatctgtatgagtactcatgggtccagggccctttgcattctaatgagacggaccgactcccccggtgtgtgcgttctactgcacgattagccagggccttgtctcctgcctttgaactgagtcagtggagctctactgaatactctacatggactgagagccgctggaaagatatccgtgcccggatatttctcatcgccagcaaagagcttgagttgatcaccctgacagtgggcttcggcatcctcatcttctccctcatcgtcacctactgcatcaatgccaaagctgatgtccttttcattgctccccgggagccaggagctgtgtcatactgaggaggaccccagcttttcttgccagctcagcagttcacttcctagagcatctgtcccactgggacacaaccactaatttgtcactggaacctccctgggcctgtctcagattgggattaacataaaagagtggaactatccaaaagagacagggagaaataaataaattgcctcccttcctccgctcccctttcccatcaccccttccccatttcctcttccttctctactcatgccagattttgggattacaaatagaagcttcttgctcctgtttaactccctagttacccaccctaatttgcccttcaggacccttctactttttccttcctgccctgtacctctctctgctcctcacccccacccctgtacccagccaccttcctgactgggaaggacataaaaggtttaatgtcagggtcaaactacattgagcccctgaggacaggggcatctctgggctgagcctactgtctccttcccactgtcctttctccaggccctcagatggcacattagggtgggcgtgctgcgggtgggtatcccacctccagcccacagtgctcagttgtactttttattaagctgtaatatctatttttgtttttgtctttttcctttattctttttgtaaatatatatataatgagtttcattaaaatagattatcccacacgaaaaaaaaaa

SEQ ID NO: 14087 - DNA, 3527 bp, Homo sapiens
gctgtagtcgcggagctgtgtctgttcccaggagtccttcggcggctgttgtgtcgggagcctgatcgcgatggggacaaaggcgcaagtcgagaggaaactgttgtgcctcttcatattggcgatccttcctgagaataatcctgtgaagttgtcctgtgcctactcgggcttttcttctccccgtgcagcttcctatgaggaccgggtgaccttcttgccaactggtatcaccttcaagtccgtgacacgggaagacactgggacatacacttgtatggtctctgaggaaggcggcaacagctatggggaggtcaaggtcaagctcatcgtgcttgtgcctccatccaagcctacagttaacatcccctcctctgccaccattgggaaccgggcagtgctgacatgctcagaacaagatggttccccaccttctgaatacacctggttcaaagatgggatagtgatgcctacgaatcccaaaagcacccgtgccttcagcaactcttcctatgtcctgaatcccacaacaggagagctggtctttgatcccctgtcagcctctgatactggagaatacagctgtgaggcacggaatgggtatgggacacccatgacttcaaatgctgtgcgcatggaagctgtggagcggaatgtgggggtcatcgtggcagccgtccttgtaaccctgattctcctgggaatcttggtttttggcatctggtttgcctatagccgaggccactttgacagaacaaagaaagggacttcgagtaagaaggtgatttacagccagcctagtgcccgaagtgaaggagaattcaaacagacctcgtcattcctggtgtgagcctggtcggctcaccgcctatcatctgcatttgccttactcaggtgctaccggactctggcccctgatgtctgtagtttcacaggatgccttatttgtcttctacaccccacagggccccctacttcttcggatgtgtttttaataatgtcagctatgtgccccatcctccttcatgccctccctccctttcctaccactgctgagtggcctggaacttgtttaaagtgtttattccccatttctttgagggatcaggaaggaatcctgggtatgccattgacttcccttctaagtagacagcaaaaatggcgggggtcgcaggaatctgcactcaactgcccacctggctggcagggatctttgaataggtatcttgagcttggttctgggctctttccttgtgtactgacgaccagggccagctgttctagagcgggaattagaggctagagcggctgaaatggttgtttggtgatgacactggggtccttccatctctggggcccactctcttctgtcttcccatgggaagtgccactgggatccctctgccctgtcctcctgaatacaagctgactgacattgactgtgtctgtggaaaatgggagctcttgttgtggagagcatagtaaattttcagagaacttgaagccaaaaggatttaaaaccgctgctctaaagaaaagaaaactggaggctgggcgcagtggctcacgcctataatcccagaggctgaggcaggcggatcacctgaggtcaggagttcaagatcagcctgaccaacatggagaaaccctactaaaaatacaaagttagccaggcatagtggtgcatgcctgtaatcccagctgctcaggagcctggcaacaagagcaaaactccagctcaaaaaaaaaaagaaagaaaagaaagctggagctggtggcttaggccatcacccttcccttggctggaactactggacagacccttttgagatgtgcctgtggtgctgtggagatgtgtgtagtggtcttagctctttgttgagcttgtgtgtgtgttgtgtagtcttagctgtatgctgaaattgggcgtgtgttggagggcttcttagctctttggtgagattgtatttctatgtgtttgtatcagctgaatgttgctggaaataaaaccttggtttgtcaaggctcttttttgtgggaagtaagtaggggaaaaggtctttgagggttcctaggctcctttgtacaacaggaaaatgcctcaaagccttgcttcccagcaacctggggctggttcccagtgcctggtcctgccccttcctggttcttatctcaaggcagagcttctgaatttcaggccttcattccagagccctcttgtggccaggccttcctttgctggaggaaggtacacagggtgaagctgatgctgtacttgggggatctccttggcctgttccaccaagtgagagaaggtacttactcttgtacctcctgttcagccaggtgcattaacagacctccctacagctgtaggaactactgtcccagagctgaggcaaggggatttctcaggtcatttggagaacaagtgctttagtagtagtttaaagtagtaactgctactgtatttagtggggtggaattcagaagaaatttgaagaccagatcatgggtggtctgcatgtgaatgaacaggaatgagccggacagcctggctgtcattgctttcttcctccccatttggacccttctctgcccttacatttttgtttctccatctaccaccatccaccagtctatttattaacttagcaagaggacaagtaaagggccctcttggcttgattttgcttctttctttctgtggaggatatactaagtgcgactttgccctatcctatttggaaatccctaacagaattgagttttctattaaggatccaaaaagaaaaacaaaatgctaatgaagccatcagtcaagggtcacatgccaataaacaataaattttccagaagaaatgaaatccaactagacaaataaagtagagcttatgaaatggttcagtaaagatgagtttgttgttttttgttttgttttgttttgtttttttaaagacggagtctcgctctgtcacccaggctggagtgcagtggtatgatcttggctcactgtaacctccgcctcccgggttcaagccattctcctgcctcagtctcctgagtagctgggattacgggtgcgtgccaccatgcctggctaatttttgtgtttttagtagagacagggtttcaccatgttggtcgggctggtctcaaactcctgacctcttgatccgcctgccttggcctcccaaagtgatgggattacagatgtgagccaccgtgcctagccaaggatgagatttttaaagtatgtttcagttctgtgtcatggttggaagacagagtaggaaggatatggaaaaggtcatggggaagcagaggtgattcatggctctgtgaatttgaggtgaatggttccttattgtctaggccacttgtgaagaatatgagtcagttattgccagccttggaatttacttctctagcttacaatggaccttttgaactggaaaacaccttgtctgcattcactttaaaatgtcaaaactaatttttataataaatgtttattttcacattga

SEQ ID NO: 14088 - DNA, 3660 bp, Homo sapiens
gctgtagtcgcggagctgtgtctgttcccaggagtccttcggcggctgttgtgtcgggagcctgatcgcgatggggacaaaggcgcaagtcgagaggaaactgttgtgcctcttcatattggcgatcctgttgtgctccctggcattgggcagtgttacagtgcactcttctgaacctgaagtcagaattcctgagaataatcctgtgaagttgtcctgtgcctactcgggcttttcttctccccgtgtggagtggaagtttgaccaaggagacaccaccagactcgtttgctataataacaagatcacagcttcctatgaggaccgggtgaccttcttgccaactggtatcaccttcaagtccgtgacacgggaagacactgggacatacacttgtatggtctctgaggaaggcggcaacagctatggggaggtcaaggtcaagctcatcgtgcttgtgcctccatccaagcctacagttaacatcccctcctctgccaccattgggaaccgggcagtgctgacatgctcagaacaagatggttccccaccttctgaatacacctggttcaaagatgggatagtgatgcctacgaatcccaaaagcacccgtgccttcagcaactcttcctatgtcctgaatcccacaacaggagagctggtctttgatcccctgtcagcctctgatactggagaatacagctgtgaggcacggaatgggtatgggacacccatgacttcaaatgctgtgcgcatggaagctgtggagcggaatgtgggggtcatcgtggcagccgtccttgtaaccctgattctcctgggaatcttggtttttggcatctggtttgcctatagccgaggccactttgacagaacaaagaaagggacttcgagtaagaaggtgatttacagccagcctagtgcccgaagtgaaggagaattcaaacagacctcgtcattcctggtgtgagcctggtcggctcaccgcctatcatctgcatttgccttactcaggtgctaccggactctggcccctgatgtctgtagtttcacaggatgccttatttgtcttctacaccccacagggccccctacttcttcggatgtgtttttaataatgtcagctatgtgccccatcctccttcatgccctccctccctttcctaccactgctgagtggcctggaacttgtttaaagtgtttattccccatttctttgagggatcaggaaggaatcctgggtatgccattgacttcccttctaagtagacagcaaaaatggcgggggtcgcaggaatctgcactcaactgcccacctggctggcagggatctttgaataggtatcttgagcttggttctgggctctttccttgtgtactgacgaccagggccagctgttctagagcgggaattagaggctagagcggctgaaatggttgtttggtgatgacactggggtccttccatctctggggcccactctcttctgtcttcccatgggaagtgccactgggatccctctgccctgtcctcctgaatacaagctgactgacattgactgtgtctgtggaaaatgggagctcttgttgtggagagcatagtaaattttcagagaacttgaagccaaaaggatttaaaaccgctgctctaaagaaaagaaaactggaggctgggcgcagtggctcacgcctataatcccagaggctgaggcaggcggatcacctgaggtcaggagttcaagatcagcctgaccaacatggagaaaccctactaaaaatacaaagttagccaggcatagtggtgcatgcctgtaatcccagctgctcaggagcctggcaacaagagcaaaactccagctcaaaaaaaaaaagaaagaaaagaaagctggagctggtggcttaggccatcacccttcccttggctggaactactggacagacccttttgagatgtgcctgtggtgctgtggagatgtgtgtagtggtcttagctctttgttgagcttgtgtgtgtgttgtgtagtcttagctgtatgctgaaattgggcgtgtgttggagggcttcttagctctttggtgagattgtatttctatgtgtttgtatcagctgaatgttgctggaaataaaaccttggtttgtcaaggctcttttttgtgggaagtaagtaggggaaaaggtctttgagggttcctaggctcctttgtacaacaggaaaatgcctcaaagccttgcttcccagcaacctggggctggttcccagtgcctggtcctgccccttcctggttcttatctcaaggcagagcttctgaatttcaggccttcattccagagccctcttgtggccaggccttcctttgctggaggaaggtacacagggtgaagctgatgctgtacttgggggatctccttggcctgttccaccaagtgagagaaggtacttactcttgtacctcctgttcagccaggtgcattaacagacctccctacagctgtaggaactactgtcccagagctgaggcaaggggatttctcaggtcatttggagaacaagtgctttagtagtagtttaaagtagtaactgctactgtatttagtggggtggaattcagaagaaatttgaagaccagatcatgggtggtctgcatgtgaatgaacaggaatgagccggacagcctggctgtcattgctttcttcctccccatttggacccttctctgcccttacatttttgtttctccatctaccaccatccaccagtctatttattaacttagcaagaggacaagtaaagggccctcttggcttgattttgcttctttctttctgtggaggatatactaagtgcgactttgccctatcctatttggaaatccctaacagaattgagttttctattaaggatccaaaaagaaaaacaaaatgctaatgaagccatcagtcaagggtcacatgccaataaacaataaattttccagaagaaatgaaatccaactagacaaataaagtagagcttatgaaatggttcagtaaagatgagtttgttgttttttgttttgttttgttttgtttttttaaagacggagtctcgctctgtcacccaggctggagtgcagtggtatgatcttggctcactgtaacctccgcctcccgggttcaagccattctcctgcctcagtctcctgagtagctgggattacgggtgcgtgccaccatgcctggctaatttttgtgtttttagtagagacagggtttcaccatgttggtcgggctggtctcaaactcctgacctcttgatccgcctgccttggcctcccaaagtgatgggattacagatgtgagccaccgtgcctagccaaggatgagatttttaaagtatgtttcagttctgtgtcatggttggaagacagagtaggaaggatatggaaaaggtcatggggaagcagaggtgattcatggctctgtgaatttgaggtgaatggttccttattgtctaggccacttgtgaagaatatgagtcagttattgccagccttggaatttacttctctagcttacaatggaccttttgaactggaaaacaccttgtctgcattcactttaaaatgtcaaaactaatttttataataaatgtttattttcacattgaaaaaaaaaaaaaa

SEQ ID NO: 14089 - DNA, 3861 bp, Homo sapiens
gccgagagggcgggccagggccgcactccggagactcgcggttgctacgcgcaccatggctggagacggagtttcgctcttgatgcccagcaggctagagtgcgatggcgcgatttcggctcactgcaacctcctcctcccagaggtacttctcagccctctagctccaactgagaacccagccagtcaggaagtcgctacttcgggaacaccaaccaatcagggggccgtcacctgctgaaggagtccttcggcggctgttgtgtcgggagcctgatcgcgatggggacaaaggcgcaagtcgagaggaaactgttgtgcctcttcatattggcgatcctgttgtgctccctggcattgggcagtgttacagtgcactcttctgaacctgaagtcagaattcctgagaataatcctgtgaagttgtcctgtgcctactcgggcttttcttctccccgtgtggagtggaagtttgaccaaggagacaccaccagactcgtttgctataataacaagatcacagcttcctatgaggaccgggtgaccttcttgccaactggtatcaccttcaagtccgtgacacgggaagacactgggacatacacttgtatggtctctgaggaaggcggcaacagctatggggaggtcaaggtcaagctcatcgtgcttgtgcctccatccaagcctacagttaacatcccctcctctgccaccattgggaaccgggcagtgctgacatgctcagaacaagatggttccccaccttctgaatacacctggttcaaagatgggatagtgatgcctacgaatcccaaaagcacccgtgccttcagcaactcttcctatgtcctgaatcccacaacaggagagctggtctttgatcccctgtcagcctctgatactggagaatacagctgtgaggcacggaatgggtatgggacacccatgacttcaaatgctgtgcgcatggaagctgtggagcggaatgtgggggtcatcgtggcagccgtccttgtaaccctgattctcctgggaatcttggtttttggcatctggtttgcctatagccgaggccactttgacagaacaaagaaagggacttcgagtaagaaggtgatttacagccagcctagtgcccgaagtgaaggagaattcaaacagacctcgtcattcctggtgtgagcctggtcggctcaccgcctatcatctgcatttgccttactcaggtgctaccggactctggcccctgatgtctgtagtttcacaggatgccttatttgtcttctacaccccacagggccccctacttcttcggatgtgtttttaataatgtcagctatgtgccccatcctccttcatgccctccctccctttcctaccactgctgagtggcctggaacttgtttaaagtgtttattccccatttctttgagggatcaggaaggaatcctgggtatgccattgacttcccttctaagtagacagcaaaaatggcgggggtcgcaggaatctgcactcaactgcccacctggctggcagggatctttgaataggtatcttgagcttggttctgggctctttccttgtgtactgacgaccagggccagctgttctagagcgggaattagaggctagagcggctgaaatggttgtttggtgatgacactggggtccttccatctctggggcccactctcttctgtcttcccatgggaagtgccactgggatccctctgccctgtcctcctgaatacaagctgactgacattgactgtgtctgtggaaaatgggagctcttgttgtggagagcatagtaaattttcagagaacttgaagccaaaaggatttaaaaccgctgctctaaagaaaagaaaactggaggctgggcgcagtggctcacgcctataatcccagaggctgaggcaggcggatcacctgaggtcaggagttcaagatcagcctgaccaacatggagaaaccctactaaaaatacaaagttagccaggcatagtggtgcatgcctgtaatcccagctgctcaggagcctggcaacaagagcaaaactccagctcaaaaaaaaaaagaaagaaaagaaaaagctggagctggtggcttaggccatcacccttcccttggctggaactactggacagacccttttgagatgtgcctgtggtgctgtggagatgtgtgtagtggtcttagctctttgttgagcttgtgtgtgtgttgtgtagtcttagctgtatgctgaaattgggcgtgtgttggagggcttcttagctctttggtgagattgtatttctatgtgtttgtatcagctgaatgttgctggaaataaaaccttggtttgtcaaggctcttttttgtgggaagtaagtaggggaaaaggtctttgagggttcctaggctcctttgtacaacaggaaaatgcctcaaagccttgcttcccagcaacctggggctggttcccagtgcctggtcctgccccttcctggttcttatctcaaggcagagcttctgaatttcaggccttcattccagagccctcttgtggccaggccttcctttgctggaggaaggtacacagggtgaagctgatgctgtacttgggggatctccttggcctgttccaccaagtgagagaaggtacttactcttgtacctcctgttcagccaggtgcattaacagacctccctacagctgtaggaactactgtcccagagctgaggcaaggggatttctcaggtcatttggagaacaagtgctttagtagtagtttaaagtagtaactgctactgtatttagtggggtggaattcagaagaaatttgaagaccagatcatgggtggtctgcatgtgaatgaacaggaatgagccggacagcctggctgtcattgctttcttcctccccatttggacccttctctgcccttacatttttgtttctccatctaccaccatccaccagtctatttattaacttagcaagaggacaagtaaagggccctcttggcttgattttgcttctttctttctgtggaggatatactaagtgcgactttgccctatcctatttggaaatccctaacagaattgagttttctattaaggatccaaaaagaaaaacaaaatgctaatgaagccatcagtcaagggtcacatgccaataaacaataaattttccagaagaaatgaaatccaactagacaaataaagtagagcttatgaaatggttcagtaaagatgagtttgttgttttttgttttgttttgttttgtttttttaaagacggagtctcgctctgtcacccaggctggagtgcagtggtatgatcttggctcactgtaacctccgcctcccgggttcaagccattctcctgcctcagtctcctgagtagctgggattacgggtgcgtgccaccatgcctggctaatttttgtgtttttagtagagacagggtttcaccatgttggtcgggctggtctcaaactcctgacctcttgatccgcctgccttggcctcccaaagtgatgggattacagatgtgagccaccgtgcctagccaaggatgagatttttaaagtatgtttcagttctgtgtcatggttggaagacagagtaggaaggatatggaaaaggtcatggggaagcagaggtgattcatggctctgtgaatttgaggtgaatggttccttattgtctaggccacttgtgaagaatatgagtcagttattgccagccttggaatttacttctctagcttacaatggaccttttgaactggaaaacaccttgtctgcattcactttaaaatgtcaaaactaatttttataataaatgtttattttcacattga

SEQ ID NO: 14090 - DNA, 3794 bp, Homo sapiens
cactccggagactcgcggttgctacgcgcaccatggctggagaggtacttctcagccctctagctccaactgagaacccagccagtcaggaagtcgctacttcgggaacaccaaccaatcagggcggctggctctcagtcccctcgctgtagtcgcggagctgtgtctgttcccaggagtccttcggcggctgttgtgtcgggagcctgatcgcgatggggacaaaggcgcaagtcgagaggaaactgttgtgcctcttcatattggcgatcctgttgtgctccctggcattgggcagtgttacagtgcactcttctgaacctgaagtcagaattcctgagaataatcctgtgaagttgtcctgtgcctactcgggcttttcttctccccgtgtggagtggaagtttgaccaaggagacaccaccagactcgtttgctataataacaagatcacagcttcctatgaggaccgggtgaccttcttgccaactggtatcaccttcaagtccgtgacacgggaagacactgggacatacacttgtatggtctctgaggaaggcggcaacagctatggggaggtcaaggtcaagctcatcgtgcttgtgcctccatccaagcctacagttaacatcccctcctctgccaccattgggaaccgggcagtgctgacatgctcagaacaagatggttccccaccttctgaatacacctggttcaaagatgggatagtgatgcctacgaatcccaaaagcacccgtgccttcagcaactcttcctatgtcctgaatcccacaacaggagagctggtctttgatcccctgtcagcctctgatactggagaatacagctgtgaggcacggaatgggtatgggacacccatgacttcaaatgctgtgcgcatggaagctgtggagcggaatgtgggggtcatcgtggcagccgtccttgtaaccctgattctcctgggaatcttggtttttggcatctggtttgcctatagccgaggccactttgacagaacaaagaaagggacttcgagtaagaaggtgatttacagccagcctagtgcccgaagtgaaggagaattcaaacagacctcgtcattcctggtgtgagcctggtcggctcaccgcctatcatctgcatttgccttactcaggtgctaccggactctggcccctgatgtctgtagtttcacaggatgccttatttgtcttctacaccccacagggccccctacttcttcggatgtgtttttaataatgtcagctatgtgccccatcctccttcatgccctccctccctttcctaccactgctgagtggcctggaacttgtttaaagtgtttattccccatttctttgagggatcaggaaggaatcctgggtatgccattgacttcccttctaagtagacagcaaaaatggcgggggtcgcaggaatctgcactcaactgcccacctggctggcagggatctttgaataggtatcttgagcttggttctgggctctttccttgtgtactgacgaccagggccagctgttctagagcgggaattagaggctagagcggctgaaatggttgtttggtgatgacactggggtccttccatctctggggcccactctcttctgtcttcccatgggaagtgccactgggatccctctgccctgtcctcctgaatacaagctgactgacattgactgtgtctgtggaaaatgggagctcttgttgtggagagcatagtaaattttcagagaacttgaagccaaaaggatttaaaaccgctgctctaaagaaaagaaaactggaggctgggcgcagtggctcacgcctataatcccagaggctgaggcaggcggatcacctgaggtcaggagttcaagatcagcctgaccaacatggagaaaccctactaaaaatacaaagttagccaggcatggtggtgcatgcctgtaatcccagctgctcaggagcctggcaacaagagcaaaactccagctcaaaaaaaaaaagaaagaaaaaagaaagctggagctggtggcttaggccatcacccttcccttggctggaactactggacagacccttttgagatgtgcctgtggtgctgtggagatgtgtgtagtggtcttagctctttgttgagcttgtgtgtgtgttgtgtagtcttagctgtatgctgaaattgggcgtgtgttggagggcttcttagctctttggtgagattgtatttctatgtgtttgtatcagctgaatgttgctggaaataaaaccttggtttgtcaaggctcttttttgtgggaagtaagtaggggaaaaggtctttgagggttcctaggctcctttgtacaacaggaaaatgcctcaaagccttgcttcccagcaacctggggctggttcccagtgcctggtcctgccccttcctggttcttatctcaaggcagagcttctgaatttcaggccttcattccagagccctcttgtggccaggccttcctttgctggaggaaggtacacagggtgaagctgatgctgtacttgggggatctccttggcctgttccaccaagtgagagaaggtacttactcttgtacctcctgttcagccaggtgcattaacagacctccctacagctgtaggaactactgtcccagagctgaggcaaggggatttctcaggtcatttggagaacaagtgctttagtagtagtttaaagtagtaactgctactgtatttagtggggtggaattcagaagaaatttgaagaccagatcatgggtggtctgcatgtgaatgaacaggaatgagccggacagcctggctgtcattgctttcttcctccccatttggacccttctctgcccttacatttttgtttctccatctaccaccatccaccagtctatttattaacttagcaagaggacaagtaaagggccctcttggcttgattttgcttctttctttctgtggaggatatactaagtgcgactttgccctatcctatttggaaatccctaacagaattgagttttctattaaggatccaaaaagaaaaacaaaatgctaatgaagccatcagtcaagggtcacatgccaataaacaataaattttccagaagaaatgaaatccaactagacaaataaagtagagcttatgaaatggttcagtaaagatgagtttgttgttttttgttttgttttgttttgtttttttaaagacggagtctcgctctgtcacccaggctggagtgcagtggtatgatcttggctcactgtaacctccgcctcccgggttcaagccattctcctgcctcagtctcctgagtagctgggattacgggtgcgtgccaccatgcctggctaatttttgtgtttttagtagagacagggtttcaccatgttggtcgggctggtctcaaactcctgacctcttgatccgcctgccttggcctcccaaagtgatgggattacagatgtgagccaccgtgcctagccaaggatgagatttttaaagtatgtttcagttctgtgtcatggttggaagacagagtaggaaggatatggaaaaggtcatggggaagcagaggtgattcatggctctgtgaatttgaggtgaatggttccttattgtctaggccacttgtgaagaatatgagtcagttattgccagccttggaatttacttctctagcttacaatggaccttttgaactggaaaacaccttgtctgcattcactttaaaatgtcaaaactaatttttataataaatgtttattttcacattga

SEQ ID NO: 14091 - DNA, 8025 bp, Homo sapiens
cggcgctgctggaagatggcgagcggccgggacgagcggccgccttggcggctagggcggctcctgttgctcatgtgcctgctgctgctggggagctcggcccgggcggctcacatcaagaaggcggaggcgactaccacaactacgagcgcgggcgccgaggcggccgagggccagttcgaccgctactaccacgaagaggagttggagtcggcgctgagggaggcggcggccgcgggcctccccggcctggcccgcctctttagcatcggccgctcggtggaaggccggccgctgtgggtgcttcgcctcaccgccggcctggggtcgctaatccctgagggcgacgcggggcctgacgctgccgggcccgacgctgcggggccgctgctgcccggccggccccaggtgaagctggtgggcaacatgcatggcgacgagaccgtgtcgcgccaggtgttgatctacttggcccgcgagctggcggccggctaccgccgcggggacccgcgcctggtccgcctgctcaacaccaccgacgtgtacctgctgcccagcctcaaccccgatggcttcgagcgtgcccgcgagggcgactgtggcttcggcgacggcggcccgtccggggccagcggccgcgacaatagtcgcggccgcgacctcaaccgaagctttcccgaccagtttagcaccggcgaaccccccgccctggacgaggtgcccgaggtgcgcgccctcatcgagtggatccgcaggaacaagtttgtgctttctggaaatctgcatggtggctcagtggtagcaagctatccttttgatgattctccagaacataaggccactggaatctatagcaaaacctcagatgatgaagtatttaaatacttggcaaaagcttatgcttcaaaccaccccataatgaaaactggtgagcctcattgtccaggagatgaagacgagactttcaaagatggaatcacaaacggcgcacattggtatgatgtggaaggtggtatgcaagattacaattatgtgtgggccaactgttttgagatcacattagaactgtcttgttgcaagtacccacctgcttcacagcttcgacaggaatgggagaacaatcgtgagtctttgatcacattgattgaaaaggttcacattggagtgaaaggatttgttaaagattccataacaggatctgggttagagaatgcaaccatctcagtggctggtattaatcataatatcacaacaggcagatttggtgatttctaccgattacttgttcctggaacttacaaccttacagtagttttaactgggtatatgccattgactgttactaatgtagtggtgaaagaaggaccagccacagaggtggatttttctcttaggccaactgtaacttcagtaatccctgacacgacagaggctgtatcaactgctagcacagttgctatacctaatattctttctggaacatcatcctcctaccagccaattcagccaaaggactttcaccaccaccatttccctgatatggaaatcttcttgagaaggtttgccaatgaatatcctaacattacccggctttattccttgggaaaatcagtagagtcaagagaactttatgtgatggagatatctgataatccgggtgtccatgaaccaggtgaaccagaatttaagtacattggaaatatgcatggaaatgaagtggttggaagagaactgctgttgaacctcatagaatacctttgtaagaactttggaacagaccctgaagtcacagatttggttcataacactagaattcaccttatgccatccatgaatcctgatgggtatgaaaagtcccaggaaggagattcaataagtgtaattggcagaaacaacagcaacaactttgacctgaaccgaaatttcccagaccagtttgttcagatcacagatcctacgcaaccagaaactattgctgtaatgagctggatgaagtcctatccatttgtactttcagcaaacctgcatggaggttctttggtggttaactacccttttgatgatgatgaacaaggacttgccacatatagtaaatcaccagatgatgctgtgttccaacaaatagcactttcttattccaaggaaaattcccagatgtttcaaggtagaccttgcaagaatatgtatcctaatgaatattttcctcatggaataacaaatggagctagttggtataatgtgccaggaggaatgcaggactggaactatttacaaacaaattgctttgaagtgactattgaactaggttgtgtgaaatatccacttgagaaagagctgccaaacttttgggaacagaatcgaagatcactaatccagtttatgaaacaggttcatcagggcgtcagaggatttgttctagatgccacagatggcaggggtatattaaatgccaccattagtgttgctgagattaatcacccagtgactacttacaaaactggagattactggcgtctcttggttccaggaacttataaaatcacagcatctgctcgagggtataatccagttaccaagaatgtgactgtcaagagtgaaggcgctattcaggtcaacttcacacttgttcgatcctcaacagattcaaacaatgaatcaaagaaaggaaaaggggctagcagcagcaccaatgatgccagtgatccaactactaaagagtttgaaactttaattaaagacctttcagcggagaatggtttggaaagcctcatgttacgctcctcctcaaatctggctctggctctttatcgataccattcctacaaagacttatcagagtttctgagaggacttgtaatgaactatccacatattacaaatcttaccaatttgggacagagcactgaatatcgtcacatttggtcccttgaaatctccaataagcccaatgtatctgagcctgaagaaccaaagattcgttttgttgctggtatccatggaaatgcgccagttggaactgaactgcttttggctctggcagaatttctctgcctgaactacaaaaagaacccagctgttacccaattggttgacaggactaggattgtgattgtcccttctctaaatccagatgggcgagagagagctcaagagaaagactgtacttcaaaaataggacaaacaaatgctcgtggcaaagatttggatacagacttcacaaataatgcctcccaacctgagaccaaagccatcattgaaaatttgattcaaaaacaggactttagtctttctgttgccttagatggtggttccatgctggtcacatatccttatgacaagccagtacagacagtggaaaataaagagactctgaagcatttggcatctctttatgcaaataatcatccatccatgcacatgggtcagcccagttgcccaaataaatcagatgagaatattccaggaggagtaatgcgtggagcagaatggcatagtcacctgggcagcatgaaggattatagtgtcacctatggccattgtccggaaatcacagtatacacaagctgctgttactttcctagtgctgcacgactcccttccttgtgggcagacaataagagatctcttcttagtatgttagtggaggttcacaagggagttcatggatttgttaaagataagactggaaagccaatctctaaagcagtcattgtacttaatgaaggaataaaggtacaaacaaaagagggaggttatttccatgtactcttagcgccaggtgtccataacattattgccatcgctgatgggtaccagcaacaacattcacaggtctttgtgcatcatgatgcagctagttctgtggtgatagtctttgacacagataaccggatatttggtttgccaagggagcttgtggtaactgtatcaggtgctactatgtcggcattgatcctaacagcttgcattatttggtgcatctgctcaatcaagtctaatagacacaaggatggctttcatcggctcaggcagcatcatgatgagtatgaagatgaaattcgcatgatgtctaccggctccaagaagtccctcctaagccatgagttccaggatgaaacagacactgaagaggaaacattatattctagcaaacattgaaaaacacattttgcatatctcccagcataagtaccaagcaaaattacagttcctcttgggagaacactgcattaagaagagagactctcttgcttcttcaaagagctttgggaaattaaattgctaaatttgtattctctgtgaatttcactggcagttttgaacttcccttccttaaagtactctaaacctttaaaaaaaaatctgatttatgcagcagagatgggacagccactttttctttttaatttaagatgagctatttggagcttatgtaataatggcataaagccaactagaggatgttgtattttgcacatcagatgtttactagtggctttagtatttttctttgttttaaatggccaaaagaatccagaaacattaaggcagggacagcagtcagaatcgacataaagctttaaaaactcaaggttttttcaacctactgaggagtacttttctctagttgttaaatagctggagtttttcttattcaggtttaatggaggttgaattgatttttaaacacatataacagtaggaaatgaataaatgggcttctgcatttggctttctacctgttccaaggctagatcggaactggtagactacgctgtaagcaggatttcactacctctcttaaggtttagcaaacttctaaatagcccattttaagggagaacttactaactttattgtgaaaggtctaaatgcccacttgaatgaagctgagagagagatctagcaaaagctaaaactcatgttgtctatctttgaacttggtaaaaacccacaggtgctgctgcttatatctgtgaagcactagcttattctaggaatgcctgattctttaatattgcctaaatcggaacctttttctatgttgcacacatggttttcagatgacccagccatctacaagatctgaattctactgaaaatatctagaaatgtggaagagacctacttgcacattcttaacctgtatttgaacacaaaatatctatacttcatgctccagcccaagcctataccctgtaatagcatactattattgaaatcgcttgaccggtcttgttcacataggcctctgggagtgatttggttctttgccctaatgtttcatttgacggtctctttttgatcaaccaatttttctaaaagttcagtcgaaagcttttaagtatagcttcctcccttgaaaaaaaatgtaaactatgactgctgagtgataaaacactgtggtgtgaaagtgtcatcttcactgccaatcaggcaaagaccggaaagatttgcattttattatgtctgtcttatcatgcaatggaaatgatgctttttgtaagtatgcatcttaccaatgatgtaacggtttaatacctttgaatgttttaataaccaagttgctgctgaacttatactaaatcaggggaccaaaaaacttgctcttatcttctcaaattgtattctatatccattaatgtatcagttatcccaaagccttcaggtggaggggtttaccaccttcctaggtcgttcaaccaggttttgtgaggaatgcattcaaagtggctttataaaagaagattttctttagcaagaataatgaggtcatgtcatttgttaataagtatctgtgataaatccgtggttcaaggttaagccattctggtattctggtattagcaactgtaaattctgccacctcatacatggaacagagcttgtgggatgctaatagttagtgaagtatacatgatttaatttctaataatctttatgttttctttaaggatggtggtgtattgctctttttcagctttatttttaagagtacagtcaggaaaccaacaaggggcctaagagtggctgcccctgcttgggacattacagcaagtgaaacaaagttaatgtgacaagctttgctttgttatcattggtcttcactagaggataccttttacatgtacttctctcttggatcaaatatgtctttaactgtacatctcagtggctggaggccatgccttttaagcatgtgtaaaatttttaaagaaatgaacatacacatagttattttagtaatatttcctgaaagaaaaaccaaattctgctataagtcttgatcttcaatgaacttttaaataatgcatttagctggaaaacaagactttcccagcttgtattacctagaagcgtgaatgtataggatacctgactactaagactatattctcagccctgccctgtcttttatttgcgggtctaatctaatattagaatatattaaccgcttaaggcattgaagccatatgggatggggaatgcatttcttcagtgtttctccgagagactttccatttccttggagttatggcggcaagtaagtatcatagtattaagaaatttgcctaaatctgagttgtgcctttctttactcacaaggcatgggctttgtcctggtgatcagtttgtaagccttcttccttcccagctccttaataaaagcaaagtgattgagtaggtaatgttcaaagtgtctgcctgtgtacatgtacttgtattgattatgtagttcagtaagatgtgcccaagtcatttcagaaagaaagacccttcagttttgatgcattttgctgaacacttgggtagtgagtgggatcctatccagttgaggaatgcttgcaatgctcattgaagggatttgctttgggactttgtcatcttccagaaaggaaacatattgtatatttggcccagtgtgattgattgctttatctttggtaacttttacttgaatgggatttgctgaattaatgactattgaatttaaaactaattatgagttgacaaataaataaaaggtagtgtttatgtctgagcttattgtgtttgagctaacaccaggttactcagtaaccatgacctgctcctccatttccatttattctcaacattaaatagttttatcttgttgttgccagaaatgcacttgtgccaggtattgtccctgctgtatgaaaagcttcttggcaatgaattctgtaatagtgccctacattatggttttctggtggaattgttttaacagtgacaacccaggatttccaatatatttttgttttattgttattaccaaaaattccactatgattgatgttcagtgattttctatagcaacttttttggtaactctttgggtttctgatttgttttagctaaaattttggggatatgatttgggtctttgattaatgtcagctgaacttggatttctagttcatgaagaaatctctcccaatacccatttatcctatttttagcaataattcgttaatgattccacttgattttcagaatattgtcctggttgattttgatttgacagcatacattatgaaatttgaaagtaggttaccattttgaggcagttggatataaattatgtaaatatgtatgattatgatttttataaatggcataacatgagtgtactaactaccttctatgctggccatgctacagattttctggaggtatgacaatagtatttttttatgctcagattaaaaatcagcttttcacctctccagtttttccaagtgatactcccagttctagagcaatctacagctgtttatgtgaggtgcccaacacccattcatctcaagtgcttcagtctttggtttatttcatgcactgtgccttcaaaatgaaatttttaaaagggactttaaatgaagttgaatagtagtttttaaaagtcaatttgtaatttatgtgaaatctaactgtaatgaggtcctttctgttttttatatgtaaacagatctactaatcctgtataaaagttattttacgatg

SEQ ID NO: 14092 - DNA, 2454 bp, Homo sapiens
ttccggttcccagagtggggcacagcgaggcgctagggggaacgctggcctctgaaactagctctgggaccggggtctgcggccggcccctagctggccccgtctcccatccccagaagggtattcactggggattctgagctttggctactccagtttcccacgacacgatgttccctttctacagctgctggaggactggactgctactactactcctggctgtggcagtgagagaatcctggcagacagaagaaaaaacttgcgacttggtaggagaaaagggtaaagagtcagagaaagagttggctctagtgaagaggctgaaaccactgtttaataaaagctttgagagcactgtgggccagggttcagacacatacatctacatcttcagggtgtgccgggaagctggcaaccacacttctggggcaggcctggtgcaaatcaacaaaagtaatgggaaggagacagtggtagggagactcaacgagactcacatcttcaacggaagtaattggatcatgctgatctataaagggggtgatgaatatgacaaccactgtggcaaggagcagcgtcgtgcagtggtgatgatctcctgcaatcgacacaccctagcggacaattttaaccctgtgtctgaggagcgtggcaaagtccaagattgtttctacctctttgagatggatagcagcctggcctgttcaccagagatctcccacctcagtgtgggttccatcttacttgtcacgtttgcatcactggttgctgtttatgttgttggggggttcctataccagcgactggtagtgggagccaaaggaatggagcagtttccccacttagccttctggcaggatcttggcaacctggtagcagatggctgtgactttgtctgccgttctaaacctcgaaatgtgcctgcagcatatcgtggtgtgggggatgaccagctgggggaggagtcagaagaaagggatgaccatttattaccaatgtagattgcactttatatgtccagcctcttcctcagtcccccaaaccaaagctacacagccagatttctcaagcagtctcaactccagtccctcatctcacccttactattgctcttgctttccagtttgcttttgatttgcatcttctcactagtaaaactgccttccctttgttccttattttctgttttttctctagagaggtacagttgtaagtcagagttaatataatagggcctgtgaaaacagaggcttttgcattgtctcttgacatcagaagttacaataggcatatgggcaaaatggtgtagcaggctcactggccgtttgttttttaaacacattttcacaagtttttgagacactggatttctttaattaaaaaaaaaatgccaagaaacattatttatacagggttgattgctttcatgttgttattctgtaccctatagtagcctccatgagaatctggtatttcttgctgcttggaactactttgcagtgattacttggttgcagtccaagtactctcgtttagtctgagcctggagatgttctagacttgcttctcccacctctgagattaggacaggaaaaatgtgaaatttcccaattacaggattatacggtaccatcacatcatttgtggaaattggggtgactgtatagctgggattgggctaaggactgtggtcttatctgtccacatacagccaaaatgcctatccagaaatccagttcgttggaaaggaaaattggtactcctgtgccacaggggttccagaaaagggaagtcactttaccttgcggtggtgggatcctgatgtctttcatccatttgtagtaaaagctggtaaagcttttcttactcctggttccctaccagtatttctaaacatgtcgcactttctccacaggcatgtggttttgacctttttttcaatcttctagaaagggaacggaagcagaagtgggacatcgagggctctgctgtcctctgcgctgggtgtggaatgctgctgcacctgtcccttctgctggctcagggaagtgtcttcttgcccacatttctgtggggaaaggtttttaatcctctgatgcttccatcttcctgtttaggccatgtgcccagaaacctggactgatctttctttaatagtgaacccctgggccactgaagagtaacatggctccactggacacaaaagagggatggaatcaacaggcagggggccttttataagccttaggaaaagaaaatgaaactatttcatctttggacttttcaatactattggagtgatttttttctttctaaacagggaaaataatgttacaaaagcatcttttttgttatttgtttgcatccctcccccacaccctggtgttttaaaatgaagaaaaaaaaccatcaccttttgtacaaaaactcttaatgattaaaaaacaaaca

SEQ ID NO: 14093 - DNA, 3425 bp, Homo sapiens
gagacggggtggcggctgcagcccgggtagggccaggagacccggtccacgtttgcaaacgcagccgaacgcccaggccgacccgtgccgcccgagcgccgcgctgcgtccgcgccactcttctcgccgccccgatggcgttccggggctggaggcccccgccgccaccgctgctcctgctgctgctctgggtgaccgggcaggcagcgcccgtggcgggcctgggctccgacgcggagctgcagatcgagcggcgcttcgtgcccgacgagtgcccgcgcaccgtgcgcagcggcgacttcgtgcgctaccactacgtggggacgttccccgacggccagaagttcgactccagctatgacagagactccactttcaatgtgtttgtgggaaaaggacagctgatcacagggatggaccaggctcttgttgggatgtgcgtaaacgagagacgtttcgtgaagattcccccaaagcttgcctacggaaatgaaggagtttctggtgtgatcccccccaattcagtgcttcattttgatgtacttctgatggatatttggaattctgaagaccaggttcagattcacacctatttcaagcccccgagttgccctcggaccatccaggtgtctgattttgtgaggtaccactacaacgggacgttcctggacggaactctgtttgattcgagtcacaatcgcatgaaaacatatgacacgtatgtgggaattggctggctgattcctggaatggataaagggctgctggggatgtgtgtgggtgagaagcgcatcatcaccattcctccttttctggcctatggagaggatggagatgggaaagacattcccggtcaggcatctctggtgtttgatgttgcattattggacctccataaccccaaggacagcatttccattgagaacaaggtagtacctgaaaactgtgagcggataagtcaaagtggggactttctcaggtatcattacaatggcacgcttctggatggcaccctctttgattccagctactctcggaaccgcacgtttgacacgtacattgggcagggctacgtgattcctgggatggatgaaggtctacttggtgtttgcattggagaaaagcgaaggattgtggtcccgcctcacctggggtatggagaggaaggaagagggaatatccccggctcggctgtgctggtgtttgacatccatgtgatcgacttccacaacccttcggactccatcagcatcacctcccactacaaaccccctgactgctcagtgctgagtaagaagggagattacctcaaatatcactacaatgcctcacttctggatgggaccctgctggactccacgtggaatttaggcaaaacttacaatattgttctgggatctgggcaagttgtgttggggatggacatgggtctcagagagatgtgcgttggcgagaaacggacagtgatcattccgcctcacctgggctatggggaagctggcgtggatggagaagtgcccggcagtgccgtattagtgtttgacattgagctgctggagctggtggctggccttcctgaggggtacatgttcatatggaatggtgaggtgtcacccaacctctttgaagaaattgacaaggatggcaacggagaagtcctcctggaagagttctcagagtacattcacgcccaggtggcatctggcaaagggaaactcgctcctggctttgatgctgagctgattgtgaagaatatgttcaccaaccaggaccggaatggagatgggaaggtcacagccgaggaatttaaactcaaagaccaggaagccaaacacgatgaactctaaacctggcatgaaccagatggtgccagggagtacgtgacaccaagccacctgtgtggcaagacgtgcagtgagggtgcaagggtctctcagaagttgcatcattagccagtagtaggtgggtcacatagtacctggtgtacacatcggggtgggttgatatatggggtgagaagtttgggctgatcgccagtgatagtaaacaaaatctgtgcagagggccttagcatgggatgtgtccagtattgaaaaggctgcactgccaaccatgatttgtgagccttctgggaaattttgttattaaaggaatatatagtgtcagacggaagttataatcatcttggaggaaccataagaaaaggtgtccagggtatctatataaagagggttaaatttttttttaacttgctggttaaaacattttagaaatattctagagatgggcaggagagtcaaagggcttgcttgccccagcagagttcccagcagacagccatggctcttcccagcagcctgtgcaaattctgatgatggccccacccccgcacacgcacacgcacatcatgcttttccagctcatcacaccccgccccactatgggcctaccattaatagtgtataacttggaggttaaaagagccttttggacagaaaactgggccaggaaaaggcatctcagaccacaaatagagaatttgattcctcatttgccacataagtcatctgcttagcttttcctttccttttttttttttttttttttctggaggcagagtctccctttgtcgccaggctggagtgcagtggtgccatctcggctcactgcagcactgtctcggctcactgcagcctccgcctcccgtattcaagcgattctcctgtctcagcctcctgagtagctgggactacaggtgtgcaccaccacgcccggctaatttttgtatttttagtagagacggggtttcactgtgttggccaggatggtctcaatctcgacctcgtgatccgcccaccttggcctcccaaagtgttgggattacaggcgtgactcaccatgcccagccacttagttttttcttattcccacctttctatcccatagaacactcttttttatcttccctgaaccatattgatgagataaatagggctgggggctgggccccgctggtcactcaacagagtatttcccttggccgagatggaagttttgtcccaatagatgagctgctgagcatcaacaaggtgacatttttctgctgcccatttgtgtcctggagacggtggtaccctgaaggcagaggccagctgccgcaagacagcaatgacagtccacctgccgacctgattcctgcatcatggaataaccacatggctaccttctatcctctgttcccaaatggtggtggcacttatcctgaagtcgtcaatgatttccctttgaaactactttattttactaatttaaactattttgtactgatgtagccctgaggtagttcatgaaaatgctgtgcactcattccatggaataaatgttggaaagctgatcttttctgatataaaatgttgaatgatatt

SEQ ID NO: 14094 - DNA, 2438 bp, Homo sapiens
ggaagtcggaccagccggccggcggaagaacctagagcgcgctgcctggcgagtcaggcgcgcggggcggcgttggtggtcttcgcggcgcaactcggcctttcctgggagggagtgatggggcgcaccggggccggggagcgggcgccagtgtagcccgcgcggcgcctggcccggagcgcggcggctgcggcggcggcggcggcgggcgctggaggcctgtgagagccgcagcccggagcgcccggcttcccacgccatggcccccatgggcatccgcctttccccactgggggtggcagtgttttgcctgctggggctcggcgtgctctaccacctctactcgggcttcttggccggccgcttcagcctcttcggcctgggcggcgagcctggcggcggcgcggcggagcccgcggccgcggccgatgggggcaccgtggacttgcgcgagatgctggctgtgtcagtgctggccgcagtccgcggcggcgacgaggtgaggcgcgtccgcgagagcaacgtcctccacgagaagtccaaggggaagacgcgcgagggagccgaggacaagatgaccagcggcgacgtgctgtccaaccgcaagatgttctacctgctcaaggccgccttccccagcgtccagattaatactgaggaacacgtggatgcagctgatcaggaggttatcttgtgggatcataagattcctgaggatatcctagaggaagtaactactcctaaagaggtaccagcagaaagtgttactgtctggattgacccacttgatgctacacaggaatatacagaggatcttcgaaagtacgtcactactatggtgtgtgtggctgtaaatggtaaacccatgctaggagttatacataagccattttccgaatatacagcttgggcaatggtagatggtggttcaaatgtgaaagcccgctcttcctacaatgagaagaccccaaggatcgttgtgtctcgttcccattcagggatggtcaaacaggtcgctcttcagacttttggaaaccagactacaattatcccagctggtggtgctggttataaagttttagcacttttggatgtgcctgataagagtcaagaaaaagctgatttatacatccatgtgacatacatcaaaaagtgggatatatgtgctggtaatgccatcttaaaagccctaggggggcatatgactaccctgagtggtgaagaaatcagttacactggttcagacggcattgaagggggactccttgctagcatcagaatgaaccaccaggccctggtcagaaaactcccagatctagaaaagacaggacataaatgagcataactgattacagggtacagttcttcacagctgaaatggttagcctgagatgctggaagcttcaaaggattggtggagactatgcatggttaaggccatcccgaactttttaaagtatttatgaagcgtcagagacttattttccctgtaatagaatgcaaaatcagggaaaatgggttgctttgtgtctcaagtattgtctttatttttgagactattttcatacagttgtcatacacaaggcgcatatatatatttgtgaattaaaatctgtagctgagtctacattgttatgagtcaccattttcacacaacatcatgaatcttcactgttagtactttcatatagaattcggttgaaggaaagattgatttttgtgtagatgtttaatataactttacaactatatctcattgaaaataaagtcattggggatttttacctctaatttggatggaaagcacaagaagccacacattcattaatatgcaacaaatgttgtatttatgttactgaatatttctatggattaaaatagaaaaagtttaattgattttttcttttaaattttaataacaggttcaccagctggtagaaaatagagacacatgatgatttgcattgtaataatttctgtgtgtatgtgtgtgtgttgttttgtttttataaagaaaagtgtgtttgtacccatgagttcagcatttctgccatcttgctattttcattttccctgtggaagatgcatggttgcatccttttccttctgaccaacacttagtctttaactttgtaaggttcggtttaaggtttcagggttagcactatagttttggttcattttctcattaacgataaaatatgctgtaaggcactataagaatataaatgattctattacaattgaaagttacttgacattacatgaattgaactgcctttcattatcttcagacactttgttttagtatttttttttaatttgctaggtttgtatatagaagatcctttcattatcaagaatgagtatggttgcttttgccatggttgcttttactattaataaatgtatctagcctacccaaaaaaaaaaaaaaa

SEQ ID NO: 14095 - DNA, 2358 bp, Homo sapiens
aggcgggcggagcgcggttcccggagtctcgcgcccgcggtcatgtgacacagcgaagatggcgtcgcccggctgcctgtggctcttggctgtggctctcctgccatggacctgcgcttctcgggcgctgcagcatctggacccgccggcgccgctgccgttggtgatctggcatgggatgggagacagctgttgcaatcccttaagcatgggtgctattaaaaaaatggtggagaagaaaatacctggaatttacgtcttatctttagagattgggaagaccctgatggaggacgtggagaacagcttcttcttgaatgtcaattcccaagtaacaacagtgtgtcaggcacttgctaaggatcctaaattgcagcaaggctacaatgctatgggattctcccagggaggccaatttctgagggcagtggctcagagatgcccttcacctcccatgatcaatctgatctcggttgggggacaacatcaaggtgtttttggactccctcgatgcccaggagagagctctcacatctgtgacttcatccgaaaaacactgaatgctggggcgtactccaaagttgttcaggaacgcctcgtgcaagccgaatactggcatgaccccataaaggaggatgtgtatcgcaaccacagcatcttcttggcagatataaatcaggagcggggtatcaatgagtcctacaagaaaaacctgatggccctgaagaagtttgtgatggtgaaattcctcaatgattccattgtggaccctgtagattcggagtggtttggattttacagaagtggccaagccaaggaaaccattcccttacaggagacctccctgtacacacaggaccgcctggggctaaaggaaatggacaatgcaggacagctagtgtttctggctacagaaggggaccatcttcagttgtctgaagaatggttttatgcccacatcataccattccttggatgaaacccgtatagttcacaatagagctcagggagcccctaactcttccaaaccacatgggagacagtttccttcatgcccaagcctgagctcagatccagcttgcaactaatccttctatcatctaacatgccctacttggaaagatctaagatctgaatcttatcctttgccatcttctgttaccatatggtgttgaatgcaagtttaattaccatggagattgttttacaaacttttgatgtggtcaagttcagttttagaaaagggagtctgttccagatcagtgccagaactgtgcccaggcccaaaggagacaactaactaaagtagtgagatagattctaagggcaaacatttttccaagtcttgccatatttcaagcaaagaggtgcccaggcctgaggtactcacataaatgctttgttttgctggtgatttaaccagtgcttggaaaaatcttgcttggctatttctgcatcatttcttaaggctgccttcctctctcagtacgttgccctctgtgctatcatcttatcatcaattattagacaaatcccactggcctacagtcttgcttctgcagcacccactttgtctcctcaggtagtgatgaattagttgctgtcacaaaaggagggaagtagcacccaaattaagttgcttaagagaggaaatgtacatcttgtataacttagggagcgaagaaaatgtaggcgcgaaagtgaaaagtgaggcagctagttcttcctattccattctcgaccaacctgccctttcttaatatgactagtggtcttgatgctagagtcaacttactctgttgctggctttagcagagaataggaggaaccatatgaaaaagatcaggctttctgacttccatccccaaaacacatttaccagcatactccaaactgtttctgatgtgttccatgagaaaaggattgtttgctcaaaaagcttggaaaatactacacactccctttctccttctggagatcaacccacattagagtgtctaaggactcctgagaattcctgttacagtaaacaaaactaacgtaatctaccatttcctacactatttgagcatggaaatcatagtccccactctgtgaaaacttaacgctttttggaagacatttctgtagcatgtcagtttggagaaatgatgagctacgccttgatgaaagaaccgtgttggtgctgctaagtttagccattatggtttttcctttctctctcttaagccttattcttcaactaaaagatgaggattaagagcaagaagttgggggggatgtgaaaataattttatgaggttgtctaaaataaagagtagtttcttaacaaaaaaaaaaaaaaaaaaaaaaaaaaaa

SEQ ID NO: 14096 - DNA, 2191 bp, Homo sapiens
ggtggccgagcgggggaccgggaagcatggcccgggggtcggcggttgcctgggcggcgctcgggccgttgttgtggggctgcgcgctggggctgcagggcgggatgctgtacccccaggagagcccgtcgcgggagtgcaaggagctggacggcctctggagcttccgcgccgacttctctgacaaccgacgccggggcttcgaggagcagtggtaccggcggccgctgtgggagtcaggccccaccgtggacatgccagttccctccagcttcaatgacatcagccaggactggcgtctgcggcattttgtcggctgggtgtggtacgaacgggaggtgatcctgccggagcgatggacccaggacctgcgcacaagagtggtgctgaggattggcagtgcccattcctatgccatcgtgtgggtgaatggggtcgacacgctagagcatgaggggggctacctccccttcgaggccgacatcagcaacctggtccaggtggggcccctgccctcccggctccgaatcactatcgccatcaacaacacactcacccccaccaccctgccaccagggaccatccaatacctgactgacacctccaagtatcccaagggttactttgtccagaacacatattttgactttttcaactacgctggactgcagcggtctgtacttctgtacacgacacccaccacctacatcgatgacatcaccgtcaccaccagcgtggagcaagacagtgggctggtgaattaccagatctctgtcaagggcagtaacctgttcaagttggaagtgcgtcttttggatgcagaaaacaaagtcgtggcgaatgggactgggacccagggccaacttaaggtgccaggtgtcagcctctggtggccgtacctgatgcacgaacgccctgcctatctgtattcattggaggtgcagctgactgcacagacgtcactggggcctgtgtctgacttctacacactccctgtggggatccgcactgtggctgtcaccaagagccagttcctcatcaatgggaaacctttctatttccacggtgtcaacaagcatgaggatgcggacatccgagggaagggcttcgactggccgctgctggtgaaggacttcaacctgcttcgctggcttggtgccaacgctttccgtaccagccactacccctatgcagaggaagtgatgcagatgtgtgaccgctatgggattgtggtcatcgatgagtgtcccggcgtgggcctggcgctgccgcagttcttcaacaacgtttctctgcatcaccacatgcaggtgatggaagaagtggtgcgtagggacaagaaccaccccgcggtcgtgatgtggtctgtggccaacgagcctgcgtcccacctagaatctgctggctactacttgaagatggtgatcgctcacaccaaatccttggacccctcccggcctgtgacctttgtgagcaactctaactatgcagcagacaagggggctccgtatgtggatgtgatctgtttgaacagctactactcttggtatcacgactacgggcacctggagttgattcagctgcagctggccacccagtttgagaactggtataagaagtatcagaagcccattattcagagcgagtatggagcagaaacgattgcagggtttcaccaggatccacctctgatgttcactgaagagtaccagaaaagtctgctagagcagtaccatctgggtctggatcaaaaacgcagaaaatatgtggttggagagctcatttggaattttgccgatttcatgactgaacagtcaccgacgagagtgctggggaataaaaaggggatcttcactcggcagagacaaccaaaaagtgcagcgttccttttgcgagagagatactggaagattgccaatgaaaccaggtatccccactcagtagccaagtcacaatgtttggaaaacagcccgtttacttgagcaagactgataccacctgcgtgtcccttcctccccgagtcagggcgacttccacagcagcagaacaagtgcctcctggactgttcacggcagaccagaacgtttctggcctgggttttgtggtcatctattctagcagggaacactaaaggtggaaataaaagattttctattatggaaataaagagttggcatgaaagtcgctactg

SEQ ID NO: 14097 - DNA, 3689 bp, Homo sapiens
agttaaaaccaacctctcctgccctgagtggataggtagggttagggttgccagatgtcacgaagttacaggatgctcagttttaaggtatatcccttatactataagggttatagtaaaaaatattcattatgtgaaattcaaatataactgggtatcaggtattctatgtggcaaccctaggtaggggagcacaggttaggcaagcgattagaagatttgcagcctccaaagtttctgcacctcgatgggacactagaacaggaaggctcctgggcctttctggctctgggaatgaagcgtggaaaaccctccttaggcgggcgcagtgcttcaagtagccaagctctgacttccgagggaagaaaggaggccatgggcctctgccagagccatgctctgcactctggggtcagcagagttcaaaacgacctgcaacgtctggcgcttagctcctaaagaggtctccagtccagcgccgacggccagcggctagaggccgtccgcccgactccaagatggcgcccgccacagctgccaggtgttaagatggcggcgcggggccgcgcccgcgctcccaggctctcctcccccagccttcctccggctggcagcacgactcgcgtagccgtgcgccgattgcctctcggcctgggcaatggtcccggctgccggtcgacgaccgccccgcgtcatgcggctcctcggctggtggcaagtattgctgtgggtgctgggacttcccgtccgcggcgtggaggttgcagaggaaagtggtcgcttatggtcagaggagcagcctgctcaccctctccaggtgggggctgtgtacctgggtgaggaggagctcctgcatgacccgatgggccaggacagggcagcagaagaggccaatgcggtgctggggctggacacccaaggcgatcacatggtgatgctgtctgtgattcctggggaagctgaggacaaagtgagttcagagcctagcggcgtcacctgtggtgctggaggagcggaggactcaaggtgcaacgtccgagagagccttttctctctggatggcgctggagcacacttccctgacagagaagaggagtattacacagagccagaagtggcggaatctgacgcagccccgacagaggactccaataacactgaaagtctgaaatccccaaaggtgaactgtgaggagagaaacattacaggattagaaaatttcactctgaaaattttaaatatgtcacaggaccttatggattttctgaacccaaacggtagtgactgtactctagtcctgttttacaccccgtggtgccgcttttctgccagtttggcccctcactttaactctctgccccgggcatttccagctcttcactttttggcactggatgcatctcagcacagcagcctttctaccaggtttggcaccgtagctgttcctaatattttattatttcaaggagctaaaccaatggccagatttaatcatacagatcgaacactggaaacactgaaaatcttcatttttaatcagacaggtatagaagccaagaagaatgtggtggtaactcaagccgaccaaataggccctcttcccagcactttgataaaaagtgtggactggttgcttgtattttccttattctttttaattagttttattatgtatgctaccattcgaactgagagtattcggtggctaattccaggacaagagcaggaacatgtggagtagtgatggtctgaaagaagttggaaagaggaacttcaatccttcgtttcagaaattagtgctacagtttcatacattttctccagtgacgtgttgacttgaaacttcaggcagattaaaagaatcatttgttgaacaactgaatgtataaaaaaattataaactggtgttttaactagtattgcaataagcaaatgcaaaaatattcaatagatgcactattcttgtttttactgcatgaacgtaatccagtatttggaaagtaatccagtttgaaatgtgaagatgtattccggcagaatagtgagtagaatgacatgcttactatacagaaggcaaaaataggactctcaggtaatagtttaaggaaacccttgattccttatatatgtttaagaaggttagttttctgtttctttgcagtttttcttctagagtccatagcaggaaagtatgtaaccagaattggttagtgtgaccccctcaagtagcaagtgatggaaaataagagtcaaataccttgatgtttgtgatctctaactcaaaaaatttgaagtgttttaagttgtttctgggtaagggagatgttaggagaaaggaaatgctgtaactaaagctcaattattatcagttctatgctaacgtatacattttaatcatagttacctaagcagcatgcattaattgaaccttaaaatgttcccagcaggctgggcgcagtggctcatgcctgtaatcccagcactttgggaggccaaggcgggaggatcacttgaggttaggacttttgagaccagcctggccaacttggtgaaaccctctctctactaaaaatacaaaaaattagctgggcgtggtggcgggcacctgtaatcccagctacttgggaaagctgaggcatgagaatcacttgaacccgggaggcagaggttgcagtgagctgagatcatgccactgcactccagcctgtgcaaccagagcgaaactccatctcaaaaacaaacaaaaagaagtattgaagtgtaaaacactgttcttgcccacaagttgattctagtctagttcaagacacatgtttagtaaagagacaacatgtaatttaaacaaactttttttttttttttagacaaagtctcactctgtcacctaggctggagtgcaatggtgcaatcttggctcactgcaacctctgcttcccgggttcaagcgattctccagcctcagcctcctgagtagctgggactatgggcctgtgccatcacacccagctaatttttctatttttagtagagatggggttttgccatgttggccaggctggtctcaaactgctgacttcaggtgatccacccgcctcagcctcccaaagtgttgggattacaggtgtgagccactgcgcctggcctaaacaaactttttgaaaagctgtttctaaaagattccttaaattcagatatgacagctaattacctcatcataaattacttttatactaattgtttccagggttttagagtagttgaatgtttatttcacaaggcaccctaaattctatagaaataaaacctcagatgagtctccttcttagagtgttacaatgaatgggagtttacaacttttatgtgtcatgtttccaacagctgtgtttggggtggtcactggcaggaggggaccgtatctcagaatggcacattatttctattttacacatgagcaaattgaggcatagagagttagataacttgcccaggttacacagattgtaagttgatgaagctgggatttgaatcttcacatgtgtgtacttataaatacaaatgtaaggaaaactctagtgagtccacctcttatattgagttattactgtgtgagtgccaagtactgttttagatgctttacatatactattttgtttaatatcctttttaaagaataaactaggttggtgcag

SEQ ID NO: 14098 - DNA, 1989 bp, Homo sapiens
agcttcgggggcgagcgctcgtgtgtgtgagtgcgcgccggccagcgcgccttctgcggcaggcggacagatcctcggcgcggcagggccggggcaagctggacgcagcatgatgcgcgcagtgtgggaggcgctggcggcgctggcggcggtggcgtgcctggtgggcgcggtgcgcggcgggcccgggctcagcatgttcgcgggccaggcggcgcagcccgatccctgctcggacgagaacggccacccgcgccgctgcatcccggactttgtcaatgcggccttcggcaaggacgtgcgcgtgtccagcacctgcggccggcccccggcgcgctactgcgtggtgagcgagcgcggcgaggagcggctgcgctcgtgccacctctgcaacgcgtccgaccccaagaaggcgcacccgcccgccttcctcaccgacctcaacaacccgcacaacctgacgtgctggcagtccgagaactacctgcagttcccgcacaacgtcacgctcacactgtccctcggcaagaagttcgaagtgacctacgtgagcctgcagttctgctcgccgcggcccgagtccatggccatctacaagtccatggactacgggcgcacgtgggtgcccttccagttctactccacgcagtgccgcaagatgtacaaccggccgcaccgcgcgcccatcaccaagcagaacgagcaggaggccgtgtgcaccgactcgcacaccgacatgcgcccgctctcgggcggcctcatcgccttcagcacgctggacgggcggccctcggcgcacgacttcgacaactcgcccgtgctgcaggactgggtcacggccacagacatccgcgtggccttcagccgcctgcacacgttcggcgacgagaacgaggacgactcggagctggcgcgcgactcgtacttctacgcggtgtccgacctgcaggtgggcggccggtgcaagtgcaacggccacgcggcccgctgcgtgcgcgaccgcaccgacagcctggtgtgcgactgcaggcacaacacggccggcccggagtgcgaccgctgcaagcccttccactacgaccggccctggcagcgcgccacagcccgcgaagccaacgagtgcgtggcctgtaactgcaacctgcatgcccggcgctgccgcttcaacatggagctctacaagctttcggggcgcaagagcggaggtgtctgcctcaactgtcgccacaacaccgccggccgccactgccattactgcaaggagggctactaccgcgacatgggcaagcccatcacccaccggaaggcctgcaaagcctgtgattgccaccctgtgggtgctgctggcaaaacctgcaaccaaaccaccggccagtgtccctgcaaggacggcgtgacgggtatcacctgcaaccgctgcgccaaaggctaccagcagagccgctctcccatcgccccctgcataaagatccctgtagcgccgccgacgactgcagccagcagcgtggaggagcctgaagactgcgattcctactgcaaggcctccaaggggaagctgaagattaacatgaaaaagtactgcaagaaggactatgccgtccagatccacatcctgaaggcggacaaggcgggggactggtggaagttcacggtgaacatcatctccgtgtataagcagggcacgagccgcatccgccgcggtgaccagagcctgtggatccgctcgcgggacatcgcctgcaagtgtcccaaaatcaagcccctcaagaagtacctgctgctgggcaacgcggaggactctccggaccagagcggcatcgtggccgataaaagcagcctggtgatccagtggcgggacacgtgggcgcggcggctgcgcaagttccagcagcgtgagaagaagggcaagtgcaagaaggcctagcgccgaggcagcgggcgggcgggccgggcgggcccgagggcggggcgagcgagacggcgcttggc

SEQ ID NO: 14099 - DNA, 1986 bp, Homo sapiens
gaggacgcgccaacatccccgctgctgtgctgggcccggggcgtgcccgccgctgctcccacctctgggccgggctggggccgcccgggggccctgttcctcggcattgcgggcctggtgggcagaaccgcggagagggcttcttttccccaagggcagcgtcttggggcccggccactggctgacccgcagcggctccggccatgcctggctggccctgggggctgctgctgacggcaggcacgctcttcgccgccctgagtcctgggccgccggcgcccgccgacccctgccacgatgaggggggtgcgccccgcggctgcgtgccaggactggtgaacgccgccctgggccgcgaggtgctggcttccagcacgtgcgggcggccggccactcgggcctgcgacgcctccgacccgcgacgggcacactcccccgccctccttacttccccagggggcacggccagccctctgtgctggcgctcggagtccctgcctcgggcgcccctcaacgtgactctcacggtgcccctgggcaaggcttttgagctggtcttcgtgagcctgcgcttctgctcagctcccccagcctccgtggccctgctcaagtctcaggaccatggccgcagctgggccccgctgggcttcttctcctcccactgtgacctggactatggccgtctgcctgcccctgccaatggcccagctggcccagggcctgaggccctgtgcttccccgcacccctggcccagcctgatggcagcggccttctggccttcagcatgcaggacagcagccccccaggcctggacctggacagcagcccagtgctccaagactgggtgaccgccaccgacgtccgtgtagtgctcacaaggcctagcacggcaggtgaccccagggacatggaggccgtcgtcccttactcctacgcagccaccgacctccaggtgggcgggcgctgcaagtgcaatggacatgcctcacggtgcctgctggacacacagggccacctgatctgcgactgtcggcatggcaccgagggccctgactgcggccgctgcaagcccttctactgcgacaggccatggcagcgggccactgcccgggaatcccacgcctgcctcgcttgctcctgcaacggccatgcccgccgctgccgcttcaacatggagctgtaccgactgtccggccgccgcagcgggggtgtctgtctcaactgccggcacaacaccgccggccgccactgccactactgccgggagggcttctatcgagaccctggccgtgccctgagtgaccgtcgggcttgcagggcctgcgactgtcacccggttggtgctgctggcaagacctgcaaccagaccacaggccagtgtccctgcaaggatggcgtcactggcctcacctgcaaccgctgcgcgcctggcttccagcaaagccgctccccagtggcgccctgtgttaagacccctatccctggacccactgaggacagcagccctgtgcagccccaggactgtgactcgcactgcaaacctgcccgtggcagctaccgcatcagcctaaagaagttctgcaagaaggactatgcggtgcaggtggcggtgggtgcgcgcggcgaggcgcgcggcgcgtggacacgcttcccggtggcggtgctcgccgtgttccggagcggagaggagcgcgcgcggcgcgggagtagcgcgctgtgggtgcccgccggggatgcggcctgcggctgcccgcgcctgctccccggccgccgctacctcctgctggggggcgggcctggagccgcggctgggggcgcggggggccgggggcccgggctcatcgccgcccgcggaagcctcgtgctaccctggagggacgcgtggacgcggcgcctgcggaggctgcagcgacgcgaacggcgggggcgctgcagcgccgcctgagcccgccggctgggcagggcggccgctgctcccacatcta

SEQ ID NO: 14100 - DNA, 1669 bp, Homo sapiens
ggactcggcctaggcggaggacggggcggagcgcggccggcaccatcgagccgggaagatggcaccgcccacggagctgctggccaggccggagcgaggcagcgcgcccggctcccgcgccatggggcggctggtggctgtgggcttgctggggatcgcgctggcgctcctgggcgagaggcttctggcactcagaaatcgacttaaagcctccagagaagtagaatctgtagaccttccacactgccacctgattaaaggaattgaagctggctctgaagatattgacatacttcccaatggtctggctttttttagtgtgggtctaaaattcccaggactccacagctttgcaccagataagcctggaggaatactaatgatggatctaaaagaagaaaaaccaagggcacgggaattaagaatcagtcgtgggtttgatttggcctcattcaatccacatggcatcagcactttcatagacaacgatgacacagtttatctctttgttgtaaaccacccagaattcaagaatacagtggaaatttttaaatttgaagaagcagaaaattctctgttgcatctgaaaacagtcaaacatgagcttcttccaagtgtgaatgacatcacagctgttggaccggcacatttctatgccacaaatgaccactacttctctgatcctttcttaaagtatttagaaacatacttgaacttacactgggcaaatgttgtttactacagtccaaatgaagttaaagtggtagcagaaggatttgattcagcaaatgggatcaatatttcacctgatgataagtatatctatgttgctgacatattggctcatgaaattcatgttttggaaaaacacactaatatgaatttaactcagttgaaggtacttgagctggatacactggtggataatttatctattgatccttcctcgggggacatctgggtaggctgtcatcctaatggccagaagctcttcgtgtatgacccgaacaatcctccctcgtcagaggttctccgcatccagaacattctatctgagaagcctacagtgactacagtttatgccaacaatgggtctgttctccaaggaagttctgtagcctcagtgtatgatgggaagctgctcataggcactttataccacagagccttgtattgtgaactctaaattgtacttttggcatgaaagtgcgataacttaacaattaattttctatgaattgctaattctgagggaatttaaccagcaacattgacccagaaatgtatggcatgtgtagttaattttattccagtaaggaacggcccttttagttcttagagcacttttaacaaaaaaggaaaatgaacaggttctttaaaatgccaagcaagggacagaaaagaaagctgctttcgaataaagtgaatacattttgcacaaagtaagcctcacctttgccttccaactgccagaacatggattccactgaaatagagtgaattatatttccttaaaatgtgagtgacctcacttctggcactgtgactactatggctgtttagaactactgataacgtattttgatgttttgtacttacatctttgtttaccattaaaaagttggagttatattaaagactaactaaaatcccaaaaaaaaaaaaaaaa

SEQ ID NO: 14101 - DNA, 1851 bp, Homo sapiens
gcttcctttctcggaaacgcggcgcggccggctgccggaaaacagggcagacctgtatgattggtttattcctggggttgtcatatcatggctgataatgacacagacagaaaccagactgagaagctcctaaaaagagtacgagaactggagcaagaggtgcaaagacttaaaaaggaacaggccaaaaataaggaggactcaaacattagagaaaattcatcaggagctggaaaaactaagcgtgcatttgatttcagtgctcatggccgaagacacgtagccctaagaatagcctatatgggctggggataccagggctttgctagtcaggaaaacacaaataataccattgaagagaaactgtttgaagctctaaccaagactcgactagtagaaagcagacagacatccaactatcaccgatgtgggagaacagataaaggagttagtgcctttggacaggtgatctcacttgaccttcgctctcagtttccaaggggcagggattccgaggactttaatgtaaaagaggaggctaatgctgctgctgaagagatccgttatacccacattctcaatcgggtactccctccagacatccgtatattggcctgggcccctgtagaaccaagcttcagtgctaggttcagctgccttgagcggacttaccgctattttttccctcgtgctgatttagatattgtaaccatggattatgcagctcagaagtatgttggcacccatgatttcaggaacttgtgtaaaatggatgtagccaacggtgtgattaattttcagaggactattctatctgctcaagtacagctagtgggccagagcccaggtgaggggagatggcaagaacctttccagttatgtcagtttgaagtgactggccaggcattcctttatcatcaagtccgatgtatgatggctatcctctttctgattggccaaggaatggagaagccagagattattgatgagctgctgaatatagagaaaaatccccaaaagcctcaatatagtatggctgtagaatttcctctagtcttatatgactgtaagtttgaaaatgtcaagtggatctatgaccaggaggctcaggagttcaatattacccacctacaacaactgtgggctaatcatgctgtcaaaactcacatgttgtatagtatgctacaaggactggacactgttccagtaccctgtggaataggaccaaagatggatggaatgacagaatggggaaatgttaagccctctgtcataaagcagaccagtgcctttgtagaaggagtgaagatgcgcacatataagcccctcatggaccgtcctaaatgccaaggactggaatcccggatccagcattttgtacgtaggggacgaattgagcacccacatttattccatgaggaagaaacaaaagccaaaagggactgtaatgacacactagaggaagacaatactaatttggagacaccaacgaagagggtctgtgttgacacagaaattaaaagcatcatttaaccatagacaatttgccaggatctaggaaccacctaatggtaggtggacagaaaaggaaaaaaaaaaaaatttacttgcaagtactaggaattcagatgatcagctcttaaaaaaaaaaaaaaagcaaaaagactaaagccctattaaggaagttattgctttaataagaaatttcaaatattctcttatcccggtccaaaaggattaagcgattaaagaacgtaaaatggagatgtatttacatacacctggaaacctgtgccttgtattcaaattcattaaagcctaatcctgcaagtaaaaaaaaaaaaaaaaaaa

SEQ ID NO: 14102 - DNA, 1352 bp, Homo sapiens
gaggaagagagcagctcgcttctaactggactgcacgttggtgacagcgtcccaagctggtgacagacccactctgtaactttcagctagattcagccaccagatcccagaaacatgacccttgctgcctacaaagagaagatgaaggagctcccgctggtgtccttgttctgctcctgcttcctggccgatcccctgaataagtcgtcctacaaatatgaaggctggtgtgggagacagtgtaggaggaaggatgaaagccagcggaaagacagtgctgactggagagaaagaagagctcaggcagacacggtggacctgaattggtgcgtcatttccgacatggaagtcatcgagctgaacaaatgcacctcgggccaatcctttgaagtcatcctgaagccaccctcctttgatggggttcccgagttcaacgcctccctgccaaggcggcgagacccatccctggaagagatccagaagaaactagaagcggctgaggagcgaaggaagtaccaggaagcggagctcctgaaacacctagcagagaaacgggaacatgagagagaggtgatccaaaaggccattgaggaaaacaacaacttcatcaagatggctaaggaaaaactggcccagaagatggaatccaacaaggagaacagggaggcccacctcgccgccatgttggaacggctgcaagagaaggacaagcacgccgaggaggtgcggaaaaacaaggagctgaaggaagaggcctccaggtaaagcctagaggccaaagaactttccaggtcagccggacagctccagcagctccacgttccaggcagcctcgcccgccggctgcgctcccagcactggggtttggggggaggggggtggccaaggggcgtttcctctgcttttggtgtttgtacatgttaagaattgaccagtgaagccatcctatttgtttccggggaacaatgacggggtgggagaggggagaggagagagtttgggaaagggagatggagaagaactcaaggacattgcaaccctgcccggcgcagatctgattttcacatctctacctggacattgagcctccaggcaccatgttgaggagagatgaaaaccagggcggtagaacttcagggtgaaggacagagtcctgggtggggcagcggctgcagggcgcaccagagaacccagccagaggggttgtgagtaccagtggtgttgcttccaccctgcagcaggtgggatgaggtctgtgtgtgtgtgtgaaccatcattttttgatcatcatgaccaatgaaacattgactccaaaaaaaaaaaaaaaaaaaaaaaaaaaaaaaaaaaaaaaa

SEQ ID NO: 14103 - DNA, 2943 bp, Homo sapiens
ggcgcggtcaggtgctccgctccagagttgagcgcaggtgagctcctgcgcgttccgggggcgttcctccagtcaccctcccgccgttacccgcggcgcgcccgagggagtctcctccagaccctccctcccgttgctccaaactaatacggactgaacggatcgctgcgaggattatcttacactgaactgatcaagtactttgaaaatgacttcgaaatttctcttggtgtccttcatacttgctgcactgagtctttcaaccaccttttctctccaaccagaccagcaaaaggttctactagtttcttttgatggattccgttgggattacttatataaagttccaacgccccattttcattatattatgaaatatggtgttcacgtgaagcaagttactaatgtttttattacaaaaacctaccctaaccattatactttggtaactggcctctttgcagagaatcatgggattgttgcaaatgatatgtttgatcctattcggaacaaatctttctccttggatcacatgaatatttatgattccaagttttgggaagaagcgacaccaatatggatcacaaaccagagggcaggacatactagtggtgcagccatgtggcccggaacagatgtaaaaatacataagcgctttcctactcattacatgccttacaatgagtcagtttcatttgaagatagagttgccaaaattattgaatggtttacgtcaaaagagcccataaatcttggtcttctctattgggaagaccctgatgacatgggccaccatttgggacctgacagtccgctcatggggcctgtcatttcagatattgacaagaagttaggatatctcatacaaatgctgaaaaaggcaaagttgtggaacactctgaacctaatcatcacaagtgatcatggaatgacgcagtgctctgaggaaaggttaatagaacttgaccagtacctggataaagaccactataccctgattgatcaatctccagtagcagccatcttgccaaaagaaggtaaatttgatgaagtctatgaagcactaactcacgctcatcctaatcttactgtttacaaaaaagaagacgttccagaaaggtggcattacaaatacaacagtcgaattcaaccaatcatagcagtggctgatgaagggtggcacattttacagaataagtcagatgactttctgttaggcaaccacggttacgataatgcgttagcagatatgcatccaatatttttagcccatggtcctgccttcagaaagaatttctcaaaagaagccatgaactccacagatttgtacccactactatgccacctcctcaatatcaccgccatgccacacaatggatcattctggaatgtccaggatctgctcaattcagcaatgccaagggtggtcccttatacacagagtactatactcctccctggtagtgttaaaccagcagaatatgaccaagaggggtcatacccttatttcataggggtctctcttggcagcattatagtgattgtattttttgtaattttcattaagcatttaattcacagtcaaatacctgccttacaagatatgcatgctgaaatagctcaaccattattacaagcctaatgttactttgaagtggatttgcatattgaagtggagattccataattatgtcagtgtttaaaggtttcaaattctgggaaaccagttccaaacatttgcagaaaccattaagcagttacatatttaggtatacacacacacacacacacacatacacacacacggaccaaaatacttacacctgcaaaggaataaagatgtgagagtatgtctccattgttcactgtagcatagggatagataagatcctgctttatttggacttggcgcagataatgtatatatttagcaactttgcactatgtaaagtaccttatgtattgcactttaaatttctctcctgatgggtactttaatttgaaatgcactttatgcacagttatgtcttataacttgattgaaaatgacaactttttgcacccatgtcacagaatacttgttacgcattgttcaaactgaaggaaatttctaataatcccgaataatgaacgtagaaatctatctccataaattgagagaagaagaaggtgataagtgttgaaaattaaatgtgataacctttgaaccttgaattttggagatgtattcccaacagcagaatgcaactgtgggcatttcttgtcttatttctttccagagaacgtggttttcatttatttttccctcaaaagagagtcaaatactgacagattcgttctaaatatattgtttctgtcataaaattattgtgatttcctgatgagtcatattactgtgattttcataataatgaagacaccatgaatatactttttttctatatagttcagcaatggcctgaatagaagcaaccaggcaccatctcagcaatgttttctcttgtttgtaattatttgctcctttgaaaattaaatcactattaattacattaaaaatcaaattggataaaacaatgttttctttctggtagcgcataataacagagcacaagcatcttttagatttgagcatttgaagattcaaagttgcgaaagagcacaaaccatattaggtaaaatattggccactcgatccttgaaaagaactgtgtggagcctggaaaaaaaaattaggaccacatgtgagatgtttacaagacacccagaacagtggtaaagtgtgcatactagaaaaagcagcaaaataactctttgtggtaacaggtatcaaaacacgggagccgagatgatatagctctgtttcaagaaatatgtgaatacccacctaccaggtgctcagtggaatcaaagatgaatccaagttcacaaatagacttctacttc

SEQ ID NO: 14104 - DNA, 1533 bp, Homo sapiens
atgctggtcatggcgccccgaaccgtcctcctgctgctctcggcggccctggccctgaccgagacctgggccggctcccactccatgaggtatttctacacctccgtgtcccggcccggccgcggggagccccgcttcatctcagtgggctacgtggacgacacccagttcgtgaggttcgacagcgacgccgcgagtccgagagaggagccgcgggcgccgtggatagagcaggaggggccggagtattgggaccggaacacacagatctacaaggcccaggcacagactgaccgagagagcctgcggaacctgcgcggctactacaaccagagcgaggccgggtctcacaccctccagagcatgtacggctgcgacgtggggccggacgggcgcctcctccgcgggcatgaccagtacgcctacgacggcaaggattacatcgccctgaacgaggacctgcgctcctggaccgccgcggacacggcggctcagatcacccagcgcaagtgggaggcggcccgtgaggcggagcagcggagagcctacctggagggcgagtgcgtggagtggctccgcagatacctggagaacgggaaggacaagctggagcgcgctgaccccccaaagacacacgtgacccaccaccccatctctgaccatgaggccaccctgaggtgctgggccctgggtttctaccctgcggagatcacactgacctggcagcgggatggcgaggaccaaactcaggacactgagcttgtggagaccagaccagcaggagatagaaccttccagaagtgggcagctgtggtggtgccttctggagaagagcagagatacacatgccatgtacagcatgaggggctgccgaagcccctcaccctgagatgggagccgtcttcccagtccaccgtccccatcgtgggcattgttgctggcctggctgtcctagcagttgtggtcatcggagctgtggtcgctgctgtgatgtgtaggaggaagagttcaggtggaaaaggagggagctactctcaggctgcgtgcagcgacagtgcccagggctctgatgtgtctctcacagcttgaaaagcctgagacagctgtcttgtgagggactgagatgcaggatttcttcacgcctcccctttgtgacttcaagagcctctggcatctctttctgcaaaggcacctgaatgtgtctgcgtccctgttagcataatgtgaggaggtggagagacagcccacccttgtgtccactgtgacccctgttcccatgctgacctgtgtttcctccccagtcatctttcttgttccagagaggtggggctggatgtctccatctctgtctcaactttacgtgcactgagctgcaacttcttacttccctactgaaaataagaatctgaatataaatttgttttctcaaatatttgctatgagaggttgatggattaattaaataagtcaattcctggaatttgaaagagcaaataaagacctgagaaccttccagaaaaaaaaaaaaaaaaa

SEQ ID NO: 14105 - DNA, 1538 bp, Homo sapiens
atggccgtcatggcgccccgaaccctcctcctgctactctcgggggccctggccctgacccagacctgggcgggctcccactccatgaggtatttcttcacatccgtgtcccggcccggccgcggggagccccgcttcatcgccgtgggctacgtggacgacacgcagttcgtgcggttcgacagcgacgccgcgagccagaggatggagccgcgggcgccgtggatagagcaggaggggccggagtattgggaccaggagacacggaatgtgaaggcccagtcacagactgaccgagtggacctggggaccctgcgcggctactacaaccagagcgaggccggttctcacaccatccagataatgtatggctgcgacgtggggtcggacgggcgcttcctccgcgggtaccggcaggacgcctacgacggcaaggattacatcgccctgaacgaggacctgcgctcttggaccgcggcggacatggcggctcagatcaccaagcgcaagtgggaggcggcccatgaggcggagcagttgagagcctacctggatggcacgtgcgtggagtggctccgcagatacctggagaacgggaaggagacgctgcagcgcacggacccccccaagacacatatgacccaccaccccatctctgaccatgaggccaccctgaggtgctgggccctgggcttctaccctgcggagatcacactgacctggcagcgggatggggaggaccagacccaggacacggagctcgtggagaccaggcctgcaggggatggaaccttccagaagtgggcggctgtggtggtgccttctggagaggagcagagatacacctgccatgtgcagcatgagggtctgcccaagcccctcaccctgagatgggagctgtcttcccagcccaccatccccatcgtgggcatcattgctggcctggttctccttggagctgtgatcactggagctgtggtcgctgccgtgatgtggaggaggaagagctcagatagaaaaggagggagttacactcaggctgcaagcagtgacagtgcccagggctctgatgtgtccctcacagcttgtaaagtgtgagacagctgccttgtgtgggactgagaggcaagagttgttcctgcccttccctttgtgacttgaagaaccctgactttgtttctgcaaaggcacctgcatgtgtctgtgttcgtgtaggcataatgtgaggaggtggggagaccaccccacccccatgtccaccatgaccctcttcccacgctgacctgtgctccctccccaatcatctttcctgttccagagaggtggggctgaggtgtctccatctctgtctcaacttcatggtgcactgagctgtaacttcttccttccctattaaaattagaaccttagtataaatttactttctcaaattcttgccatgagaggttgatgagttaattaaaggagaagattcctaaaatttgagagacaaaataaatggaacacatgagaaccttccaaaaaaaaaaaaaaaaaaa

SEQ ID NO: 14106 - DNA, 2856 bp, Homo sapiens
tagtcgcgggtccccgagtgagcacgccagggagcaggagaccaaacgacgggggtcggagtcagagtcgcagtgggagtccccggaccggagcacgagcctgagcgggagagcgccgctcgcacgcccgtcgccacccgcgtacccggcgcagccagagccaccagcgcagcgctgccatggagcccagcagcaagaagctgacgggtcgcctcatgctggctgtgggaggagcagtgcttggctccctgcagtttggctacaacactggagtcatcaatgccccccagaaggtgatcgaggagttctacaaccagacatgggtccaccgctatggggagagcatcctgcccaccacgctcaccacgctctggtccctctcagtggccatcttttctgttgggggcatgattggctccttctctgtgggccttttcgttaaccgctttggccggcggaattcaatgctgatgatgaacctgctggccttcgtgtccgccgtgctcatgggcttctcgaaactgggcaagtcctttgagatgctgatcctgggccgcttcatcatcggtgtgtactgcggcctgaccacaggcttcgtgcccatgtatgtgggtgaagtgtcacccacagcctttcgtggggccctgggcaccctgcaccagctgggcatcgtcgtcggcatcctcatcgcccaggtgttcggcctggactccatcatgggcaacaaggacctgtggcccctgctgctgagcatcatcttcatcccggccctgctgcagtgcatcgtgctgcccttctgccccgagagtccccgcttcctgctcatcaaccgcaacgaggagaaccgggccaagagtgtgctaaagaagctgcgcgggacagctgacgtgacccatgacctgcaggagatgaaggaagagagtcggcagatgatgcgggagaagaaggtcaccatcctggagctgttccgctcccccgcctaccgccagcccatcctcatcgctgtggtgctgcagctgtcccagcagctgtctggcatcaacgctgtcttctattactccacgagcatcttcgagaaggcgggggtgcagcagcctgtgtatgccaccattggctccggtatcgtcaacacggccttcactgtcgtgtcgctgtttgtggtggagcgagcaggccggcggaccctgcacctcataggcctcgctggcatggcgggttgtgccatactcatgaccatcgcgctagcactgctggagcagctaccctggatgtcctatctgagcatcgtggccatctttggctttgtggccttctttgaagtgggtcctggccccatcccatggttcatcgtggctgaactcttcagccagggtccacgtccagctgccattgccgttgcaggcttctccaactggacctcaaatttcattgtgggcatgtgcttccagtatgtggagcaactgtgtggtccctacgtcttcatcatcttcactgtgctcctggttctgttcttcatcttcacctacttcaaagttcctgagactaaaggccggaccttcgatgagatcgcttccggcttccggcaggggggagccagccaaagtgataagacacccgaggagctgttccatcccctgggggctgattcccaagtgtgagtcgccccagatcaccagcccggcctgctcccagcagccctaaggatctctcaggagcacaggcagctggatgagacttccaaacctgacagatgtcagccgagccgggcctggggctcctttctccagccagcaatgatgtccagaagaatattcaggacttaacggctccaggattttaacaaaagcaagactgttgctcaaatctattcagacaagcaacaggttttataatttttttattactgattttgttatttttatatcagcctgagtctcctgtgcccacatcccaggcttcaccctgaatggttccatgcctgagggtggagactaagccctgtcgagacacttgccttcttcacccagctaatctgtagggctggacctatgtcctaaggacacactaatcgaactatgaactacaaagcttctatcccaggaggtggctatggccacccgttctgctggcctggatctccccactctaggggtcaggctccattaggatttgccccttcccatctcttcctacccaaccactcaaattaatctttctttacctgagaccagttgggagcactggagtgcagggaggagaggggaagggccagtctgggctgccgggttctagtctcctttgcactgagggccacactattaccatgagaagagggcctgtgggagcctgcaaactcactgctcaagaagacatggagactcctgccctgttgtgtatagatgcaagatatttatatatatttttggttgtcaatattaaatacagacactaagttatagtatatctggacaagccaacttgtaaatacaccacctcactcctgttacttacctaaacagatataaatggctggtttttagaaacatggttttgaaatgcttgtggattgagggtaggaggtttggatgggagtgagacagaagtaagtggggttgcaaccactgcaacggcttagacttcgactcaggatccagtcccttacacgtacctctcatcagtgtcctcttgctcaaaaatctgtttgatccctgttacccagagaatatatacattctttatcttgacattcaaggcatttctatcacatatttgatagttggtgttcaaaaaaacactagttttgtgccagccgtgatgctcaggcttgaaatcgcattattttgaatgtgaagggaa

SEQ ID NO: 14107 - DNA, 2887 bp, Homo sapiens
ggagctgagaggaacaggaagtgtcaggactttacgacccgcgcctccagctgaggtttctagacgtgacccagggcagactggtagcaaagcccccacgcccagccaggagcaccgccgaggactccagcacaccgagggacatgctgggcctgcgccccccactgctcgccctggtggggctgctctccctcgggtgcgtcctctctcaggagtgcacgaagttcaaggtcagcagctgccgggaatgcatcgagtcggggcccggctgcacctggtgccagaagctgaacttcacagggccgggggatcctgactccattcgctgcgacacccggccacagctgctcatgaggggctgtgcggctgacgacatcatggaccccacaagcctcgctgaaacccaggaagaccacaatgggggccagaagcagctgtccccacaaaaagtgacgctttacctgcgaccaggccaggcagcagcgttcaacgtgaccttccggcgggccaagggctaccccatcgacctgtactatctgatggacctctcctactccatgcttgatgacctcaggaatgtcaagaagctaggtggcgacctgctccgggccctcaacgagatcaccgagtccggccgcattggcttcgggtccttcgtggacaagaccgtgctgccgttcgtgaacacgcaccctgataagctgcgaaacccatgccccaacaaggagaaagagtgccagcccccgtttgccttcaggcacgtgctgaagctgaccaacaactccaaccagtttcagaccgaggtcgggaagcagctgatttccggaaacctggatgcacccgagggtgggctggacgccatgatgcaggtcgccgcctgcccggaggaaatcggctggcgcaacgtcacgcggctgctggtgtttgccactgatgacggcttccatttcgcgggcgacgggaagctgggcgccatcctgacccccaacgacggccgctgtcacctggaggacaacttgtacaagaggagcaacgaattcgactacccatcggtgggccagctggcgcacaagctggctgaaaacaacatccagcccatcttcgcggtgaccagtaggatggtgaagacctacgagaaactcaccgagatcatccccaagtcagccgtgggggagctgtctgaggactccagcaatgtggtccaactcattaagaatgcttacaataaactctcctccagggtcttcctggatcacaacgccctccccgacaccctgaaagtcacctacgactccttctgcagcaatggagtgacgcacaggaaccagcccagaggtgactgtgatggcgtgcagatcaatgtcccgatcaccttccaggtgaaggtcacggccacagagtgcatccaggagcagtcgtttgtcatccgggcgctgggcttcacggacatagtgaccgtgcaggttcttccccagtgtgagtgccggtgccgggaccagagcagagaccgcagcctctgccatggcaagggcttcttggagtgcggcatctgcaggtgtgacactggctacattgggaaaaactgtgagtgccagacacagggccggagcagccaggagctggaaggaagctgccggaaggacaacaactccatcatctgctcagggctgggggactgtgtctgcgggcagtgcctgtgccacaccagcgacgtccccggcaagctgatatacgggcagtactgcgagtgtgacaccatcaactgtgagcgctacaacggccaggtctgcggcggcccggggagggggctctgcttctgcgggaagtgccgctgccacccgggctttgagggctcagcgtgccagtgcgagaggaccactgagggctgcctgaacccgcggcgtgttgagtgtagtggtcgtggccggtgccgctgcaacgtatgcgagtgccattcaggctaccagctgcctctgtgccaggagtgccccggctgcccctcaccctgtggcaagtacatctcctgcgccgagtgcctgaagttcgaaaagggcccctttgggaagaactgcagcgcggcgtgtccgggcctgcagctgtcgaacaaccccgtgaagggcaggacctgcaaggagagggactcagagggctgctgggtggcctacacgctggagcagcaggacgggatggaccgctacctcatctatgtggatgagagccgagagtgtgtggcaggccccaacatcgccgccatcgtcgggggcaccgtggcaggcatcgtgctgatcggcattctcctgctggtcatctggaaggctctgatccacctgagcgacctccgggagtacaggcgctttgagaaggagaagctcaagtcccagtggaacaatgataatccccttttcaagagcgccaccacgacggtcatgaaccccaagtttgctgagagttaggagcacttggtgaagacaaggccgtcaggacccaccatgtctgccccatcacgcggccgagacatggcttgccacagctcttgaggatgtcaccaattaaccagaaatccagttattttccgccctcaaaatgacagccatggccggccgggtgcttctgggggctcgtcggggggacagctccactctgactggcacagtctttgcatggagacttgaggagggagggcttgaggttggtgaggttaggtgcgtgtttcctgtgcaagtcaggacatcagtctgattaaaggtggtgccaatttatttacatttaaacttgtcagggtataaaatgacatcccattaattatattgttaatcaatcacgtgtatagaaaaaaaataaaacttcaatacaggctgtccatggaaaaaaaaaaaaaaaaaaaaaa

SEQ ID NO: 14108 - DNA, 5346 bp, Homo sapiens
ggggagcaggcgggggagcgggcgggaagcagtgggagcgcgcgtgcgcgcggccgtgcagcctgggcagtgggtcctgcctgtgacgcgcggcggcggtcggtcctgcctgtaacggcggcggcggctgctgctccagacacctgcggcggcggcggcgaccccgcggcgggcgcggagatgtggcccctggtagcggcgctgttgctgggctcggcgtgctgcggatcagctcagctactatttaataaaacaaaatctgtagaattcacgttttgtaatgacactgtcgtcattccatgctttgttactaatatggaggcacaaaacactactgaagtatacgtaaagtggaaatttaaaggaagagatatttacacctttgatggagctctaaacaagtccactgtccccactgactttagtagtgcaaaaattgaagtctcacaattactaaaaggagatgcctctttgaagatggataagagtgatgctgtctcacacacaggaaactacacttgtgaagtaacagaattaaccagagaaggtgaaacgatcatcgagctaaaatatcgtgttgtttcatggttttctccaaatgaaaatattcttattgttattttcccaatttttgctatactcctgttctggggacagtttggtattaaaacacttaaatatagatccggtggtatggatgagaaaacaattgctttacttgttgctggactagtgatcactgtcattgtcattgttggagccattcttttcgtcccaggtgaatattcattaaagaatgctactggccttggtttaattgtgacttctacagggatattaatattacttcactactatgtgtttagtacagcgattggattaacctccttcgtcattgccatattggttattcaggtgatagcctatatcctcgctgtggttggactgagtctctgtattgcggcgtgtataccaatgcatggccctcttctgatttcaggtttgagtatcttagctctagcacaattacttggactagtttatatgaaatttgtggcttccaatcagaagactatacaacctcctaggaaagctgtagaggaaccccttaatgcattcaaagaatcaaaaggaatgatgaatgatgaataactgaagtgaagtgatggactccgatttggagagtagtaagacgtgaaaggaatacacttgtgtttaagcaccatggccttgatgattcactgttggggagaagaaacaagaaaagtaactggttgtcacctatgagacccttacgtgattgttagttaagtttttattcaaagcagctgtaatttagttaataaaataattatgatctatgttgtttgcccaattgagatccagttttttgttgttatttttaatcaattaggggcaatagtagaatggacaatttccaagaatgatgcctttcaggtcctagggcctctggcctctaggtaaccagtttaaattggttcagggtgataactacttagcactgccctggtgattacccagagatatctatgaaaaccagtggcttccatcaaacctttgccaactcaggttcacagcagctttgggcagttatggcagtatggcattagctgagaggtgtctgccacttctgggtcaatggaataataaattaagtacaggcaggaatttggttgggagcatcttgtatgatctccgtatgatgtgatattgatggagatagtggtcctcattcttgggggttgccattcccacattcccccttcaacaaacagtgtaacaggtccttcccagatttagggtacttttattgatggatatgttttccttttattcacataaccccttgaaaccctgtcttgtcctcctgttacttgcttctgctgtacaagatgtagcaccttttctcctctttgaacatggtctagtgacacggtagcaccagttgcaggaaggagccagacttgttctcagagcactgtgttcacacttttcagcaaaaatagctatggttgtaacatatgtattcccttcctctgatttgaaggcaaaaatctacagtgtttcttcacttcttttctgatctggggcatgaaaaaagcaagattgaaatttgaactatgagtctcctgcatggcaacaaaatgtgtgtcaccatcaggccaacaggccagcccttgaatggggatttattactgttgtatctatgttgcatgataaacattcatcaccttcctcctgtagtcctgcctcgtactccccttcccctatgattgaaaagtaaacaaaacccacatttcctatcctggttagaagaaaattaatgttctgacagttgtgatcgcctggagtacttttagacttttagcattcgttttttacctgtttgtggatgtgtgtttgtatgtgcatacgtatgagataggcacatgcatcttctgtatggacaaaggtggggtacctacaggagagcaaaggttaattttgtgcttttagtaaaaacatttaaatacaaagttctttattgggtggaattatatttgatgcaaatatttgatcacttaaaacttttaaaacttctaggtaatttgccacgctttttgactgctcaccaataccctgtaaaaatacgtaattcttcctgtttgtgtaataagatattcatatttgtagttgcattaataatagttatttcttagtccatcagatgttcccgtgtgcctcttttatgccaaattgattgtcatatttcatgttgggaccaagtagtttgcccatggcaaacctaaatttatgacctgctgaggcctctcagaaaactgagcatactagcaagacagctcttcttgaaaaaaaaaatatgtatacacaaatatatacgtatatctatatatacgtatgtatatacacacatgtatattcttccttgattgtgtagctgtccaaaataataacatatatagagggagctgtattcctttatacaaatctgatggctcctgcagcactttttccttctgaaaatatttacattttgctaacctagtttgttactttaaaaatcagttttgatgaaaggagggaaaagcagatggacttgaaaaagatccaagctcctattagaaaaggtatgaaaatctttatagtaaaattttttataaactaaagttgtaccttttaatatgtagtaaactctcatttatttggggttcgctcttggatctcatccatccattgtgttctctttaatgctgcctgccttttgaggcattcactgccctagacaatgccaccagagatagtgggggaaatgccagatgaaaccaactcttgctctcactagttgtcagcttctctggataagtgaccacagaagcaggagtcctcctgcttgggcatcattgggccagttccttctctttaaatcagatttgtaatggctcccaaattccatcacatcacatttaaattgcagacagtgttttgcacatcatgtatctgttttgtcccataatatgctttttactccctgatcccagtttctgctgttgactcttccattcagttttatttattgtgtgttctcacagtgacaccatttgtccttttctgcaacaacctttccagctacttttgccaaattctatttgtcttctccttcaaaacattctcctttgcagttcctcttcatctgtgtagctgctcttttgtctcttaacttaccattcctatagtactttatgcatctctgcttagttctattagttttttggccttgctcttctccttgattttaaaattccttctatagctagagcttttctttctttcattctctcttcctgcagtgttttgcatacatcagaagctaggtacataagttaaatgattgagagttggctgtatttagatttatcactttttaatagggtgagcttgagagttttctttctttctgttttttttttttgttttttttttttttttttttttttttttttttgactaatttcacatgctctaaaaaccttcaaaggtgattatttttctcctggaaactccaggtccattctgtttaaatccctaagaatgtcagaattaaaataacagggctatcccgtaattggaaatatttcttttttcaggatgctatagtcaatttagtaagtgaccaccaaattgttatttgcactaacaaagctcaaaacacgataagtttactcctccatctcagtaataaaaattaagctgtaatcaaccttctaggtttctcttgtcttaaaatgggtattcaaaaatggggatctgtggtgtatgtatggaaacacatactccttaatttacctgttgttggaaactggagaaatgattgtcgggcaaccgtttattttttattgtattttatttggttgagggatttttttataaacagttttacttgtgtcatattttaaaattactaactgccatcacctgctggggtcctttgttaggtcattttcagtgactaatagggataatccaggtaactttgaagagatgagcagtgagtgaccaggcagtttttctgcctttagctttgacagttcttaattaagatcattgaagaccagctttctcataaatttctctttttgaaaaaaagaaagcatttgtactaagctcctctgtaagacaacatcttaaatcttaaaagtgttgttatcatgactggtgagagaagaaaacattttgtttttattaaatggagcattatttacaaaaagccattgttgagaattagatcccacatcgtataaatatctattaaccattctaaataaagagaactccagtgttgctatgtgcaagatcctctcttggagcttttttgcatagcaattaaaggtgtgctatttgtcagtagccatttttttgcagtgatttgaagaccaaagttgttttacagctgtgttaccgttaaaggtttttttttttatatgtattaaatcaatttatcactgtttaaagctttgaatatctgcaatctttgccaaggtacttttttatttaaaaaaaaacataactttgtaaatattaccctgtaatattatatatacttaataaaacattttaagctattttgttgggctatttctattgctgctacagcagaccacaagcacatttctgaaaaatttaatttattaatgtatttttaagttgcttatattctaggtaacaatgtaaagaatgatttaaaatattaattatgaattttttgagtataatacccaataagcttttaattagagcagagttttaattaaaagttttaaatcagtc

SEQ ID NO: 14109 - DNA, 5288 bp, Homo sapiens
ggggagcaggcgggggagcgggcgggaagcagtgggagcgcgcgtgcgcgcggccgtgcagcctgggcagtgggtcctgcctgtgacgcgcggcggcggtcggtcctgcctgtaacggcggcggcggctgctgctccagacacctgcggcggcggcggcgaccccgcggcgggcgcggagatgtggcccctggtagcggcgctgttgctgggctcggcgtgctgcggatcagctcagctactatttaataaaacaaaatctgtagaattcacgttttgtaatgacactgtcgtcattccatgctttgttactaatatggaggcacaaaacactactgaagtatacgtaaagtggaaatttaaaggaagagatatttacacctttgatggagctctaaacaagtccactgtccccactgactttagtagtgcaaaaattgaagtctcacaattactaaaaggagatgcctctttgaagatggataagagtgatgctgtctcacacacaggaaactacacttgtgaagtaacagaattaaccagagaaggtgaaacgatcatcgagctaaaatatcgtgttgtttcatggttttctccaaatgaaaatattcttattgttattttcccaatttttgctatactcctgttctggggacagtttggtattaaaacacttaaatatagatccggtggtatggatgagaaaacaattgctttacttgttgctggactagtgatcactgtcattgtcattgttggagccattcttttcgtcccaggtgaatattcattaaagaatgctactggccttggtttaattgtgacttctacagggatattaatattacttcactactatgtgtttagtacagcgattggattaacctccttcgtcattgccatattggttattcaggtgatagcctatatcctcgctgtggttggactgagtctctgtattgcggcgtgtataccaatgcatggccctcttctgatttcaggtttgagtatcttagctctagcacaattacttggactagtttatatgaaatttgtggcttccaatcagaagactatacaacctcctaggaataactgaagtgaagtgatggactccgatttggagagtagtaagacgtgaaaggaatacacttgtgtttaagcaccatggccttgatgattcactgttggggagaagaaacaagaaaagtaactggttgtcacctatgagacccttacgtgattgttagttaagtttttattcaaagcagctgtaatttagttaataaaataattatgatctatgttgtttgcccaattgagatccagttttttgttgttatttttaatcaattaggggcaatagtagaatggacaatttccaagaatgatgcctttcaggtcctagggcctctggcctctaggtaaccagtttaaattggttcagggtgataactacttagcactgccctggtgattacccagagatatctatgaaaaccagtggcttccatcaaacctttgccaactcaggttcacagcagctttgggcagttatggcagtatggcattagctgagaggtgtctgccacttctgggtcaatggaataataaattaagtacaggcaggaatttggttgggagcatcttgtatgatctccgtatgatgtgatattgatggagatagtggtcctcattcttgggggttgccattcccacattcccccttcaacaaacagtgtaacaggtccttcccagatttagggtacttttattgatggatatgttttccttttattcacataaccccttgaaaccctgtcttgtcctcctgttacttgcttctgctgtacaagatgtagcaccttttctcctctttgaacatggtctagtgacacggtagcaccagttgcaggaaggagccagacttgttctcagagcactgtgttcacacttttcagcaaaaatagctatggttgtaacatatgtattcccttcctctgatttgaaggcaaaaatctacagtgtttcttcacttcttttctgatctggggcatgaaaaaagcaagattgaaatttgaactatgagtctcctgcatggcaacaaaatgtgtgtcaccatcaggccaacaggccagcccttgaatggggatttattactgttgtatctatgttgcatgataaacattcatcaccttcctcctgtagtcctgcctcgtactccccttcccctatgattgaaaagtaaacaaaacccacatttcctatcctggttagaagaaaattaatgttctgacagttgtgatcgcctggagtacttttagacttttagcattcgttttttacctgtttgtggatgtgtgtttgtatgtgcatacgtatgagataggcacatgcatcttctgtatggacaaaggtggggtacctacaggagagcaaaggttaattttgtgcttttagtaaaaacatttaaatacaaagttctttattgggtggaattatatttgatgcaaatatttgatcacttaaaacttttaaaacttctaggtaatttgccacgctttttgactgctcaccaataccctgtaaaaatacgtaattcttcctgtttgtgtaataagatattcatatttgtagttgcattaataatagttatttcttagtccatcagatgttcccgtgtgcctcttttatgccaaattgattgtcatatttcatgttgggaccaagtagtttgcccatggcaaacctaaatttatgacctgctgaggcctctcagaaaactgagcatactagcaagacagctcttcttgaaaaaaaaaatatgtatacacaaatatatacgtatatctatatatacgtatgtatatacacacatgtatattcttccttgattgtgtagctgtccaaaataataacatatatagagggagctgtattcctttatacaaatctgatggctcctgcagcactttttccttctgaaaatatttacattttgctaacctagtttgttactttaaaaatcagttttgatgaaaggagggaaaagcagatggacttgaaaaagatccaagctcctattagaaaaggtatgaaaatctttatagtaaaattttttataaactaaagttgtaccttttaatatgtagtaaactctcatttatttggggttcgctcttggatctcatccatccattgtgttctctttaatgctgcctgccttttgaggcattcactgccctagacaatgccaccagagatagtgggggaaatgccagatgaaaccaactcttgctctcactagttgtcagcttctctggataagtgaccacagaagcaggagtcctcctgcttgggcatcattgggccagttccttctctttaaatcagatttgtaatggctcccaaattccatcacatcacatttaaattgcagacagtgttttgcacatcatgtatctgttttgtcccataatatgctttttactccctgatcccagtttctgctgttgactcttccattcagttttatttattgtgtgttctcacagtgacaccatttgtccttttctgcaacaacctttccagctacttttgccaaattctatttgtcttctccttcaaaacattctcctttgcagttcctcttcatctgtgtagctgctcttttgtctcttaacttaccattcctatagtactttatgcatctctgcttagttctattagttttttggccttgctcttctccttgattttaaaattccttctatagctagagcttttctttctttcattctctcttcctgcagtgttttgcatacatcagaagctaggtacataagttaaatgattgagagttggctgtatttagatttatcactttttaatagggtgagcttgagagttttctttctttctgttttttttttttgttttttttttttttttttttttttttttttttgactaatttcacatgctctaaaaaccttcaaaggtgattatttttctcctggaaactccaggtccattctgtttaaatccctaagaatgtcagaattaaaataacagggctatcccgtaattggaaatatttcttttttcaggatgctatagtcaatttagtaagtgaccaccaaattgttatttgcactaacaaagctcaaaacacgataagtttactcctccatctcagtaataaaaattaagctgtaatcaaccttctaggtttctcttgtcttaaaatgggtattcaaaaatggggatctgtggtgtatgtatggaaacacatactccttaatttacctgttgttggaaactggagaaatgattgtcgggcaaccgtttattttttattgtattttatttggttgagggatttttttataaacagttttacttgtgtcatattttaaaattactaactgccatcacctgctggggtcctttgttaggtcattttcagtgactaatagggataatccaggtaactttgaagagatgagcagtgagtgaccaggcagtttttctgcctttagctttgacagttcttaattaagatcattgaagaccagctttctcataaatttctctttttgaaaaaaagaaagcatttgtactaagctcctctgtaagacaacatcttaaatcttaaaagtgttgttatcatgactggtgagagaagaaaacattttgtttttattaaatggagcattatttacaaaaagccattgttgagaattagatcccacatcgtataaatatctattaaccattctaaataaagagaactccagtgttgctatgtgcaagatcctctcttggagcttttttgcatagcaattaaaggtgtgctatttgtcagtagccatttttttgcagtgatttgaagaccaaagttgttttacagctgtgttaccgttaaaggtttttttttttatatgtattaaatcaatttatcactgtttaaagctttgaatatctgcaatctttgccaaggtacttttttatttaaaaaaaaacataactttgtaaatattaccctgtaatattatatatacttaataaaacattttaagctattttgttgggctatttctattgctgctacagcagaccacaagcacatttctgaaaaatttaatttattaatgtatttttaagttgcttatattctaggtaacaatgtaaagaatgatttaaaatattaattatgaattttttgagtataatacccaataagcttttaattagagcagagttttaattaaaagttttaaatcagtc

SEQ ID NO: 14110 - DNA, 1921 bp, Homo sapiens
cctgttgctgatgctgccgtgcggtacttgtcatggagctggcactgcggcgctctcccgtcccgcggtggttgctgctgctgccgctgctgctgggcctgaacgcaggagctgtcattgactggcccacagaggagggcaaggaagtatgggattatgtgacggtccgcaaggatgcctacatgttctggtggctctattatgccaccaactcctgcaagaacttctcagaactgcccctggtcatgtggcttcagggcggtccaggcggttctagcactggatttggaaactttgaggaaattgggccccttgacagtgatctcaaaccacggaaaaccacctggctccaggctgccagtctcctatttgtggataatcccgtgggcactgggttcagttatgtgaatggtagtggtgcctatgccaaggacctggctatggtggcttcagacatgatggttctcctgaagaccttcttcagttgccacaaagaattccagacagttccattctacattttctcagagtcctatggaggaaaaatggcagctggcattggtctagagctttataaggccattcagcgagggaccatcaagtgcaactttgcgggggttgccttgggtgattcctggatctcccccgtggattcggtgctctcctggggaccttacctgtacagcatgtctcttctcgaagacaaaggtctggcagaggtgtctaaggttgcagagcaagtactgaatgccgtaaataaggggctctacagagaggccacagagctgtgggggaaagcagaaatgatcattgaacagaacacagatggggtgaacttctataacatcttaactaaaagcactcccacgtctacaatggagtcgagtctagaattcacacagagccacctagtttgtctttgtcagcgccacgtgagacacctacaacgagatgccttaagccagctcatgaatggccccatcagaaagaagctcaaaattattcctgaggatcaatcctggggaggccaggctaccaacgtctttgtgaacatggaggaggacttcatgaagccagtcattagcattgtggacgagttgctggaggcagggatcaacgtgacggtgtataatggacagctggatctcatcgtagataccatgggtcaggaggcctgggtgcggaaactgaagtggccagaactgcctaaattcagtcagctgaagtggaaggccctgtacagtgaccctaaatctttggaaacatctgcttttgtcaagtcctacaagaaccttgctttctactggattctgaaagctggtcatatggttccttctgaccaaggggacatggctctgaagatgatgagactggtgactcagcaagaataggatggatggggctggagatgagctggtttggccttggggcacagagctgagctgaggccgctgaagctgtaggaagcgccattcttccctgtatctaactggggctgtgatcaagaaggttctgaccagcttctgcagaggataaaatcattgtctctggaggcaatttggaaattatttctgcttcttaaaaaaacctaagattttttaaaaaattgatttgttttgatcaaaataaaggatgataatagatattattttttcttatgacagaagcaaatgatgtgatttatagaaaaactgggaaatacaggtacccaaagagtaaatcaacatctgtatacccccttcccaggggtaagcactgttaccaatttagcatatgtccttgcagaatttttttttctatatatacatatatattttttaccaaaatgaatcattactctatgttgttttactatttgtttgacatatcagtatatctgaaacaccttttcatgtcaataaatgttcttctctaacattaa

SEQ ID NO: 14111 - DNA, 983 bp, Homo sapiens
gtggaattcatggcatctacttcgtatgactattgcagagtgcccatggaagacggggataagcgctgtaagcttctgctggggataggaattctggtgctcctgatcatcgtgattctgggggtgcccttgattatcttcaccatcaaggccaacagcgaggcctgccgggacggccttcgggcagtgatggagtgtcgcaatgtcacccatctcctgcaacaagagctgaccgaggcccagaagggctttcaggatgtggaggcccaggccgccacctgcaaccacactgtgatggccctaatggcttccctggatgcagagaaggcccaaggacaaaagaaagtggaggagcttgagggagagatcactacattaaaccataagcttcaggacgcgtctgcagaggtggagcgactgagaagagaaaaccaggtcttaagcgtgagaatcgcggacaagaagtactaccccagctcccaggactccagctccgctgcggcgccccagctgctgattgtgctgctgggcctcagcgctctgctgcagtgagatcccaggaagctggcacatcttggaaggtccgtcctgctcggcttttcgcttgaacattcccttgatctcatcagttctgagcgggtcatggggcaacacggttagcggggagagcacggggtagccggagaagggcctctggagcaggtctggaggggccatggggcagtcctgggtgtggggacacagtcgggttgacccagggctgtctccctccagagcctccctccggacaatgagtcccccctcttgtctcccaccctgagattgggcatggggtgcggtgtggggggcatgtgctgcctgttgttatgggttttttttgcggggggggttgcttttttctggggtctttgagctccaaaaaataaacacttcctttgagggagagcaaaaaaaaaaaaaaaaaaaaaaaaaaaaaaaaaaaa

SEQ ID NO: 14112 - DNA, 1934 bp, Homo sapiens
agaaccccgcggggtctgagcagcccagcgtgcccattccagcgcccgcgtccccgcagcatgccgcgcccccgcctgctggccgcgctgtgcggcgcgctgctctgcgcccccagcctcctcgtcgccctggatatctgttccaaaaacccctgccacaacggtggtttatgcgaggagatttcccaagaagtgcgaggagatgtcttcccctcgtacacctgcacgtgccttaagggctacgcgggcaaccactgtgagacgaaatgtgtcgagccactgggcatggagaatgggaacattgccaactcacagatcgccgcctcatctgtgcgtgtgaccttcttgggtttgcagcattgggtcccggagctggcccgcctgaaccgcgcaggcatggtcaatgcctggacacccagcagcaatgacgataacccctggatccaggtgaacctgctgcggaggatgtgggtaacaggtgtggtgacgcagggtgccagccgcttggccagtcatgagtacctgaaggccttcaaggtggcctacagccttaatggacacgaattcgatttcatccatgatgttaataaaaaacacaaggagtttgtgggtaactggaacaaaaacgcggtgcatgtcaacctgtttgagacccctgtggaggctcagtacgtgagattgtaccccacgagctgccacacggcctgcactctgcgctttgagctactgggctgtgagctgaacggatgcgccaatcccctgggcctgaagaataacagcatccctgacaagcagatcacggcctccagcagctacaagacctggggcttgcatctcttcagctggaacccctcctatgcacggctggacaagcagggcaacttcaacgcctgggttgcggggagctacggtaacgatcagtggctgcaggtggacctgggctcctcgaaggaggtgacaggcatcatcacccagggggcccgtaactttggctctgtccagtttgtggcatcctacaaggttgcctacagtaatgacagtgcgaactggactgagtaccaggaccccaggactggcagcagtaagatcttccctggcaactgggacaaccactcccacaagaagaacttgtttgagacgcccatcctggctcgctatgtgcgcatcctgcctgtagcctggcacaaccgcatcgccctgcgcctggagctgctgggctgttagtggccacctgccacccccaggtcttcctgctttccatgggcccgctgcctcttggcttctcagcccctttaaatcaccatagggctggggactggggaaggggagggtgttcagaggcagcaccaccacacagtcacccctccctccctctttcccaccctccacctctcacgggccctgccccagcccctaagccccgtcccctaacccccagtcctcactgtcctgttttcttaggcactgagggatctgagtaggtctgggatggacaggaaagggcaaagtagggcgtgtggtttccctgcccctgtccggaccgccgatcccaggtgcgtgtgtctctgtctctcctagcccctctctcacacatcacattcccatggtggcctcaagaaaggcccggaagccccaggctggagataacagcctcttgcccgtcggccctgcgtcggccctggggtaccatgtgccacaactgctgtggccccctgtccccaagacacttccccttgtctccctggttgcctctcttgccccttgtcctgaagcccagcgacacagaagggggtggggcgggtctatggggagaaagggagcgaggtcagaggagccggcatgggttggcagggtgggcgtttggggccctcatgctggcttttcaccccagaggacacaggcagcttccaaaatatatttatcttcttcacggg

SEQ ID NO: 14113 - DNA, 2650 bp, Homo sapiens
gctctgggagtgtgaaactgggagagacggttaagctggggacggtattcagaattcgagcgcaggagctccgcttctccacctgctcccggggagctattgggatccagagaatcacccgctgatggtttttgcccaggcctgaaacaaccagagagctacgggaaaggaagggcttggcttgccagaggaattttccaagtgctcaaacgccaggcttacggcgcctgtgatccgtccaggaggacaaagtgggatttgaagatccactccacttctgctcatggcgggccagggcctgcccctgcacgtggccacactgctgactgggctgctggaatgcctgggctttgctggcgtcctctttggctggccttcactagtgtttgtcttcaagaatgaagattactttaaggatctgtgtggaccagatgctgggccgattggcaatgccacagggcaggctgactgcaaagcccaggatgagaggttctcactcatcttcaccctggggtccttcatgaacaacttcatgacattccccactggctacatctttgaccggttcaagaccaccgtggcacgcctcatagccatatttttctacaccaccgccacactcatcatagccttcacctctgcaggctcagccgtgctgctcttcctggccatgccaatgctcaccattgggggaatcctgtttctcatcaccaacctgcagattgggaacctatttggccaacaccgttcgaccatcatcactctgtacaatggagcatttgactcttcctcggcagtcttccttattattaagcttctttatgaaaaaggcatcagcctcagggcctccttcatcttcatctctgtctgcagtacctggcatgtagcacgcactttcctcctgatgccccgggggcacatcccatacccactgccccccaactacagctatggcctgtgccctgggaatggcaccacaaaggaagagaaggaaacagctgagcatgaaaacagggagctacagtcaaaggagttcctttcagcgaaggaagagaccccaggggcagggcagaagcaggaactccgctccttctggagctacgctttctctcggcgctttgcctggcacctggtgtggctgtctgtgatacagttgtggcactacctcttcattggcactctcaactccttgctgaccaacatggccggtggggacatggcacgagtcagcacctacacaaatgcctttgccttcactcagttcggagtgctgtgtgccccctggaatggcctgctcatggaccggcttaaacagaagtaccagaaggaagcaagaaagacaggttcctccactttggcggtggccctctgctcgacggtgccttcgctggccctgacatccctgctgtgcctgggcttcgccctctgtgcctcagtccccatcctccctctccagtacctcaccttcatcctgcaagtgatcagccgctccttcctctatgggagcaacgcggccttcctcacccttgctttcccttcagagcactttggcaagctctttgggctggtgatggccttgtcggctgtggtgtctctgctccagttccccatcttcaccctcatcaaaggctcccttcagaatgacccattttacgtgaatgtgatgttcatgcttgccattcttctgacattcttccacccctttctggtatatcgggaatgccgtacttggaaagaaagtccctctgcaattgcatagttcagaagccctcacttttcagccccgaggatggttttgttcatcttccaccacctttgaggacctcgtgtcccaaaagactttgcctatcccagcaaaacacacacacacacacacacacacacaaaataaagacacacaaggacgtctgcgcagcaagaaaagaatctcagttgccaagcagattgatatcacacagactcaaagcaaaggcatgtggaacttctttatttcaaaacagaagtgtctccttgcacttagccttggcagacccttgactccaggggagatgacctgggggaggaagtgtgtcaactatttctttaggcctgtttggctccgaagcctatatgtgcctggatcctctgccacgggttaaattttcaggtgaagagtgaggttgtcatggcctcagctatgcttcctggctctccctcaagagtgcagccttggctagagaactcacagctctgggaaaaagaggagcagacagggttccctgggcccagtctcagcccagccactgatgctggatgaccttggcctgaccctggtctggtctcagaatcacttttcccatctgtaaaattgagatgaattttggtgttgaaagttcttcctggagcagatgtcctagaaggttttaggaatagtgacagagtcaggccaccccaagggccatgggagccagctgacctgcttgaccgaaggatttctgacagactatctttggggatgttttcaagaagggatataagttatttactttgggcatttaaaagaaaatttctctcgggaataattttatagaaaaataaagcttctgtgtctaaggcaaaaaaaaaaaaaaaaaaaaaaaaaaaaaaaaaaaaaaaaaaaaaaaaaaaaaaa

SEQ ID NO: 14114 - DNA, 2752 bp, Homo sapiens
gcccagtcgcgccgccagcgggctgagggtaggaagtagccgctccgagtggaggcgactgggggctgaagagcgcgccgccctctcgtcccactttccaggtgtgtgatcctgtaaaattaaatcttccaagatgatctggtatatattaattataggaattctgcttccccagtctttggctcatccaggcttttttacttcaattggtcagatgactgatttgatccatactgagaaagatctggtgacttctctgaaagattatattaaggcagaagaggacaagttagaacaaataaaaaaatgggcagagaagttagatcggctaactagtacagcgacaaaagatccagaaggatttgttgggcatccagtaaatgcattcaaattaatgaaacgtctgaatactgagtggagtgagttggagaatctggtccttaaggatatgtcagatggctttatctctaacctaaccattcagagacagtactttcctaatgatgaagatcaggttggggcagccaaagctctgttacgtctccaggatacctacaatttggatacagataccatctcaaagggtaatcttccaggagtgaaacacaaatcttttctaacggctgaggactgctttgagttgggcaaagtggcctatacagaagcagattattaccatacggaactgtggatggaacaagccctaaggcaactggatgaaggcgagatttctaccatagataaagtctctgttctagattatttgagctatgcggtatatcagcagggagacctggataaggcacttttgctcacaaagaagcttcttgaactagatcctgaacatcagagagctaatggtaacttaaaatattttgagtatataatggctaaagaaaaagatgtcaataagtctgcttcagatgaccaatctgatcagaaaactacaccaaagaaaaaaggggttgctgtggattacctgccagagagacagaagtacgaaatgctgtgccgtggggagggtatcaaaatgacccctcggagacagaaaaaactcttttgccgctaccatgatggaaaccgtaatcctaaatttattctggctccagctaaacaggaggatgaatgggacaagcctcgtattattcgcttccatgatattatttctgatgcagaaattgaaatcgtcaaagacctagcaaaaccaaggctgagccgagctacagtacatgaccctgagactggaaaattgaccacagcacagtacagagtatctaagagtgcctggctctctggctatgaaaatcctgtggtgtctcgaattaatatgagaatacaagatctaacaggactagatgtttccacagcagaggaattacaggtagcaaattatggagttggaggacagtatgaaccccattttgactttgcacggaaagatgagccagatgctttcaaagagctggggacaggaaatagaattgctacatggctgttttatatgagtgatgtgtctgcaggaggagccactgtttttcctgaagttggagctagtgtttggcccaaaaaaggaactgctgttttctggtataatctgtttgccagtggagaaggagattatagtacacggcatgcagcctgtccagtgctagttggcaacaaatgggtatccaataaatggctccatgaacgtggacaagaatttcgaagaccttgtacgttgtcagaattggaatgacaaacaggcttccctttttctcctattgttgtactcttatgtgtctgatatacacatttcctagtcttaactttcaggagtttacaattgactaacactccatgattgattcagtcatgaacctcatcccatgtttcatctgtggacaattgcttactttgtgggttcttttaaaagtaacacgaaatcatcatattgcataaaaccttaaagttctgttggtatcacagaagacaaggcagagtttaaagtgaggaattttatatttaaagaactttttggttggataaaaacataatttgagcatccagttttagtatttcactacatctcagttggtgggtgttaagctagaatgggctgtgtgataggaaacaaatgccttacagatgtgcctaggtgttctgtttacctagtgtcttactctgttttctggatctgaagactagtaataaactaggacactaactgggttccatgtgattgccctttcatatgatcttctaagttgatttttttcctcccaagtcttttttaaagaaagtatactgtattttaccaaccccctctcttttcttttagctcctctgtggtgaattaaacgtacttgagttaaaatatttcgattttttttttttttttaatggaaagtcctgcataacaacactgggccttcttaactaaaatgctcaccacttagcctgtttttttatcccttttttaaaatgacagatgattttgttcaggaattttgctgtttttcttagtgctaataccttgcctcttattcctgctacagcagggtggtaatattggcattctgattaaatactgtgccttaggagactggaagtttaaaaatgtacaagtcctttcagtgatgagggaattgattttttttaaaagtctttttcttagaaagccaaaatgtttgtttttttaagattctgaaatgtgttgtgacaacaatgacctatttatgatcttaaatcttttttaaaaaaaaaaaaaaaa

SEQ ID NO: 14115 - DNA, 4266 bp, Homo sapiens
cttcctctgccaccatggggaactgggctgtgaatgaggggctctccatttttgtcattctggtttggctggggttgaacgtcttcctctttgtctggtattaccgggtttatgatattccacctaagttcttttacacaagaaaacttcttgggtcagcactggcactggccagggcccctgcagcctgcctgaatttcaactgcatgctgattctcttgccagtctgtcgaaatctgctgtccttcctcaggggttccagtgcgtgctgctcaacaagagttcgaagacaactggacaggaatctcacctttcataaaatggtggcatggatgattgcacttcactctgcgattcacaccattgcacatctatttaatgtggaatggtgtgtgaatgcccgagtcaataattctgatccttattcagtagcactctctgaacttggagacaggcaaaatgaaagttatctcaattttgctcgaaagagaataaagaaccctgaaggaggcctgtacctggctgtgaccctgttggcaggcatcactggagttgtcatcacgctgtgcctcatattaattatcacttcctccaccaaaaccatccggaggtcttactttgaagtcttttggtacacacatcatctctttgtgatcttcttcattggccttgccatccatggagctgaacgaattgtacgtgggcagaccgcagagagtttggctgtgcataatataacagtttgtgaacaaaaaatctcagaatggggaaaaataaaggaatgcccaatccctcagtttgctggaaaccctcctatgacttggaaatggatagtgggtcccatgtttctgtatctctgtgagaggttggtgcggttttggcgatctcaacagaaggtggtcatcaccaaggtggtcactcaccctttcaaaaccatcgagctacagatgaagaagaaggggttcaaaatggaagtgggacaatacatttttgtcaagtgcccaaaggtgtccaagctggagtggcacccttttacactgacatccgcccctgaggaagacttctttagtatccatatccgcatcgttggggactggacagaggggctgttcaatgcttgtggctgtgataagcaggagtttcaagatgcgtggaaactacctaagatagcggttgatgggccctttggcactgccagtgaagatgtgttcagctatgaggtggtgatgttagtgggagcagggattggggtcacacccttcgcatccattctcaagtcagtctggtacaaatattgcaataacgccaccaatctgaagctcaaaaagatctacttctactggctgtgccgggacacacatgcctttgagtggtttgcagatctgctgcaactgctggagagccagatgcaggaaaggaacaatgccggcttcctcagctacaacatctacctcactggctgggatgagtctcaggccaatcactttgctgtgcaccatgatgaggagaaagatgtgatcacaggcctgaaacaaaagactttgtatggacggcccaactgggataatgaattcaagacaattgcaagtcaacaccctaataccagaataggagttttcctctgtggacctgaagccttggctgaaaccctgagtaaacaaagcatctccaactctgagtctggccctcggggagtgcatttcattttcaacaaggaaaacttctaacttgtctcttccatgaggaaataaatgtgggttgtgctgccaaatgctcaaataatgctaattgataatataaataccccctgcttaaaaatggacaaaaagaaactataatgtaatggttttcccttaaaggaatgtcaaagattgtttgatagtgataagttacatttatgtggagctctatggttttgagagcacttttacaaacattatttcatttttttcctctcagtaatgtcagtggaagttagggaaaagattcttggactcaattttagaatcaaaagggaaaggatcaaaaggttcagtaacttccctaagattatgaaactgtgaccagatctagcccatcttactccaggtttgatactctttccacaatactgagctgcctcagaatcctcaaaatcagtttttatattccccaaaagaagaaggaaaccaaggagtagctatatatttctactttgtgtcatttttgccatcattattatcatactgaaggaaattttccagatcattaggacataatacatgttgagagtgtctcaacacttattagtgacagtattgacatctgagcatactccagtttactaatacagcagggtaactgggccagatgttctttctacagaagaatattggattgattggagttaatgtaatactcatcatttaccactgtgcttggcagagagcggatactcaagtaagttttgttaaatgaatgaatgaatttagaaccacacaatgccaagatagaattaatttaaagccttaaacaaaatttatctaaagaaataacttctattactgtcatagaccaaaggaatctgattctccctagggtcaagaacaggctaaggatactaaccaataggattgcctgaagggttctgcacattcttatttgaagcatgaaaaaagagggttggaggtggagaattaacctcctgccatgactctggctcatctagtcctgctccttgtgctataaaataaatgcagactaatttcctgcccaaagtggtcttctccagctagcccttatgaatattgaacttaggaattgtgacaaatatgtatctgatatggtcatttgttttaaataacacccaccccttattttccgtaaatacacacacaaaatggatcgcatctgtgtgactaatggtttatttgtattatatcatcatcatcatcctaaaattaacaacccagaaacaaaaatctctatacagagatcaaattcacactcaatagtatgttctgaatatatgttcaagagagagtctctaaatcactgttagtgtggccaagagcagggttttctttttgttcttagaactgctcccatttctgggaactaaaaccagttttatttgccccaccccttggagccacaaatgtttagaactcttcaacttcggtaatgaggaagaaggagaaagagctgggggaagggcagaagactggtttaggaggaaaaggaaataaggagaaaagagaatgggagagtgagagaaaataaaaaaggcaaaagggagagagaggggaagggggtctcatattggtcattccctgccccagatttcttaaagtttgatatgtatagaatataattgaaggaggtatacacatactgatgttgttttgattatctatggtattgaatcttttaaaatctggtcacaaattttgatgctgagggggattattcaagggactaggatgaactaaataagaactcagttgttctttgtcatactactattcctttcgtctcccagaatcctcagggcactgagggtaggtctgacaaataaggcctgctgtgcgaatatagcctttctgaaatgtaccaggatggtttctgcttagagacacttaggtccagcctgttcacactgcacctcaggtatcaattcatctattcaacagatatttattgtgttattactatgagtcaggctctgtttattgtttcaattctttacaccaaagtatgaactggagagggtacctcagttataaggagtctgagaatattggccctttctaacctatgtgcataattaaaaccagcttcatttgttgctccgagagtgtttctccaaggttttctatcttcaaaaccaactaagttatgaaagtagagagatctgccctgtgttatccagttatgagataaaaaatgaatataagagtgcttgtcattataaaagtttcctttttatctctcaagccaccagctgccagccaccacgagccagctgccagcctagctttttttttttttttttttttagcacttagtatttagcatttattaacaggtactctaagaatgatgaagcattgtttttaatcttaagactatgaaggtttttcttagttcttctgcttttgcaattgtgtttgtgaaatttgaatacttgcaggctttgtatgtgaataattctagcgggggacctgggagataattctacggggaattcttaaaactgtgctcaactattaaaatgaatgagctttc

SEQ ID NO: 14116 - DNA, 944 bp, Homo sapiens
tcaagattaaacgacaaggacagacatggctcagcggatgacaacacagctgctgctccttctagtgtgggtggctgtagtaggggaggctcagacaaggattgcatgggccaggactgagcttctcaatgtctgcatgaacgccaagcaccacaaggaaaagccaggccccgaggacaagttgcatgagcagtgtcgaccctggaggaagaatgcctgctgttctaccaacaccagccaggaagcccataaggatgtttcctacctatatagattcaactggaaccactgtggagagatggcacctgcctgcaaacggcatttcatccaggacacctgcctctacgagtgctcccccaacttggggccctggatccagcaggtggatcagagctggcgcaaagagcgggtactgaacgtgcccctgtgcaaagaggactgtgagcaatggtgggaagattgtcgcacctcctacacctgcaagagcaactggcacaagggctggaactggacttcagggtttaacaagtgcgcagtgggagctgcctgccaacctttccatttctacttccccacacccactgttctgtgcaatgaaatctggactcactcctacaaggtcagcaactacagccgagggagtggccgctgcatccagatgtggttcgacccagcccagggcaaccccaatgaggaggtggcgaggttctatgctgcagccatgagtggggctgggccctgggcagcctggcctttcctgcttagcctggccctaatgctgctgtggctgctcagctgacctccttttaccttctgatacctggaaatccctgccctgttcagccccacagctcccaactatttggttcctgctccatggtcgggcctctgacagccactttgaataaaccagacaccgcacatgtgtcttgagaattatttgg

SEQ ID NO: 14117 - DNA, 1032 bp, Homo sapiens
ggcaagggggagtgtagagcagagcagaagcctgagccagacggagagccacctcctctcccaggaactgaacccaaaggatcacctggtattccctgagagtacagatttctccggcgtggccctcaagggacagacatggctcagcggatgacaacacagctgctgctccttctagtgtgggtggctgtagtaggggaggctcagacaaggattgcatgggccaggactgagcttctcaatgtctgcatgaacgccaagcaccacaaggaaaagccaggccccgaggacaagttgcatgagcagtgtcgaccctggaggaagaatgcctgctgttctaccaacaccagccaggaagcccataaggatgtttcctacctatatagattcaactggaaccactgtggagagatggcacctgcctgcaaacggcatttcatccaggacacctgcctctacgagtgctcccccaacttggggccctggatccagcaggtggatcagagctggcgcaaagagcgggtactgaacgtgcccctgtgcaaagaggactgtgagcaatggtgggaagattgtcgcacctcctacacctgcaagagcaactggcacaagggctggaactggacttcagggtttaacaagtgcgcagtgggagctgcctgccaacctttccatttctacttccccacacccactgttctgtgcaatgaaatctggactcactcctacaaggtcagcaactacagccgagggagtggccgctgcatccagatgtggttcgacccagcccagggcaaccccaatgaggaggtggcgaggttctatgctgcagccatgagtggggctgggccctgggcagcctggcctttcctgcttagcctggccctaatgctgctgtggctgctcagctgacctccttttaccttctgatacctggaaatccctgccctgttcagccccacagctcccaactatttggttcctgctccatggtcgggcctctgacagccactttgaataaaccagacaccg

SEQ ID NO: 14118 - DNA, 1104 bp, Homo sapiens
tggaggcctggctggtgctcacatacaataattaactgctgagtggccttcgcccaatcccaggctccactcctgggctccattcccactccctgcctgtctcctaggccactaaaccacagctgtcccctggaataaggcaagggggagtgtagagcagagcagaagcctgagccagacggagagccacctcctctcccagggacagacatggctcagcggatgacaacacagctgctgctccttctagtgtgggtggctgtagtaggggaggctcagacaaggattgcatgggccaggactgagcttctcaatgtctgcatgaacgccaagcaccacaaggaaaagccaggccccgaggacaagttgcatgagcagtgtcgaccctggaggaagaatgcctgctgttctaccaacaccagccaggaagcccataaggatgtttcctacctatatagattcaactggaaccactgtggagagatggcacctgcctgcaaacggcatttcatccaggacacctgcctctacgagtgctcccccaacttggggccctggatccagcaggtggatcagagctggcgcaaagagcgggtactgaacgtgcccctgtgcaaagaggactgtgagcaatggtgggaagattgtcgcacctcctacacctgcaagagcaactggcacaagggctggaactggacttcagggtttaacaagtgcgcagtgggagctgcctgccaacctttccatttctacttccccacacccactgttctgtgcaatgaaatctggactcactcctacaaggtcagcaactacagccgagggagtggccgctgcatccagatgtggttcgacccagcccagggcaaccccaatgaggaggtggcgaggttctatgctgcagccatgagtggggctgggccctgggcagcctggcctttcctgcttagcctggccctaatgctgctgtggctgctcagctgacctccttttaccttctgatacctggaaatccctgccctgttcagccccacagctcccaactatttggttcctgctccatggtcgggcctctgacagccactttgaataaaccagacaccg

SEQ ID NO: 14119 - DNA, 939 bp, Homo sapiens
cattccttggtgccactgaccacagctctttcttcagggacagacatggctcagcggatgacaacacagctgctgctccttctagtgtgggtggctgtagtaggggaggctcagacaaggattgcatgggccaggactgagcttctcaatgtctgcatgaacgccaagcaccacaaggaaaagccaggccccgaggacaagttgcatgagcagtgtcgaccctggaggaagaatgcctgctgttctaccaacaccagccaggaagcccataaggatgtttcctacctatatagattcaactggaaccactgtggagagatggcacctgcctgcaaacggcatttcatccaggacacctgcctctacgagtgctcccccaacttggggccctggatccagcaggtggatcagagctggcgcaaagagcgggtactgaacgtgcccctgtgcaaagaggactgtgagcaatggtgggaagattgtcgcacctcctacacctgcaagagcaactggcacaagggctggaactggacttcagggtttaacaagtgcgcagtgggagctgcctgccaacctttccatttctacttccccacacccactgttctgtgcaatgaaatctggactcactcctacaaggtcagcaactacagccgagggagtggccgctgcatccagatgtggttcgacccagcccagggcaaccccaatgaggaggtggcgaggttctatgctgcagccatgagtggggctgggccctgggcagcctggcctttcctgcttagcctggccctaatgctgctgtggctgctcagctgacctccttttaccttctgatacctggaaatccctgccctgttcagccccacagctcccaactatttggttcctgctccatggtcgggcctctgacagccactttgaataaaccagacaccg

SEQ ID NO: 14120 - DNA, 1331 bp, Homo sapiens
ggaaaggattttctcagcccccatccccagcactgtgtgttggccgcacccatgagagcctcagcactctgaaggtgcagggggcaaaggccaaaagagctctggcctgaacttgggtggtccctactgtgtgacttggggcatggccctcatctgtgctgaaatgattccacaaagattaaactggctatcatttgttgatttcccccttcttacatttaatccttgcaggagaaagctaagcctcaagatagtttgcttctctttcccccaaggccaaggagaaggtggagtgagggctggggtcgggacaggttgaacgggaaccctgtgctctaaacagttagggtttgttcccgcaggaactgaacccaaaggatcacctggtattccctgagagtacagatttctccggcgtggccctcaagggacagacatggctcagcggatgacaacacagctgctgctccttctagtgtgggtggctgtagtaggggaggctcagacaaggattgcatgggccaggactgagcttctcaatgtctgcatgaacgccaagcaccacaaggaaaagccaggccccgaggacaagttgcatgagcagtgtcgaccctggaggaagaatgcctgctgttctaccaacaccagccaggaagcccataaggatgtttcctacctatatagattcaactggaaccactgtggagagatggcacctgcctgcaaacggcatttcatccaggacacctgcctctacgagtgctcccccaacttggggccctggatccagcaggtggatcagagctggcgcaaagagcgggtactgaacgtgcccctgtgcaaagaggactgtgagcaatggtgggaagattgtcgcacctcctacacctgcaagagcaactggcacaagggctggaactggacttcagggtttaacaagtgcgcagtgggagctgcctgccaacctttccatttctacttccccacacccactgttctgtgcaatgaaatctggactcactcctacaaggtcagcaactacagccgagggagtggccgctgcatccagatgtggttcgacccagcccagggcaaccccaatgaggaggtggcgaggttctatgctgcagccatgagtggggctgggccctgggcagcctggcctttcctgcttagcctggccctaatgctgctgtggctgctcagctgacctccttttaccttctgatacctggaaatccctgccctgttcagccccacagctcccaactatttggttcctgctccatggtcgggcctctgacagccactttgaataaaccagacaccgc

SEQ ID NO: 14121 - DNA, 929 bp, Homo sapiens
agggacagacatggctcagcggatgacaacacagctgctgctccttctagtgtgggtggctgtagtaggggaggctcagacaaggattgcatgggccaggactgagcttctcaatgtctgcatgaacgccaagcaccacaaggaaaagccaggccccgaggacaagttgcatgagcagtgtcgaccctggaggaagaatgcctgctgttctaccaacaccagccaggaagcccataaggatgtttcctacctatatagattcaactggaaccactgtggagagatggcacctgcctgcaaacggcatttcatccaggacacctgcctctacgagtgctcccccaacttggggccctggatccagcaggtggatcagagctggcgcaaagagcgggtactgaacgtgcccctgtgcaaagaggactgtgagcaatggtgggaagattgtcgcacctcctacacctgcaagagcaactggcacaagggctggaactggacttcagggtttaacaagtgcgcagtgggagctgcctgccaacctttccatttctacttccccacacccactgttctgtgcaatgaaatctggactcactcctacaaggtcagcaactacagccgagggagtggccgctgcatccagatgtggttcgacccagcccagggcaaccccaatgaggaggtggcgaggttctatgctgcagccatgagtggggctgggccctgggcagcctggcctttcctgcttagcctggccctaatgctgctgtggctgctcagctgacctccttttaccttctgatacctggaaatccctgccctgttcagccccacagctcccaactatttggttcctgctccatggtcgggcctctgacagccactttgaataaaccagacaccgcacatgtgtcttgagaattatttgg

SEQ ID NO: 14122 - DNA, 2409 bp, Homo sapiens
atgcggggcgtgtggccgcccccggtgtccgccctgctgtcggcgctggggatgtcgacgtacaagcgggccacgctggacgaggaggacctggtggactcgctctccgagggcgacgcataccccaacggcctgcaggtgaacttccacagcccccggagtggccagaggtgctgggctgcacggacccaggtggagaagcggctggtggtgttggtggtacttctggcggcaggactggtggcctgcttggcagcactgggcatccagtaccagacaagatccccctctgtgtgcctgagcgaagcttgtgtctcagtgaccagctccatcttgagctccatggaccccacagtggacccctgccatgacttcttcagctacgcctgtgggggctggatcaaggccaacccagtccctgatggccactcacgctgggggaccttcagcaacctctgggaacacaaccaagcaatcatcaagcacctcctcgaaaactccacggccagcgtgagcgaggcagagagaaaggcgcaagtatactaccgtgcgtgcatgaacgagaccaggatcgaggagctcagggccaaacctctaatggagttgattgagaggctcgggggctggaacatcacaggtccctgggccaaggacaacttccaggacaccctgcaggtggtcaccgcccactaccgcacctcacccttcttctctgtctatgtcagtgccgattccaagaactccaacagcaacgtgatccaggtggaccagtctggcctgggcttgccctcgagagactattacctgaacaaaactgaaaacgagaaggtgctgaccggatatctgaactacatggtccagctggggaagctgctgggcggcggggacgaggaggccatccggccccagatgcagcagatcttggactttgagacggcactggccaacatcaccatcccacaggagaagcgccgtgatgaggagctcatctaccacaaagtgacggcagccgagctgcagaccttggcacccgccatcaactggttgccttttctcaacaccatcttctaccccgtggagatcaatgaatccgagcctattgtggtctatgacaaggaataccttgagcagatctccactctcatcaacaccaccgacagatgcctgctcaacaactacatgatctggaacctggtgcggaaaacaagctccttccttgaccagcgctttcaggacgccgatgagaagttcatggaagtcatgtacgggaccaagaagacctgtcttcctcgctggaagttttgcgtgagtgacacagaaaacaacctgggctttgcgttgggccccatgtttgtcaaagcaaccttcgccgaggacagcaagagcatagccaccgagatcatcctggagattaagaaggcatttgaggaaagcctgagcaccctgaagtggatggatgaggaaacccgaaaatcagccaaggaaaaggccgatgccatctacaacatgataggataccccaacttcatcatggatcccaaggagctggacaaagtgtttaatgactacactgcagttccagacctctactttgaaaatgccatgcggtttttcaacttctcatggagggtcactgccgatcagctcaggaaagcccccaacagagatcagtggagcatgaccccgcccatggtgaacgcctactactcgcccaccaagaatgagattgtgtttccggccgggatcctgcaggcaccattctacacacgctcctcacccaaggccttaaactttggtggcataggtgtcgtcgtgggccatgagctgactcatgcttttgatgatcaaggacgggagtatgacaaggacgggaacctccggccatggtggaagaactcatccgtggaggccttcaagcgtcagaccgagtgcatggtagagcagtacagcaactacagcgtgaacggggagccggtgaacgggcggcacaccctgggggagaacatcgccgacaacgggggtctcaaggcggcctatcgggcttaccagaactgggtgaagaagaacggggctgagcactcgctccccaccctgggcctcaccaataaccagctcttcttcctgggctttgcacaggtctggtgctccgtccgcacacctgagagctcccacgaaggcctcatcaccgatccccacagcccctctcgcttccgggtcatcggctccctctccaattccaaggagttctcagaacacttccgctgcccacctggctcacccatgaacccgcctcacaagtgcgaagtctggtaaggacgaagcggagagagccaagacggaggaggggaaggggctgaggacgagacccccatccagcctccagggcattgctcagcccgcttggccacc

SEQ ID NO: 14123 - DNA, 2816 bp, Homo sapiens
attctgccttgtcccatagatttagaaagaggctgacacatctggtaactagtttacggtcatctgcctctaagcgacatttagggtaagcgacatttttcagaaaccaaggccctccctctcgtctcactagtgggaagggtggaaagaacaggacagaaagctcttcctcttgtgtgaggcagttgctgtggaagccccataggcaggaggcccccgggcagcacatcctgtctgcttgtgtctgctgcagagttctgtccttgcattggtgcgcctcaggccaggctgcactgctgggacctgggccatgtctccccaccccaccgccctcctgggcctagtgctctgcctggcccagaccatccacacgcaggaggaagatctgcccagaccctccatctcggctgagccaggcaccgtgatccccctggggagccatgtgactttcgtgtgccggggcccggttggggttcaaacattccgcctggagagggagagtagatccacatacaatgatactgaagatgtgtctcaagctagtccatctgagtcagaggccagattccgcattgactcagtaagtgaaggaaatgccgggccttatcgctgcatctattataagccccctaaatggtctgagcagagtgactacctggagctgctggtgaaagaaacctctggaggcccggactccccggacacagagcccggctcctcagctggacccacgcagaggccgtcggacaacagtcacaatgagcatgcacctgcttcccaaggcctgaaagctgagcatctgtatattctcatcggggtctcagtggtcttcctcttctgtctcctcctcctggtcctcttctgcctccatcgccagaatcagataaagcaggggccccccagaagcaaggacgaggagcagaagccacagcagaggcctgacctggctgttgatgttctagagaggacagcagacaaggccacagtcaatggacttcctgagaaggacagagagacggacacctcggccctggctgcagggagttcccaggaggtgacgtatgctcagctggaccactgggccctcacacagaggacagcccgggctgtgtccccacagtccacaaagcccatggccgagtccatcacgtatgcagccgttgccagacactgaccccatacccacctggcctctgcacctgagggtagaaagtcactctaggaaaagcctgaagcagccatttggaaggcttcctgttggattcctcttcatctagaaagccagccaggcagctgtcctggagacaagagctggagactggaggtttctaaccagcatccagaaggttcgttagccaggtggtcccttctacaatcgagcagctccttggacagactgtttctcagttatttccagagacccagctacagttccctggctgtttctagagacccagctttattcacctgactgtttccagagacccagctaaagtcacctgcctgttctaaaggcccagctacagccaatcagccgatttcctgagcagtgatgccacctccaagcttgtcctaggtgtctgctgtgaacctccagtgaccccagagactttgctgtaattatctgccctgctgaccctaaagaccttcctagaagtcaagagctagccttgagactgtgctatacacacacagctgagagccaagcccagttctctgggttgtgctttactccacgcatcaataaataattttgaaggcctcacatctggcagccccaggcctggtcctgggtgcataggtctctcggacccactctctgccttcacagttgttcaaagctgagtgagggaaacaggacctacgaaaacgtgtcagcgttttctttttaaaatttaattgatcaggattgtacgtattcaaggtgtaaaatgtgataatttgtcgtacacgtacattgtgcaatgacagtcacaatcaattcctcagcgcacccatcaccacgaatacgatacattagatattctgaacttgctcatcttaggacttcacattggtgtcagtgttttctgacaaatcacgtgtatcaggaatgaatgagggaggtgtggctgggtgaaggcagagagccgaccctacaggtccacatctgcacatacatgcacaggaatgcatgctctcacacacatgcatacacacacgcacacacacagacatgcacatacactcacacgccccaggaaatccaaggaatcactgagcctgctgttggttgaggcatttctgagtatccaccctacctgtagggtcagatgtactgattgacacagaaaattaccctatgtaccactaggaggcggcagaatctcatttgggttaatctgtgtttgtctttaaaaaacaaaaacaggccgggcgcggtggctcacgcctgtaatcccagcactttgggaggctgaggtgggcggatcacgaggtcaggagatcgagaccatcctggctaacacggtgaaaccccatctctactaaaaatacaaaaaaattagctgggcgtggtggcgggcacctgtagtcccagctactcgggaggctgaggcaggagaatggcgtgaacccgggaggcggagcttgcagtgagccgaggtggtgccactgcactccagcctgggcgacagagcgagactccgtcaaaaaaaaaaagaaaagaaaagaaagatttttaagaattcagcaaaaactcagccagctctttctatggggcagttgctaatttagttctaggcaaacgtggacacattaaattctcctacaaaccc

SEQ ID NO: 14124 - DNA, 2765 bp, Homo sapiens
attctgccttgtcccatagatttagaaagaggctgacacatctggtaactagtttacggtcatctgcctctaagcgacatttagggtaagcgacatttttcagaaaccaaggccctccctctcgtctcactagtgggaagggtggaaagaacaggacagaaagctcttcctcttgtgtgaggcagttgctgtggaagccccataggcaggaggcccccgggcagcacatcctgtctgcttgtgtctgctgcagagttctgtccttgcattggtgcgcctcaggccaggctgcactgctgggacctgggccatgtctccccaccccaccgccctcctgggcctagtgctctgcctggcccagaccatccacacgcaggaggaagatctgcccagaccctccatctcggctgagccaggcaccgtgatccccctggggagccatgtgactttcgtgtgccggggcccggttggggttcaaacattccgcctggagagggagagtagatccacatacaatgatactgaagatgtgtctcaagctagtccatctgagtcagaggccagattccgcattgactcagtaagtgaaggaaatgccgggccttatcgctgcatctattataagccccctaaatggtctgagcagagtgactacctggagctgctggtgaaaggacccacgcagaggccgtcggacaacagtcacaatgagcatgcacctgcttcccaaggcctgaaagctgagcatctgtatattctcatcggggtctcagtggtcttcctcttctgtctcctcctcctggtcctcttctgcctccatcgccagaatcagataaagcaggggccccccagaagcaaggacgaggagcagaagccacagcagaggcctgacctggctgttgatgttctagagaggacagcagacaaggccacagtcaatggacttcctgagaaggacagagagacggacacctcggccctggctgcagggagttcccaggaggtgacgtatgctcagctggaccactgggccctcacacagaggacagcccgggctgtgtccccacagtccacaaagcccatggccgagtccatcacgtatgcagccgttgccagacactgaccccatacccacctggcctctgcacctgagggtagaaagtcactctaggaaaagcctgaagcagccatttggaaggcttcctgttggattcctcttcatctagaaagccagccaggcagctgtcctggagacaagagctggagactggaggtttctaaccagcatccagaaggttcgttagccaggtggtcccttctacaatcgagcagctccttggacagactgtttctcagttatttccagagacccagctacagttccctggctgtttctagagacccagctttattcacctgactgtttccagagacccagctaaagtcacctgcctgttctaaaggcccagctacagccaatcagccgatttcctgagcagtgatgccacctccaagcttgtcctaggtgtctgctgtgaacctccagtgaccccagagactttgctgtaattatctgccctgctgaccctaaagaccttcctagaagtcaagagctagccttgagactgtgctatacacacacagctgagagccaagcccagttctctgggttgtgctttactccacgcatcaataaataattttgaaggcctcacatctggcagccccaggcctggtcctgggtgcataggtctctcggacccactctctgccttcacagttgttcaaagctgagtgagggaaacaggacctacgaaaacgtgtcagcgttttctttttaaaatttaattgatcaggattgtacgtattcaaggtgtaaaatgtgataatttgtcgtacacgtacattgtgcaatgacagtcacaatcaattcctcagcgcacccatcaccacgaatacgatacattagatattctgaacttgctcatcttaggacttcacattggtgtcagtgttttctgacaaatcacgtgtatcaggaatgaatgagggaggtgtggctgggtgaaggcagagagccgaccctacaggtccacatctgcacatacatgcacaggaatgcatgctctcacacacatgcatacacacacgcacacacacagacatgcacatacactcacacgccccaggaaatccaaggaatcactgagcctgctgttggttgaggcatttctgagtatccaccctacctgtagggtcagatgtactgattgacacagaaaattaccctatgtaccactaggaggcggcagaatctcatttgggttaatctgtgtttgtctttaaaaaacaaaaacaggccgggcgcggtggctcacgcctgtaatcccagcactttgggaggctgaggtgggcggatcacgaggtcaggagatcgagaccatcctggctaacacggtgaaaccccatctctactaaaaatacaaaaaaattagctgggcgtggtggcgggcacctgtagtcccagctactcgggaggctgaggcaggagaatggcgtgaacccgggaggcggagcttgcagtgagccgaggtggtgccactgcactccagcctgggcgacagagcgagactccgtcaaaaaaaaaaagaaaagaaaagaaagatttttaagaattcagcaaaaactcagccagctctttctatggggcagttgctaatttagttctaggcaaacgtggacacattaaattctcctacaaaccc

SEQ ID NO: 14125 - DNA, 3592 bp, Homo sapiens
gaggaagaggctgaggaggcgcggggggcgggggaggctcaggagcgggcggtgacggcgacggcggcggcagaggaggcagcggctgggccgggccccgtgcgtctgtccgcgccccgtggatgcgaatcggccgcggcggaggcggcggcggcggaggaggcggcggcgggaggaggagtcggtgagccggctccgggccggaggggcgcggaggatgaggccgctgcctggcgctcttggcgtggcggcggccgccgcgctgtggctgctgctgctgctgctgccccggacccgggcggacgagcacgaacacacgtatcaagataaagaggaagttgtcttatggatgaatactgttgggccctaccataatcgtcaagaaacatataagtacttttcacttccattctgtgtggggtcaaaaaaaagtatcagtcattaccatgaaactctgggagaagcacttcaaggggttgaattggaatttagtggtctggatattaaatttaaagatgatgtgatgccagccacttactgtgaaattgatttagataaagaaaagagagatgcatttgtatatgccataaaaaatcattactggtaccagatgtacatagatgatttaccaatatggggtattgttggtgaggctgatgaaaatggagaagattactatctttggacctataaaaaacttgaaataggttttaatggaaatcgaattgttgatgttaatctaactagtgaaggaaaggtgaaactggttccaaatactaaaatccagatttcatattcagtaaaatggaaaaagtcagatgtgaaatttgaagatcgatttgacaaatatcttgatccgtccttttttcaacatcggattcattggttttcaattttcaactccttcatgatggtgatcttcttggtgggcttagtttcaatgattttaatgagaacattaagaaaagattatgctcggtacagtaaagaggaagaaatggatgatatggatagagacctaggagatgaatatggatggaaacaggtgcatggagatgtatttagaccatcaagtcacccactgatattttcctctctgattggttctggatgtcagatatttgctgtgtctctcatcgttattattgttgcaatgatagaagatttatatactgagaggggatcaatgctcagtacagccatatttgtctatgctgctacgtctccagtgaatggttattttggaggaagtctgtatgctagacaaggaggaaggagatggataaagcagatgtttattggggcattccttatcccagctatggtgtgtggcactgccttcttcatcaatttcatagccatttattaccatgcttcaagagccattccttttggaacaatggtggccgtttgttgcatctgtttttttgttattcttcctctaaatcttgttggtacaatacttggccgaaatctgtcaggtcagcccaactttccttgtcgtgtcaatgctgtgcctcgtcctataccggagaaaaaatggttcatggagcctgcggttattgtttgcctgggtggaattttaccttttggttcaatctttattgaaatgtatttcatcttcacgtctttctgggcatataagatctattatgtctatggcttcatgatgctggtgctggttatcctgtgcattgtgactgtctgtgtgactattgtgtgcacatattttctactaaatgcagaagattaccggtggcaatggacaagttttctctctgctgcatcaactgcaatctatgtttacatgtattccttttactactattttttcaaaacaaagatgtatggcttatttcaaacatcattttactttggatatatggcggtatttagcacagccttggggataatgtgtggagcgattggttacatgggaacaagtgcctttgtccgaaaaatctatactaatgtgaaaattgactagagacccaagaaaacctggaactttggatcaatttctttttcataggggtggaacttgcacagcaaaaacaaacaaacgcaagaagagatttgggctttaacacactgggtactttgtgggtctctctttcgtcggtggcttaaagtaacatctatttccattgatcctaggttcttcctgactgctttctccaactgttcacagcaaatgcttggattttatgcagtaggcattactacagtacatggctaatcttcccaaaaactagctcattaaagatgaaatagaccagctctcttcagtgaagaggacaaatagtttatttaaagcatttgttccaataaaataaatagagggaaacttggatgctaaaattacatgaataggaatcttcctggcacttagtgtttctatgttattgaaaaatgatgttccagaaagattacttttttcctcttatttttactgccattgtcgacctattgtgggacatttttatatattgaatctgggttcttttttgacttttttttttcccaatccaacagcatccttttttttaaaagagagaattagaaaatattaaatcctgcatgtaatatatctgctgtcatcttagttggaccaacttcccatttatttatcttaaaactatacagttacatcttaattccatccaaagaagatacagtttgaagacagaagtgtactctctacaatgcaatttactgtacagttagaaagcaaagtgttaaatggagaagatacttgtttttattaaacattttgagatttagataaactacattttaactgaatgtctaaagtgattatcttttttccccccaagttagtcttaaatcttttgggtttgaatgaaggttttacataagaaattattaaaaacaaggggggtgggtaataaatgtatataacattaaataatgtaacgtaggtgtagattcccaaatgcatttggatgtacagatcgactacagagtacttttttcttatgatgattggtgtagaaatgtgtgatttgggtgggcttttacatcttgcctaccattgcatgaaacattggggtttcttcaaaatgtgtgtgtcatacttcttttgggaggggggttgttttcttctgtttattttctgagactcctacaggagccaaatttgtaatttagagacacttaattttgttaatcctgtctgggacacttaagtaacatctaaagcattattgctttagaatgttcaaataaaatttcctgaccaaattgttttgtggaaatagatgtgtttgcaatttgaagatatctttctgtccagaaggcaaaattaccgaatgccatttttaaaagtatgctataaactatgctactctcatacaggggacccgtattttaaaatctccagacttgcttacatctagattatccagcacaatcataaagtgaatgacaaaccctttgaatgaaattgtggcacaaaatctgttcaggttggtgtaccgtgtaaagtggggatggggtaaaagtggttaacgtactgttggatcaacaaataaaggttacagttttgtaagagaaaaaaaaaaaaaaaaaa

SEQ ID NO: 14126 - DNA, 2183 bp, Homo sapiens
gagcgcacgcgtacacgcgtgcgcaggggaagaccgagtgccaggggctgaaccgcagggaagggggcgcggcgcacgcagtatggcgcccaacatctacttggttcgccagcggatcagtcgactcggccagaggatgtccggcttccagatcaacctcaacccgctcaaggagccactcggcttcatcaaggtcctcgagtggattgcttctatctttgcttttgccacctgtggaggttttaagggccaaacagaaattcaagtgaattgtcctcctgcagttactgagaataaaactgttacagctacttttggttatccattcaggttgaatgaggcatcatttcagccacctccaggtgtaaacatatgtgatgtaaattggaaagattacgtcctcataggcgattactcttcttctgcacaattctatgttacctttgcagtctttgtgttcctgtactgcattgctgcccttctgctttatgttggctacacgagtctgtatctggatagtcgtaaacttcctatgatagactttgttgttacacttgttgccacttttttgtggttggtgagcacttcagcctgggctaaagctctgacagatattaaaatagctactggtcacaatattattgatgaacttccgccttgtaagaagaaagcagtactgtgttactttggctctgtgaccagtatgggatccctaaatgtatctgtgatatttggctttctaaatatgatactctggggaggaaatgcttggtttgtgtacaaggagaccagcctacacagtccatcaaatacatctgcccctcatagccaaggaggtattccacctcctaccggaatataattaaagggagaaatacactgtatgaagtatatgttgatactatgacatgttgccaacaccttgagaagcattatttgtttctaataaaagtaatggctttgtcaatatattggtgggtttaaaactttgctgcttttttacataaagcctgtgcctttcctagaaagttaagatgtaaatgtattctcacatgtaaatttgaaagttcaggggtctattatgaaatgatacacatttttaaatgaaccataatttttttcactaagctgtttgccttccaaagtgtttacaccttaagccttaacatgtatcttcattcagaaaacagttatattgtcataccatagtaggaagaaaaacctttatttggaatatacactactgtaagtttgtacagatcatatacctaccacctgtctttgcttaaagagccttgattacataaatatgtaggaaaaaacatattgagttcaaaatttatatctaacattgtttatgttatgatttttttttaattgcaaagactaggtgtatatttttttctgtttttctaaatgacccgtggtacttaataggtgtactaaaattgtgttgggagcagggatttggaaatttctgagagatgtgtagttaatttagtaattctgtttcatgagatatgatctgttatgctagtggtttaataggcttgctatgtaagtagaacgtggctcaactagatatctttatatgtatgggcattactcttagtgatatttgtttcctgtcctttgttgctcatgctgtttaagtgcaggctgagacccagcctctttgtaagtacagtaaaataatccaccgttttttacagaccctagtcaaagggttaaaaaaattaagattgctttccatgtttgaaatttaccattgagagtcaatgaagttgctattttgagtttagcattgatattgtgaaaataagtgcaatttggatttcatgtttcttaatattcattcttgtttcacaaatgaatgattaaggaattatgcatcataaaggaacctaagtgaggtatatgatgagtgtattgtctttgcacacacatataggtatattctgaatacaagcttattcacattttgcttcctaatctttttgttgtacagggattcaggtttcttattcttacaacatgattgtttatatgtgaagcacatcttgctgttgccttatttttgatgcttttattcatgacaagaattgtcaatataagaatgtatatcttttttgcaaccaatttaataaaggagttgaaagaaaaaaaaaaaaaaaaaaaaaaaa

SEQ ID NO: 14127 - DNA, 2149 bp, Homo sapiens
gcgccagccccgcctgcccttcctcgccaccgggctgctctggtctcgtcggtcccctcctccgccccgtcgtcctgactctctctccctcctttcctcagaggatgtccggcttccagatcaacctcaacccgctcaaggagccactcggcttcatcaaggtcctcgagtggattgcttctatctttgcttttgccacctgtggaggttttaagggccaaacagaaattcaagtgaattgtcctcctgcagttactgagaataaaactgttacagctacttttggttatccattcaggttgaatgaggcatcatttcagccacctccaggtgtaaacatatgtgatgtaaattggaaagattacgtcctcataggcgattactcttcttctgcacaattctatgttacctttgcagtctttgtgttcctgtactgcattgctgcccttctgctttatgttggctacacgagtctgtatctggatagtcgtaaacttcctatgatagactttgttgttacacttgttgccacttttttgtggttggtgagcacttcagcctgggctaaagctctgacagatattaaaatagctactggtcacaatattattgatgaacttccgccttgtaagaagaaagcagtactgtgttactttggctctgtgaccagtatgggatccctaaatgtatctgtgatatttggctttctaaatatgatactctggggaggaaatgcttggtttgtgtacaaggagaccagcctacacagtccatcaaatacatctgcccctcatagccaaggaggtattccacctcctaccggaatataattaaagggagaaatacactgtatgaagtatatgttgatactatgacatgttgccaacaccttgagaagcattatttgtttctaataaaagtaatggctttgtcaatatattggtgggtttaaaactttgctgcttttttacataaagcctgtgcctttcctagaaagttaagatgtaaatgtattctcacatgtaaatttgaaagttcaggggtctattatgaaatgatacacatttttaaatgaaccataatttttttcactaagctgtttgccttccaaagtgtttacaccttaagccttaacatgtatcttcattcagaaaacagttatattgtcataccatagtaggaagaaaaacctttatttggaatatacactactgtaagtttgtacagatcatatacctaccacctgtctttgcttaaagagccttgattacataaatatgtaggaaaaaacatattgagttcaaaatttatatctaacattgtttatgttatgatttttttttaattgcaaagactaggtgtatatttttttctgtttttctaaatgacccgtggtacttaataggtgtactaaaattgtgttgggagcagggatttggaaatttctgagagatgtgtagttaatttagtaattctgtttcatgagatatgatctgttatgctagtggtttaataggcttgctatgtaagtagaacgtggctcaactagatatctttatatgtatgggcattactcttagtgatatttgtttcctgtcctttgttgctcatgctgtttaagtgcaggctgagacccagcctctttgtaagtacagtaaaataatccaccgttttttacagaccctagtcaaagggttaaaaaaattaagattgctttccatgtttgaaatttaccattgagagtcaatgaagttgctattttgagtttagcattgatattgtgaaaataagtgcaatttggatttcatgtttcttaatattcattcttgtttcacaaatgaatgattaaggaattatgcatcataaaggaacctaagtgaggtatatgatgagtgtattgtctttgcacacacatataggtatattctgaatacaagcttattcacattttgcttcctaatctttttgttgtacagggattcaggtttcttattcttacaacatgattgtttatatgtgaagcacatcttgctgttgccttatttttgatgcttttattcatgacaagaattgtcaatataagaatgtatatcttttttgcaaccaatttaataaaggagttgaaagaaaaaaaaaaaaaaaaaaaaaa

SEQ ID NO: 14128 - DNA, 5903 bp, Homo sapiens
agacgccgcccaggacgcagccgccgccgccgccgctcctctgccactggctctgcgccccagcccggctctgctgcagcggcagggaggaagagccgccgcagcgcgactcgggagccccgggccacagcctggcctccggagccacccacaggcctccccgggcggcgcccacgctcctaccgcccggacgcgcggatcctccgccggcaccgcagccacctgctcccggcccagaggcgacgacacgatgcgctgcgcgctggcgctctcggcgctgctgctactgttgtcaacgccgccgctgctgccgtcgtcgccgtcgccgtcgccgtcgccctcccagaatgcaacccagactactacggactcatctaacaaaacagcaccgactccagcatccagtgtcaccatcatggctacagatacagcccagcagagcacagtccccacttccaaggccaacgaaatcttggcctcggtcaaggcgaccacccttggtgtatccagtgactcaccggggactacaaccctggctcagcaagtctcaggcccagtcaacactaccgtggctagaggaggcggctcaggcaaccctactaccaccatcgagagccccaagagcacaaaaagtgcagacaccactacagttgcaacctccacagccacagctaaacctaacaccacaagcagccagaatggagcagaagatacaacaaactctggggggaaaagcagccacagtgtgaccacagacctcacatccactaaggcagaacatctgacgacccctcaccctacaagtccacttagcccccgacaacccacttcgacgcatcctgtggccaccccaacaagctcgggacatgaccatcttatgaaaatttcaagcagttcaagcactgtggctatccctggctacaccttcacaagcccggggatgaccaccaccctaccgtcatcggttatctcgcaaagaactcaacagacctccagtcagatgccagccagctctacggccccttcctcccaggagacagtgcagcccacgagcccggcaacggcattgagaacacctaccctgccagagaccatgagctccagccccacagcagcatcaactacccaccgataccccaaaacaccttctcccactgtggctcatgagagtaactgggcaaagtgtgaggatcttgagacacagacacagagtgagaagcagctcgtcctgaacctcacaggaaacaccctctgtgcagggggcgcttcggatgagaaattgatctcactgatatgccgagcagtcaaagccaccttcaacccggcccaagataagtgcggcatacggctggcatctgttccaggaagtcagaccgtggtcgtcaaagaaatcactattcacactaagctccctgccaaggatgtgtacgagcggctgaaggacaaatgggatgaactaaaggaggcaggggtcagtgacatgaagctaggggaccaggggccaccggaggaggccgaggaccgcttcagcatgcccctcatcatcaccatcgtctgcatggcatcattcctgctcctcgtggcggccctctatggctgctgccaccagcgcctctcccagaggaaggaccagcagcggctaacagaggagctgcagacagtggagaatggttaccatgacaacccaacactggaagtgatggagacctcttctgagatgcaggagaagaaggtggtcagcctcaacggggagctgggggacagctggatcgtccctctggacaacctgaccaaggacgacctggatgaggaggaagacacacacctctagtccggtctgccggtggcctccagcagcaccacagagctccagaccaaccaccccaagtgccgtttggatggggaagggaaagactggggagggagagtgaactccgaggggtgtcccctcccaatccccccagggccttaatttttcccttttcaacctgaacaaatcacattctgtccagattcctcttgtaaaataacccactagtgcctgagctcagtgctgctggatgatgagggagatcaagaaaaagccacgtaagggactttatagatgaactagtggaatcccttcattctgcagtgagattgccgagacctgaagagggtaagtgacttgcccaaggtcagagccacttggtgacagagccaggatgagaacaaagattccatttgcaccatgccacactgctgtgttcacatgtgccttccgtccagagcagtcccgggcaggggtgaaactccagcaggtggctgggctggaaaggagggcagggctacatcctggctcggtgggatctgacgacctgaaagtccagctcccaagttttccttctcctaccccagcctcgtgtacccatcttcccaccctctatgttcttacccctccctacactcagtgtttgttcccacttactctgtcctggggcctctgggattagcacaggttattcataaccttgaaccccttgttctggattcggattttctcacatttgcttcgtgagatgggggcttaacccacacaggtctccgtgcgtgaaccaggtctgcttaggggacctgcgtgcaggtgaggagagaaggggacactcgagtccaggctggtatctcagggcagctgatgaggggtcagcaggaacactggcccattgcccctggcactccttgcagaggccacccacgatcttctttgggcttccatttccaccagggactaaaatctgctgtagctagtgagagcagcgtgttccttttgttgttcactgctcagctgatgggagtgattccctgagacccagtatgaaagagcagtggctgcaggagaggccttcccggggccccccatcagcgatgtgtcttcagagacaatccattaaagcagccaggaaggacaggctttcccctgtatatcataggaaactcagggacatttcaagttgctgagagttttgttatagttgttttctaacccagccctccactgccaaaggccaaaagctcagacagttggcagacgtccagttagctcatctcactcactctgattctcctgtgccacaggaaaagagggcctggaaagcgcagtgcatgctgggtgcatgaagggcagcctgggggacagactgttgtgggaacgtcccactgtcctggcctggagctaggccttgctgttcctcttctctgtgagcctagtggggctgctgcggttctcttgcagtttctggtggcatctcaggggaacacaaagctatgtctattccccaatataggacttttatgggctcggcagttagctgccatgtagaaggctcctaagcagtgggcatggtgaggtttcatctgattgagaagggggaatcctgtgtggaatgttgaactttcgccatggtctccatcgttctgggcgtaaattccctgggatcaagtaggaaaatgggcagaactgcttaggggaatgaaattgccatttttcgggtgaaacgccacacctccagggtcttaagagtcaggctccggctgtagtagctctgatgaaataggctatccactcgggatggcttactttttaaaagggtagggggaggggctggggaagatctgtcctgcaccatctgcctaattccttcctcacagtctgtagccatctgatatcctaggggaaaaggaaggccaggggttcacatagggccccagcgagtttcccaggagttagagggatgcgaggctaacaagttccaaaaacatctgccccgatgctctagtgtttggaggtgggcaggatggagaacagtgcctgtttgggggaaaacaggaaatcttgttaggcttgagtgaggtgtttgcttccttcttgcccagcgctgggttctctccacccagtaggttttctgttgtggtcccgtgggagaggccagactggattattcctcctttgctgatcctgggtcacacttcaccagccagggcttttgacggagacagcaaataggcctctgcaaatcaatcaaaggctgcaaccctatggcctcttggagacagatgatgactggcaaggactagagagcaggagtgcctggccaggtcggtcctgactctcctgactctccatcgctctgtccaaggagaacccggagaggctctgggctgattcagaggttactgctttatattcgtccaaactgtgttagtctaggcttaggacagcttcagaatctgacaccttgccttgctcttgccaccaggacacctatgtcaacaggccaaacagccatgcatctataaaggtcatcatcttctgccacctttactgggttctaaatgctctctgataattcagagagcattgggtctgggaagaggtaagaggaacactagaagctcagcatgacttaaacaggttgtagcaaagacagtttatcatcagctctttcagtggtaaactgtggtttccccaagctgcacaggaggccagaaaccacaagtatgatgactaggaagcctactgtcatgagagtggggagacaggcagcaaagcttatgaaggaggtacagaatattctttgcgttgtaagacagaatacgggtttaatctagtctaggcaccagatttttttcccgcttgataaggaaagctagcagaaagtttatttaaaccacttcttgagctttatcttttttgacaatatactggagaaactttgaagaacaagttcaaactgatacatatacacatatttttttgataatgtaaatacagtgaccatgttaacctaccctgcactgctttaagtgaacatactttgaaaaagcattatgttagctgagtgatggccaagttttttctctggacaggaatgtaaatgtcttactggaaatgacaagtttttgcttgatttttttttttaaacaaaaaatgaaatataacaagacaaacttatgataaagtatttgtcttgtagatcaggtgttttgttttgtttttttaattttaaaatgcaaccctgccccctccccagcaaagtcacagctccatttcagtaaaggttggagtcaatatgctctggttggcaggcaaccctgtagtcatggagaaaggtatttcaagatctagtccaatctttttctagagaaaaagataatctgaagctcacaaagatgaagtgacttcctcaaaatcacatggttcaggacagaaacaagattaaaacctggatccacagactgtgcgcctcagaaggaataatcggtaaattaagaattgctactcgaaggtgccagaatgacacaaaggacagaattcctttcccagttgttaccctagcaaggctagggagggcatgaacacaaacataagaactggtcttctacactttctctgaatcatttaggtttaagatgtaagtgaacaattctttctttctgccaagaaacaaagttttggatgagcttttatatatggaacttactccaacaggactgagggaccaaggaaacatgatgggggaggcagagagggcaagagtaaaactgtagcatagcttttgtcacggtcactagctgatccctcaggtctgctgcaaacacagcatggaggacacagatgactctttggtgttggtctttttgtctgcagtgaatgttcaacagtttgcccaggaactgggggatcatatatgtcttagtggacaggggtctgaagtacactggaatttactgagaaacttgtttgtaaaaactatagttaataattattgcattttcttacaaaaatatattttggaaaattgtatactgtcaattaaagtgtttttgtgtaaactggttcaaaaaaaaaaaaaaaaaaaaaaaaa

SEQ ID NO: 14129 - DNA, 5833 bp, Homo sapiens
cccaagctaacctccccaccccaataggatctggtggaagaaaagtcaggcaaacacaagcacgcacacaccactgggagatcagatcttctagctggctctctgctgccacagctccgccgaagggagggggtggaagaggaggactaaactcagagctgagaggagaggcaggtgtgtgcaggtgcatcacctggatcatgaggtcacccctctgctggctcctcccacttctcatcttggcctcagtggcccaaggccagccaacaagacgaccaagacccgggactgggcccgggcgcagacccaggcccaggcccaggcccacacccagctttcctcagcctgatgaaccagcagagccaacagacctgcctcctcccctccctccaggccctccatctatcttccctgactgtccccgcgaatgctactgcccccctgatttcccatctgccctctactgtgatagccgcaacctgcgaaaggtccctgtcatcccgccccgcatccattacctctatctccagaacaacttcatcactgagctcccggtggagtccttccagaatgccacaggcctgcgatggattaacctggacaacaaccgaatccgcaagatagaccagagggtgctggagaaactgcccggcctggtgttcctctacatggagaagaaccagttggaagaggtcccctcggccctgccccggaacctggagcagctgaggctgagccagaaccacatctccagaatcccgcctggtgtcttcagcaagctggagaacctgctgctcctggatctccagcacaacaggctgagcgacggcgtcttcaagcccgacaccttccatggcctcaagaacctcatgcagctcaacctggcccacaacatcctgagaaagatgccgcccagggtccccaccgccattcaccagctctacctggacagtaacaagattgagaccatccctaacggatacttcaagagctttcccaatcttgccttcattcggcttaactacaacaagctgacagacaggggactccccaagaactcctttaatatctccaacctgcttgtgctccacctgtcccacaacaggatcagcagtgtgcccgccatcaacaacaggctggaacacctgtacctcaacaacaatagcatcgagaaaatcaacggaacccagatttgccccaacgacctagtggcgttccatgacttctcctcggacctggagaacgtgccacacctgcgctacctgcggctggatggaaactacttgaagccgcccatcccgctggacctcatgatgtgcttccgcctcctgcagtccgtggtcatctaggccctactccgccaccggatctgctctgaccgcacttgaaggctggggcccaggcacctgtgccggccattcgttttctctctctccctttctttctcccagctttgcctcccttatcccaccctcgaggcagggaaaagccatctattcttctgcagcctcaggagcgagacttcaaggactcagtttggttccacccagttgaaagacacccagtgcacacccaaactcctggccttctgtggtttccctttgctccagaaacacagatgtgtctaaagacttggtgtccccttctctctcctcccccacccgccactcctgggtacatctgggccgtggactatctgatcttggtcctggccgagcaaacagcccggaggtaaggttcagaaagtccccctggggactcctccatcttcggcagctctggctcaaagaggccgagaaacccagttctcctgggccaaggatcccttctggcaaagctgctgctccgccgcttggttccccggcaccagacatcgccctggccctgctggcccgggtatcgggaaggaggagcgagggaatgacggaggtagggtgcagggtcagggctcccgcaggggcctgcatctggccagcaggacacagggatgcgcagggcgcccccttctgttccagggtgaacatagcacacgccctcctggctgggcctcaggaggaacagccaaggagaagaatggcccaaggaactaggaagcagccatgggagaggggaagggttcaagcccgggatgggcccgcgtgacgtcgatgggtcctgcggcccccttgcccaacctcgggtttagggaggagggttcacagtgtttttgtgggggcgggggaaggaagaggcagccccgcccccgccatctgttctccatcagtgtgcgcggcccagccatttccaccctcgggaggcggctcctgagaaacagggaggaaggggcggagcacctggacgtctcccagaagcccctccacgtttgaaaatgcgcctcctcctcggagacagacgcatcggtgccacctagtggctggtgggagtaacagctggtcccagtcttgcgcctggccctcttcctggggtgattttcctcggtggaggaggcccgtggggtcccaacacggaagagccatgggccgtgtgcatggtgtcgctctcctctagggtctagcgggcacaaacgtccccaggctgggctcattcccatcgtgagtgagcccaggtgaggacatagtcggctcccgtttgttgtaggcccttcccaggtgccttctcagctccctcatctgtaaaccgaggaggtggataagatgctcccggccgggcgcggtggctcacgcctgtaatcccagcactttgggaggccgaggcgggcagattattgcctgagctcaggagttcgaaaccaccctgggcaacatggtgaaacccccgtctctactaaaatacaaaaaaattagccaggcatagtggcgcgcgcctataatcccagctactgggaggctgaggcgggagaatcgcttgagccggggaggcggaggttgcagtgaggcgagattgtgccactgcactccagcttgggcgacagagtgagactccgtctcaaaaaagaaaaaaaaaagatgctcctctgaggtccctccggcgctcatgttccgagtctgcagctccacactttaaatcatactcgaatgcaggacaagtcctaaatatttgccccttcccttgcagtaatttattttctgtatggactgtccctcccccagaggcttccccaccctccattgcctggcccaggtgagcagcttggcaggtctccaagtggaacccggtccagacagggctgcctcgacttcacctttccccctaacttcctccaagggatgctgccccttctcagccccctgcgtgtgtatattggtgggaggcatagaggatggatgttctagaaatgagtaagacacagtgcccacccccaagttaggatgaaaaaagttccagaggtttttaagaaattggattaagctgggtccctaacttcaagaaattcccattatgctccttctcacctttcttttttgctaattatggaaaatagggcccatttcatcatagcctccttcccccgtgctccactacaatcgccgcattctttctagctgcagctggtttcttcaaggctcctgcttaaagtccacacgttattatggccgaaagcaacctggtgcttcggcctggataagagccccttctgcatcttattcacagcttgcagcctcagcccctttgatgaggccctcaggggagaggtcattaccttgatcctgcaaacccagactcgttgagcagcaacgcaatcaccatcatcccactgcccaatctagaatatgtctgctctcctttgctctctgcagctgtaagccagaggggattcaaggtaaataggctttacaggctcccctcctccaaacacacacagaatgggctggtttctttcaagtttaaaaaaagcccccttctccatgcacaagttcattccctccatgctgtcgtcatcgacatatacaggtgtgtacgtaggtgtatgtgtgtactctgcacgtatatctcttctgtcttgaagaccctgttaactttgtgaaataacttccacatttcaacacacttcacagtacaggaaataaagtaatatgaaaaacaccctgcgtgaactcaacggtgtgaacaggtcaagaataacacttcaaagtcatcttgccagccaggcgtggtggatcacgcctgtaatcccagcactctgggaggccaaagcgggcagatcacctgaggtcaggagttcaagaccagcctggccaacatagtgaaaccccttgtttactcaaaatacaaaaattggctgggtgcggtggtacatgcctgtagtcccagctacttgggaggctgaggcaggagaattgcttgaaccctggaggcagaagttgcagtgagccgagatcgcaccactgcactccagcctaggagacaaaacgagacttcatttaaaaaaaataaaaataaaaataaaaataaagtcatcttgccacccaccccctaccattgagccaccatgcccagccccaaagcctcttaattgctctaacaagatgagtggggaaaagattatactcttaagaaattcctacgaaagctatccaaaagccttttctttcctcttttcttattatttttaaatagaggcagggtctcattatgttgcccaggctggtctggaactcctggcctcaagtgatcctcccaccttggcctccccagagtgctgggattacacacgtgagtcaccatgcccagccccaaagccatttcttgaagaatttctcgcaaactcacaaccctcatgaaaaattaatcctcagttccacgagactgcccacccacagacaaaaaaatatatatattcctaaagtcggaccagaaatctgacagctgcctttgaaacccaaagcctcgggttctttcaagctacatgtactaaattgtcgaaggtctcccaggagctctgtactgaggcagacacagaaagacacaaaacggtcgtctttcctgcccaagtaaagcttacagactaactggggagatgtagtgtgcatacaaaacagtaaaagagccatctcaaggacagagagcatagaccaagtcatctggaatggtctacatgccatgcggaagtccaccgaagggttagaacagggtgtcccagactctctcttctgagggaaggttggttgcaaaagtgggattcatgaccctcccaggctacaccatcttctttagaatgagaactgccaggtgacgccctcgctgctcctacctggctactaaacatcgacttcggttcacttcacggatgttcagtggatatcggtcacatgccaggtccccagctacgcattcaaggatggataatatacatagcagcacatccttgaggaactcataccttggtaaagggaaagaaatccatgaatggatacctctgtgtcctaagtgtttgtaataatgctgtgtgtcaggcctctgagcccaagctaagccatcatatcccctgtgacctgcatgtgcacatccagacggctggttcctaccttaactgatgatattccaccacaaaagaagtgaaaatggctggtccctgccttaactgatgacattaccttgtgaaattccttctcctggctcatcctggctcaaaagctcccccactgaacaccttgcaacccccacccctggccaccagagaacaaccccctttgactgtaattttccattacctacccacatcttataaaatggccccatccctatctcccttcgctgactcttttcggactcagcccgcctgcacccaggtgaaataaacagccttgttgctcacacaaaaaaaaaaaaaaaa

SEQ ID NO: 14130 - DNA, 4742 bp, Homo sapiens
ttttctgcccttctttgctttggtggcttccttgtggttcctcagtggtgcctgcaacccctggttcacctccttccaggttctggctccttccagccatggctctcagagtccttctgttaacagccttgaccttatgtcatgggttcaacttggacactgaaaacgcaatgaccttccaagagaacgcaaggggcttcgggcagagcgtggtccagcttcagggatccagggtggtggttggagccccccaggagatagtggctgccaaccaaaggggcagcctctaccagtgcgactacagcacaggctcatgcgagcccatccgcctgcaggtccccgtggaggccgtgaacatgtccctgggcctgtccctggcagccaccaccagcccccctcagctgctggcctgtggtcccaccgtgcaccagacttgcagtgagaacacgtatgtgaaagggctctgcttcctgtttggatccaacctacggcagcagccccagaagttcccagaggccctccgagggtgtcctcaagaggatagtgacattgccttcttgattgatggctctggtagcatcatcccacatgactttcggcggatgaaggagtttgtctcaactgtgatggagcaattaaaaaagtccaaaaccttgttctctttgatgcagtactctgaagaattccggattcactttaccttcaaagagttccagaacaaccctaacccaagatcactggtgaagccaataacgcagctgcttgggcggacacacacggccacgggcatccgcaaagtggtacgagagctgtttaacatcaccaacggagcccgaaagaatgcctttaagatcctagttgtcatcacggatggagaaaagtttggcgatcccttgggatatgaggatgtcatccctgaggcagacagagagggagtcattcgctacgtcattggggtgggagatgccttccgcagtgagaaatcccgccaagagcttaataccatcgcatccaagccgcctcgtgatcacgtgttccaggtgaataactttgaggctctgaagaccattcagaaccagcttcgggagaagatctttgcgatcgagggtactcagacaggaagtagcagctcctttgagcatgagatgtctcaggaaggcttcagcgctgccatcacctctaatggccccttgctgagcactgtggggagctatgactgggctggtggagtctttctatatacatcaaaggagaaaagcaccttcatcaacatgaccagagtggattcagacatgaatgatgcttacttgggttatgctgccgccatcatcttacggaaccgggtgcaaagcctggttctgggggcacctcgatatcagcacatcggcctggtagcgatgttcaggcagaacactggcatgtgggagtccaacgctaatgtcaagggcacccagatcggcgcctacttcggggcctccctctgctccgtggacgtggacagcaacggcagcaccgacctggtcctcatcggggccccccattactacgagcagacccgagggggccaggtgtccgtgtgccccttgcccagggggagggctcggtggcagtgtgatgctgttctctacggggagcagggccaaccctggggccgctttggggcagccctaacagtgctgggggacgtaaatggggacaagctgacggacgtggccattggggccccaggagaggaggacaaccggggtgctgtttacctgtttcacggaacctcaggatctggcatcagcccctcccatagccagcggatagcaggctccaagctctctcccaggctccagtattttggtcagtcactgagtgggggccaggacctcacaatggatggactggtagacctgactgtaggagcccaggggcacgtgctgctgctcaggtcccagccagtactgagagtcaaggcaatcatggagttcaatcccagggaagtggcaaggaatgtatttgagtgtaatgatcaggtggtgaaaggcaaggaagccggagaggtcagagtctgcctccatgtccagaagagcacacgggatcggctaagagaaggacagatccagagtgttgtgacttatgacctggctctggactccggccgcccacattcccgcgccgtcttcaatgagacaaagaacagcacacgcagacagacacaggtcttggggctgacccagacttgtgagaccctgaaactacagttgccgaattgcatcgaggacccagtgagccccattgtgctgcgcctgaacttctctctggtgggaacgccattgtctgctttcgggaacctccggccagtgctggcggaggatgctcagagactcttcacagccttgtttccctttgagaagaattgtggcaatgacaacatctgccaggatgacctcagcatcaccttcagtttcatgagcctggactgcctcgtggtgggtgggccccgggagttcaacgtgacagtgactgtgagaaatgatggtgaggactcctacaggacacaggtcaccttcttcttcccgcttgacctgtcctaccggaaggtgtccacgctccagaaccagcgctcacagcgatcctggcgcctggcctgtgagtctgcctcctccaccgaagtgtctggggccttgaagagcaccagctgcagcataaaccaccccatcttcccggaaaactcagaggtcacctttaatatcacgtttgatgtagactctaaggcttcccttggaaacaaactgctcctcaaggccaatgtgaccagtgagaacaacatgcccagaaccaacaaaaccgaattccaactggagctgccggtgaaatatgctgtctacatggtggtcaccagccatggggtctccactaaatatctcaacttcacggcctcagagaataccagtcgggtcatgcagcatcaatatcaggtcagcaacctggggcagaggagcctccccatcagcctggtgttcttggtgcccgtccggctgaaccagactgtcatatgggaccgcccccaggtcaccttctccgagaacctctcgagtacgtgccacaccaaggagcgcttgccctctcactccgactttctggctgagcttcggaaggcccccgtggtgaactgctccatcgctgtctgccagagaatccagtgtgacatcccgttctttggcatccaggaagaattcaatgctaccctcaaaggcaacctctcgtttgactggtacatcaagacctcgcataaccacctcctgatcgtgagcacagctgagatcttgtttaacgattccgtgttcaccctgctgccgggacagggggcgtttgtgaggtcccagacggagaccaaagtggagccgttcgaggtccccaaccccctgccgctcatcgtgggcagctctgtcgggggactgctgctcctggccctcatcaccgccgcgctgtacaagctcggcttcttcaagcggcaatacaaggacatgatgagtgaagggggtcccccgggggccgaaccccagtagcggctccttcccgacagagctgcctctcggtggccagcaggactctgcccagaccacacgtagcccccaggctgctggacacgtcggacagcgaagtatccccgacaggacgggcttgggcttccatttgtgtgtgtgcaagtgtgtatgtgcgtgtgtgcaagtgtctgtgtgcaagtgtgtgcacatgtgtgcgtgtgcgtgcatgtgcacttgcacgcccatgtgtgagtgtgtgcaagtatgtgagtgtgtccaagtgtgtgtgcgtgtgtccatgtgtgtgcaagtgtgtgcatgtgtgcgagtgtgtgcatgtgtgtgctcaggggcgtgtggctcacgtgtgtgactcagatgtctctggcgtgtgggtaggtgacggcagcgtagcctctccggcagaagggaactgcctgggctcccttgtgcgtgggtgaagccgctgctgggttttcctccgggagaggggacggtcaatcctgtgggtgaagacagagggaaacacagcagcttctctccactgaaagaagtgggacttcccgtcgcctgcgagcctgcggcctgctggagcctgcgcagcttggatggagactccatgagaagccgtgggtggaaccaggaacctcctccacaccagcgctgatgcccaataaagatgcccactgaggaatgatgaagcttcctttctggattcatttattatttcaatgtgactttaattttttggatggataagcttgtctatggtacaaaaatcacaaggcattcaagtgtacagtgaaaagtctccctttccagatattcaagtcacctccttaaaggtagtcaagattgtgttttgaggtttccttcagacagattccaggcgatgtgcaagtgtatgcacgtgtgcacacacaccacacatacacacacacaagcttttttacacaaatggtagcatactttatattggtctgtatcttgctttttttcaccaatatttctcagacatcggttcatattaagacataaattactttttcattcttttataccgctgcatagtattccattgtgtgagtgtaccataatgtatttaaccagtcttcttttgatatactattttcattctcttgttattgcatcaatgctgagttaataaatcaaatatatgtcatttttgcatatatgtaaggataa

SEQ ID NO: 14131 - DNA, 1543 bp, Homo sapiens
ggccgagatgcgggtcatggcgccccgagccctcctcctgctgctctcgggaggcctggccctgaccgagacctgggcctgctcccactccatgaggtatttcgacaccgccgtgtcccggcccggccgcggagagccccgcttcatctcagtgggctacgtggacgacacgcagttcgtgcggttcgacagcgacgccgcgagtccgagaggggagccgcgggcgccgtgggtggagcaggaggggccggagtattgggaccgggagacacagaagtacaagcgccaggcacaggctgaccgagtgagcctgcggaacctgcgcggctactacaaccagagcgaggacgggtctcacaccctccagaggatgtctggctgcgacctggggcccgacgggcgcctcctccgcgggtatgaccagtccgcctacgacggcaaggattacatcgccctgaacgaggacctgcgctcctggaccgccgcggacaccgcggctcagatcacccagcgcaagttggaggcggcccgtgcggcggagcagctgagagcctacctggagggcacgtgcgtggagtggctccgcagatacctggagaacgggaaggagacgctgcagcgcgcagaacccccaaagacacacgtgacccaccaccccctctctgaccatgaggccaccctgaggtgctgggccctgggcttctaccctgcggagatcacactgacctggcagcgggatggggaggaccagacccaggacaccgagcttgtggagaccaggccagcaggagatggaaccttccagaagtgggcagctgtggtggtgccttctggacaagagcagagatacacgtgccatatgcagcacgaggggctgcaagagcccctcaccctgagctgggagccatcttcccagcccaccatccccatcatgggcatcgttgctggcctggctgtcctggttgtcctagctgtccttggagctgtggtcaccgctatgatgtgtaggaggaagagctcaggtggaaaaggagggagctgctctcaggctgcgtgcagcaacagtgcccagggctctgatgagtctctcatcacttgtaaagcctgagacagctgcctgtgtgggactgagatgcaggatttcttcacacctctcctttgtgacttcaagagcctctggcatctctttctgcaaaggcacctgaatgtgtctgcgttcctgttagcataatgtgaggaggtggagagacagcccacccccgtgtccaccgtgacccctgtccccacactgacctgtgttccctccccgatcatctttcctgttccagagaggtggggctggatgtctccatctctgtctcaaattcatggtgcactgagctgcaacttcttacttccctaatgaagttaagaacctgaatataaatttgtgttctcaaatatttgctatgaagcgttgatggattaattaaataagtcaattcctagaagttgagagagcaaataaagacctgagaaccttccaaaaaaaaaaaaaaaaaaa

SEQ ID NO: 14132 - DNA, 1779 bp, Homo sapiens
gtgactgggtggggctgcctcacttctgcctgatttgggaagcgctgcaaggacaaccggctggggtccttgcgcgccgcggctcagggaggagcaccgactgcgccgcgtaagtgccgcctgccctgcgtgggtcgtgccagctcagcgggacaggtcctcgcctcggtccctcggacttagggagcgcggggcagaccctgagagatggttggtgccatgtggaaggtgattgtttcgctggtcctgttgatgcctggcccctgtgatgggctgtttcgctccctatacagaagtgtttccatgccacctaagggagactcaggacagccattatttctcaccccttacattgaagctgggaagatccaaaaaggaagagaattgagtttggtcggccctttcccaggactgaacatgaagagttatgccggcttcctcaccgtgaataagacttacaacagcaacctcttcttctggttcttcccagctcagatacagccagaagatgccccagtagttctctggctacagggtgggccgggaggttcatccatgtttggactctttgtggaacatgggccttatgttgtcacaagtaacatgaccttgcgtgacagagacttcccctggaccacaacgctctccatgctttacattgacaatccagtgggcacaggcttcagttttactgatgatacccacggatatgcagtcaatgaggacgatgtagcacgggatttatacagtgcactaattcagtttttccagatatttcctgaatataaaaataatgacttttatgtcactggggagtcttatgcagggaaatatgtgccagccattgcacacctcatccattccctcaaccctgtgagagaggtgaagatcaacctgaacggaattgctattggagatggatattctgatcccgaatcaattatagggggctatgcagaattcctgtaccaaattggcttgttggatgagaagcaaaaaaagtacttccagaagcagtgccatgaatgcatagaacacatcaggaagcagaactggtttgaggcctttgaaatactggataaactactagatggcgacttaacaagtgatccttcttacttccagaatgttacaggatgtagtaattactataactttttgcggtgcacggaacctgaggatcagctttactatgtgaaatttttgtcactcccagaggtgagacaagccatccacgtggggaatcagacttttaatgatggaactatagttgaaaagtacttgcgagaagatacagtacagtcagttaagccatggttaactgaaatcatgaataattataaggttctgatctacaatggccaactggacatcatcgtggcagctgccctgacagagcgctccttgatgggcatggactggaaaggatcccaggaatacaagaaggcagaaaaaaaagtttggaagatctttaaatctgacagtgaagtggctggttacatccggcaagcgggtgacttccatcaggtaattattcgaggtggaggacatattttaccctatgaccagcctctgagagcttttgacatgattaatcgattcatttatggaaaaggatgggatccttatgttggataaactaccttcccaaaagagaacatcagaggttttcattgctgaaaagaaaatcgtaaaaacagaaaatgtcataggaataaaaaaattatcttttcatatctgcaagatttttttcatcaataaaaattatccttgaaacaa

SEQ ID NO: 14133 - DNA, 1691 bp, Homo sapiens
gtgactgggtggggctgcctcacttctgcctgatttgggaagcgctgcaaggacaaccggctggggtccttgcgcgccgcggctcagggaggagcaccgactgcgccgcaccctgagagatggttggtgccatgtggaaggtgattgtttcgctggtcctgttgatgcctggcccctgtgatgggctgtttcgctccctatacagaagtgtttccatgccacctaagggagactcaggacagccattatttctcaccccttacattgaagctgggaagatccaaaaaggaagagaattgagtttggtcggccctttcccaggactgaacatgaagagttatgccggcttcctcaccgtgaataagacttacaacagcaacctcttcttctggttcttcccagctcagatacagccagaagatgccccagtagttctctggctacagggtgggccgggaggttcatccatgtttggactctttgtggaacatgggccttatgttgtcacaagtaacatgaccttgcgtgacagagacttcccctggaccacaacgctctccatgctttacattgacaatccagtgggcacaggcttcagttttactgatgatacccacggatatgcagtcaatgaggacgatgtagcacgggatttatacagtgcactaattcagtttttccagatatttcctgaatataaaaataatgacttttatgtcactggggagtcttatgcagggaaatatgtgccagccattgcacacctcatccattccctcaaccctgtgagagaggtgaagatcaacctgaacggaattgctattggagatggatattctgatcccgaatcaattatagggggctatgcagaattcctgtaccaaattggcttgttggatgagaagcaaaaaaagtacttccagaagcagtgccatgaatgcatagaacacatcaggaagcagaactggtttgaggcctttgaaatactggataaactactagatggcgacttaacaagtgatccttcttacttccagaatgttacaggatgtagtaattactataactttttgcggtgcacggaacctgaggatcagctttactatgtgaaatttttgtcactcccagaggtgagacaagccatccacgtggggaatcagacttttaatgatggaactatagttgaaaagtacttgcgagaagatacagtacagtcagttaagccatggttaactgaaatcatgaataattataaggttctgatctacaatggccaactggacatcatcgtggcagctgccctgacagagcgctccttgatgggcatggactggaaaggatcccaggaatacaagaaggcagaaaaaaaagtttggaagatctttaaatctgacagtgaagtggctggttacatccggcaagcgggtgacttccatcaggtaattattcgaggtggaggacatattttaccctatgaccagcctctgagagcttttgacatgattaatcgattcatttatggaaaaggatgggatccttatgttggataaactaccttcccaaaagagaacatcagaggttttcattgctgaaaagaaaatcgtaaaaacagaaaatgtcataggaataaaaaaattatcttttcatatctgcaagatttttttcatcaataaaaattatccttgaaacaa

SEQ ID NO: 14134 - DNA, 1048 bp, Homo sapiens
ggcgcttaggggctgaggcgcgatggcaggtgtcggggctgggcctctgcgggcgatggggcggcaggccctgctgcttctcgcgctgtgcgccacaggcgcccaggggctctacttccacatcggcgagaccgagaagcgctgtttcatcgaggaaatccccgacgagaccatggtcatcggcaactatcgtacccagatgtgggataagcagaaggaggtcttcctgccctcgacccctggcctgggcatgcacgtggaagtgaaggaccccgacggcaaggtggtgctgtcccggcagtacggctcggagggccgcttcacgttcacctcccacacgcccggtgaccatcaaatctgtctgcactccaattctaccaggatggctctcttcgctggtggcaaactgcgtgtgcatctcgacatccaggttggggagcatgccaacaactaccctgagattgctgcaaaagataagctgacggagctacagctccgcgcccgccagttgcttgatcaggtggaacagattcagaaggagcaggattaccaaaggtatcgtgaagagcgcttccgactgacgagcgagagcaccaaccagagggtcctatggtggtccattgctcagactgtcatcctcatcctcactggcatctggcagatgcgtcacctcaagagcttctttgaggccaagaagctggtgtagtgccctctttgtatgacccttcctttttacctcatttatttggtactttccccacacagtcctttatccgcctggatttttagggaaaaaaatgaaaaagaataagtcacattggttccatggccacaaaccattcagatcagccacttgctgaccctggttcttaaggacacatgacattagtccaatctttcaaaatcttgtcttagggcttgtgaggaatcagaactaacccaggactcagtcctgcttcttttgcctcgagtgattttcctctgtttttcactaaataagcaaatgaaaactctctccattaaaaaaaaaaaaaaaaaaaaaaaaaaa

SEQ ID NO: 14135 - DNA, 5327 bp, Homo sapiens
actttcggtcctgggggagctaggccggcggcagtggtggtggcggcggcgcaagggtgagggcggccccagaaccccaggtaggtagagcaagaagatggtgtttctgcccctcaaatggtcccttgcaatcatgtcatttctactttcctcactgttggctctcttaactgtgtccactccttcatggtgtcagagcactgaagcatctccaaaacgtagtgatgggacaccatttccttggaataaaatacgacttcctgagtacgtcatcccagttcattatgatctcttgatccatgcaaaccttaccacgctgaccttctggggaaccacgaaagtagaaatcacagccagtcagcccaccagcaccatcatcctgcatagtcaccacctgcagatatctagggccaccctcaggaagggagctggagagaggctatcggaagaacccctgcaggtcctggaacacccccctcaggagcaaattgcactgctggctcccgagcccctccttgtcgggctcccgtacacagttgtcattcactatgctggcaatctttcggagactttccacggattttacaaaagcacctacagaaccaaggaaggggaactgaggatactagcatcaacacaatttgaacccactgcagctagaatggcctttccctgctttgatgaacctgccttcaaagcaagtttctcaatcaaaattagaagagagccaaggcacctagccatctccaatatgccattggtgaaatctgtgactgttgctgaaggactcatagaagaccattttgatgtcactgtgaagatgagcacctatctggtggccttcatcatttcagattttgagtctgtcagcaagataaccaagagtggagtcaaggtttctgtttatgctgtgccagacaagataaatcaagcagattatgcactggatgctgcggtgactcttctagaattttatgaggattatttcagcataccgtatcccctacccaaacaagatcttgctgctattcccgactttcagtctggtgctatggaaaactggggactgacaacatatagagaatctgctctgttgtttgatgcagaaaagtcttctgcatcaagtaagcttggcatcacagtgactgtggcccatgaactggcccaccagtggtttgggaacctggtcactatggaatggtggaatgatctttggctaaatgaaggatttgccaaatttatggagtttgtgtctgtcagtgtgacccatcctgaactgaaagttggagattatttctttggcaaatgttttgacgcaatggaggtagatgctttaaattcctcacaccctgtgtctacacctgtggaaaatcctgctcagatccgggagatgtttgatgatgtttcttatgataagggagcttgtattctgaatatgctaagggagtatcttagcgctgacgcatttaaaagtggtattgtacagtatctccagaagcatagctataaaaatacaaaaaacgaggacctgtgggatagtatggcaagtatttgccctacagatggtgtaaaagggatggatggcttttgctctagaagtcaacattcatcttcatcctcacattggcatcaggaaggggtggatgtgaaaaccatgatgaacacttggacactgcagaggggttttcccctaataaccatcacagtgagggggaggaatgtacacatgaagcaagagcactacatgaagggctctgacggcgccccggacactgggtacctgtggcatgttccattgacattcatcaccagcaaatccaacatggtccatcgatttttgctaaaaacaaaaacagatgtgctcatcctcccagaagaggtggaatggatcaaatttaatgtgggcatgaatggctattacattgtgcattacgaggatgatggatgggactctttgactggccttttaaaaggaacacacacagcagtcagcagtaatgatcgggcaagtctcattaacaatgcatttcagctcgtcagcattgggaagctgtccattgaaaaggccttggatttatccctgtacttgaaacatgaaactgaaattatgcccgtgtttcaaggtttgaatgagctgattcctatgtataagttaatggagaaaagagatatgaatgaagtggaaactcaattcaaggccttcctcatcaggctgctaagggacctcattgataagcagacatggacagacgagggctcagtctcagagcaaatgctgcggagtgaactactactcctcgcctgtgtgcacaactatcagccgtgcgtacagagggcagaaggctatttcagaaagtggaaggaatccaatggaaacttgagcctgcctgtcgacgtgaccttggcagtgtttgctgtgggggcccagagcacagaaggctgggattttctttatagtaaatatcagttttctttgtccagtactgagaaaagccaaattgaatttgccctctgcagaacccaaaataaggaaaagcttcaatggctactagatgaaagctttaagggagataaaataaaaactcaggagtttccacaaattcttacactcattggcaggaacccagtaggatacccactggcctggcaatttctgaggaaaaactggaacaaacttgtacaaaagtttgaacttggctcatcttccatagcccacatggtaatgggtacaacaaatcaattctccacaagaacacggcttgaagaggtaaaaggattcttcagctctttgaaagaaaatggttctcagctccgttgtgtccaacagacaattgaaaccattgaagaaaacatcggttggatggataagaattttgataaaatcagagtgtggctgcaaagtgaaaagcttgaacatgatcctgaagctgacgcaacaggatgaaaatccatcagaatctcagactacagcactaaatatgctttgatgctacatcaaacggaatggaagcatagctgacttcgctaaagttacttcatctccatctagcaaatgaggcactgttctcaaccaaaggagatggggatctggtttagggcaatccctttataatttgatgtgctgtggtctccttggtaatgtataatttggtattgcacaggtgattagtcaaggaagtctggaaaagctttggtcccacagccttgcctcacagcatgtaaataattaaaacaatattgatgctgaggttcttctactgctagtatgaaagtgacaaatttttactggtgtgaattgggaagaaaacaatgctattccatgacgtttgtaaaatgtttgtaaaagctcaaacatgacgattccataaaataaacttgaggttaaataatgggtagtaaattatagaatgtataagaaaaaatataaaggagaaaatcaattatcaggaaagctaaagaacttttcaaatctagtaatttgaatatagacacaatgcactttattgcactttcaattcttataaagcaacaataatattaaggtccttgactatgtgtacaatgttttcacatatatagtttcatttaatcatttcaaagttaatctctgccatctcgctaaatcatcagtctcggctcttctgaaatagaaggtgcctgatcttcctaataattctgcctattttcatttgctttaaacaggcgccctattttctttctagttgtggctgcgcaaaaacatttatctcccaaataagatgtgctgcttaccgaggtatcacggggtggggctccagcttgggtcgttgaagctggggtttgggaaaccacttcagagatggcagcagcaagtttagcatcttcaaatttcttttattgaaaaaaattttattagtaacatgttgtatataaaattatgagcacaatgccatcacttaactataactcttaaagatagcttaatgactgtttattctcttgaccaaatagactcataataacatataattttaaaagaaatttaaattctttcttctctattgtattattttatacaatttgctatttctatttccttctcatattgattattctaaatactatgcaataatataacttagagttccacggtttgtttacacatttcctgttgtacatttaggttattcaaagttttcagctcttttaaaattgctctgaataagttctagtgagtgagttatggtgctggctatattttgctaaactgccctctcaaatgttgctaggaattcatactgcgaaaagcaatgaataagcatgcctgttttcccatggccttgcttgccagaatttgacttttattatgataatcagtgtaaaatgatatactactattgcttgtatattgtggtatacggtgtcaggtttcagggttttttttcaacgttaaatattctagaaactttctgaaataatttctgtttaaaaatattgaatatttgcttcatttcaaatactcccttttgacaaaaaaacttaggtataactgttgatgaaaaaccagaaaaaagtccagaactctttggtgactccaactatggatagcttattttgaaaaaggagaattgcaaattttaccaaaagatggagaaaagcacattaaaaagataccaacattcagaaattcatttcagcatgttattattggaaattatttaaactaatttagataactataagatacttattgtccatttataccctgtaaagccgttttagaatgtaatattttaggtaatccaaaatgtactaaattaaattcatttttagttatgagaaatctttgcttatatgacaaatgaaaagaataacaagttgtcaaatgaaaagaatgacattgaaacatttgtattgtctcttcttaaactatcttattgacttattatttaagccttttaatactaagtatgaaacaacctatggtctggaaatttgtatcgcaaagctatatgtgcatatgttatttaattcatctaacgctacacaaaagcataaaataatgatttttcactctctttaaaaatactaaatcatttatgtccatttctcaattttttcattgatctatgctttgagtttgctttctcaacattattgtattttccacttattattactgtataacatatgctagtgtttagttggattaatcttacctaaaagtactgaaaaatgctttttagtactttttcatattttatacatttattttccgaatgtatcattgaataattttattgagttataaaagtatcttattgctatttaataaaaaattaacacat

SEQ ID NO: 14136 - DNA, 2565 bp, Homo sapiens
gccatccctggggaacagaatgcaacccgggatctagagagctgtcacattccaagaaatatttaaattgtgctgattttcttctggagaactgagcccagggaatgaaactctccatcaagtcatggctttgcgggcaatagatcagaggatattgccagttttctaatggattattgttatcgggcaggttttctctgaagcttctcagctgctgttacattctacttggatgggaactggagatcagccagatcacttgtatgcacaaagctgctgtggatctgtctttcaaacaagagctgcagaaaacgctatagcaaggttgaagctttatccactctgactcacccagaaagcacagccctgattctgcgtgagaaaggctatctctacagaaactaaaacggtatcaacggtttctgtacagcacagattatgacagcgtctttcttaagcagatggaatcttggaacgtctcatgcttgggaaggacatggtcagatttgttgtaagaaagactgtgcagaggagtgtggcaaagggatccagaagatgcaaggtattatttagaaaagaagagaatgtttaaatttcatcaaatgaaacatatttttgaaatacttgataaaatgagatgcctgagaaaacgttctacagtgtcattcttgggagttcttgtcatttttctcctttttatgaacttgtacattgaagatagctatgttctggaaggagacaaacaacttataagggaaacatccacacatcaactgaattcagaacgctatgttcatactttcaaggatttatctaatttctcaggagccataaatgtcacctatcgctacctagctgccacacctttacaaagaaagcggtatcttacaattggactttcttcagtaaagcgaaaaaaaggaaactatttacttgagacaattaagtcaatttttgagcaatccagctatgaagagctgaaggaaatttcagtggtggttcacctagcagactttaattcttcctggcgtgatgccatggtccaggatattacacagaaatttgcgcaccatattattgcaggaagattaatggttatacatgctccagaggagtattacccaatcctagatggccttaaaagaaattacaatgatccagaagatagagtcaaatttcgttccaagcaaaatgtagattatgcttttctgcttaatttttgtgccaatacttcagactattatgtaatgcttgaagatgatgttcgatgttcaaaaaatttcttaactgccatcaagaaagtcattgcatccctagaaggaacttactgggtaactcttgaattctctaagcttggctacattggtaaactctatcattctcatgatctcccacgtttggcccattttttattaatgttttatcaagaaatgccttgtgattggctattgactcatttccgtggtctgttggctcagaaaaatgtgatccgttttaaaccatctctctttcagcacatgggctattattcatcatacaaagggacggagaataagctgaaggatgatgattttgaagaggagtcatttgacattcctgataacccccctgcaagtctgtacaccaacatgaatgtgtttgaaaattatgaagcaagcaaggcttacagtagtgttgatgagtacttttgggggaaaccaccttcaacaggagatgtttttgtgattgtatttgaaaatccaattataataaaaaaaattaaagtaaatactggaacagaagatcggcaaaatgatattttgcatcatggagccctagatgttggggaaaacgttatgcctagcaaacaaaggagacaatgttctagttacttaagactaggagaattcaaaaatggaaactttgaaatgtcaggtgtaaatcaaaaaattccatttgatatacattgtatgaggatatatgtcaccaaaacacaaaaggaatggctaattattaggagtattagcatttggacttcttagccaattaaatcagtatgttcagtttctgaagcagttcttcctgcttcgtcttttgctacctttgtcttttggagggaaagcaatggatgggatatgttaaaagaaacattaattacattggcagttttcatttatacattgttgacataattttactcttaatacacacttgtatttattttaacgtctgaagttgaatatcagtctatagctaatgctactttcatttatatttttaaatgttcttagttttaaaatttcaactgattgtcgaaagggtaatatgaaagattttaaatgaaaaaaatttgttggatgatgatttttgaaaaatagtcaccaactgtatatacttcctcaagaactgataattcattatatcatcagatagcttttattaagcatctgtgggaatatacagttgggtggaatgataatctggtttattttttctgtaaacttaagtttccgttgacttctgtacatctacaatgaatacctcctcatagaagtggtgtctttacataattttttgtgtaggtga

SEQ ID NO: 14137 - DNA, 4521 bp, Homo sapiens
acttcattcacttgcaaatcagtgtgtgcccacaagagccagctctcccgagcccgtaaccttcgcatcccaagagctgcagtttcagccgcgacagcaagaacggcagagccggcgaccgcggcggcggcggcggcggaggcaggagcagcctgggcgggtcgcagggtctccgcgggcgcaggaaggcgagcagagatatcctctgagagccaagcaaagaacattaaggaaggaaggaggaatgaggctggatacggtgcagtgaaaaaggcacttccaagagtggggcactcactacgcacagactcgacggtgccatcagcatgagaacttaccgctacttcttgctgctcttttgggtgggccagccctacccaactctctcaactccactatcaaagaggactagtggtttcccagcaaagaaaagggccctggagctctctggaaacagcaaaaatgagctgaaccgttcaaaaaggagctggatgtggaatcagttctttctcctggaggaatacacaggatccgattatcagtatgtgggcaagttacattcagaccaggatagaggagatggatcacttaaatatatcctttcaggagatggagcaggagatctcttcattattaatgaaaacacaggcgacatacaggccaccaagaggctggacagggaagaaaaacccgtttacatccttcgagctcaagctataaacagaaggacagggagacccgtggagcccgagtctgaattcatcatcaagatccatgacatcaatgacaatgaaccaatattcaccaaggaggtttacacagccactgtccctgaaatgtctgatgtcggtacatttgttgtccaagtcactgcgacggatgcagatgatccaacatatgggaacagtgctaaagttgtctacagtattctacagggacagccctatttttcagttgaatcagaaacaggtattatcaagacagctttgctcaacatggatcgagaaaacagggagcagtaccaagtggtgattcaagccaaggatatgggcggccagatgggaggattatctgggaccaccaccgtgaacatcacactgactgatgtcaacgacaaccctccccgattcccccagagtacataccagtttaaaactcctgaatcttctccaccggggacaccaattggcagaatcaaagccagcgacgctgatgtgggagaaaatgctgaaattgagtacagcatcacagacggtgaggggctggatatgtttgatgtcatcaccgaccaggaaacccaggaagggattataactgtcaaaaagctcttggactttgaaaagaagaaagtgtatacccttaaagtggaagcctccaatccttatgttgagccacgatttctctacttggggcctttcaaagattcagccacggttagaattgtggtggaggatgtagatgagccacctgtcttcagcaaactggcctacatcttacaaataagagaagatgctcagataaacaccacaataggctccgtcacagcccaagatccagatgctgccaggaatcctgtcaagtactctgtagatcgacacacagatatggacagaatattcaacattgattctggaaatggttcgatttttacatcgaaacttcttgaccgagaaacactgctatggcacaacattacagtgatagcaacagagatcaataatccaaagcaaagtagtcgagtacctctatatattaaagttctagatgtcaatgacaacgccccagaatttgctgagttctatgaaacttttgtctgtgaaaaagcaaaggcagatcagttgattcagaccctgcatgctgttgacaaggatgacccttatagtggacaccaattttcgttttccttggcccctgaagcagccagtggctcaaactttaccattcaagacaacaaagacaacacggcgggaatcttaactcggaaaaatggctataatagacacgagatgagcacctatctcttgcctgtggtcatttcagacaacgactacccagttcaaagcagcactgggacagtgactgtccgggtctgtgcatgtgaccaccacgggaacatgcaatcctgccatgcggaggcgctcatccaccccacgggactgagcacgggggctctggttgccatccttctgtgcatcgtgatcctactagtgacagtggtgctgtttgcagctctgaggcggcagcgaaaaaaagagcctttgatcatttccaaagaggacatcagagataacattgtcagttacaacgacgaaggtggtggagaggaggacacccaggcttttgatatcggcaccctgaggaatcctgaagccatagaggacaacaaattacgaagggacattgtgcccgaagcccttttcctaccccgacggactccaacagctcgcgacaacaccgatgtcagagatttcattaaccaaaggttaaaggaaaatgacacggaccccactgccccgccatacgactccttggccacttacgcctatgaaggcactggctccgtggcggattccctgagctcgctggagtcagtgaccacggatgcagatcaagactatgattaccttagtgactggggacctcgattcaaaaagcttgcagatatgtatggaggagtggacagtgacaaagactcctaatctgttgcctttttcattttccaatacgacactgaaatatgtgaagtggctatttctttatatttatccactactccgtgaaggcttctctgttctacccgttccaaaagccaatggctgcagtccgtgtggatccaatgttagagacttttttctagtacacttttatgagcttccaaggggcaaatttttattttttagtgcatccagttaaccaagtcagcccaacaggcaggtgccggaggggaggacagggaacagtatttccacttgttctcagggcagcgtgcccgcttccgctgtcctggtgttttactacactccatgtcaggtcagccaactgccctaactgtacatttcacaggctaatgggataaaggactgtgctttaaagataaaaatatcatcatagtaaaagaaatgagggcatatcggctcacaaagagataaactacataggggtgtttatttgtgtcacaaagaatttaaaataacacttgcccatgctatttgttcttcaagaactttctctgccatcaactactattcaaaacctcaaatccacccatatgttaaaattctcattactcttaaggaatagaagcaaattaaacggtaacatccaaaagcaaccacaaacctagtacgacttcattccttccactaactcatagtttgttatatcctagactagacatgcgaaagtttgcctttgtaccatataaagggggagggaaatagctaataatgttaaccaaggaaatatattttaccatacatttaaagttttggccaccacatgtatcacgggtcacttgaaattctttcagctatcagtaggctaatgtcaaaattgtttaaaaattcttgaaagaattttcctgagacaaattttaacttcttgtctatagttgtcagtattattctactatactgtacatgaaagtagcagtgtgaagtacaataattcatattcttcatatccttcttacacgactaagttgaattagtaaagttagattaaataaaacttaaatctcactctaggagttcagtggagaggttagagccagccacacttgaacctaataccctgcccttgacatctggaaacctctacatatttatataacgtgatacatttggataaacaacattgagattatgatgaaaacctacatattccatgtttggaagacccttggaagaggaaaattggattcccttaaacaaaagtgtttaagattgtaattaaaatgatagttgattttcaaaagcattaattttttttcattgtttttaactttgctttcatgaccatcctgccatccttgactttgaactaatgataaagtaatgatctcaaactatgacagaaaagtaatgtaaaatccatccaatctattatttctctaattatgcaattagcctcatagttattatccagaggacccaactgaactgaactaatccttctggcagattcaaatcgtttatttcacacgctgttctaatggcacttatcattagaatcttaccttgtgcagtcatcagaaattccagcgtactataatgaaaacatccttgttttgaaaacctaaaagacaggctctgtatatatatatacttaagaatatgctgacttcacttattagtcttagggatttattttcaattaatattaattttctacaaataattttagtgtcatttccatttggggatattgtcatatcagcacatattttctgtttggaaacacactgttgtttagttaagttttaaataggtgtattacccaagaagtaaagatggaaacgtt

SEQ ID NO: 14138 - DNA, 4700 bp, Homo sapiens
gtgctccctcggtccccgcgtccactgagcgccgcgctcggggatggggcccggccggccggcccccgcgccctggcctcgtcacctgctgcgctgcgtcctgctcctcgggtgcctgcacctcggccgtcccggcgcccctggggacgccgccctcccggaacccaacgtcttcctcatcttcagccatggactgcagggctgcctggaggcccagggcgggcaggtcagagtcaccccggcttgcaataccagcctccctgcccagcgctggaagtgggtctcccgaaaccggctattcaacctgggtaccatgcagtgcctgggcacaggctggccaggcaccaacaccacggcctccctgggcatgtatgagtgtgaccgggaagcactgaatcttcgctggcattgtcgtacactgggtgaccagctgtccttgctcctgggggcccgcaccagcaacatatccaagcctggcacccttgagcgtggtgaccagacccgcagtggccagtggcgcatctacggcagcgaggaggacctatgtgctctgccctaccacgaggtctacaccatccagggaaactcccacggaaagccgtgcaccatccccttcaaatatgacaaccagtggttccacggctgcaccagcacgggccgcgaggatggtcacctgtggtgtgccaccacccaggactacggcaaagacgagcgctggggcttctgccccatcaagagtaacgactgcgagaccttctgggacaaggaccagctgactgacagctgctaccagtttaacttccagtccacgctgtcgtggagggaggcctgggccagctgcgagcagcagggtgcggatctgctgagcatcacggagatccacgagcagacctacatcaacggcctcctcactgggtacagctccaccctgtggatcggcttgaatgacttggacacgagcggaggctggcagtggtcggacaactcgcccctcaagtacctcaactgggagagtgaccagccggacaaccccagtgaggagaactgtggagtgatccgcactgagtcctcgggcggctggcagaaccgtgactgcagcatcgcgctgccctatgtgtgcaagaagaagcccaacgccacggccgagcccacccctccagacaggtgggccaatgtgaaggtggagtgcgagccgagctggcagcccttccagggccactgctaccgcctgcaggccgagaagcgcagctggcaggagtccaagaaggcatgtctgcggggcggtggcgacctggtcagcatccacagcatggcggagctggaattcatcaccaagcagatcaagcaagaggtggaggagctgtggatcggcctcaacgatttgaaactgcagatgaattttgagtggtctgacgggagccttgtgagcttcacccactggcacccctttgagcccaacaacttccgggacagtctggaggactgtgtcaccatctggggcccggaaggccgctggaacgacagtccctgtaaccagtccttgccatccatctgcaagaaggcaggccagctgagccagggggccgccgaggaggaccatggctgccggaagggttggacgtggcacagcccatcctgctactggctgggagaagaccaagtgacctacagtgaggcccggcgcctgtgcactgaccatggctctcagctggtcaccatcaccaacaggttcgagcaggccttcgtcagcagcctcatctacaactgggagggcgagtacttctggacggccctgcaggacctcaacagcaccggctccttcttctggctcagtggggatgaagtcatgtacacccactggaaccgggaccagcccgggtacagccgtgggggctgcgtggcgctggccactggcagcgccatggggctgtgggaggtgaagaactgtacctcgttccgggcccgctacatctgccggcagagcctgggcactccagtgacgccggagctgccggggccagatcccacgcccagcctcactggctcctgtccccagggctgggcctcggacaccaaactccggtattgctataaggtgttcagctcagagcggctgcaggacaagaagagctgggtccaggcccagggggcctgccaggagctgggggcccagctgctgagcctggccagctacgaggaggagcactttgtggccaacatgctcaacaagatcttcggtgaatcagaacccgagatccacgagcagcactggttctggatcggcctgaaccgtcgggatcccagagggggtcagagttggcgctggagcgacggcgtagggttctcttaccacaatttcgaccggagccggcacgacgacgacgacatccgaggctgtgcggtgctggacctggcctccctgcagtgggtggccatgcagtgcgacacacagctggactggatctgcaagatccccagaggtacggacgtgcgggagcccgacgacagccctcaaggccgacgggaatggctgcgcttccaggaggccgagtacaagttctttgagcaccactccacgtgggcgcaggcgcagcgcatctgcacgtggttccaggccgagctgacctccgtgcacagccaggcggagctagacttcctgagccacaacttgcagaagttctcccgggcccaggagcagcactggtggatcggcctgcacacctctgagagcgatgggcgcttcagatggacagatggttccattataaacttcatctcctgggcaccaggcaaacctcggcctgtcggcaaggacaagaagtgcgtgtacatgacagccagccgagaggactggggggaccagaggtgcctgacagccttgccctacatctgcaagcgcagcaacgtcaccaaagaaacgcagcccccagacctgccaactacagccctggggggctgcccctctgactggatccagttcctcaacaagtgttttcaggtccagggccaggaaccccagagccgggtgaagtggtcagaggcacagttctcctgtgaacagcaagaggcccagctggtcaccatcacaaaccccttagagcaagcattcatcacagccagcctgcccaatgtgacctttgacctttggattggcctccatgcctcgcagagggacttccagtgggtggagcaggagcctttgatgtatgccaactgggcacctggggagccctctggccctagccctgctcccagtggcaacaaaccgaccagctgtgcggtggtcctgcacagcccctcagcccacttcactggccgctgggacgatcggagctgcacggaggagacccatggcttcatctgccagaagggcacggacccctccctgagcccgtccccagcagcgctgccccccgccccgggcactgagctctcctacctcaacggcaccttccggctgcttcagaagccgctgcgctggcacgatgccctcctgctgtgtgagagccacaatgccagcctggcctacgtgcccgacccctacacccaggccttcctcacgcaggctgcccgagggctgcgcacgccgctctggattgggctggctggcgaggagggctctcggcggtactcctgggtctcagaggagccgctgaactacgtgggctggcaggacggggagccgcagcagccggggggctgtacctacgtagatgtggacggggcctggcgcaccaccagctgtgacaccaagctgcagggggctgtgtgtggggttagcagtgggccccctcctccccgaagaataagctaccatggcagctgtccccagggactggcagactccgcgtggattcccttccgggagcactgctattctttccacatggagctgctgctgggccacaaggaggcgcgacagcgctgccagagagcgggtggggccgtcctgtctatcctggatgagatggagaatgtgtttgtctgggagcacctgcagagctatgagggccagagtcggggcgcctggctgggcatgaacttcaaccccaaaggaggcactctggtctggcaggacaacacagctgtgaactactccaactgggggcccccgggcttgggccccagcatgctgagccacaacagctgctactggattcagagcaacagcgggctatggcgccccggcgcttgcaccaacatcaccatgggtgtcgtctgcaagcttcctcgtgctgagcagagcagcttctccccatcagcgcttccagagaacccagcggccctggtggtggtgctgatggcggtgctgctgctcctggccttgctgaccgcagccctcatcctttaccggaggcgccagagcatcgagcgcggggcctttgagggtgcccgctacagccgcagcagctccagccccaccgaggccactgagaagaacatcctggtgtcagacatggaaatgaatgagcagcaagaatagagccaggcgcgtgggcagggccagggcgggaggagctggggagctggggccctgggtcagtctggccccccaccagctgcctgtccagttggcctatggaagggtgcccttgggagtcgctgttgggagccggagctgggcagagcctgggctggtggggtgccaccctcccacaagggctgggctgagacccagctgagtgcaccgtggaagggcg

SEQ ID NO: 14139 - DNA, 1501 bp, Homo sapiens
ggggtcggccgggtgctaggccggggccgaggccgaggccggggcgggatccagagcgggagccggcgcgggatctgggactcggagcgggatccggagcgggacccaggagccggcgcggggccatggcgaggcgcgggccagggtggcggccgcttctgctgctcgtgctgctggcgggcgcggcgcagggcggcctctacttccgccggggacagacctgctaccggcctctgcggggggacgggctggctccgctggggcgcagcacatacccccggcctcatgagtacctgtccccagcggatctgcccaagagctgggactggcgcaatgtggatggtgtcaactatgccagcatcacccggaaccagcacatcccccaatactgcggctcctgctgggcccacgccagcaccagcgctatggcggatcggatcaacatcaagaggaagggagcgtggccctccaccctcctgtccgtgcagaacgtcatcgactgcggtaacgctggctcctgtgaagggggtaatgacctgtccgtgtgggactacgcccaccagcacggcatccctgacgagacctgcaacaactaccaggccaaggaccaggagtgtgacaagtttaaccaatgtgggacatgcaatgaattcaaagagtgccacgccatccggaactacaccctctggagggtgggagactacggctccctctctgggagggagaagatgatggcagaaatctacgcaaatggtcccatcagctgtggaataatggcaacagaaagactggctaactacaccggaggcatctatgccgaataccaggacaccacatatataaaccatgtcgtttccgtggctgggtggggcatcagtgatgggactgagtactggattgtccggaattcatggggtgaaccatggggcgagagaggctggctgaggatcgtgaccagcacctataaggatgggaagggcgccagatacaaccttgccatcgaggagcactgtacatttggggaccccatcgtttaaggccatgtcactagaagcgcagtttaagaaaaggcatggtgacccatgaccagaggggatcctatggttatgtgtgccaggctggctggcaggaactggggtggctatcaatattggatggcgaggacagcgtggtactggctgcgagtgttcctgagagttgaaagtgggatgacttatgacacttgcacagcatggctctgcctcacaatgatgcagtcagccacctggtgaagaagtgacctgcaacacaggaaacgatgggacctcagtcttcttcagcagaggacttgatattttgtatttggcaactgtgggcaataatatggcatttaagaggtgaaagagttcagacttatcaccattcttatgtcactttagaatcaagggtgggggagggagggagggagttggcagtttcaaatcgcccaagtgatgaataaagtatctggctctgcacgaga

SEQ ID NO: 14140 - DNA, 2516 bp, Homo sapiens
gcgccgctgaacggatggctgagggagccccgcggatcgtttaggaaagccggccagctgatcgtcgtgtgttgccacccattcatgtcaagatgactaagtttggatttttgcgattgtcctatgagaagcaggacacacttttgaagcttctcattctgtcaatggctgctgtattatccttctccactcgtctgtttgctgtcctgagatttgaaagtgttatccatgagtttgatccgtactttaattatcggactaccaggttcctggctgaggaggggttttataaattccataactggtttgatgaccgagcctggtaccctttgggacgaatcattggaggaacaatttacccaggtttaatgatcacctctgctgcaatctaccatgtactccattttttccacatcaccatcgacattcggaatgtctgtgtgttcctggcccctctcttctcctccttcaccaccatcgtcacgtaccaccttaccaaagagctcaaggatgcaggggctgggcttcttgctgctgccatgattgctgtagttcctggatatatctcccgatctgtggctggctcctatgataatgaagggattgccatcttttgcatgctactcacctactacatgtggatcaaggcagtaaagactggttccatctgttgggcagctaagtgtgcccttgcttatttctacatggtctcgtcatggggaggttatgtgttcctgatcaacttaattcctctccacgtcctcgtgctgatgctcacaggccgtttctctcaccggatctatgtggcctactgtactgtttactgcctgggcactatactttctatgcagatctcctttgtgggtttccagcctgtcctttcatcagagcacatggcagcctttggggtctttggtctctgccagatccatgcctttgtggattacctgcgcagcaagttgaatccacaacaatttgaagttcttttccggagcgtcatctctctggtaggctttgtccttctcaccgtgggagctctcctcatgctgacaggaaaaatatctccctggacggggcgtttctactcgctgctggatccctcttatgctaagaacaacatccccatcattgcttctgtgtctgagcatcagcccacaacctggtcctcatactattttgacctgcagctcctcgtcttcatgtttccagttggcctctattactgctttagcaacctgtctgatgcccggatttttatcatcatgtatggtgtgaccagcatgtacttttcagctgtaatggtgcgtctaatgctagtgttggcacctgttatgtgcattctctctggcattggagtctcccaggtgctgtccacatacatgaagaatctggacataagtcgtccagacaagaagagcaagaagcaacaggattccacctaccctattaagaatgaagtggcaagtgggatgatactggtcatggctttctttctcatcacctacacctttcattcaacctgggtgaccagtgaggcctactcttctccgtccattgtactatctgcccgtggtggggatggcagtaggatcatatttgatgacttccgagaagcatattattggcttcgtcataatactccagaggatgcgaaggtcatgtcctggtgggattatggctatcagattacagctatggcaaaccgaacaattttagtggacaataacacatggaataatacccatatttctcgagtagggcaggcaatggcgtccacagaggaaaaagcctatgagatcatgagggagctcgatgtcagctatgtgctggtcatttttggaggcctcactgggtattcctctgatgatatcaacaagtttctttggatggtccggattggagggagcacagatacaggcaaacatatcaaggagaatgactattatactccaactggggagttccgtgtggaccgtgaaggttctccagtgctgctcaactgcctcatgtacaagatgtgttactatcgctttggacaggtttacacagaagccaagcgtcctccaggctttgaccgtgtccgaaatgctgagattgggaataaagactttgagcttgatgtcctggaggaagcatataccacagaacattggctggtcaggatatacaaggtaaaggacctggataatcgaggcttgtcaaggacataaatgtcacgtccagctctgatatgcttcgcactgagcacatcacatttaggacgttgaagattttttttttttttttttttttaatatgcagtttgtaagaacaaaactggatggcatcagaattgtctggaagttttgtcttgggcagtatgggctgggccaaatgaaatgatttttataattctaaacaggttaccaaatgaaatgtcatggctttactttggtcaattaaaggggggaatttttttaaaaaaaaaaaaaaaaaaaaaaaaaaaaaaaaaaaaaaaaaaaaaaaaaaaaaaaaaa

SEQ ID NO: 14141 - DNA, 2856 bp, Homo sapiens
gtaaccgctactcccggacaccagaccaccgccttccgtacacaggggcccgcatcccaccctcccggacctaagagcctgggtcccctgtttccggaggtccgcttcccggcccccagattctggcatcccagccctcagtgtccaagacccaggcagcccgggtccccgcctcccggatccaggcgtccgggatctgcgccaccagaacctagcctcctgcagacctccgccatctgggggcactcaacctcctggagccaagggccccacgtcccacccagagaaactctcgtattcccagctcctagggccaaggaacccgggcgctccgaactcccagctttcggacatctggcacacggggcagagcagagaagctcagcgcccagcctggggaatttaaacactccagcttccaagagccaaggaacttcagtgctgtgaactcacaactctaaggagccctccaaagttccagtctccaggtgctgttactcaactcagtcctaggaacgtcgggtcctgggaaggagcccaagcgctcccagccagcttccaggcgctaagaaaccccggtgcttcccatcatggtggccgatcctcctcgagactccaaggggctcgcagcggcggagcccaccgccaacgggggcctggcgctggcctccatcgaggaccaaggcgcggcagcaggcggctactgcggttcccgggaccaggtgcgccgctgccttcgagccaacctgcttgtgctgctgacagtggtggccgtggtggccggcgtggcgctgggactgggggtgtcgggggccgggggtgcgctggcgttgggcccggagcgcttgagcgccttcgtcttcccgggcgagctgctgctgcgtctgctgcggatgatcatcttgccgctggtggtgtgcagcttgatcggcggcgccgccagcctggaccccggcgcgctcggccgtctgggcgcctgggcgctgctctttttcctggtcaccacgctgctggcgtcggcgctcggagtgggcttggcgctggctctgcagccgggcgccgcctccgccgccatcaacgcctccgtgggagccgcgggcagtgccgaaaatgcccccagcaaggaggtgctcgattcgttcctggatcttgcgagaaatatcttcccttccaacctggtgtcagcagcctttcgctcatactctaccacctatgaagagaggaatatcaccggaaccagggtgaaggtgcccgtggggcaggaggtggaggggatgaacatcctgggcttggtagtgtttgccatcgtctttggtgtggcgctgcggaagctggggcctgaaggggagctgcttatccgcttcttcaactccttcaatgaggccaccatggttctggtctcctggatcatgtggtacgcccctgtgggcatcatgttcctggtggctggcaagatcgtggagatggaggatgtgggtttactctttgcccgccttggcaagtacattctgtgctgcctgctgggtcacgccatccatgggctcctggtactgcccctcatctacttcctcttcacccgcaaaaacccctaccgcttcctgtggggcatcgtgacgccgctggccactgcctttgggacctcttccagttccgccacgctgccgctgatgatgaagtgcgtggaggagaataatggcgtggccaagcacatcagccgtttcatcctgcccatcggcgccaccgtcaacatggacggtgccgcgctcttccagtgcgtggccgcagtgttcattgcacagctcagccagcagtccttggacttcgtaaagatcatcaccatcctggtcacggccacagcgtccagcgtgggggcagcgggcatccctgctggaggtgtcctcactctggccatcatcctcgaagcagtcaacctcccggtcgaccatatctccttgatcctggctgtggactggctagtcgaccggtcctgtaccgtcctcaatgtagaaggtgacgctctgggggcaggactcctccaaaattatgtggaccgtacggagtcgagaagcacagagcctgagttgatacaagtgaagagtgagctgcccctggatccgctgccagtccccactgaggaaggaaaccccctcctcaaacactatcgggggcccgcaggggatgccacggtcgcctctgagaaggaatcagtcatgtaaaccccgggagggaccttccctgccctgctgggggtgctctttggacactggattatgaggaatggataaatggatgagctagggctctgggggtctgcctgcacactctggggagccaggggccccagcaccctccaggacaggagatctgggatgcctggctgctggagtacatgtgttcacaagggttactcctcaaaacccccagttctcactcatgtccccaactcaaggctagaaaacagcaagatggagaaataatgttctgctgcgtccccaccgtgacctgcctggcctcccctgtctcagggagcaggtcacaggtcaccatggggaattctagcccccactggggggatgttacaacaccatgctggttattttggcggctgtagttgtggggggatgtgtgtgtgcacgtgtgtgtgtgtgtgtgtgtgtgtgtgtgtgtgtgttctgtgacctcctgtccccatggtacgtcccaccctgtccccagatcccctattccctccacaataacagaaacactcccagggactctggggagaggctgaggacaaatacctgctgtcactccagaggacattttttttagcaataaaattgagtgtcaactatttaaaaaaaaaaaaaaaaa

SEQ ID NO: 14142 - DNA, 3416 bp, Homo sapiens
cttccaaagagagattgttattattcctcacgatgacccgacagtctctgctttctttttcctttcttccagaaggagatttaaccatagtagaaagaatggagaactattaactgcctttcttctgtgggctgtgattttcagaggggaatgctaagaggtgattttcaatgttgggactcaaaggtgaagacactgaaggacagaatttttggcagaggaaagatcttcttcggtcaccatacttgagttagctctagggaagtggaggtttccatttggaattctatagcttcttccaggtcatagtgtctgccccccaccttccagtatctcctgatatgcagcatgaatgaaaatggcaagtttcctggccttccttctgctcaactttcgtgtctgcctccttttgcttcagctgctcatgcctcactcagctcagttttctgtgcttggaccctctgggcccatcctggccatggtgggtgaagacgctgatctgccctgtcacctgttcccgaccatgagtgcagagaccatggagctgaagtgggtgagttccagcctaaggcaggtggtgaacgtgtatgcagatggaaaggaagtggaagacaggcagagtgcaccgtatcgagggagaacttcgattctgcgggatggcatcactgcagggaaggctgctctccgaatacacaacgtcacagcctctgacagtggaaagtacttgtgttatttccaagatggtgacttctatgaaaaagccctggtggagctgaaggttgcagcactgggttctgatcttcacgttgatgtgaagggttacaaggatggagggatccatctggagtgcaggtccactggctggtacccccaaccccaaatacagtggagcaacaacaagggagagaacatcccgactgtggaagcacctgtggttgcagacggagtgggcctgtatgcagtagcagcatctgtgatcatgagaggcagctctggggagggtgtatcctgtaccatcagaagttccctcctcggcctggaaaagacagccagcatttccatcgcagaccccttcttcaggagcgcccagaggtggatcgccgccctggcagggaccctgcctgtcttgctgctgcttcttgggggagccggttacttcctgtggcaacagcaggaggaaaaaaagactcagttcagaaagaaaaagagagagcaagagttgagagaaatggcatggagcacaatgaagcaagaacaaagcacaagagtgaagctcctggaggaactcagatggagaagtatccagtatgcatctcggggagagagacattcagcctataatgaatggaaaaaggccctcttcaagcctgcggatgtgattctggatccaaaaacagcaaaccccatcctccttgtttctgaggaccagaggagtgtgcagcgtgccaaggagccccaggatctgccagacaaccctgagagatttaattggcattattgtgttctcggctgtgagagcttcatatcagggagacattactgggaggtggaggtaggggacaggaaagagtggcatataggggtgtgcagtaagaatgtgcagagaaaaggctgggtcaaaatgacacctgagaatggattctggactatggggctgactgatgggaataagtatcggactctaactgagcccagaaccaacctgaaacttcctaagccccctaagaaagtgggggtcttcctggactatgagactggagatatctcattctacaatgctgtggatggatcgcatattcatactttcctggacgtctccttctctgaggctctatatcctgttttcagaattttgaccttggagcccacggccctgactatttgtccagcgtgaaaagaagaagagagttcctccaattctgaccgagtgctgatcattccctagagacaccagtaaccccgggcttagctaacgaaagtggggagcctcaggctgaagtaacttttctctgcttctccctgcccagctcagagctgagggcctccccctccacagcaaccaatcacaaccataaagctacaagcacgcactgaagcactttactgatactcattcaattattcatatgacagttgtttgagtttggtaccatcttattttccccttatacagataaggaaactggggtgcagaaaagtgaattgactacaaagtagacatgactagttaacaacacagctgggatctaaacagcaataactaacattaatggagaacttaaaatgctctgagtgctgtgttatgagctttggtggatgtcactcctttaatcctcgcaacaccctgtcgggtagtctcatttagcaagtatggaagttgaggcagggcaacattaagcaacttacataactcatgcagtaatttctgcagttgggagatgttcagcttcagtccccggccctatggccgttcttttccaccctgtttcttcccccataggaagaacccacctgtagccctgaggttcttttcccaggatggctccaggataaggatcactgtaggtggttgtggagttgacacccctgttgactccttcccagctgattgtcagagccttagacccagcacgccttggattagctctgcagagtgtcttggttgagagaataacctcaccgtacccacatgacacgtgatttggaaagagactagaggccacacttgataaatcatggggaacagatgtgttccacccaacaaatgtgataagtgatcatgcagccagagccagccttccttcaatcaaggtttccaggcagagcaaataccctagagattctctgtgatataggaaatttggatgaagggagctagaagaaatacagggatttttttttttttttaagatggagtcttactctgttgctaggctggagtgcagtggtgcgatctcagctccctgcaacctccacctcctgggttcaaacaattctcctgcctcagcctcccgagtactgggaatataggtgcacgccaccacacccaacaaatttttgtacttttagtacagatgagggttcactatgttggccaggatggtctcgatctcttgacctcatgatccacccacctcggtctcccaaagtgctgggattacaggcttgagccaccgggtgaccggcttacagggatatttttaatcccgttatggactctgtctccaggagaggggtctatccacccctgctcattggtggatgttaaaccaatattcctttcaactgctgcctgctagggaaaaactactcctcattatcatcattattattgctctccactgtatcccctctacctggcatgtgcttgtcaagttctagttgttcaataaatttgttaataatgctgactcttc

SEQ ID NO: 14143 - DNA, 3812 bp, Homo sapiens
aatcaaaaaactaattcttccaaagagcgactcttactgtttctcatggtgagaagacaatatttgctttctctttttcctttcttccggatgagaggctaagccataatagaaagaatggagaattattgattgaccgtctttattctgtgggctctgattctccaatgggaataccaagggatggttttccatactggaacccaaaggtaaagacactcaaggacagacatttttggcagagcatagatgaaaatggcaagttccctggctttccttctgctcaactttcatgtctccctcctcttggtccagctgctcactccttgctcagctcagttttctgtgcttggaccctctgggcccatcctggccatggtgggtgaagacgctgatctgccctgtcacctgttcccgaccatgagtgcagagaccatggagctgaagtgggtaagttccagcctaaggcaggtggtgaacgtgtatgcagatggaaaggaagtggaagacaggcagagtgcaccgtatcgagggagaacttcgattctgcgggatggcatcactgcagggaaggctgctctccgaatacacaacgtcacagcctctgacagtggaaagtacttgtgttatttccaagatggtgacttctatgaaaaagccctggtggagctgaaggttgcagcactgggttctaatcttcacgtcgaagtgaagggttatgaggatggagggatccatctggagtgcaggtccaccggctggtacccccaaccccaaatacagtggagcaacgccaagggagagaacatcccagctgtggaagcacctgtggttgcagatggagtgggcctatatgaagtagcagcatctgtgatcatgagaggcggctccggggagggtgtatcctgcatcatcagaaattccctcctcggcctggaaaagacagccagcatttccatcgcagaccccttcttcaggagcgcccagccctggatcgcagccctggcagggaccctgcctatcttgctgctgcttctcgccggagccagttacttcttgtggagacaacagaaggaaataactgctctgtccagtgagatagaaagtgagcaagagatgaaagaaatgggatatgctgcaacagagcgggaaataagcctaagagagagcctccaggaggaactcaagaggaaaaaaatccagtacttgactcgtggagaggagtcttcgtccgataccaataagtcagcctgatgctctaatggaaaaatggccctcttcaagcctggtgaggaaatgcttcagatgaggctccaccttgttaaataaattggatgtatggaaaaatagactgcagaaaaggggaactcatttagctcacgagtggtcgagtgaagattgaaaattaacctctgagggccagcacagcagctcatgcctgtaatcctagcactttggaaggctgaggagggcggatcacaaggtcaggagatcaagaccatcctggctaacacggtgaaaccccgtctctactaaaaatacaaaaaataaaaaattagccgggcatggtgacgggcacctgtagtcccagctactcgggaggctgaggcaggagaatggcatgaacccggaaggcagagcttgcagtgagccgagatcacgccactgcactccagcctgggagacagagcgagactctgtctcaagaaaaaaaaaaaaaaaaaaaaagaaaagaaaattaacctctgagtataaagcatcagtgggcagaatcaatgtggggagggaaacaacaaaaatgtagaaagaggatccttgttgcttcttggggccgcatcagggtattgggttaggcagatactgaccttactttcatttcccctctggtcactagacccctggggctttcaccaatgacattgatgagagaatcacattcagggcaggctagggacacggggttctggaaggacctcctcagcatggcccaagccttgcatgctgtggctcttaaatccaggaaaaatggctgaccccatggacacctcctcaaactctctgcagcagatgtaattctgtatccagacatggcaaatgccatcctccttgtttctgaggaccagaggagtgtacagcgtgctgaggagccccatgacctaccagacaaccctgagagatttgaatggcgttactgtgtgcttggctgtgaaagcttcatgtcagagagacactactgggaggtggaagtgggggacagaaaagagtggcatattggggtatgtagtaagaacgtggagaggaaaaaagtttgggtcaaaatgacaccggagaacggatactggactatgggcctgactgatgggaataagtatcgggctctcactgagcccagaaccaacctgaaacttcctgagcctcctaggaaagtgggggtcatcctggactatgagactggacatatctcgttctacaatgccacggatggatctcatatctacacatttctgcacgcctcttcctctgagcctctgtatcctgtattcagaattttgaccttggagcccactgccctgaccgtttgcccaataccaaaagtagagagttcccccgatcccgacctagtgcctgatcattccctggagataccactgaccccaggcttagctaatgaaagtggggagcctcaggctgaagtaacatctctgcttctccctgcccagcctggagctaagggtctcaccctccacaacagccagtcagaaccataaagctacaggcacacactgaagcactttactgatattcattcaattattccataggacagttgtttgagtttggtgccaccttattggcccctttatacagataaggaaactggggtgtagaaaagtgtattgactttacaaagcagacaggaatagtgaacaacagagctgggatctgaacaacaatgactaacattaatggagaatttaaaacgttctgagtgctgtgttatgagctttggtgggtgtcactcctttaatcctcacaacaccctgtcaggtagtctcatttggcaagtatggaagcagaggcagggcaacattaagtagcttacataactcacacggtaatttgtgcagttgggagatgttcagcttcagtccctggccaattgcccgttcttttccagcctgatttttcctgcatgggaagagcccacatgtagccctgaggttcccttcccaggacagctccaggatcgagatcactgtgagtggttgtggagttaagacccctatggactccttcccagctgattatcagagccttagacccagcactccttggattggctctgcagagtgtcttggttgagagaataacgttgcagttcccacagggcatgtgactttgaaagagactagaggccacactcagttaataatggggcacagatgtgttcccacccaacaaatgtgataagtgatcgtgcagccagagccagccttccttcagtcaaggtttccaggcagagcaaataccctagagattctctgtaatattggtaatttggatgaaggaagctagaagaattacagggatgtttttaatcccactatggactcagtctcctggaaaaggatctgtccactcctggtcattggtggatgttaaacccatattcctttcaactgctgcctgctagggaaaactgctcctcattatcatcactattattgctcaccactgtatcccctctactgggcaagtgcttgtcaagttctagttgttcaataaatttgttaataatgctgactcttcaa

SEQ ID NO: 14144 - DNA, 2866 bp, Homo sapiens
ctgctttctttttcctttcttcggaatgagagactcaaccataatagaaagaatggagaactattaaccaccattcttcagtgggctgtgattttcagaggggaatactaagaaatggttttccatactggaacccaaaggtaaagacactcaaggacagacatttttggcagagctcagttttctgtgcttggaccctctgggcccatcctggccatggtgggtgaagacgctgatctgccctgtcacctgttcccgaccatgagtgcagagaccatggagctgaggtgggtgagttccagcctaaggcaggtggtgaacgtgtatgcagatggaaaggaagtggaagacaggcagagtgcaccgtatcgagggagaacttcgattctgcgggatggcatcactgcagggaaggctgctctccgaatacacaacgtcacagcctctgacagtggaaagtacttgtgttatttccaagatggtgacttctacgaaaaagccctggtggagctgaaggttgcagcattgggttctgatcttcacattgaagtgaagggttatgaggatggagggatccatctggagtgcaggtccactggctggtacccccaaccccaaataaagtggagcgacaccaagggagagaacatcccggctgtggaagcacctgtggttgcagatggagtgggcctgtatgcagtagcagcatctgtgatcatgagaggcagctctggtgggggtgtatcctgcatcatcagaaattccctcctcggcctggaaaagacagccagcatatccatcgcagaccccttcttcaggagcgcccagccctggatcgcggccctggcagggaccctgcctatctcgttgctgcttctcgcaggagccagttacttcttgtggagacaacagaaggaaaaaattgctctgtccagggagacagaaagagagcgagagatgaaagaaatgggatacgctgcaacagagcaagaaataagcctaagagagaagctccaggaggaactcaagtggaggaaaatccagtacatggctcgtggagagaagtctttggcctatcatgaatggaaaatggccctcttcaaacctgcggatgtgattctggatccagacacggcaaacgccatcctccttgtttctgaggaccagaggagtgtgcagcgtgctgaagagccgcgggatctgccagacaaccctgagagatttgaatggcgttactgtgtccttggctgtgaaaacttcacatcagggagacattactgggaggtggaagtgggggacagaaaagagtggcatattggggtatgtagtaagaacgtggagaggaaaaaaggttgggtcaaaatgacaccggagaacggatactggactatgggcctgactgatgggaataagtatcgggctctcactgagcccagaaccaacctgaaacttcctgagcctcctaggaaagtggggatcttcctggactatgagactggagagatctcgttctataatgccacagatggatctcatatctacacctttccgcacgcctctttctctgagcctctatatcctgttttcagaattttgaccttggagcccactgccctgaccatttgcccaataccaaaagaagtagagagttcccccgatcctgacctagtgcctgatcattccctggagacaccactgaccccgggcttagctaatgaaagtggggagcctcaggctgaagtaacatctctgcttctccctgcccaccctggagctgaggtctccccttctgcaacaaccaatcagaaccataagctacaggcacgcactgaagcactttactgatattcattccattattccatatgacagttgttttgagtttcgtaccaccttattgtccccttatacagataaggaaactggggtgcagaaaggtgaattaactttacaaagtagacatgacaagtgaacagcagagctgggatctaaacagcaataactaacattaacagagaatttaaaatgttcttagtgctgtgttataagctttggtggatgtcactcctttaatcctcacaacaccctgtcgggtagtcatattttgcaagtatggaagctgaggcagggcaacatgaagtaacttacataactcatacagtaatttgtgcagttgggagatgttcagccttagtccctggctaattgcctgttcttttccagcctgattttttttcccacaggaagagcccacatgtagccctgaggtttccttcccaggacagctgcagggtagagatcattttaagtgcttgtggagttgacatccctattgactctttcccagctgatatcagagacttagacccagcactccttggattagctctgcagagtgtcttggttgagagaataacctcatagtaccaacatgacatgtgacttggaaagagactagaggccacacttgataaatcatggggcacagatatgttcccacccaacaaatgtgataagtgattgtgcagccagagccagccttccttcaatcaaggtttccaggcagagcaaataccctagagattctctgtgatataggaaatttggatcaaggaagctaaaagaattacagggatgtttttaatcccactatggactcagtctcctggaaataggtctgtccactcctggtcattggtggatgttaaacccatattcctttcaactgctgcctgctagggaaaactgctcctcattatcatcactattattgctcaccactgtatcccctctacttggcaagtggttgtcaagttctagttgttcaataaatgtgttaataatgcttaaaaaaaaaaaaaaaaaa

SEQ ID NO: 14145 - DNA, 2956 bp, Homo sapiens
ctgctttctttttcctttcttcggaatgagagactcaaccataatagaaagaatggagaactattaaccaccattcttcagtgggctgtgattttcagaggggaatactaagaaatggttttccatactggaacccaaaggtaaagacactcaaggacagacatttttggcagagcatagatgaaaatggcaagttccctggctttccttctgctcaactttcatgtctccctcttcttggtccagctgctcactccttgctcagctcagttttctgtgcttggaccctctgggcccatcctggccatggtgggtgaagacgctgatctgccctgtcacctgttcccgaccatgagtgcagagaccatggagctgaggtgggtgagttccagcctaaggcaggtggtgaacgtgtatgcagatggaaaggaagtggaagacaggcagagtgcaccgtatcgagggagaacttcgattctgcgggatggcatcactgcagggaaggctgctctccgaatacacaacgtcacagcctctgacagtggaaagtacttgtgttatttccaagatggtgacttctacgaaaaagccctggtggagctgaaggttgcagcattgggttctgatcttcacattgaagtgaagggttatgaggatggagggatccatctggagtgcaggtccactggctggtacccccaaccccaaataaagtggagcgacaccaagggagagaacatcccggctgtggaagcacctgtggttgcagatggagtgggcctgtatgcagtagcagcatctgtgatcatgagaggcagctctggtgggggtgtatcctgcatcatcagaaattccctcctcggcctggaaaagacagccagcatatccatcgcagaccccttcttcaggagcgcccagccctggatcgcggccctggcagggaccctgcctatctcgttgctgcttctcgcaggagccagttacttcttgtggagacaacagaaggaaaaaattgctctgtccagggagacagaaagagagcgagagatgaaagaaatgggatacgctgcaacagagcaagaaataagcctaagagagaagctccaggaggaactcaagtggaggaaaatccagtacatggctcgtggagagaagtctttggcctatcatgaatggaaaatggccctcttcaaacctgcggatgtgattctggatccagacacggcaaacgccatcctccttgtttctgaggaccagaggagtgtgcagcgtgctgaagagccgcgggatctgccagacaaccctgagagatttgaatggcgttactgtgtccttggctgtgaaaacttcacatcagggagacattactgggaggtggaagtgggggacagaaaagagtggcatattggggtatgtagtaagaacgtggagaggaaaaaaggttgggtcaaaatgacaccggagaacggatactggactatgggcctgactgatgggaataagtatcgggctctcactgagcccagaaccaacctgaaacttcctgagcctcctaggaaagtggggatcttcctggactatgagactggagagatctcgttctataatgccacagatggatctcatatctacacctttccgcacgcctctttctctgagcctctatatcctgttttcagaattttgaccttggagcccactgccctgaccatttgcccaataccaaaagaagtagagagttcccccgatcctgacctagtgcctgatcattccctggagacaccactgaccccgggcttagctaatgaaagtggggagcctcaggctgaagtaacatctctgcttctccctgcccaccctggagctgaggtctccccttctgcaacaaccaatcagaaccataagctacaggcacgcactgaagcactttactgatattcattccattattccatatgacagttgttttgagtttcgtaccaccttattgtccccttatacagataaggaaactggggtgcagaaaggtgaattaactttacaaagtagacatgacaagtgaacagcagagctgggatctaaacagcaataactaacattaacagagaatttaaaatgttcttagtgctgtgttataagctttggtggatgtcactcctttaatcctcacaacaccctgtcgggtagtcatattttgcaagtatggaagctgaggcagggcaacatgaagtaacttacataactcatacagtaatttgtgcagttgggagatgttcagccttagtccctggctaattgcctgttcttttccagcctgattttttttcccacaggaagagcccacatgtagccctgaggtttccttcccaggacagctgcagggtagagatcattttaagtgcttgtggagttgacatccctattgactctttcccagctgatatcagagacttagacccagcactccttggattagctctgcagagtgtcttggttgagagaataacctcatagtaccaacatgacatgtgacttggaaagagactagaggccacacttgataaatcatggggcacagatatgttcccacccaacaaatgtgataagtgattgtgcagccagagccagccttccttcaatcaaggtttccaggcagagcaaataccctagagattctctgtgatataggaaatttggatcaaggaagctaaaagaattacagggatgtttttaatcccactatggactcagtctcctggaaataggtctgtccactcctggtcattggtggatgttaaacccatattcctttcaactgctgcctgctagggaaaactgctcctcattatcatcactattattgctcaccactgtatcccctctacttggcaagtggttgtcaagttctagttgttcaataaatgtgttaataatgcttaaaaaaaaaaaaaaaaaa

SEQ ID NO: 14146 - DNA, 1494 bp, Homo sapiens
agtgaaacagaaggggaggtgcagtttcagaacccagccagcctctctcttgctgcctagcctcctgccggcctcatcttcgcccagccaaccccgcctggagccctatggccaactgcgagttcagcccggtgtccggggacaaaccctgctgccggctctctaggagagcccaactctgtcttggcgtcagtatcctggtcctgatcctcgtcgtggtgctcgcggtggtcgtcccgaggtggcgccagcagtggagcggtccgggcaccaccaagcgctttcccgagaccgtcctggcgcgatgcgtcaagtacactgaaattcatcctgagatgagacatgtagactgccaaagtgtatgggatgctttcaagggtgcatttatttcaaaacatccttgcaacattactgaagaagactatcagccactaatgaagttgggaactcagaccgtaccttgcaacaagattcttctttggagcagaataaaagatctggcccatcagttcacacaggtccagcgggacatgttcaccctggaggacacgctgctaggctaccttgctgatgacctcacatggtgtggtgaattcaacacttccaaaataaactatcaatcttgcccagactggagaaaggactgcagcaacaaccctgtttcagtattctggaaaacggtttcccgcaggtttgcagaagctgcctgtgatgtggtccatgtgatgctcaatggatcccgcagtaaaatctttgacaaaaacagcacttttgggagtgtggaagtccataatttgcaaccagagaaggttcagacactagaggcctgggtgatacatggtggaagagaagattccagagacttatgccaggatcccaccataaaagagctggaatcgattataagcaaaaggaatattcaattttcctgcaagaatatctacagacctgacaagtttcttcagtgtgtgaaaaatcctgaggattcatcttgcacatctgagatctgagccagtcgctgtggttgttttagctccttgactccttgtggtttatgtcatcatacatgactcagcatacctgctggtgcagagctgaagattttggagggtcctccacaataaggtcaatgccagagacggaagcctttttccccaaagtcttaaaataacttatatcatcagcatacctttattgtgatctatcaatagtcaagaaaaattattgtataagattagaatgaaaattgtatgttaagttacttcactttaattctcatgtgatccttttatgttatttatatattggtaacatcctttctattgaaaaatcaccacaccaaacctctcttattagaacaggcaagtgaagaaaagtgaatgctcaagtttttcagaaagcattacatttccaaatgaatgaccttgttgcatgatgtatttttgtacccttcctacagatagtcaaaccataaacttcatggtcatgggtaaa

SEQ ID NO: 14147 - DNA, 1001 bp, Homo sapiens
cgtgggtgcaccctggaccccaccatggctcaccggccccccagccctgccctggcgtccgtgctgctggccttgctgctgagcggtgctgcccgagctgcggagatcgtgggcgggcacgaggcgcagccacactcccggccctacatggcctccctgcagatgcgggggaacccgggcagccacttctgcggaggcaccttgatccaccccagcttcgtgctgacggccgcgcactgcctgcgggacataccccagcgcctggtgaacgtggtgctcggagcccacaacgtgcggacgcaggagcccacccagcagcacttctcggtggctcaggtgtttctgaacaactacgacgcggagaacaaactgaacgacgttctcctcatccagctgagcagcccagccaacctcagtgcctccgtcgccacagtccagctgccacagcaggaccagccagtgccccacggcacccagtgcctggccatgggctggggccgcgtgggtgcccacgaccccccagcccaggtcctgcaggagctcaatgtcaccgtggtcaccttcttctgccggccacataacatttgcactttcgtccctcgccgcaaggccggcatctgcttcggagactcaggtggccccctgatctgtgatggcatcatccaaggaatagactccttcgtgatctggggatgtgccacccgccttttccctgacttcttcacgcgggtagccctctacgtggactggatccgttccacgctgcgccgtgtggaggccaagggccgcccctgaaccgcccctcccacagcgctggccgggaccccgagcctggctccaaaccctcgaggcggatctttggacagaagcagctcttccccgaacactgtggcgtccgggacggccccacccgtccccccacactccctcccacggggctccgggagacaggccggccctgcacctcaccccaccgtgacctcaataaacgttgaaactcc

SEQ ID NO: 14148 - DNA, 827 bp, Homo sapiens
gtataaggtccacaccccgggagctgagtgattgcagaaactggccttccatctctctcagacaccaagctgcagatccaggcttttctgggaaagtgaggccaccatggctctggagaagtctcttgtccggctccttctgcttgtcctgatactgctggtgctgggctgggtccagccttccctgggcaaggaatcccgggccaagaaattccagcggcagcatatggactcagacagttcccccagcagcagctccacctactgtaaccaaatgatgaggcgccggaatatgacacaggggcggtgcaaaccagtgaacacctttgtgcacgagcccctggtagatgtccagaatgtctgtttccaggaaaaggtcacctgcaagaacgggcagggcaactgctacaagagcaactccagcatgcacatcacagactgccgcctgacaaacggctccaggtaccccaactgtgcataccggaccagcccgaaggagagacacatcattgtggcctgtgaagggagcccatatgtgccagtccactttgatgcttctgtggaggactctacctaaggtcagagcagcgagataccccacctccctcaacctcatcctctccacagctgcctcttccctcttccttccctgctgtgaaagaagtaactacagttagggctcctattcaacacacacatgcttccctttcctgagtcccatccctgcgtgattttgggggtgaagagtgggttgtgaggtgggccccatgttaacccctccactctttctttcaataaaacgcagttgcaaacacctgaaaaaaaaa

SEQ ID NO: 14149 - DNA, 889 bp, Homo sapiens
ctgggtacaaatgtattttggatcaaagaaactccagtattcaaagataggaactgacaggattttaggtcactttgtaggtcaccacctagaggggaggaagacctcgctttggagagtgggaataaaacgctcgtggaaaagggtacacgcttttctgggaaagtgaggccaccatggctctggagaagtctcttgtccggctccttctgcttgtcctgatactgctggtgctgggctgggtccagccttccctgggcaaggaatcccgggccaagaaattccagcggcagcatatggactcagacagttcccccagcagcagctccacctactgtaaccaaatgatgaggcgccggaatatgacacaggggcggtgcaaaccagtgaacacctttgtgcacgagcccctggtagatgtccagaatgtctgtttccaggaaaaggtcacctgcaagaacgggcagggcaactgctacaagagcaactccagcatgcacatcacagactgccgcctgacaaacggctccaggtaccccaactgtgcataccggaccagcccgaaggagagacacatcattgtggcctgtgaagggagcccatatgtgccagtccactttgatgcttctgtggaggactctacctaaggtcagagcagcgagataccccacctccctcaacctcatcctctccacagctgcctcttccctcttccttccctgctgtgaaagaagtaactacagttagggctcctattcaacacacacatgcttccctttcctgagtcccatccctgcgtgattttgggggtgaagagtgggttgtgaggtgggccccatgttaacccctccactctttctttcaataaaacgcagttgcaaacacctga

SEQ ID NO: 14150 - DNA, 898 bp, Homo sapiens
gtataaggtccacaccccgggagctgagtgattgcagaaactggccttccatctctctcagacaccaagctgcagatccaggtcaccacctagaggggaggaagacctcgctttggagagtgggaataaaacgctcgtggaaaagggtacacgcttttctgggaaagtgaggccaccatggctctggagaagtctcttgtccggctccttctgcttgtcctgatactgctggtgctgggctgggtccagccttccctgggcaaggaatcccgggccaagaaattccagcggcagcatatggactcagacagttcccccagcagcagctccacctactgtaaccaaatgatgaggcgccggaatatgacacaggggcggtgcaaaccagtgaacacctttgtgcacgagcccctggtagatgtccagaatgtctgtttccaggaaaaggtcacctgcaagaacgggcagggcaactgctacaagagcaactccagcatgcacatcacagactgccgcctgacaaacggctccaggtaccccaactgtgcataccggaccagcccgaaggagagacacatcattgtggcctgtgaagggagcccatatgtgccagtccactttgatgcttctgtggaggactctacctaaggtcagagcagcgagataccccacctccctcaacctcatcctctccacagctgcctcttccctcttccttccctgctgtgaaagaagtaactacagttagggctcctattcaacacacacatgcttccctttcctgagtcccatccctgcgtgattttgggggtgaagagtgggttgtgaggtgggccccatgttaacccctccactctttctttcaataaaacgcagttgcaaacacctgaaaaaaaaa

SEQ ID NO: 14151 - DNA, 907 bp, Homo sapiens
gtataaggtccacaccccgggagctgagtgattgcagaaactggccttccatctctctcagacaccaagctgcagatccaggtcactttgtaggtcaccacctagaggggaggaagacctcgctttggagagtgggaataaaacgctcgtggaaaagggtacacgcttttctgggaaagtgaggccaccatggctctggagaagtctcttgtccggctccttctgcttgtcctgatactgctggtgctgggctgggtccagccttccctgggcaaggaatcccgggccaagaaattccagcggcagcatatggactcagacagttcccccagcagcagctccacctactgtaaccaaatgatgaggcgccggaatatgacacaggggcggtgcaaaccagtgaacacctttgtgcacgagcccctggtagatgtccagaatgtctgtttccaggaaaaggtcacctgcaagaacgggcagggcaactgctacaagagcaactccagcatgcacatcacagactgccgcctgacaaacggctccaggtaccccaactgtgcataccggaccagcccgaaggagagacacatcattgtggcctgtgaagggagcccatatgtgccagtccactttgatgcttctgtggaggactctacctaaggtcagagcagcgagataccccacctccctcaacctcatcctctccacagctgcctcttccctcttccttccctgctgtgaaagaagtaactacagttagggctcctattcaacacacacatgcttccctttcctgagtcccatccctgcgtgattttgggggtgaagagtgggttgtgaggtgggccccatgttaacccctccactctttctttcaataaaacgcagttgcaaacacctgaaaaaa

SEQ ID NO: 14152 - DNA, 4911 bp, Homo sapiens
ccacgcgtccgggccttccaggaggcgggaggcgcccgctgtcgaggcagctgagccccggcaaccgctgctctccgcctctcccctcgcggggccggctcatggagcgcagggaccgggctggctctcgccgagccccgggcctcttttagcctcgtccccagagagggaggagccggtgcccggcacagccccgccggccctagaagctccccacgcgccaccatgcctctgctggacgttttctggtcttgcttcaggaaggtgaagtgcttcccattgctgcaggtgaagaagaacgctgaagccgaggccaaaagagcatgtgagtggcttcaagcaacaggattccctcagtatgtgcagctttttgaaggaggctgatgaccttgaataattgtgcctcgatgaaactggaggttcattttcaaagcaagcagaatgaagactcagaagaggaagagcagtgtaccatcagtagccactgggccttccagcaggaaagtaagtgctggtctcctatggggtcctctgatctgttggccccaccgagccctggcctgccagcgacctcaagctgtgagagcgtcctcaccgagcttagtgccacctctctgccagtcatcaccgtgagcctaccacccgagccagcagacttgcccttgccaggccgtgcccccagctcgagtgaccggcccctcctcagccccacccagggccaggagggtccccaggacaaagccaagaagcgccatcgtaaccgtagcttcctcaagcaccttgaatctctgaggcggaaggaaaagagtggcagccagcaagcagagcccaagcatagtccagccacctcagagaaggtctccaaagcctcatctttccgcagttgtcgtggcttcctctcagctggattttacagggccaagaactgggccgccacctcagccggtggcagtggtgccaatactcggaaggcctgggaggcctggcctgtggcctcgttccggcatcctcagtggacacaccggggtgattgcctggtgcacgttcctggggaccacaaaccaggcacattccctcgctccctgtccattgagagcctgtgtcctgaggatggacaccgcctggcagactggcagccaggtaggcggtggggctgtgaggggcgccggggctcctgtggctcaacgggcagccatgccagcacgtatgacaacttgcctgagctgtacccagctgagcctgtaatggttggggctgaggctgaagatgaagatgatgaggagagtgggggcagctatgctcacctagacgacatcctccagcacgtgtgggggctacagcaacgagtagagctgtggtctcgggccatgtacccagacctggggcctggagatgaggaagaggaggaggccacttcatcagtagaaatagccacagttgaggtcaaatgccaagctgaggctctcagccagatggaggttccggcccatggagagtccccagcctgggcccaggctgaagtccagccagcagtcctggctccggctcaggctccagctgaggctgaaccagtggcacaggaagaggctgaggccccggccccagccccggccccggccccagcccaggacagtgagcaggaggcacattcaggcggggaacccacctttgcctctagcctgtctgtggaagaaggacactccatttctgacactgtggcctcctccagcgaacttgacagtagtgggaactccatgaatgaggctgaggctgcggggcccctggctggactccaggcatcaatgccccgtgaacggcgcgattcaggtgttggggcctcacttaccagaccctgcaggaagctccgttggcatagcttccagaactcccatcgtcccagcctcaactcagagtcgctggagatcaaccggcagtttgcaggccagatcaacctcctgcacaagggctcactgctgcggcttaccgcgttcatggagaagtacactgtgccccacaagcagggctgggtctggtcaatgcccaagttcatgaggaggaacaagaccccagattaccggggacagcacgtatttggggtgccacccctcatccacgtgcagcgcacgggccagccactgccacagagcattcagcaagccatgcgctacttgcgcagccagtgcctggaccaagtaggcatcttccgcaagtctggggtcaagtccaggatccagaacctgcgtcaaatgaatgagacctcgcctgacaatgtctgctacgagggccagtcagcctacgacgtggctgacctgctaaagcagtatttccgggacctgcctgagcccatcttcaccagcaagctcaccaccactttcctccagatctaccagctcctccccaaggatcagtggttggcagcagcacaagccgccaccttgctgctccccgatgagaaccgagaggtgctacagaccctgctctacttcttaagtgacattgcctctgccgaggaaaaccagatgacagcaggcaacctggcagtgtgcctggcgccctccatcttccacctcaatgtctctaagaaggatagcccctctcccaggatcaagagcaaacgcagcctcattggcaggccaggccctagggacctgagtgacaacatggcagccacccagggcctgtcgcacatgatcagtgactgcaagaaacttttccaggtgccccaggacatggtgctgcagctgtgcagctcctacagcgcagctgagctcagccctcccggcccagccctggctgagctgcgtcaggcccaagctgcaggggtaagcctgagcctctacatggaagagaatatccaggacctgctgcgtgatgctgctgagcgcttcaagggctggatgagcgtgccagggccccagcacacggagctggcttgcaggaaggcaccggatgggcaccccctgcggctatggaaggcatccacagaggtggcagcccccccagctgtggtgctgcatcgtgttctccgggagcgggccctctgggatgaggatctgctgcgggcccaggtgctggaagccctgatgccgggtgtggagctgtaccactatgtcaccgacagcatggcaccccatccctgccgcgactttgtggtgcttcggatgtggcgctctgacctgcctcgtgggggttgcctgcttgtctcccagtccctggatccggaacaacctgtgccagagtcgggtgtgcgagccctcatgctcacatcccagtacctcatggagccttgcggcttgggccgctctcggctcacacacatctgccgggctgacctcaggggccgttctcctgactggtacaacaaagtctttggacacctgtgtgccatggaagtggcaaagatccgggactccttccccaccctgcaggcagcgggccctgagacaaagctgtgagccttgggctggtcccagggtggcaccacccaggccccctgggcaccaagggagcgagggggaataagagcagggcagccccctgggtgccgctgtcaggagcagagccaggcccaggtggctccagctgcctgtcctgtcccctttcctaaagctcctctgcacatagaggggagaaaaagagaatttaggcaactccactcccccttcacccccaaccctgtattctactctcccgaaaagagaagagaatcgcatgagtagcaagactgctgccaccagccacctgcttgtgaggccgccacttggcatgaagcctccacagctccccgcctgcaggggcaaagaggtcgacagcaatgtgtgatcccagctctctgccagactgagagggcaagccgtcttgtttgctgcaaggatgcttttgaggttggacaggaggttctggtcctgcctttggggccaacgctggctctgaagtgtctttttcagaggaattggactggagtgaatgggcacaggggtggagcgcagggcagccccagtcaccacgagctgtttcatttgtgtaaatacgatgctgaattttatgaggctgagttaagagtgggcactgacgggcccctaatatgtgacatgacgatttggcatagatagggatgtgagagtggagtaccttcctttctcaagtctcgagatgccagtgaaaccagtattccctgacttgggtttcacactttatcgaccaccccatggggtcctgtgtagcctttggccacgcactgacactgcccaggccaagcaaaagcagagtgtggttaagagacaagggtctatgtcatcatcccttttgcttatggtagtgggctaacataacagcccctttctcaagcagagacctggcccctgggccagccagatggaagggcctatcttagccagctggagcttaagccaaacctgttctgtcccactggccagccatctttgctcacatggaaattcaaatgccattcaaaggccactggtgctttatttttctatctgctgagtaaactgaaatgagatgggtcccaaccaccactgtaattttcaagcctattttatttgtacctgtaaatactgtacagctaatatatatatatatatatatatgtgtgtgtgtgtgtgtgtgtgtatatgtgtttatagagatacacacacatatatatgtgtgtatatatatacacatacatatatatacacacacgcatttgcacagacacacacatatatcaattctcatgagtgtattataatctctggtgggggcaagtgtctggaaggcctgaggggcacttcagatgagaatggagaggtagggagccaggtgcagcaggatccctcaaatcaataaagcattaccagagatgcaaaaaaaaaaaaaaaaaaaaaaaaaaaaaaaaaaaaaaaaaaa

SEQ ID NO: 14153 - DNA, 3176 bp, Homo sapiens
gggtagtgagccggctgagaggcatggagacgcaggaacttcggggggccctggctcttctcctcctttgctttttcacatctgccagtcaggatctgcaggtaattgacctgctgactgtgggcgagtctcggcagatggtagctgtggcagagaagatccggacagccttgctcactgctggggacatctacctcttatccaccttccgcctgccccccaagcagggtggtgtcctctttggcctctattctcgccaagacaacactcgatggctggaggcctctgttgtaggcaagatcaacaaagtactggtgcgataccagcgggaggatggcaaagtccacgccgtgaacctacagcaagcgggcctggctgatgggcgcacacacacagttctcctgcgactccgaggtccctccagacccagccctgccctacatctctacgtggactgcaaactgggtgaccaacatgcaggccttccagcactggcccccattcctccagcggaggtcgatgggctggagattaggactggacagaaggcgtatttgaggatgcagggctttgtggaatctatgaaaattattctgggtgggtccatggcccgggtaggagccctgagtgagtgtccattccaaggggacgagtccatccacagtgcagtgaccaatgcactgcactccattctaggggagcagaccaaggcgctggtcacccaactcaccctcttcaaccagatcctggtggagctgcgggatgatatacgagaccaggtgaaggaaatgtccctgatccgaaacaccattatggagtgtcaggtgtgcggcttccatgagcagcgttcccactgcagccccaatccctgcttccgaggtgtggactgcatggaagtgtacgagtacccaggctaccgctgtgggccctgcccccctggcctgcagggcaacggcacccactgcagtgacatcaatgagtgtgctcacgctgacccctgtttcccgggctccagctgcatcaacaccatgcccggcttccactgtgaggcctgtcctcgagggtacaagggcacacaggtgtctggtgtgggcattgactatgcccgggccagcaaacaggtctgcaatgacatcgatgaatgcaacgatggcaacaatggtggctgtgacccaaactccatctgcaccaacactgtgggctctttcaagtgtggtccctgccgcctgggtttcctgggcaaccagagccagggctgcctcccagcccggacctgccacagcccagcccacagcccctgccacatccatgctcactgtctctttgaacgcaatggtgcagtgtcctgccagtgtaacgtgggctgggctgggaatgggaacgtgtgtgggactgacacagacatcgatggctacccagaccaagcactgccctgcatggacaacaacaaacactgcaaacaggacaactgccttttgacacccaactctgggcaggaagatgctgataatgatggtgtgggggaccagtgtgatgatgatgctgatggggatgggatcaagaatgttgaggacaactgccggctgttccccaacaaagaccagcagaactcagatacagattcatttggtgatgcctgtgacaattgccccaacgttcccaacaatgaccagaaggacacagatggcaatggggaaggagatgcctgtgacaacgacgtggatggggatggcatccccaatggattggacaattgccctaaagtccccaacccactacagacagacagggatgaggacggggtgggagatgcttgcgacagctgccctgaaatgagcaatcctacccagacagatgcagacagcgacctggtgggggatgtctgtgatactaatgaagacagcgatggggatgggcatcaggacaccaaggacaactgcccacagctgccaaatagctcccagctggactctgataacgatggacttggagatgagtgtgatggggatgatgacaatgatggcatcccagattatgtgcctcctggtcccgataactgccgcctggtacccaatcccaatcagaaggactcagatggcaatggcgttggtgatgtgtgtgaggatgactttgacaatgatgctgtggtcgaccccctggatgtgtgtcctgaaagtgcagaggtaacgcttacggattttcgggcctatcagaccgtcgtcctggatcctgagggtgatgctcagattgacccaaactgggttgtgctcaaccagggcatggaaatcgttcagaccatgaacagtgaccctggcttggcagttggatacacggccttcaatggtgtggactttgaaggcaccttccatgtgaacacagtgactgatgatgactacgcaggctttctcttcagttatcaagacagtggccgcttctacgtagtcatgtggaagcagaccgagcagacctactggcaggctacacccttccgggcggttgcccagcccgggctgcagctcaaggcagtgacatcagtgtctggcccaggtgagcacctccgaaatgccctgtggcatactggccacacccctgatcaggtacgactgctgtggacagacccacgaaatgtgggctggcgggacaagacctcctatcgctggcagcttctgcaccggcctcaagttggctacattcgggtgaagctctatgagggaccccagcttgtggcggattctggggtgatcattgacacatccatgcgaggggggcgtcttggtgtattctgcttctcccaagaaaacataatttggtccaatctccagtatcgatgcaatgacacagtgcctgaggactttgagccattccggaggcagctgctccagggaagggtgtgaggaggaggccaccagattcagaattcagaattttagaccctttggccttggggtccatcctggagaccctgaggtctaagctacagcccctcagccaaccacagacccttctctggctcccaaaaggagttcagtcccagaggggtggtcaccccacccttcaggggatgagaagttttcaaggggtattactcaggcactaaccccaggaaagatgacagcacattgccataaagttttggttgttttctaaaaaaaaaaaaaaaaaaaaaaaaaaaaaaa

SEQ ID NO: 14154 - DNA, 1670 bp, Homo sapiens
gggtcgtcatgatccggaccccattgtcggcctctgcccatcgcctgctcctcccaggctcccgcggccgacccccgcgcaacatgcagcccacgggccgcgagggttcccgcgcgctcagccggcggtatctgcggcgtctgctgctcctgctactgctgctgctgctgcggcagcccgtaacccgcgcggagaccacgccgggcgcccccagagccctctccacgctgggctcccccagcctcttcaccacgccgggtgtccccagcgccctcactaccccaggcctcactacgccaggcacccccaaaaccctggaccttcggggtcgcgcgcaggccctgatgcggagtttcccactcgtggacggccacaatgacctgccccaggtcctgagacagcgttacaagaatgtgcttcaggatgttaacctgcgaaatttcagccatggtcagaccagcctggacaggcttagagacggcctcgtgggtgcccagttctggtcagcctccgtctcatgccagtcccaggaccagactgccgtgcgcctcgccctggagcagattgacctcattcaccgcatgtgtgcctcctactctgaactcgagcttgtgacctcagctgaaggtctgaacagctctcaaaagctggcctgcctcattggcgtggagggtggtcactcactggacagcagcctctctgtgctgcgcagtttctatgtgctgggggtgcgctacctgacacttaccttcacctgcagtacaccatgggcagagagttccaccaagttcagacaccacatgtacaccaacgtcagcggattgacaagctttggtgagaaagtagtagaggagttgaaccgcctgggcatgatgatagatttgtcctatgcatcggacaccttgataagaagggtcctggaagtgtctcaggctcctgtgatcttctcccactcagctgccagagctgtgtgtgacaatttgttgaatgttcccgatgatatcctgcagcttctgaagaagaacggtggcatcgtgatggtgacactgtccatgggggtgctgcagtgcaacctgcttgctaacgtgtccactgtggcagatcactttgaccacatcagggcagtcattggatctgagttcatcgggattggtggaaattatgacgggactggccggttccctcaggggctggaggatgtgtccacatacccagtcctgatagaggagttgctgagtcgtagctggagcgaggaagagcttcaaggtgtccttcgtggaaacctgctgcgggtcttcagacaagtggaaaaggtgagagaggagagcagggcgcagagccccgtggaggctgagtttccatatgggcaactgagcacatcctgccactcccacctcgtgcctcagaatggacaccaggctactcatctggaggtgaccaagcagccaaccaatcgggtcccctggaggtcctcaaatgcctccccataccttgttccaggccttgtggctgctgccaccatcccaaccttcacccagtggctctgctgacacagtcggtccccgcagaggtcactgtggcaaagcctcacaaagccccctctcctagttcattcacaagcatatgctgagaataaacatgttacacatggaaaaaaaaaaaaaaaaaaa

SEQ ID NO: 14155 - DNA, 1510 bp, Homo sapiens
gttcttcaggtacgaggagggcattgttgtcagtctggaccgagcccgcagagcccctcctcggcgtcctggtcccggccgtgcccgcggtgtcccgggaggaaggggcgggccgggggtcgggaggagtcacgtgccccctcccgccccaggtcgtcctctcagcatgggggtcccgcggcctcagccctgggcgctggggctcctgctctttctccttcctgggagcctgggcgcagaaagccacctctccctcctgtaccaccttaccgcggtgtcctcgcctgccccggggactcctgccttctgggtgtccggctggctgggcccgcagcagtacctgagctacaatagcctgcggggcgaggcggagccctgtggagcttgggtctgggaaaaccaggtgtcctggtattgggagaaagagaccacagatctgaggatcaaggagaagctctttctggaagctttcaaagctttggggggaaaaggtccctacactctgcagggcctgctgggctgtgaactgggccctgacaacacctcggtgcccaccgccaagttcgccctgaacggcgaggagttcatgaatttcgacctcaagcagggcacctggggtggggactggcccgaggccctggctatcagtcagcggtggcagcagcaggacaaggcggccaacaaggagctcaccttcctgctattctcctgcccgcaccgcctgcgggagcacctggagaggggccgcggaaacctggagtggaaggagcccccctccatgcgcctgaaggcccgacccagcagccctggcttttccgtgcttacctgcagcgccttctccttctaccctccggagctgcaacttcggttcctgcggaatgggctggccgctggcaccggccagggtgacttcggccccaacagtgacggatccttccacgcctcgtcgtcactaacagtcaaaagtggcgatgagcaccactactgctgcattgtgcagcacgcggggctggcgcagcccctcagggtggagctggaatctccagccaagtcctccgtgctcgtggtgggaatcgtcatcggtgtcttgctactcacggcagcggctgtaggaggagctctgttgtggagaaggatgaggagtgggctgccagccccttggatctcccttcgtggagacgacaccggggtcctcctgcccaccccaggggaggcccaggatgctgatttgaaggatgtaaatgtgattccagccaccgcctgaccatccgccattccgactgctaaaagcgaatgtagtcaggcccctttcatgctgtgagacctcctggaacactggcatctctgagcctccagaaggggttctgggcctagttgtcctccctctggagccccgtcctgtggtctgcctcagtttcccctcctaatacatatggctgttttccacctcgataatataacacgagtttgggcccgaaaaaaaaaaaaaaaaaaaaaaaaaaaaaaaaaa

SEQ ID NO: 14156 - DNA, 2411 bp, Homo sapiens
gtctcttaaaacccactggacgttggcacagtgctgggatgactatggagacccaaatgtctcagaatgtatgtcccagaaacctgtggctgcttcaaccattgacagttttgctgctgctggcttctgcagacagtcaagctgctcccccaaaggctgtgctgaaacttgagcccccgtggatcaacgtgctccaggaggactctgtgactctgacatgccagggggctcgcagccctgagagcgactccattcagtggttccacaatgggaatctcattcccacccacacgcagcccagctacaggttcaaggccaacaacaatgacagcggggagtacacgtgccagactggccagaccagcctcagcgaccctgtgcatctgactgtgctttccgaatggctggtgctccagacccctcacctggagttccaggagggagaaaccatcatgctgaggtgccacagctggaaggacaagcctctggtcaaggtcacattcttccagaatggaaaatcccagaaattctcccatttggatcccaccttctccatcccacaagcaaaccacagtcacagtggtgattaccactgcacaggaaacataggctacacgctgttctcatccaagcctgtgaccatcactgtccaagtgcccagcatgggcagctcttcaccaatggggatcattgtggctgtggtcattgcgactgctgtagcagccattgttgctgctgtagtggccttgatctactgcaggaaaaagcggatttcagccaattccactgatcctgtgaaggctgcccaatttgagccacctggacgtcaaatgattgccatcagaaagagacaacttgaagaaaccaacaatgactatgaaacagctgacggcggctacatgactctgaaccccagggcacctactgacgatgataaaaacatctacctgactcttcctcccaacgaccatgtcaacagtaataactaaagagtaacgttatgccatgtggtcatactctcagcttgctgagtggatgacaaaaagaggggaattgttaaaggaaaatttaaatggagactggaaaaatcctgagcaaacaaaaccacctggcccttagaaatagctttaactttgcttaaactacaaacacaagcaaaacttcacggggtcatactacatacaagcataagcaaaacttaacttggatcatttctggtaaatgcttatgttagaaataagacaaccccagccaatcacaagcagcctactaacatataattaggtgactagggactttctaagaagatacctacccccaaaaaacaattatgtaattgaaaaccaaccgattgcctttattttgcttccacattttcccaataaatacttgcctgtgacattttgccactggaacactaaacttcatgaattgcgcctcagatttttcctttaacatcttttttttttttgacagagtctcaatctgttacccaggctggagtgcagtggtgctatcttggctcactgcaaacccgcctcccaggtttaagcgattctcatgcctcagcctcccagtagctgggattagaggcatgtgccatcatacccagctaatttttgtattttttattttttttttttagtagagacagggtttcgcaatgttggccaggccgatctcgaacttctggcctctagcgatctgcccgcctcggcctcccaaagtgctgggatgaccagcatcagccccaatgtccagcctctttaacatcttctttcctatgccctctctgtggatccctactgctggtttctgccttctccatgctgagaacaaaatcacctattcactgcttatgcagtcggaagctccagaagaacaaagagcccaattaccagaaccacattaagtctccattgttttgccttgggatttgagaagagaattagagaggtgaggatctggtatttcctggactaaattccccttggggaagacgaagggatgctgcagttccaaaagagaaggactcttccagagtcatctacctgagtcccaaagctccctgtcctgaaagccacagacaatatggtcccaaatgactgactgcaccttctgtgcctcagccgttcttgacatcaagaatcttctgttccacatccacacagccaatacaattagtcaaaccactgttattaacagatgtagcaacatgagaaacgcttatgttacaggttacatgagagcaatcatgtaagtctatatgacttcagaaatgttaaaatagactaacctctaacaacaaattaaaagtgattgtttcaaggtgatgcaattattgatgacctattttatttttctataatgatcatatattacctttgtaataaaacattataaccaaaaca

SEQ ID NO: 14157 - DNA, 1633 bp, Homo sapiens
agaatttgtttgccctctagggtagaatccgccaagctttgagagaaggctgtgactgctgtgctctgggcgccagctcgctccagggagtgatgggaatcctgtcattcttacctgtccttgccactgagagtgactgggctgactgcaagtccccccagccttggggtcatatgcttctgtggacagctgtgctattcctggctcctgttgctgggacacctgcagctcccccaaaggctgtgctgaaactcgagccccagtggatcaacgtgctccaggaggactctgtgactctgacatgccgggggactcacagccctgagagcgactccattcagtggttccacaatgggaatctcattcccacccacacgcagcccagctacaggttcaaggccaacaacaatgacagcggggagtacacgtgccagactggccagaccagcctcagcgaccctgtgcatctgactgtgctttctgagtggctggtgctccagacccctcacctggagttccaggagggagaaaccatcgtgctgaggtgccacagctggaaggacaagcctctggtcaaggtcacattcttccagaatggaaaatccaagaaattttcccgttcggatcccaacttctccatcccacaagcaaaccacagtcacagtggtgattaccactgcacaggaaacataggctacacgctgtactcatccaagcctgtgaccatcactgtccaagctcccagctcttcaccgatggggatcattgtggctgtggtcactgggattgctgtagcggccattgttgctgctgtagtggccttgatctactgcaggaaaaagcggatttcagctctcccaggataccctgagtgcagggaaatgggagagaccctccctgagaaaccagccaatcccactaatcctgatgaggctgacaaagttggggctgagaacacaatcacctattcacttctcatgcacccggatgctctggaagagcctgatgaccagaaccgtatttagtctccattgtcttgcattgggatttgagaagaaaatcagagagggaagatctggtatttcctggcctaaattccccttggggaggacagggagatgctgcagttccaaaagagaaggtttcttccagagtcatctacctgagtcctgaagctccctgtcctgaaagccacagacaatatggtcccaaatgaccgactgcaccttctgtgcttcagctcttcttgacatcaaggctcttccgttccacatccacacagccaatccaattaatcaaaccactgttattaacagataatagcaacttgggaaatgcttatgttacaggttacgtgagaacaatcatgtaaatctatatgatttcagaaatgttaaaatagactaacctctaccagcacattaaaagtgattgtttctgggtgataaaattattgatgatttttattttctttatttttctataaagatcatatattacttttataataaaacattataaaaacaacattctgtttaccttttcaaggctgtattggttggagtgtagactgaactgcctggggtctgtttctcttcagtgatgagactcttaggaaggcaggaatggatag

SEQ ID NO: 14158 - DNA, 4666 bp, Homo sapiens
agtaccttggtccagctcttcctgcaacggcccaggagctcagagctccacatctgaccttctagtcatgaccaggaccagggcagcactcctcctgttcacagccttagcaacttctctaggtttcaacttggacacagaggagctgacagccttccgtgtggacagcgctgggtttggagacagcgtggtccagtatgccaactcctgggtggtggttggagccccccaaaagataacagctgccaaccaaacgggtggcctctaccagtgtggctacagcactggtgcctgtgagcccatcggcctgcaggtgcccccggaggccgtgaacatgtccctgggcctgtccctggcgtctaccaccagcccttcccagctgctggcctgcggccccaccgtgcaccacgagtgcgggaggaacatgtacctcaccggactctgcttcctcctgggccccacccagctcacccagaggctcccggtgtccaggcaggagtgcccaagacaggagcaggacattgtgttcctgatcgatggctcaggcagcatctcctcccgcaactttgccacgatgatgaacttcgtgagagctgtgataagccagttccagagacccagcacccagttttccctgatgcagttctccaacaaattccaaacacacttcactttcgaggaattcaggcgcagctcaaaccccctcagcctgttggcttctgttcaccagctgcaagggtttacatacacggccaccgccatccaaaatgtcgtgcaccgattgttccatgcctcatatggggcccgtagggatgccgccaaaattctcattgtcatcactgatgggaagaaagaaggcgacagcctggattataaggatgtcatccccatggctgatgcagcaggcatcatccgctatgcaattggggttggattagcttttcaaaacagaaattcttggaaagaattaaatgacattgcatcgaagccctcccaggaacacatatttaaagtggaggactttgatgctctgaaagatattcaaaaccaactgaaggagaagatctttgccattgagggtacggagaccacaagcagtagctccttcgaattggagatggcacaggagggcttcagcgctgtgttcacacctgatggccccgttctgggggctgtggggagcttcacctggtctggaggtgccttcctgtaccccccaaatatgagccctaccttcatcaacatgtctcaggagaatgtggacatgagggactcttacctgggttactccaccgagctggccctctggaaaggggtgcagagcctggtcctgggggccccccgctaccagcacaccgggaaggctgtcatcttcacccaggtgtccaggcaatggaggatgaaggccgaagtcacggggactcagatcggctcctacttcggggcctccctctgctccgtggacgtagacagcgacggcagcaccgacctggtcctcatcggggccccccattactacgagcagacccgagggggccaggtgtctgtgtgtcccttgcccagggggtggagaaggtggtggtgtgatgctgttctctacggggagcagggccacccctggggtcgctttggggcggctctgacagtgctgggggatgtgaatggggacaagctgacagacgtggtcatcggggccccaggagaggaggagaaccggggtgctgtctacctgtttcacggagtcttgggacccagcatcagcccctcccacagccagcggatcgcgggctcccagctctcctccaggctgcagtattttgggcaggcactgagcgggggtcaagacctcacccaggatggactggtggacctggctgtgggggcccggggccaggtgctcctgctcaggaccagacctgtgctctgggtgggggtgagcatgcagttcatacctgccgagatccccaggtctgcgtttgagtgtcgggagcaggtggtctctgagcagaccctggtacagtccaacatctgcctttacattgacaaacgttctaagaacctgcttgggagccgtgacctccaaagctctgtgaccttggacctggccctcgaccctggccgcctgagtccccgtgccaccttccaggaaacaaagaaccggagtctgagccgagtccgagtcctcgggctgaaggcacactgtgaaaacttcaacctgctgctcccgagctgcgtggaggactctgtgacccccattaccttgcgtctgaacttcacgctggtgggcaagcccctccttgccttcagaaacctgcggcctatgctggccgccgatgctcagagatacttcacggcctccctaccctttgagaagaactgtggagccgaccatatctgccaggacaatctcggcatctccttcagcttcccaggcttgaagtccctgctggtggggagtaacctggagctgaacgcagaagtgatggtgtggaatgacggggaagactcctacggaaccaccatcaccttctcccaccccgcaggactgtcctaccgctacgtggcagagggccagaaacaagggcagctgcgttccctgcacctgacatgtgacagcgccccagttgggagccagggcacctggagcaccagctgcagaatcaaccacctcatcttccgtggcggcgcccagatcaccttcttggctacctttgacgtctcccccaaggctgtcctgggagaccggctgcttctgacagccaatgtgagcagtgagaacaacactcccaggaccagcaagaccaccttccagctggagctcccggtgaagtatgctgtctacactgtggttagcagccacgaacaattcaccaaatacctcaacttctcagagtctgaggagaaggaaagccatgtggccatgcacagataccaggtcaataacctgggacagagggacctgcctgtcagcatcaacttctgggtgcctgtggagctgaaccaggaggctgtgtggatggatgtggaggtctcccacccccagaacccatcccttcggtgctcctcagagaaaatcgcacccccagcatctgacttcctggcgcacattcagaagaatcccgtgctggactgctccattgctggctgcctgcggttccgctgtgacgtcccctccttcagcgtccaggaggagctggatttcaccctgaagggcaacctcagctttggctgggtccgccagatattgcagaagaaggtgtcggtcgtgagtgtggctgaaattacgttcgacacatccgtgtactcccagcttccaggacaggaggcatttatgagagctcagacgacaacggtgctggagaagtacaaggtccacaaccccacccccctcatcgtaggcagctccattgggggtctgttgctgctggcactcatcacagcggtactgtacaaagttggcttcttcaagcgtcagtacaaggaaatgatggaggaggcaaatggacaaattgccccagaaaacgggacacagacccccagcccgcccagtgagaaatgatcccctctttgccttggacttcttctcccccgcgagttttccccacttacttaccctcacctgtcaggcctgacggggaggaaccactgcaccaccgagagaggctgggatgggcctgcttcctgtctttgggagaaaacgtcttgcttgggaaggggcctttgtcttgtcaaggttccaactggaaacccttaggacagggtccctgctgtgttccccaaaggacttgacttgcaatttctacctagaaatacatggacaatacccccaggcctcagtctcccttctcccatgaggcacgaatgatctttctttcctttctttttttttttttttcttttcttttttttttttttgagacggagtctcgctctgtcacccaggctggagtgcaatggcgtgatctcggctcactgcaacctccgcctcccgggttcaagtaattctgctgtctcagcctcctgagtagctgggactacaggcacacgccacctcgcccggcccgatctttctaaaatacagttctgaatatgctgctcatccccacctgtcttcaacagctccccattaccctcaggacaatgtctgaactctccagcttcgcgtgagaagtccccttccatcccagagggtgggcttcagggcgcacagcatgagaggctctgtgcccccatcaccctcgtttccagtgaattagtgtcatgtcagcatcagctcagggcttcatcgtggggctctcagttccgatttcccaggctgaattgggagtgagatgcctgcatgctgggttctgcacagctggcctcccgcgttgggcaacattgctggctggaagggaggagcgccctctagggagggacatggccccggtgcggctgcagctcacccagccccaggggcagaagagacccaaccacttctattttttgaggctatgaatatagtacctgaaaaaatgccaagacatgattatttttttaaaaagcgtactttaaatgtttgtgttaataaattaaaacatgcacaaaaagatgcatctaccgctcttgggaaatatgtcaaaggtctaaaaataaaaaagccttctgtgaaaaaaaaaaaaaaaaa

SEQ ID NO: 14159 - DNA, 2409 bp, Homo sapiens
gaattcgggcgcgaagcggccggcctgggcgccgactgcagagccgggaggctggtggtcatgccggggttcctggttcgcatcctccttctgctgctggttctgctgcttctgggccctacgcgcggcttgcgcaatgccacccagaggatgtttgaaattgactatagccgggactccttcctcaaggatggccagccatttcgctacatctcaggaagcattcactactcccgtgtgccccgcttctactggaaggaccggctgctgaagatgaagatggctgggctgaacgccatccagacgtatgtgccctggaactttcatgagccctggccaggacagtaccagttttctgaggaccatgatgtggaatattttcttcggctggctcatgagctgggactgctggttatcctgaggcccgggccctacatctgtgcagagtgggaaatgggaggattacctgcttggctgctagagaaagagtctattcttctccgctcctccgacccagattacctggcagctgtggacaagtggttgggagtccttctgcccaagatgaagcctctcctctatcagaatggagggccagttataacagtgcaggttgaaaatgaatatggcagctactttgcctgtgattttgactacctgcgcttcctgcagaagcgctttcgccaccatctgggggatgatgtggttctgtttaccactgatggagcacataaaacattcctgaaatgtggggccctgcagggcctctacaccacggtggactttggaacaggcagcaacatcacagatgctttcctaagccagaggaagtgtgagcccaaaggacccttgatcaattctgaattctatactggctggctagatcactggggccaacctcactccacaatcaagaccgaagcagtggcttcctccctctatgatatacttgcccgtggggcgagtgtgaacttgtacatgtttataggtgggaccaattttgcctattggaatggggccaactcaccctatgcagcacagcccaccagctacgactatgatgccccactgagtgaggctggggacctcactgagaagtattttgctctgcgaaacatcatccagaagtttgaaaaagtaccagaaggtcctatccctccatctacaccaaagtttgcatatggaaaggtcactttggaaaagttaaagacagtgggagcagctctggacattctgtgtccctctgggcccatcaaaagcctttatcccttgacatttatccaggtgaaacagcattatgggtttgtgctgtaccggacaacacttcctcaagattgcagcaacccagcacctctctcttcacccctcaatggagtccacgatcgagcatatgttgctgtggatgggatcccccagggagtccttgagcgaaacaatgtgatcactctgaacataacagggaaagctggagccactctggaccttctggtagagaacatgggacgtgtgaactatggtgcatatatcaacgattttaagggtttggtttctaacctgactctcagttccaatatcctcacggactggacgatctttccactggacactgaggatgcagtgcgcagccacctggggggctggggacaccgtgacagtggccaccatgatgaagcctgggcccacaactcatccaactacacgctcccggccttttatatggggaacttctccattcccagtgggatcccagacttgccccaggacacctttatccagtttcctggatggaccaagggccaggtctggattaatggctttaaccttggccgctattggccagcccggggccctcagttgaccttgtttgtgccccagcacatcctgatgacctcggccccaaacaccatcaccgtgctggaactggagtgggcaccctgcagcagtgatgatccagaactatgtgctgtgacgttcgtggacaggccagttattggctcatctgtgacctacgatcatccctccaaacctgttgaaaaaagactcatgcccccacccccgcaaaaaaacaaagattcatggctggaccatgtatgatgatgaaagcctgtgtctttgagggattctaccctgaacatacctcacagatcctccctgtcatgccacatttcactgattggaatgtggaaatggaaaaggaatttaggatgtgcattttcacctgaggtttccctgcatccctgcagtgccaaagccccaccttcagggaccacctggaatgtgtgaggggctgacagcacagtaacgtgcatacatatctgcagggctggaatggaagctttaaaggtggtagtgatttttattttggaagaatcatgttacctttttgttaaataaaatttgcccgaattc

SEQ ID NO: 14160 - DNA, 4039 bp, Homo sapiens
ctggacctgggcaccgccagccgcctgggcacgggactgggcgggggcgctgacctcggcctaggaggcccaggatcccggagacgcccgcgccctcaggaccctgcgggtcgcacgccctccccagcttctgctgctcgccgctcttcggcagggcgaggtcaggtgcccccttctcgcctctcttctcttctcttcctcctccacttctgtgcccgcggagactccggccgcccccttccgcaggggtgtagtaatctgcggagctgacagcagccccgcagccaccctgcccgaagtctccggaagcggcacgagctcaggccgccgcagccccggcgaacccactgttggacctgaggagccagccctcctcccgcacccaaacttggagcacttgacctttggctgttggagggggcaggctcgcgggtggctggacagctgcggagccgcgagggcatcttgcctggagaccgtcggctgcactcccgggctcctggctttgcctctgggatcccgaggtgtccacatcagacgcatgttgactgagacctagagtcatggatgtatgcgtccgtcttgccctgtggctcctctggggactcctcctgcaccagggccagagcctcagccatagtcacagtgagaaggcgacaggaaccagctcgggggccaactctgaggagtccactgcagcagagttttgccgaattgacaagcccctgtgtcacagtgaggatgagaaactcagcttcgaggcagtccgtaacatccacaaactgatggacgatgatgccaatggtgatgtggatgtggaagaaagtgatgagttcctgagggaagacctcaattaccatgacccaacagtgaaacacagcaccttccatggtgaggataagctcatcagcgtggaggacctgtggaaggcatggaagtcatcagaagtatacaattggaccgtggatgaggtggtacagtggctgatcacatatgtggagctgcctcagtatgaggagaccttccggaagctgcagctcagtggccatgccatgccaaggctggctgtcaccaacaccaccatgacagggactgtgctgaagatgacagaccggagtcatcggcagaagctgcagctgaaggctctggatacagtgctctttgggcctcctctcttgactcgccataatcacctcaaggacttcatgctggtggtgtctatcgttattggtgtgggcggctgctggtttgcctatatccagaaccgttactccaaggagcacatgaagaagatgatgaaggacttggaggggttacaccgagctgagcagagtctgcatgaccttcaggaaaggctgcacaaggcccaggaggagcaccgcacagtggaggtggagaaggtccatctggaaaagaagctgcgcgatgagatcaaccttgctaagcaggaagcccagcggctgaaggagctgcgggagggtactgagaatgagcggagccgccaaaaatatgctgaggaggagttggagcaggttcgggaggccttgaggaaagcagagaaggagctagaatctcacagctcatggtatgctccagaggcccttcagaagtggctgcagctgacacatgaggtggaggtgcaatattacaacatcaagaagcaaaatgctgagaagcagctgctggtggccaaggagggggctgagaagataaaaaagaagagaaacacactctttggcaccttccacgtggcccacagctcttccctggatgatgtagatcataaaattctaacagctaagcaagcactgagcgaggtgacagcagcattgcgggagcgcctgcaccgctggcaacagatcgagatcctctgtggcttccagattgtcaacaaccctggcatccactcactggtggctgccctcaacatagaccccagctggatgggcagtacacgccccaaccctgctcacttcatcatgactgacgacgtggatgacatggatgaggagattgtgtctcccttgtccatgcagtcccctagcctgcagagcagtgttcggcagcgcctgacggagccacagcatggcctgggatctcagagggatttgacccattccgattcggagtcctccctccacatgagtgaccgccagcgtgtggcccccaaacctcctcagatgagccgtgctgcagacgaggctctcaatgccatgacttccaatggcagccaccggctgatcgagggggtccacccagggtctctggtggagaaactgcctgacagccctgccctggccaagaaggcattactggcgctgaaccatgggctggacaaggcccacagcctgatggagctgagcccctcagccccacctggtggctctccacatttggattcttcccgttctcacagccccagctccccagacccagacacaccatctccagttggggacagccgagccctgcaagccagccgaaacacacgcattccccacctggctggcaagaaggctgtggctgaggaggataatggctctattggcgaggaaacagactccagcccaggccggaagaagtttcctctcaaaatctttaagaagcctcttaagaagtaggcaggatggggtggcagtaaagggacagcttgtccttccctgggtgttctgtctctccttccctcccttccttcaagataactggccccaagagtggggcatgggaagggctggtccaggggtctgggcactgtacatacctgccccctcatccttgggtccttcattattatttattaactgaccaccatggcctgcctgccctgcctccgtcccaaccatgggctgctgctgtcactccctctccacttcagtgcatgtcttagttgctgttccctcagctcccagctccacctctggggttcagcttctgtctctgctgtcccagttttgaggtttggtttcttgtttctgtctcttgctttcaggctcctccctcccaccactccccaacttcccctagcagttgcagggaagataggacgagtagcttctgacatgtgtgcctcagatctgttccaccccactcacagtggttctgtttgctccagactggggctagggcctaatctttgaagtttgttctttggtattgatgtgggtcagaaggagcctcatcctaatctcactcaggcctccagggatccatgggggagtgaaaccaattctcagagaacaacccaccagagacttttaaagagaggccaggcttgggaatgggttgggagaggcatctgttcattggagcatgagtggatgccagaactgtaggttataaggcagtcactttttctctctactcccacccacacctgcctccctcttacccctgctcccccacactgcaggaggatttgtctctaagaggtgctgccccaaagctccccaagcatcaatactcctagggctcaggacaagtggctcccctggccaggagagccacagccatgatacagggctcttatggagccctggagttgttgggcaaggatgctgtcattttttgaaccaaaagacaaacaggttaaaaggaaaaaaagtaatctgaatttcccaagtgcctacgctgcatattccccttgttagatcccattttcatgttactttgtagccttggccagaggctcaaaaaggacacaaccagtttggggaaggggtggctaaggaagatggtataggtgaaggcggctgtgtgaccactttcccccacccttcccaccctctagacaactctctcccttacctgtttttgctatggctgtaaaggtatttttcctctgccccactccctgccatacctttatcctgggatcctattttgggcctggggtgggtatacctggggctggtcttaggagggtgctaggctgcagactgccttgtactccctggacaccctcaaatggggttttctgtgttatttcataaaattctttgaagtccaataaagcatgtaggagattttaaccacaaaaaaa

SEQ ID NO: 14161 - DNA, 3898 bp, Homo sapiens
gaggcttcggtgcagagctggagagccgcggctgggaccggagtggggagcgcggcgtggaggtgccacccggcgcgggtggcggagagatcagaagcctcttccccaagccgagccaacctcagcggggacccgggctcagggacgcggcggcggcggcggcgactgcagtggctggacgatggcagcgtccgccggagccggggcggtgattgcagccccagacagccggcgctggctgtggtcggtgctggcggcggcgcttgggctcttgacagctggagtatcagccttggaagtatatacgccaaaagaaatcttcgtggcaaatggtacacaagggaagctgacctgcaagttcaagtctactagtacgactggcgggttgacctcagtctcctggagcttccagccagagggggccgacactactgtgtcgtttttccactactcccaagggcaagtgtaccttgggaattatccaccatttaaagacagaatcagctgggctggagaccttgacaagaaagatgcatcaatcaacatagaaaatatgcagtttatacacaatggcacctatatctgtgatgtcaaaaaccctcctgacatcgttgtccagcctggacacattaggctctatgtcgtagaaaaagagaatttgcctgtgtttccagtttgggtagtggtgggcatagttactgctgtggtcctaggtctcactctgctcatcagcatgattctggctgtcctctatagaaggaaaaactctaaacgggattacactggctgcagtacatcagagagtttgtcaccagttaagcaggctcctcggaagtccccctccgacactgagggtcttgtaaagagtctgccttctggatctcaccagggcccagtcatatatgcacagttagaccactccggcggacatcacagtgacaagattaacaagtcagagtctgtggtgtatgcggatatccgaaagaattaagagaatacctagaacatatcctcagcaagaaacaaaaccaaactggactctcgtgcagaaaatgtagcccattaccacatgtagccttggagacccaggcaaggacaagtacacgtgtactcacagagggagagaaagatgtgtacaaaggatatgtataaatattctatttagtcatcctgatatgaggagccagtgttgcatgatgaaaagatggtatgattctacatatgtacccattgtcttgctgtttttgtactttcttttcaggtcatttacaattgggagatttcagaaacattcctttcaccatcatttagaaatggtttgccttaatggagacaatagcagatcctgtagtatttccagtagacatggccttttaatctaagggcttaagactgattagtcttagcatttactgtagttggaggatggagatgctatgatggaagcatacccagggtggcctttagcacagtatcagtaccatttatttgtctgccgcttttaaaaaatacccattggctatgccacttgaaaacaatttgagaagtttttttgaagtttttctcactaaaatatggggcaattgttagccttacatgttgtgtagacttactttaagtttgcacccttgaaatgtgtcatatcaatttctggattcataatagcaagattagcaaaggataaatgccgaaggtcacttcattctggacacagttggatcaatactgattaagtagaaaatccaagctttgcttgagaacttttgtaacgtggagagtaaaaagtatcggttttattctttgctgatgtcctttctgcttgaaataacagtcaccatacagctaaaggagaggagtttctttccttctaagtaggcagaaatggtatcattatgttgccgctctccaatctcccagagctcgctctctagagaatcaccttctttcgcttttttttttttttttgaggtagagtctcactatgttgcccagactagccttgaactcttgggctcaagtgattctccctcctcagcctcccgagtagctggaacgaactatagttgcaccactgcagctggcaagaatcaccttctttataaagcgtcagtcatgcttccagcaagaggcagcatcagtcatggctttataacagcttcatggtgcctcaaagactgttgaggttaatgagagcctagattagacagtttggctgtccttccctaaaacttgttttctcctattcactactccccaccgcacttaaaatctatgagtttttactttttactgggaatggaaagtgtggtgaagatcattcaacacttatgttgtcatttctcccattttctgaatttttttttaaatttccccccttttaaaattgttcgaaagcccacagttatggaaagaattactgtctagatggtctgcagaacgtgtttggggtgagtgggagtgaggggcaatgttactttttctccctgtagtttggagtccattatgagctgctgctttttcttctcatcttgtcatcttctggggatgtttgaaggctgagttccaacagaattcacaaagggaataaaacaggattgagattttgaggtgtgcacaaggtggtaagataaagggcatatgagcttcaaaactaatgctgttgcatacatgaagccttttgttttttgaggagctatttttgttattcttgtaacgctccaccttacatgccacatctgtgtgagtcaacagggatcaggtttggtcaccacacatgtctgaagctgggcagcgtctgctctgtgttctgtgtggaatggagaaaaaaacgcctgccctgctgccttccatgttcataggcccagcccaagagagtgacacacagtgctggccctgagacatttccacaaagtggtcaactctgccttgcatcctaaaactttttgggcatctattttgaaaactataggagcctttggaaggcctcttatgtttggaggggaagggtgttgagattgtcaccatccttcaagctgagactcctggtgagcctttgccaccatgaaaaccacatagctgaccagggctgtgcttgaggtacagaggacacacattgtagacaggcctgtgtcatgtttccttacagtcgttttttacagagaaaaggggcattgttttttcactgctttctcaacagttcctgtgaataaatgaaacatttcggagctccctgagagcaagagccttcacttcttcttgcggtgccgggaccatgtgttggtgaagctggtgctgtgggggccactcactcgaatgacacctggaggcctgttcctcccttaccactcccttccccagcccgacttcttggcctcctgcccaaccagacacctcaaactctgtcagtgccctggcattctggcagagaatcctcaccagttctcaccaaccttccccccaggcaagggcagctgccagcatggtgctctgccaggacaggtttccctgaaggaagctgctcacactgagatgagcctctcagggcaggacctcttcccaagccctgcacacccacccctgcagcccttttggctccccttttccctgtgcctcagcactcctttcctggttgcagataacgaactaaggttgcctaaagggcagatctgccctctccatgtcttcgtcctggcaaacagggtcgtcttaaaattatgcgctaattctgtatgggagcactcaaaaggcattacttagagattgaaatttcaaactatctctagtttttcaatggaaatatatcagctagggaaaaaccatcaagctcattattattttttgatcttcagttgtatttttgtgaatattttaatacatctttttcaatttctgaaaaaaa

SEQ ID NO: 14162 - DNA, 2153 bp, Homo sapiens
aagactgcgagctccccgcaccccctcgcactccctctggccggcccagggcgccttcagcccaacctccccagccccacgggcgccacggaacccgctcgatctcgccgccaactggtagacatggagacccctgcctggccccgggtcccgcgccccgagaccgccgtcgctcggacgctcctgctcggctgggtcttcgcccaggtggccggcgcttcaggcactacaaatactgtggcagcatataatttaacttggaaatcaactaatttcaagacaattttggagtgggaacccaaacccgtcaatcaagtctacactgttcaaataagcactaagtcaggagattggaaaagcaaatgcttttacacaacagacacagagtgtgacctcaccgacgagattgtgaaggatgtgaagcagacgtacttggcacgggtcttctcctacccggcagggaatgtggagagcaccggttctgctggggagcctctgtatgagaactccccagagttcacaccttacctggagacaaacctcggacagccaacaattcagagttttgaacaggtgggaacaaaagtgaatgtgaccgtagaagatgaacggactttagtcagaaggaacaacactttcctaagcctccgggatgtttttggcaaggacttaatttatacactttattattggaaatcttcaagttcaggaaagaaaacagccaaaacaaacactaatgagtttttgattgatgtggataaaggagaaaactactgtttcagtgttcaagcagtgattccctcccgaacagttaaccggaagagtacagacagcccggtagagtgtatgggccaggagaaaggggaattcagagaaatattctacatcattggagctgtggtatttgtggtcatcatccttgtcatcatcctggctatatctctacacaagtgtagaaaggcaggagtggggcagagctggaaggagaactccccactgaatgtttcataaaggaagcactgttggagctactgcaaatgctatattgcactgtgaccgagaacttttaagaggatagaatacatggaaacgcaaatgagtatttcggagcatgaagaccctggagttcaaaaaactcttgatatgacctgttattaccattagcattctggttttgacatcagcattagtcactttgaaatgtaacgaatggtactacaaccaattccaagttttaatttttaacaccatggcaccttttgcacataacatgctttagattatatattccgcacttaaggattaaccaggtcgtccaagcaaaaacaaatgggaaaatgtcttaaaaaatcctgggtggacttttgaaaagcttttttttttttttttttttgagacggagtcttgctctgttgcccaggctggagtgcagtagcacgatctcggctcacttgcaccctccgtctctcgggttcaagcaattgtctgcctcagcctcccgagtagctgggattacaggtgcgcactaccacgccaagctaatttttgtattttttagtagagatggggtttcaccatcttggccaggctggtcttgaattcctgacctcagtgatccacccaccttggcctcccaaagatgctagtattatgggcgtgaaccaccatgcccagccgaaaagcttttgaggggctgacttcaatccatgtaggaaagtaaaatggaaggaaattgggtgcatttctaggacttttctaacatatgtctataatatagtgtttaggttcttttttttttcaggaatacatttggaaattcaaaacaattgggcaaactttgtattaatgtgttaagtgcaggagacattggtattctgggcagcttcctaatatgctttacaatctgcactttaactgacttaagtggcattaaacatttgagagctaactatatttttataagactactatacaaactacagagtttatgatttaaggtacttaaagcttctatggttgacattgtatatataattttttaaaaaggtttttctatatggggattttctatttatgtaggtaatattgttctatttgtatatattgagataatttatttaatatactttaaataaaggtgactgggaattgtt

SEQ ID NO: 14163 - DNA, 4081 bp, Homo sapiens
gcggcgcgcggggactcggaggtactgggcgcgcgcggctccggctcgggacgcctcgggacgcctcggggtcgggctccggctgcggctgctgctgcggcgcccgcgctccggtgcgctccgcctcctgtgcccgccgcggagcgcagtctgcgcgcccgccgtgcgccctcagctccttttcctgagcccgccgcgatgggagctgcgcggggatccccggccagaccccgccggttgcctctgctcagcgtcctgctgctgccgctgctgggcggtacccagacagccattgtcttcatcaagcagccgtcctcccaggatgcactgcaggggcgccgggcgctgcttcgctgtgaggttgaggctccgggcccggtacatgtgtactggctgctcgatggggcccctgtccaggacacggagcggcgtttcgcccagggcagcagcctgagctttgcagctgtggaccggctgcaggactctggcaccttccagtgtgtggctcgggatgatgtcactggagaagaagcccgcagtgccaacgcctccttcaacatcaaatggattgaggcaggtcctgtggtcctgaagcatccagcctcggaagctgagatccagccacagacccaggtcacacttcgttgccacattgatgggcaccctcggcccacctaccaatggttccgagatgggacccccctttctgatggtcagagcaaccacacagtcagcagcaaggagcggaacctgacgctccggccagctggtcctgagcatagtgggctgtattcctgctgcgcccacagtgcttttggccaggcttgcagcagccagaacttcaccttgagcattgctgatgaaagctttgccagggtggtgctggcaccccaggacgtggtagtagcgaggtatgaggaggccatgttccattgccagttctcagcccagccacccccgagcctgcagtggctctttgaggatgagactcccatcactaaccgcagtcgccccccacacctccgcagagccacagtgtttgccaacgggtctctgctgctgacccaggtccggccacgcaatgcagggatctaccgctgcattggccaggggcagaggggcccacccatcatcctggaagccacacttcacctagcagagattgaagacatgccgctatttgagccacgggtgtttacagctggcagcgaggagcgtgtgacctgccttccccccaagggtctgccagagcccagcgtgtggtgggagcacgcgggagtccggctgcccacccatggcagggtctaccagaagggccacgagctggtgttggccaatattgctgaaagtgatgctggtgtctacacctgccacgcggccaacctggctggtcagcggagacaggatgtcaacatcactgtggccactgtgccctcctggctgaagaagccccaagacagccagctggaggagggcaaacccggctacttggattgcctgacccaggccacaccaaaacctacagttgtctggtacagaaaccagatgctcatctcagaggactcacggttcgaggtcttcaagaatgggaccttgcgcatcaacagcgtggaggtgtatgatgggacatggtaccgttgtatgagcagcaccccagccggcagcatcgaggcgcaagcccgtgtccaagtgctggaaaagctcaagttcacaccaccaccccagccacagcagtgcatggagtttgacaaggaggccacggtgccctgttcagccacaggccgagagaagcccactattaagtgggaacgggcagatgggagcagcctcccagagtgggtgacagacaacgctgggaccctgcattttgcccgggtgactcgagatgacgctggcaactacacttgcattgcctccaacgggccgcagggccagattcgtgcccatgtccagctcactgtggcagtttttatcaccttcaaagtggaaccagagcgtacgactgtgtaccagggccacacagccctactgcagtgcgaggcccagggggaccccaagccgctgattcagtggaaagacaagcctgtgccggaggagtcggagggccctggcagccctcccccctacaagatgatccagaccattgggttgtcggtgggtgccgctgtggcctacatcattgccgtgctgggcctcatgttctactgcaagaagcgctgcaaagccaagcggctgcagaagcagcccgagggcgaggagccagagatggaatgcctcaacggtgggcctttgcagaacgggcagccctcagcagagatccaagaagaagtggccttgaccagcttgggctccggccccgcggccaccaacaaacgccacagcacaagtgataagatgcacttcccacggtctagcctgcagcccatcaccacgctggggaagagtgagtttggggaggtgttcctggcaaaggctcagggcttggaggagggagtggcagagaccctggtacttgtgaagagcctgcagagcaaggatgagcagcagcagctggacttccggagggagttggagatgtttgggaagctgaaccacgccaacgtggtgcggctcctggggctgtgccgggaggctgagccccactacatggtgctggaatatgtggatctgggagacctcaagcagttcctgaggatttccaagagcaaggatgaaaaattgaagtcacagcccctcagcaccaagcagaaggtggccctatgcacccaggtagccctgggcatggagcacctgtccaacaaccgctttgtgcataaggacttggctgcgcgtaactgcctggtcagtgcccagagacaagtgaaggtgtctgccctgggcctcagcaaggatgtgtacaacagtgagtactaccacttccgccaggcctgggtgccgctgcgctggatgtcccccgaggccatcctggagggtgacttctctaccaagtctgatgtctgggccttcggtgtgctgatgtgggaagtgtttacacatggagagatgccccatggtgggcaggcagatgatgaagtactggcagatttgcaggctgggaaggctagacttcctcagcccgagggctgcccttccaaactctatcggctgatgcagcgctgctgggccctcagccccaaggaccggccctccttcagtgagattgccagcgccctgggagacagcaccgtggacagcaagccgtgaggagggagcccgctcaggatggcctgggcaggggaggacatctctagagggaagctcacagcatgatgggcaagatccctgtcctcctgggccctgaggcccctgccctagtgcaacaggcattgctgaggtctgagcagggcctggcctttcctcctcttcctcaccctcatcctttgggaggctgacttggacccaaactgggcgactagggctttgagctgggcagttttccctgccacctcttcctctatcagggacagtgtgggtgccacaggtaaccccaatttctggccttcaacttctccccttgaccgggtccaactctgccactcatctgccaactttgcctggggagggctaggcttgggatgagctgggtttgtggggagttccttaatattctcaagttctgggcacacagggttaatgagtctcttggcccactggtcccacttgggggtctagaccaggattatagaggacacagcaagtgagtcctccccactctgggcttgtgcacactgacccagacccacgtcttccccacccttctctcctttcctcatcctaagtgcctggcagatgaaggagttttcaggagcttttgacactatataaaccgccctttttgtatgcaccacgggcggcttttatatgtaattgcagcgtggggtgggtgggcatgggaggtaggggtgggccctggagatgaggagggtgggccatccttaccccacacttttattgttgtcgttttttgtttgttttgtttttttgtttttgtttttgtttttacactcgctgctctcaataaataagccttttttacaacctg

SEQ ID NO: 14164 - DNA, 3389 bp, Homo sapiens
agtgcctccctccagactcgggagggtcgagggggcgcgggagagagcgcgggcggccgccggggctggtcgcctgcagggatgggggacgagcggccccactactacgggaaacacggaacgccacagaagtatgatcccactttcaaaggacccatttacaataggggctgcacggatatcatatgctgtgtgttcctgctcctggccattgtgggctacgtggctgtaggcatcatagcctggactcatggagaccctcgaaaggtgatctaccccactgatagccggggcgagttctgcgggcagaagggcacaaaaaacgagaacaaaccctatctgttttatttcaacattgtgaaatgtgccagccccctggttctgctggaattccaatgtcccactccccagatctgcgtggaaaaatgccccgaccgctacctcacgtacctgaatgctcgcagctcccgggactttgagtactataagcagttctgtgttcctggcttcaagaacaataaaggagtggctgaggtgcttcgagatggtgactgccctgctgtcctcatccccagcaaacccttggcccggagatgcttccccgctatccacgcctacaagggtgtcctgatggtgggcaatgagacgacctatgaggatgggcatggctcccggaaaaacatcacagacctggtggagggcgccaagaaagccaatggagtcctagaggcgcggcaactcgccatgcgcatatttgaagattacaccgtctcttggtactggattatcataggcctggtcattgccatggcgatgagcctcctgttcatcatcctgcttcgcttcctggctggtattatggtctgggtgatgatcatcatggtgattctggtgctgggctacggaatatttcactgctacatggagtactcccgactgcgtggtgaggccggctctgatgtctctttggtggacctcggctttcagacggatttccgggtgtacctgcacttacggcagacctggttggcctttatgatcattctgagtatccttgaagtcattatcatcttgctgctcatctttctccggaagagaattctcatcgcgattgcactcatcaaagaagccagcagggctgtgggatacgtcatgtgctccttgctctacccactggtcaccttcttcttgctgtgcctctgcatcgcctactgggccagcactgctgtcttcctgtccacttccaacgaagcggtctataagatctttgatgacagcccctgcccatttactgcgaaaacctgcaacccagagaccttcccctcctccaatgagtcccgccaatgccccaatgcccgttgccagttcgccttctacggtggtgagtcgggctaccaccgggccctgctgggcctgcagatcttcaatgccttcatgttcttctggttggccaacttcgtgctggcgctgggccaggtcacgctggccggggcctttgcctcctactactgggccctgcgcaagccggacgacctgccggccttcccgctcttctctgcctttggccgggcgctcaggtaccacacaggctccctggcctttggcgcgctcatcctggccattgtgcagatcatccgtgtgatactcgagtacctggatcagcggctgaaagctgcagagaacaagtttgccaagtgcctcatgacctgtctcaaatgctgcttctggtgcctggagaagttcatcaaattccttaataggaatgcctacatcatgattgccatctacggcaccaatttctgcacctcggccaggaatgccttcttcctgctcatgagaaacatcatcagagtggctgtcctggataaagttactgacttcctcttcctgttgggcaaacttctgatcgttggtagtgtggggatcctggctttcttcttcttcacccaccgtatcaggatcgtgcaggatacagcaccacccctcaattattactgggttcctatactgacggtgatcgttggctcctacttgattgcacacggtttcttcagcgtctatggcatgtgtgtggacacgctgttcctctgcttcttggaggacctggagaggaatgacggctcggccgagaggccttacttcatgtcttccaccctcaagaaacccttgaacaagaccaacaagaaggcagcggagtcctgaaggccccgtgctccccacctctcaaggagtctcatgccgcagggtgctcagtagctgggtctgttcccccagccccttgggctcacctgaagtcctatcactgccgctctgcccctccccatgagccagatcccaccagtttctggacgtggagagtctggggcatctccttcttatgccaaggggcgcttggagttttcatggctgcccctccagactgcgagaaacaagtaaaaacccattggggcctcttgatgtctgggatggcacgtggcccgacctccacaagctccctcatgcttcctgtcccccgcttacacgacaacgggccagaccacgggaaggacggtgtttgtgtctgagggagctgctggccacagtgaacacccacgtttattcctgcctgctccggccaggactgaaccccttctccacacctgaacagttggctcaagggccaccagaagcatttctttattattattattttttaacctggacatgcattaaagggtctattagctttctttccgtctgtctcaacagctgagatggggccgccaaggagtgccttccttttgctccctcctagctgggagtgacgggtgggagtgtgtgtgcccaggtgggggtgtctcctggctgggaaggagggaaagggagggagagttttgcgggggttggcagtggagagcaggctggagaggagatggctaatagctgtttaatggaaacctgctgggctggagggagttaggctgaatttcccgacttcctctgccagttattgacacagctctctttgtaagagaggaaagaaactaaacccacccaagggatgatttcagggggagaggtggagggcagatgtcctgggcaaaccgggcccctctgcccacacacctcacttgatccttttgccaaacttgtcaaactcaggggaactggcttcccagttgcccctttgccatattccaagtccccctcagacttcatgtctctgctcatcagcactgtcccaggatcctggagagggagaacccctggccccaggggaaagaggggggggtctcccgtttcctgtgcctgcaccagccctgcccccattgcgtctgcacacccctgcgtgtaactgcattccaaccactaataaagtgcctattgtacaggtaaaaaaaaaaaaaaaa

SEQ ID NO: 14165 - DNA, 4253 bp, Homo sapiens
ggtgcatgccgggacggcggtgggtggtgcatgcgctcgcatcatggcggctgagtgggcttctcgtttctggctttgggctacgctgctgattcctgcggccgcggtctacgaagaccaagtgggcaagtttgattggagacagcaatatgttgggaaggtcaagtttgcctccttggaattttcccctggatccaagaagttggttgtagccacagagaagaatgtgattgcagcattaaattcccgaactggggagatcttgtggcgccatgttgacaagggcacggcagaaggggctgtggatgccatgctgctgcacggacaggatgtgatcactgtgtccaatggaggccgaatcatgcgttcctgggagactaacatcgggggcctgaactgggagataaccctggacagtggcagtttccaggcacttgggctggttggcctgcaggagtctgtaaggtacatcgcagtcctgaagaagactacacttgccctccatcacctctccagtgggcacctcaagtgggtggaacatctcccagaaagtgacagcatccactaccagatggtgtattcttacggctctggggtggtgtgggccctcggagttgttcccttcagccatgtgaacattgtcaagtttaatgtggaagatggagagattgttcagcaggttagggtttcaactccgtggctgcagcacctgtctggagcctgtggtgtggtggatgaggctgtcctggtgtgtcctgacccgagctcacgttccctccaaactttggctctggagacggaatgggagttgagacagatcccactgcagtctctcgacttagaatttggaagtggattccaaccccgggtcctgcctacccagcccaacccagtggacgcttcccgggcccagttcttcctgcacttgtccccaagccactatgctctgctgcagtaccattatggaacgctgagtttgcttaaaaacttcccacagactgccctagtgagctttgccaccactggggagaagacggtggctgcagtcatggcctgtcggaatgaagtgcagaaaagtagcagttctgaagatgggtcaatggggagcttttcggagaagtctagttcaaaggactctctggcttgcttcaatcagacctacaccattaacctatacctcgtggagacaggtcggcggctgctggacaccacgataacatttagcctggaacagagcggcactcggcctgagcggctgtatatccaggtgttcttgaagaaggatgactcagtgggctaccgggctttggtgcagacagaggatcatctgctacttttcctgcagcagttggcagggaaggtggtgctgtggagccgtgaggagtccctggcagaagtggtgtgcctagagatggtggacctccccctgactggggcacaggccgagctggaaggagaatttggcaaaaaggcagatggcttgctggggatgttcctgaaacgcctctcgtctcagcttatcctgctgcaagcatggacttcccacctctggaaaatgttttatgatgctcggaagccccggagtcagattaagaatgagatcaacattgacaccctggccagagatgaattcaacctccagaagatgatggtgatggtaacagcctcaggcaagctttttggcattgagagcagctctggcaccatcctgtggaaacagtatctacccaatgtcaagccagactcctcctttaaactgatggtccagagaactactgctcatttcccccatcccccacagtgcaccctgctggtgaaggacaaggagtcgggaatgagttctctgtatgtcttcaatcccatttttgggaagtggagtcaggtagctcccccagtgctgaagcgccccatcttgcagtccttgcttctcccagtcatggatcaagactacgccaaggtgttgctgttgatagatgatgaatacaaggtcacagcttttccagccactcggaatgtcttgcgacagctacatgagcttgccccttccatcttcttctatttggtggatgcagagcagggacggctgtgtggatatcggcttcgaaaggatctcaccactgagctgagttgggagctgaccattcccccagaagtacagcggatcgtcaaggtgaaggggaaacgcagcagtgagcacgttcattcccagggccgtgtgatgggggaccgcagtgtgctctacaagagcctgaaccccaacctgctggccgtggtgacagagagcacagacgcgcaccatgagcgcacctttattggcatcttcctcattgatggcgtcactgggcgtatcattcactcctctgtgcagaagaaagccaaaggccctgtccatatcgtgcattcagagaactgggtggtgtaccagtactggaacaccaaggctcggcgcaacgagtttaccgtactggagctctatgagggcactgagcaatacaacgccaccgccttcagctccctggaccgcccccagctgccccaggtcctccagcagtcctatatcttcccgtcctccatcagtgccatggaggccaccatcaccgaacggggcatcaccagccgacacctgctgattggactaccttctggagcaattctttcccttcctaaggctttgctggatccccgccgccccgagatcccaacagaacaaagcagagaggagaacttaatcccgtattctccagatgtacagatacacgcagagcgattcatcaactataaccagacagtttctcgaatgcgaggtatctacacagctccctcgggtctggagtccacttgtttggttgtggcctatggtttggacatttaccaaactcgagtctacccatccaagcagtttgacgttctgaaggatgactatgactacgtgttaatcagcagcgtcctctttggcctggtttttgccaccatgatcactaagagactggcacaggtgaagctcctgaatcgggcctggcgataaagaacaaagactgtgcctaaaagtggagagccaggggagtgtgggtcagataagcagctacagctgcagtttggtggattggtggagtatgtgtgtgtgtcagtgctcagctaagaactgtagggaagatggatgaccttcacgcagaactccttttgggatatacatgatgcagaaaggatcctacatggagagagacagaactctctcagctgacactctcagagattcctgatgggctttctcttgaagtccaaaggcgtctgcattgtttcctttctttgcccatccatgaatgttctgttttgttttttttaataagaattccggctgatttttgtgaggcctgtttaaattgactttactttgccttttgtgtttctcaattttatctagaaatctttctgactttttccatctcttgcttcaaagtaagaggggaactctccttgccgactccaccttataggtacatttggtgttttgcactgggaagaaataggatccatccttagctgaggcttgaggactgatccagcctctcatggcttccctccaaagtaacttagggttgagggatctatatgtgatgtcaaaacttactttaaacctctagtttcgtgctgtcatttattaggctgggccaccaaatctttgtttcaatttatcagaagccaagtgcatactagcgtcttgtttgttgcccattgcctatacttttcacctgagatgtgtgagttggggccttttaaaaactactgaattgtctgagccttgaagacatttccagggagaagagataatctctcatttcacccacaggctggtctaatcataacctagttaaagatgtccttgtttaagaaccccattatttatttttagtttttaatataaattaacatgtgggtcattatatttctccttaaatgaggaaattttaaattttattgatctaacctttgaagctttaaaaaaggagaaagagggtaggggtgggaaactggcatactgtgtgtatagcactgccgattggctaggccactgtgtctctgctacaaattaaagaaatcctaaaagttttccttggtcatagagttggggaatgacagaatttttctttgttgtgaaatgtatgtacagagtagaccatctctagccctgtggtgaaagaggtacactcgaatgtttgcataaagcaagtgacaaatgaaaaaaaaaaaaaaaa

SEQ ID NO: 14166 - DNA, 1407 bp, Homo sapiens
atggcggcggaaggctggatttggcgttggggctggggccggcggtgcctgggaaggcctgggcttctcggccccggccctggccccactacacctctctttcttcttttgttgttggggtctgtgactgcggatataactgacggcaacagtgaacatctcaagcgggagcattcgctcattaagccctaccaaggggtcggttccagctctatgcccctctgggacttccagggcagcactatgctcacgagccagtacgtacgtctgacccctgacgagcgcagcaaagagggctctatctggaaccaccagccgtgcttcctcaaagactgggaaatgcacgtccacttcaaagtccacggcacagggaagaagaacctccatggagacggcatcgccttgtggtacacccgggaccgcctcgtgccagggcctgtgtttggaagcaaagataacttccacggcttagccatcttcctggacacctaccccaatgatgagaccactgagcgcgtgttcccgtacatctcggtgatggtgaacaatggctccctgtcctacgaccacagcaaggatgggcgctggaccgagctggcgggctgcacggctgacttccgcaaccgcgatcacgacaccttcctggctgtgcgctactcccggggccgtctgacggtgatgaccgacctggaggacaagaacgagtggaagaactgcattgacatcacgggagtgcgcctgcccaccggctactacttcggggcctccgccggcaccggcgacctgtctgacaatcatgacatcatctccatgaagctgttccagctgatggtggagcacacgcccgacgaggagagcatcgactggaccaagatcgagcccagcgtcaacttcctcaagtcgcccaaagacaacgtggacgaccccacggggaacttccgcagcgggcccctgacggggtggcgggtgttcctgctgctgctgtgcgctctcctgggcatcgttgtctgcgccgtggtgggggccgtggtgttccagaagcggcaggagcggaacaagcgcttctactgagtggcgcctccggcggggcctgtccctgggcccaggagccaatgtgaacttttttttttaccgggattataaaagaacaacaagatgaccttatttcttaactgtttcaaataaatgattaaagtattttcatacattttgcttcttgcccagcagggacaggtggcagagccgaggcttagggtctggcaccccccacagctggagacggaggctctcctggggctggtgtctcaggagcaggggtctgtgtctacagatgggctgtggcccctgcaggcagctgttgaacactggagggtcccccggaccacactggggtgggctcctgaggac

SEQ ID NO: 14167 - DNA, 1365 bp, Homo sapiens
cactgcttgagccgctgagagggtggcgacgtcggggccatggggctgggcccggtcttcctgcttctggctggcatcttcccttttgcacctccgggagctgctgctgagccccacagtcttcgttataacctcacggtgctgtcctgggatggatctgtgcagtcagggtttctcactgaggtacatctggatggtcagcccttcctgcgctgtgacaggcagaaatgcagggcaaagccccagggacagtgggcagaagatgtcctgggaaataagacatgggacagagagaccagagacttgacagggaacggaaaggacctcaggatgaccctggctcatatcaaggaccagaaagaaggcttgcattccctccaggagattagggtctgtgagatccatgaagacaacagcaccaggagctcccagcatttctactacgatggggagctcttcctctcccaaaacctggagactaaggaatggacaatgccccagtcctccagagctcagaccttggccatgaacgtcaggaatttcttgaaggaagatgccatgaagaccaagacacactatcacgctatgcatgcagactgcctgcaggaactacggcgatatctaaaatccggcgtagtcctgaggagaacagtgccccccatggtgaatgtcacccgcagcgaggcctcagagggcaacattaccgtgacatgcagggcttctggcttctatccctggaatatcacactgagctggcgtcaggatggggtatctttgagccacgacacccagcagtggggggatgtcctgcctgatgggaatggaacctaccagacctgggtggccaccaggatttgccaaggagaggagcagaggttcacctgctacatggaacacagcgggaatcacagcactcaccctgtgccctctgggaaagtgctggtgcttcagagtcattggcagacattccatgtttctgctgttgctgctgctgctatttttgttattattattttctatgtccgttgttgtaagaagaaaacatcagctgcagagggtccagagctcgtgagcctgcaggtcctggatcaacacccagttgggacgagtgaccacagggatgccacacagctcggatttcagcctctgatgtcagatcttgggtccactggctccactgagggcgcctagactctacagccaggcagctgggattcaattccctgcctggatctcacgagcactttccctcttggtgcctcagtttcctgacctatgaaacagagaaaataaaagcacttatttattgttgttggaggctgcaaaatgttagtagatatgaggcgtttgcagctgtaccatatt

SEQ ID NO: 14168 - DNA, 2486 bp, Homo sapiens
acccggagcgggaagatggcggcggcgcaggaggcggacggggcccgcagcgccgtggtggcggccgggggaggcagctccggtcaggtgaccagcaatggcagcatcgggagggacccgccagcggagacccagcctcagaacccaccggcccagccggcacccaatgcctggcaggtcatcaaaggtgtgctgtttaggatcttcatcatctgggccatcagcagttggttccgccgagggccggcccctcaggaccaggcgggccccggaggagccccacgcgtcgccagccgcaacctgttccccaaagacactttaatgaacctgcatgtgtacatctcagagcacgagcactttacagacttcaacgccacgtcggcactcttctgggaacagcacgatcttgtgtatggcgactggactagcggcgagaactcagacggctgctacgagcactttgctgagctcgatatcccacagagcgtccagcagaacggctccatctacatccacgtttacttcaccaagagtggcttccacccagacccccggcagaaggccctgtaccgccggcttgccacagtccacatgtcccggatgatcaacaaatacaagcgcagacgatttcagaaaaccaagaacctgctgacaggagagacagaagcggacccagaaatgatcaagagggctgaggactatgggcctgtggaggtgatctcccattggcaccccaacatcaccatcaacatcgtggacgaccacacgccgtgggtgaagggcagtgtgccccctcccctggatcaatatgtgaagttcgacgccgtgagcggtgactactatcccatcatctacttcaatgactactggaacctgcagaaggactactaccccatcaacgagagcctggccagcctgccgctccgcgtctccttctgcccactctcgctttggcgctggcagctctatgctgcccagagcaccaagtcgccctggaacttcctgggcgatgagttgtacgagcagtcagatgaggagcaggactcggtgaaggtggccctgctggagaccaacccctacctgctggcgctcaccatcatcgtgtctatcgttcacagtgtcttcgagttcctggccttcaagaatgatatccagttctggaacagccggcagtccctggagggcctgtccgtgcgctccgtcttcttcggcgttttccagtcattcgtggtcctcctctacatcctggacaacgagaccaacttcgtggtccaggtcagcgtcttcattggggtcctcatcgacctctggaagatcaccaaggtcatggacgtccggctggaccgagagcacagggtggcaggaatcttcccccgcctatccttcaaggacaagtccacgtatatcgagtcctcgaccaaagtgtatgatgatatggcattccggtacctgtcctggatcctcttcccgctcctgggctgctatgccgtctacagtcttctgtacctggagcacaagggctggtactcctgggtgctcagcatgctctacggcttcctgctgaccttcggcttcatcaccatgacgccccagctcttcatcaactacaagctcaagtctgtggcccaccttccctggcgcatgctcacctacaaggccctcaacacattcatcgacgacctgttcgcctttgtcatcaagatgcccgttatgtaccggatcggctgcctgcgggacgatgtggttttcttcatctacctctaccaacggtggatctaccgcgtcgaccccacccgagtcaacgagtttggcatgagtggagaagaccccacagctgccgcccccgtggccgaggttcccacagcagcaggggccctcacgcccacacctgcacccaccacgaccaccgccaccagggaggaggcctccacgtccctgcccaccaagcccacccagggggccagctctgccagcgagccccaggaagcccctccaaagccagcagaggacaagaaaaaggattagtcgagactggtcctcacctgctccggctcctggcgaccactacccctgcgtcccggccccctcgcctcccctccctgtcgccctttccctggacagatcaggccggggcggtgggaggcccgcctcaggtcagggcccagcgtgtgacgtaggggccggggcaggccagggtttgtttgtggaggcgctgtctgtccctctgtccctctgtgtttccagccatctcgccctgccagcccagcaccactgggaatcatggtgaagctgatgcagcgttgccgagggggtgggttgggcgggggtggggccgggcccccctacgggatgcccacggccgttcatcatcttgtccctcgtccccctaccacactccccctcctagaccgccgccctttaacacagtctggatttaataaattcatatgggtgtttaacttaaactcaaaaaaaaaaaaaaaaaa

SEQ ID NO: 14169 - DNA, 1203 bp, Homo sapiens
agaaagccgcgcacctcctcccgccaggcgctttctcggacgccttgcccagcgggccgcccgaccccctgcaccatggaccccgctcgccccctggggctgtcgattctgctgcttttcctgacggaggctgcactgggcgatgctgctcaggagccaacaggaaataacgcggagatctgtctcctgcccctagactacggaccctgccgggccctacttctccgttactactacgacaggtacacgcagagctgccgccagttcctgtacgggggctgcgagggcaacgccaacaatttctacacctgggaggcttgcgacgatgcttgctggaggatagaaaaagttcccaaagtttgccggctgcaagtgagtgtggacgaccagtgtgaggggtccacagaaaagtatttctttaatctaagttccatgacatgtgaaaaattcttttccggtgggtgtcaccggaaccggattgagaacaggtttccagatgaagctacttgtatgggcttctgcgcaccaaagaaaattccatcattttgctacagtccaaaagatgagggactgtgctctgccaatgtgactcgctattattttaatccaagatacagaacctgtgatgctttcacctatactggctgtggagggaatgacaataactttgttagcagggaggattgcaaacgtgcatgtgcaaaagctttgaaaaagaaaaagaagatgccaaagcttcgctttgccagtagaatccggaaaattcggaagaagcaattttaaacattcttaatatgtcatcttgtttgtctttatggcttatttgcctttatggttgtatctgaagaataatatgacagcatgaggaaacaaatcattggtgatttattcaccagtttttattaatacaagtcactttttcaaaaatttggatttttttatatataactagctgctattcaaatgtgagtctaccatttttaatttatggttcaactgtttgtgagactgaattcttgcaatgcataagatataaaagcaaatatgactcactcatttcttggggtcgtattcctgatttcagaagaggatcataactgaaacaacataagacaatataatcatgtgcttttaacatatttgagaataaaaaggactagcaaataaaacacaaaaaaaaaaaaaaaaaaaaaaaaaaaaaaa

SEQ ID NO: 14170 - DNA, 1890 bp, Homo sapiens
ccagatcataccctgctgggcaaaggaggaagagccagaggatccagacgccttggaggacttggaacacctgtaacaggacaaggagttctgctcaggcacgtggccacagaaaactacttaggaagcctgtggtgagaacaacaacagtgcctgagaatcccacggctctggggaagtgagccccgaggatgaggctgctcgcctggctgattttcctggctaactggggaggtgccagggctgaaccagggaagttctggcacatcgctgacctgcaccttgaccctgactacaaggtatccaaagaccccttccaggtgtgcccatcagctggatcccagccagtgcccgacgcaggcccctggggtgactacctctgtgattctccctgggccctcatcaactcctccatctatgccatgaaggagattgagccagagccagacttcattctctggactggtgatgacacgcctcatgtgcccgatgagaaactgggagaggcagctgtactggaaattgtggaacgcctgaccaagctcatcagagaggtctttccagatactaaagtctatgctgctttgggaaatcatgattttcaccccaaaaaccagttcccagctggaagtaacaacatctacaatcagatagcagaactatggaaaccctggcttagtaatgagtccatcgctctcttcaaaaaaggtgccttctactgtgagaagctgccgggtcccagcggggctgggcgaattgtggtcctcaacaccaatctgtactataccagcaatgcgctgacagcagacatggcggaccctggccagcagttccagtggctggaagatgtgctgaccgatgcatccaaagctggggacatggtgtacattgtcggccacgtgcccccggggttctttgagaagacgcaaaacaaggcatggttccgggagggcttcaatgaaaaatacctgaaggtggtccggaagcatcatcgcgtcatagcagggcagttcttcgggcaccaccacaccgacagctttcggatgctctatgatgatgcaggtgtccccataagcgccatgttcatcacacctggagtcaccccatggaaaaccacattacctggagtggtcaatggggccaacaatccagccatccgggtgttcgaatatgaccgagccacactgagcctgaaggacatggtgacctacttcatgaacctgagccaggcgaatgctcaggggacgccgcgctgggagctcgagtaccagctgaccgaggcctatggggtgccggacgccagcgcccactccatgcacacagtgctggaccgcatcgctggcgaccagagcacactgcagcgctactacgtctataactcagtcagctactctgctggggtctgcgacgaggcctgcagcatgcagcacgtgtgtgccatgcgccaggtggacattgacgcttacaccacctgtctgtatgcctctggcaccacgcccgtgccccagctcccgctgctgctgatggccctgctgggcctgtgcacgctcgtgctgtgacctgccaggctcaccttcttcctggtaacgggtaacgggggcagcgcccaggatcacccagagctgggccttccaccatttcctccgcgcctgaggagtgaactgaaataggacaaccgaatcaggaagcgaagccccaggagctgcagccatccgtgatcgcgccactgcactccagcctgggcgacaaagccagactctctccaaaaacaaaccagaaacagaaaagaaatgacgacccaagacccccctacaagcatacttcttttgcgtattatgttttactcacaaaacaaagctcatcatgcgtttgaaaaaaaaaaaaaaaaaa

SEQ ID NO: 14171 - DNA, 2995 bp, Homo sapiens
taggcttcctccctccctgtcgccgccagcctctcgctctccccgtcttccgcccgcactctctgggcagggctgcggccaggacccgcccccgcgtcccgcccgaccctccgccaggggtcacttcccctgtccaggtttcagcttccacatgtgtcaagcggctggctcagcccagagtccctgtctcccgcccgccggcccgagccgccgcccctcccccgcctcccgtgcgcccgggacaatcctcgccttgtctgtggcgccggcatctggagctttctgtagcctccggatacgcctttttttcagggcgtagccccagccaagctgctccccgcggcggccgcacagcagcccgagcgccccctttccagagctcccctccggagctgggatccaggcgcgtagcggagatcccaggatcctgggtgctgtctgggcccgctccccaccatgacctcctcggggcctggaccccggttcctgctgctgctgccgctgctgctgccccctgcggcctcagcctccgaccggccccggggccgagacccggtcaacccagagaagctgctggtgatcactgtggccacagctgaaaccgaggggtacctgcgtttcctgcgctctgcggagttcttcaactacactgtgcggaccctgggcctgggagaggagtggcgagggggtgatgtggctcgaacagttggtggaggacagaaggtccggtggttaaagaaggaaatggagaaatacgctgaccgggaggatatgatcatcatgtttgtggatagctacgacgtgattctggccggcagccccacagagctgctgaagaagttcgtccagagtggcagccgcctgctcttctctgcagagagcttctgctggcccgagtgggggctggcggagcagtaccctgaggtgggcacggggaagcgcttcctcaattctggtggattcatcggttttgccaccaccatccaccaaatcgtgcgccagtggaagtacaaggatgatgacgacgaccagctgttctacacacggctctacctggacccaggactgagggagaaactcagccttaatctggatcataagtctcggatctttcagaacctcaacggggctttagatgaagtggttttaaagtttgatcggaaccgtgtgcgtatccggaacgtggcctacgacacgctccccattgtggtccatggaaacggtcccactaagctgcagctcaactacctgggaaactacgtccccaatggctggactcctgagggaggctgtggcttctgcaaccaggaccggaggacactcccgggggggcagcctcccccccgggtgtttctggccgtgtttgtggaacagcctactccgtttctgccccgcttcctgcagcggctgctactcctggactatccccccgacagggtcacccttttcctgcacaacaacgaggtcttccatgaaccccacatcgctgactcctggccgcagctccaggaccacttctcagctgtgaagctcgtggggccggaggaggctctgagcccaggcgaggccagggacatggccatggacctgtgtcggcaggaccccgagtgtgagttctacttcagcctggacgccgacgctgtcctcaccaacctgcagaccctgcgtatcctcattgaggagaacaggaaggtgatcgcccccatgctgtcccgccacggcaagctgtggtccaacttctggggcgccctgagccccgatgagtactacgcccgctccgaggactacgtggagctggtgcagcggaagcgagtgggtgtgtggaatgtaccatacatctcccaggcctatgtgatccggggtgataccctgcggatggagctgccccagagggatgtgttctcgggcagtgacacagacccggacatggccttctgtaagagctttcgagacaagggcatcttcctccatctgagcaatcagcatgaatttggccggctcctggccacttccagatacgacacggagcacctgcaccccgacctctggcagatcttcgacaaccccgtcgactggaaggagcagtacatccacgagaactacagccgggccctggaaggggaaggaatcgtggagcagccatgcccggacgtgtactggttcccactgctgtcagaacaaatgtgtgatgagctggtggcagagatggagcactacggccagtggtcaggcggccggcatgaggattcaaggctggctggaggctacgagaatgtgcccaccgtggacatccacatgaagcaggtggggtacgaggaccagtggctgcagctgctgcggacgtatgtgggccccatgaccgagagcctgtttcccggttaccacaccaaggcgcgggcggtgatgaactttgtggttcgctaccggccagacgagcagccgtctctgcggccacaccacgactcatccaccttcaccctcaacgttgccctcaaccacaagggcctggactatgagggaggtggctgccgcttcctgcgctacgactgtgtgatctcctccccgaggaagggctgggcactcctgcaccccggccgcctcacccactaccacgaggggctgccaacgacctggggcacacgctacatcatggtgtcctttgtcgacccctgacactcaaccactctgccaaacctgccctgccattgtgcctttttagggggcctggcccccgtcctgggagttgggggatgggtctctctgtctccccacttcctgagttcatgttccgcgtgcctgaactgaatatgtcaccttgctcccaagacacggccctctcaggaagctcccggagtccccgcctctctcctccgcccacaggggttcgtgggcacagggcttctggggactccccgcgtgataaattattaatgttccgcagtctcactctgaataaaggacagtttgtaagtcttgaaaaaaaaaaaaaaaaaaa

SEQ ID NO: 14172 - DNA, 4009 bp, Homo sapiens
acaccgccctcccgccagactcccggcggctcctcctccctctcccaaacccactcccaaagctaagtgcaggcttccccgttccagccagaagcgctgcgtgagcctccacacgtagccgcaggcagctccttaaatagcgtccgcgctgagcaaacagtccagacgtggggcccaggagggcgagctgaggcgaccgcaccgggcgcgcagcggcggcgggtcagccggcggccaatagccagggcgcggcccgccccgtcgcctcccctcggggagcctataaggcctccgcagcgccccgggcgcctgctgctccgtgcctccaccgacgacctcactcagctgcgttacgcgccgctccggctgccggccgcgcgccttgcccgccggctcccgcccgcaatcggcggctcagggcggacccgggtctctgcgttctcgcgagaagcgcggcgctgcggggccgtgggcgcctgagcccgcgcggccctcgagggccgaatatggggggatgcacggtgaagcctcagctgctgctcctggcgctcgtcctccacccctggaatccctgtctgggtgcggactcggagaagccctcgagcatccccacagataaattattagtcataactgtagcaacaaaagaaagtgatggattccatcgatttatgcagtcagccaaatatttcaattatactgtgaaggtccttggtcaaggagaagaatggagaggtggtgatggaattaatagtattggagggggccagaaagtgagattaatgaaagaagtcatggaacactatgctgatcaagatgatctggttgtcatgtttactgaatgctttgatgtcatatttgctggtggtccagaagaagttctaaaaaaattccaaaaggcaaaccacaaagtggtctttgcagcagatggaattttgtggccagataaaagactagcagacaagtatcctgttgtgcacattgggaaacgctatctgaattcaggaggatttattggctatgctccatatgtcaaccgtatagttcaacaatggaatctccaggataatgatgatgatcagctcttttacactaaagtttacattgatccactgaaaagggaagctattaacatcacattggatcacaaatgcaaaattttccagaccttaaatggagctgtagatgaagttgttttaaaatttgaaaatggcaaagccagagctaagaatacattttatgaaacattaccagtggcaattaatggaaatggacccaccaagattctcctgaattattttggaaactatgtacccaattcatggacacaggataatggctgcactctttgtgaattcgatacagtcgacttgtctgcagtagatgtccatccaaacgtatcaataggtgtttttattgagcaaccaaccccttttctacctcggtttctggacatattgttgacactggattacccaaaagaagcacttaaactttttattcataacaaagaagtttatcatgaaaaggacatcaaggtattttttgataaagctaagcatgaaatcaaaactataaaaatagtaggaccagaagaaaatctaagtcaagcggaagccagaaacatgggaatggacttttgccgtcaggatgaaaagtgtgattattactttagtgtggatgcagatgttgttttgacaaatccaaggactttaaaaattttgattgaacaaaacagaaagatcattgctcctcttgtaactcgtcatggaaagctgtggtccaatttctggggagcattgagtcctgatggatactatgcacgatctgaagattatgtggatattgttcaagggaatagagtaggagtatggaatgtcccatatatggctaatgtgtacttaattaaaggaaagacactccgatcagagatgaatgaaaggaactattttgttcgtgataaactggatcctgatatggctctttgccgaaatgctagagaaatgggtgtatttatgtacatttctaatagacatgaatttggaaggctattatccactgctaattacaatacttcccattataacaatgacctctggcagatttttgaaaatcctgtggactggaaggaaaagtatataaaccgtgattattcaaagattttcactgaaaatatagttgaacagccctgtccagatgtcttttggttccccatattttctgaaaaagcctgtgatgaattggtagaagaaatggaacattacggcaaatggtctgggggaaaacatcatgatagccgtatatctggtggttatgaaaatgtcccaactgatgatatccacatgaagcaagttgatctggagaatgtatggcttcattttatccgggagttcattgcaccagttacactgaaggtctttgcaggctattatacgaagggatttgcactactgaattttgtagtaaaatactcccctgaacgacagcgttctcttcgtcctcatcatgatgcttctacatttaccataaacattgcacttaataacgtgggagaagactttcagggaggtggttgcaaatttctaaggtacaattgctctattgagtcaccacgaaaaggctggagcttcatgcatcctgggagactcacacatttgcatgaaggacttcctgttaaaaatggaacaagatacattgcagtgtcatttatagatccctaagttatttacttttcattgaattgaaatttattttggatgaatgactggcatgaacacgtctttgaagttgtggctgagaagatgagaggaatatttaaataacatcaacagaacaacttcactttgggccaaacatttgaaaaactttttataaaaaattgtttgatatttcttaatgtctgctctgagccttaaaacacagattgaagaagaaaagaaagaaaaaacttaaatatttatttctatgctttgttgcctctgagaataatgacaatttatgaatttgtgtttcaaattgataaaatatttaggtacaaataacaagactaataatattttcttatttaaaaaaagcatgggaagatttttatttatcaaaatatagaggaaatgtagacaaaatggatataaatgaaaattaccatgttgtaaaaccttgaaaatcagattctaactggatttgtatgcaactaagtatttttctgaacacctatgcaggtcttatttacagtagttactaagggaacacacaaagaattacacaacgttttcctcaagaaaatggtacaaaacacaaccgaggagcgtatacagttgaaaacatttttgttttgattggaaggcagattattttatattagtattaaaaatcaaaccctatgtttctttcagatgaatcttccaaagtggattatattaagcaggtattagatttaggaaaacctttccatttcttaaagtattatcaagtgtcaagatcagcaagtgtccttaagtcaaacaggttttttttgttgttgtttttgctttgtttccttttttagaaagttctagaaaataggaaaacgaaaaatttcattgagatgagtagtgcatttaattattttttaaaaaactttttaagtacttgaattttatatcaggaaaacaaagttgttgagccttgcttcttccgttttgccctttgtctcgctccttattctttttttggggggagggttatttgcttttttatcttcctggcataatttccattttattcttctgagtgtctatgttaacttccctctatcccgcttataaaaaaattctccaacaaaaatacttgttgacttgatgttttatcacttctctaagtaaggttgaaatatccttattgtagctactgtttttaatgtaaaggttaaacttgaaaagaaattcttaatcacggtgccaaaattcattttctaacaccatgtgttagaaaattataaaaaataaaataattttagaaaaaaaaaaaaaaa

SEQ ID NO: 14173 - DNA, 4072 bp, Homo sapiens
acaccgccctcccgccagactcccggcggctcctcctccctctcccaaacccactcccaaagctaagtgcaggcttccccgttccagccagaagcgctgcgtgagcctccacacgtagccgcaggcagctccttaaatagcgtccgcgctgagcaaacagtccagacgtggggcccaggagggcgagctgaggcgaccgcaccgggcgcgcagcggcggcgggtcagccggcggccaatagccagggcgcggcccgccccgtcgcctcccctcggggagcctataaggcctccgcagcgccccgggcgcctgctgctccgtgcctccaccgacgacctcactcagctgcgttacgcgccgctccggctgccggccgcgcgccttgcccgccggctcccgcccgcaatcggcggctcagggcggacccgggtctctgcgttctcgcgagaagcgcggcgctgcggggccgtgggcgcctgagcccgcgcggccctcgagggccgaatatggggggatgcacggtgaagcctcagctgctgctcctggcgctcgtcctccacccctggaatccctgtctgggtgcggactcggagaagccctcgagcatccccacagataaattattagtcataactgtagcaacaaaagaaagtgatggattccatcgatttatgcagtcagccaaatatttcaattatactgtgaaggtccttggtcaaggagaagaatggagaggtggtgatggaattaatagtattggagggggccagaaagtgagattaatgaaagaagtcatggaacactatgctgatcaagatgatctggttgtcatgtttactgaatgctttgatgtcatatttgctggtggtccagaagaagttctaaaaaaattccaaaaggcaaaccacaaagtggtctttgcagcagatggaattttgtggccagataaaagactagcagacaagtatcctgttgtgcacattgggaaacgctatctgaattcaggaggatttattggctatgctccatatgtcaaccgtatagttcaacaatggaatctccaggataatgatgatgatcagctcttttacactaaagtttacattgatccactgaaaagggaagctattaacatcacattggatcacaaatgcaaaattttccagaccttaaatggagctgtagatgaagttgttttaaaatttgaaaatggcaaagccagagctaagaatacattttatgaaacattaccagtggcaattaatggaaatggacccaccaagattctcctgaattattttggaaactatgtacccaattcatggacacaggataatggctgcactctttgtgaattcgatacagtcgacttgtctgcagtagatgtccatccaaacgtatcaataggtgtttttattgagcaaccaaccccttttctacctcggtttctggacatattgttgacactggattacccaaaagaagcacttaaactttttattcataacaaagaagtttatcatgaaaaggacatcaaggtattttttgataaagctaagcatgaaatcaaaactataaaaatagtaggaccagaagaaaatctaagtcaagcggaagccagaaacatgggaatggacttttgccgtcaggatgaaaagtgtgattattactttagtgtggatgcagatgttgttttgacaaatccaaggactttaaaaattttgattgaacaaaacagaaagatcattgctcctcttgtaactcgtcatggaaagctgtggtccaatttctggggagcattgagtcctgatggatactatgcacgatctgaagattatgtggatattgttcaagggaatagagtaggagtatggaatgtcccatatatggctaatgtgtacttaattaaaggaaagacactccgatcagagatgaatgaaaggaactattttgttcgtgataaactggatcctgatatggctctttgccgaaatgctagagaaatgactttacaaagggaaaaagactcccctactccggaaacattccaaatgctcagccccccaaagggtgtatttatgtacatttctaatagacatgaatttggaaggctattatccactgctaattacaatacttcccattataacaatgacctctggcagatttttgaaaatcctgtggactggaaggaaaagtatataaaccgtgattattcaaagattttcactgaaaatatagttgaacagccctgtccagatgtcttttggttccccatattttctgaaaaagcctgtgatgaattggtagaagaaatggaacattacggcaaatggtctgggggaaaacatcatgatagccgtatatctggtggttatgaaaatgtcccaactgatgatatccacatgaagcaagttgatctggagaatgtatggcttcattttatccgggagttcattgcaccagttacactgaaggtctttgcaggctattatacgaagggatttgcactactgaattttgtagtaaaatactcccctgaacgacagcgttctcttcgtcctcatcatgatgcttctacatttaccataaacattgcacttaataacgtgggagaagactttcagggaggtggttgcaaatttctaaggtacaattgctctattgagtcaccacgaaaaggctggagcttcatgcatcctgggagactcacacatttgcatgaaggacttcctgttaaaaatggaacaagatacattgcagtgtcatttatagatccctaagttatttacttttcattgaattgaaatttattttggatgaatgactggcatgaacacgtctttgaagttgtggctgagaagatgagaggaatatttaaataacatcaacagaacaacttcactttgggccaaacatttgaaaaactttttataaaaaattgtttgatatttcttaatgtctgctctgagccttaaaacacagattgaagaagaaaagaaagaaaaaacttaaatatttatttctatgctttgttgcctctgagaataatgacaatttatgaatttgtgtttcaaattgataaaatatttaggtacaaataacaagactaataatattttcttatttaaaaaaagcatgggaagatttttatttatcaaaatatagaggaaatgtagacaaaatggatataaatgaaaattaccatgttgtaaaaccttgaaaatcagattctaactggatttgtatgcaactaagtatttttctgaacacctatgcaggtcttatttacagtagttactaagggaacacacaaagaattacacaacgttttcctcaagaaaatggtacaaaacacaaccgaggagcgtatacagttgaaaacatttttgttttgattggaaggcagattattttatattagtattaaaaatcaaaccctatgtttctttcagatgaatcttccaaagtggattatattaagcaggtattagatttaggaaaacctttccatttcttaaagtattatcaagtgtcaagatcagcaagtgtccttaagtcaaacaggttttttttgttgttgtttttgctttgtttccttttttagaaagttctagaaaataggaaaacgaaaaatttcattgagatgagtagtgcatttaattattttttaaaaaactttttaagtacttgaattttatatcaggaaaacaaagttgttgagccttgcttcttccgttttgccctttgtctcgctccttattctttttttggggggagggttatttgcttttttatcttcctggcataatttccattttattcttctgagtgtctatgttaacttccctctatcccgcttataaaaaaattctccaacaaaaatacttgttgacttgatgttttatcacttctctaagtaaggttgaaatatccttattgtagctactgtttttaatgtaaaggttaaacttgaaaagaaattcttaatcacggtgccaaaattcattttctaacaccatgtgttagaaaattataaaaaataaaataattttagaaaaaaaaaaaaaaa

SEQ ID NO: 14174 - DNA, 5489 bp, Homo sapiens
ggctgagttttatgacgggcccggtgctgaagggcagggaacaacttgatggtgctactttgaactgcttttcttttctcctttttgcacaaagagtctcatgtctgatatttagacatgatgagctttgtgcaaaaggggagctggctacttctcgctctgcttcatcccactattattttggcacaacaggaagctgttgaaggaggatgttcccatcttggtcagtcctatgcggatagagatgtctggaagccagaaccatgccaaatatgtgtctgtgactcaggatccgttctctgcgatgacataatatgtgacgatcaagaattagactgccccaacccagaaattccatttggagaatgttgtgcagtttgcccacagcctccaactgctcctactcgccctcctaatggtcaaggacctcaaggccccaagggagatccaggccctcctggtattcctgggagaaatggtgaccctggtattccaggacaaccagggtcccctggttctcctggcccccctggaatctgtgaatcatgccctactggtcctcagaactattctccccagtatgattcatatgatgtcaagtctggagtagcagtaggaggactcgcaggctatcctggaccagctggccccccaggccctcccggtccccctggtacatctggtcatcctggttcccctggatctccaggataccaaggaccccctggtgaacctgggcaagctggtccttcaggccctccaggacctcctggtgctataggtccatctggtcctgctggaaaagatggagaatcaggtagacccggacgacctggagagcgaggattgcctggacctccaggtatcaaaggtccagctgggatacctggattccctggtatgaaaggacacagaggcttcgatggacgaaatggagaaaagggtgaaacaggtgctcctggattaaagggtgaaaatggtcttccaggcgaaaatggagctcctggacccatgggtccaagaggggctcctggtgagcgaggacggccaggacttcctggggctgcaggtgctcggggtaatgacggtgctcgaggcagtgatggtcaaccaggccctcctggtcctcctggaactgccggattccctggatcccctggtgctaagggtgaagttggacctgcagggtctcctggttcaaatggtgcccctggacaaagaggagaacctggacctcagggacacgctggtgctcaaggtcctcctggccctcctgggattaatggtagtcctggtggtaaaggcgaaatgggtcccgctggcattcctggagctcctggactgatgggagcccggggtcctccaggaccagccggtgctaatggtgctcctggactgcgaggtggtgcaggtgagcctggtaagaatggtgccaaaggagagcccggaccacgtggtgaacgcggtgaggctggtattccaggtgttccaggagctaaaggcgaagatggcaaggatggatcacctggagaacctggtgcaaatgggcttccaggagctgcaggagaaaggggtgcccctgggttccgaggacctgctggaccaaatggcatcccaggagaaaagggtcctgctggagagcgtggtgctccaggccctgcagggcccagaggagctgctggagaacctggcagagatggcgtccctggaggtccaggaatgaggggcatgcccggaagtccaggaggaccaggaagtgatgggaaaccagggcctcccggaagtcaaggagaaagtggtcgaccaggtcctcctgggccatctggtccccgaggtcagcctggtgtcatgggcttccccggtcctaaaggaaatgatggtgctcctggtaagaatggagaacgaggtggccctggaggacctggccctcagggtcctcctggaaagaatggtgaaactggacctcaaggacccccagggcctactgggcctggtggtgacaaaggagacacaggaccccctggtccacaaggattacaaggcttgcctggtacaggtggtcctccaggagaaaatggaaaacctggggaaccaggtccaaagggtgatgccggtgcacctggagctccaggaggcaagggtgatgctggtgcccctggtgaacgtggacctcctggattggcaggggccccaggacttagaggtggagctggtccccctggtcccgaaggaggaaagggtgctgctggtcctcctgggccacctggtgctgctggtactcctggtctgcaaggaatgcctggagaaagaggaggtcttggaagtcctggtccaaagggtgacaagggtgaaccaggcggcccaggtgctgatggtgtcccagggaaagatggcccaaggggtcctactggtcctattggtcctcctggcccagctggccagcctggagataagggtgaaggtggtgcccccggacttccaggtatagctggacctcgtggtagccctggtgagagaggtgaaactggccctccaggacctgctggtttccctggtgctcctggacagaatggtgaacctggtggtaaaggagaaagaggggctccgggtgagaaaggtgaaggaggccctcctggagttgcaggaccccctggaggttctggacctgctggtcctcctggtccccaaggtgtcaaaggtgaacgtggcagtcctggtggacctggtgctgctggcttccctggtgctcgtggtcttcctggtcctcctggtagtaatggtaacccaggacccccaggtcccagcggttctccaggcaaggatgggcccccaggtcctgcgggtaacactggtgctcctggcagccctggagtgtctggaccaaaaggtgatgctggccaaccaggagagaagggatcgcctggtgcccagggcccaccaggagctccaggcccacttgggattgctgggatcactggagcacggggtcttgcaggaccaccaggcatgccaggtcctaggggaagccctggccctcagggtgtcaagggtgaaagtgggaaaccaggagctaacggtctcagtggagaacgtggtccccctggaccccagggtcttcctggtctggctggtacagctggtgaacctggaagagatggaaaccctggatcagatggtcttccaggccgagatggatctcctggtggcaagggtgatcgtggtgaaaatggctctcctggtgcccctggcgctcctggtcatccaggcccacctggtcctgtcggtccagctggaaagagtggtgacagaggagaaagtggccctgctggccctgctggtgctcccggtcctgctggttcccgaggtgctcctggtcctcaaggcccacgtggtgacaaaggtgaaacaggtgaacgtggagctgctggcatcaaaggacatcgaggattccctggtaatccaggtgccccaggttctccaggccctgctggtcagcagggtgcaatcggcagtccaggacctgcaggccccagaggacctgttggacccagtggacctcctggcaaagatggaaccagtggacatccaggtcccattggaccaccagggcctcgaggtaacagaggtgaaagaggatctgagggctccccaggccacccagggcaaccaggccctcctggacctcctggtgcccctggtccttgctgtggtggtgttggagccgctgccattgctgggattggaggtgaaaaagctggcggttttgccccgtattatggagatgaaccaatggatttcaaaatcaacaccgatgagattatgacttcactcaagtctgttaatggacaaatagaaagcctcattagtcctgatggttctcgtaaaaaccccgctagaaactgcagagacctgaaattctgccatcctgaactcaagagtggagaatactgggttgaccctaaccaaggatgcaaattggatgctatcaaggtattctgtaatatggaaactggggaaacatgcataagtgccaatcctttgaatgttccacggaaacactggtggacagattctagtgctgagaagaaacacgtttggtttggagagtccatggatggtggttttcagtttagctacggcaatcctgaacttcctgaagatgtccttgatgtgcagctggcattccttcgacttctctccagccgagcttcccagaacatcacatatcactgcaaaaatagcattgcatacatggatcaggccagtggaaatgtaaagaaggccctgaagctgatggggtcaaatgaaggtgaattcaaggctgaaggaaatagcaaattcacctacacagttctggaggatggttgcacgaaacacactggggaatggagcaaaacagtctttgaatatcgaacacgcaaggctgtgagactacctattgtagatattgcaccctatgacattggtggtcctgatcaagaatttggtgtggacgttggccctgtttgctttttataaaccaaactctatctgaaatcccaacaaaaaaaatttaactccatatgtgttcctcttgttctaatcttgtcaaccagtgcaagtgaccgacaaaattccagttatttatttccaaaatgtttggaaacagtataatttgacaaagaaaaatgatacttctctttttttgctgttccaccaaatacaattcaaatgctttttgttttatttttttaccaattccaatttcaaaatgtctcaatggtgctataataaataaacttcaacactctttatgataacaacactgtgttatattctttgaatcctagcccatctgcagagcaatgactgtgctcaccagtaaaagataacctttctttctgaaatagtcaaatacgaaattagaaaagccctccctattttaactacctcaactggtcagaaacacagattgtattctatgagtcccagaagatgaaaaaaattttatacgttgataaaacttataaatttcattgattaatctcctggaagattggtttaaaaagaaaagtgtaatgcaagaatttaaagaaatatttttaaagccacaattattttaatattggatatcaactgcttgtaaaggtgctcctcttttttcttgtcattgctggtcaagattactaatatttgggaaggctttaaagacgcatgttatggtgctaatgtactttcacttttaaactctagatcagaattgttgacttgcattcagaacataaatgcacaaaatctgtacatgtctcccatcagaaagattcattggcatgccacagggattctcctccttcatcctgtaaaggtcaacaataaaaaccaaattatggggctgcttttgtcacactagcatagagaatgtgttgaaatttaactttgtaagcttgtatgtggttgttgatcttttttttccttacagacacccataataaaatatcatattaaaattc

SEQ ID NO: 14175 - DNA, 3572 bp, Homo sapiens
acctgcacttctgggggcgtcgagcctggcggtagaatcttcccagtaggcggcgcgggagggaaaagaggattgaggggctaggccgggcggatcccgtcctcccccgatgtgagcagttttccgaaaccccgtcaggcgaaggctgcccagagaggtggagtcggtagcggggccgggaacatgaggcagtctctcctattcctgaccagcgtggttcctttcgtgctggcgccgcgacctccggatgacccgggcttcggcccccaccagagactcgagaagcttgattctttgctctcagactacgatattctctctttatctaatatccagcagcattcggtaagaaaaagagatctacagacttcaacacatgtagaaacactactaactttttcagctttgaaaaggcattttaaattatacctgacatcaagtactgaacgtttttcacaaaatttcaaggtcgtggtggtggatggtaaaaacgaaagcgagtacactgtaaaatggcaggacttcttcactggacacgtggttggtgagcctgactctagggttctagcccacataagagatgatgatgttataatcagaatcaacacagatggggccgaatataacatagagccactttggagatttgttaatgataccaaagacaaaagaatgttagtttataaatctgaagatatcaagaatgtttcacgtttgcagtctccaaaagtgtgtggttatttaaaagtggataatgaagagttgctcccaaaagggttagtagacagagaaccacctgaagagcttgttcatcgagtgaaaagaagagctgacccagatcccatgaagaacacgtgtaaattattggtggtagcagatcatcgcttctacagatacatgggcagaggggaagagagtacaactacaaattacttaatagagctaattgacagagttgatgacatctatcggaacacttcatgggataatgcaggttttaaaggctatggaatacagatagagcagattcgcattctcaagtctccacaagaggtaaaacctggtgaaaagcactacaacatggcaaaaagttacccaaatgaagaaaaggatgcttgggatgtgaagatgttgctagagcaatttagctttgatatagctgaggaagcatctaaagtttgcttggcacaccttttcacataccaagattttgatatgggaactcttggattagcttatgttggctctcccagagcaaacagccatggaggtgtttgtccaaaggcttattatagcccagttgggaagaaaaatatctatttgaatagtggtttgacgagcacaaagaattatggtaaaaccatccttacaaaggaagctgacctggttacaactcatgaattgggacataattttggagcagaacatgatccggatggtctagcagaatgtgccccgaatgaggaccagggagggaaatatgtcatgtatcccatagctgtgagtggcgatcacgagaacaataagatgttttcaaactgcagtaaacaatcaatctataagaccattgaaagtaaggcccaggagtgttttcaagaacgcagcaataaagtttgtgggaactcgagggtggatgaaggagaagagtgtgatcctggcatcatgtatctgaacaacgacacctgctgcaacagcgactgcacgttgaaggaaggtgtccagtgcagtgacaggaacagtccttgctgtaaaaactgtcagtttgagactgcccagaagaagtgccaggaggcgattaatgctacttgcaaaggcgtgtcctactgcacaggtaatagcagtgagtgcccgcctccaggaaatgctgaagatgacactgtttgcttggatcttggcaagtgtaaggatgggaaatgcatccctttctgcgagagggaacagcagctggagtcctgtgcatgtaatgaaactgacaactcctgcaaggtgtgctgcagggacctttctggccgctgtgtgccctatgtcgatgctgaacaaaagaacttatttttgaggaaaggaaagccctgtacagtaggattttgtgacatgaatggcaaatgtgagaaacgagtacaggatgtaattgaacgattttgggatttcattgaccagctgagcatcaatacttttggaaagtttttagcagacaacatcgttgggtctgtcctggttttctccttgatattttggattcctttcagcattcttgtccattgtgtggataagaaattggataaacagtatgaatctctgtctctgtttcaccccagtaacgtcgaaatgctgagcagcatggattctgcatcggttcgcattatcaaaccctttcctgcgccccagactccaggccgcctgcagcctgcccctgtgatcccttcggcgccagcagctccaaaactggaccaccagagaatggacaccatccaggaagaccccagcacagactcacatatggacgaggatgggtttgagaaggaccccttcccaaatagcagcacagctgccaagtcatttgaggatctcacggaccatccggtcaccagaagtgaaaaggctgcctcctttaaactgcagcgtcagaatcgtgttgacagcaaagaaacagagtgctaatttagttctcagctcttctgacttaagtgtgcaaaatatttttatagatttgacctacaaatcaatcacagcttgtattttgtgaagactgggaagtgacttagcagatgctggtcatgtgtttgaacttcctgcaggtaaacagttcttgtgtggtttggcccttctccttttgaaaaggtaaggtgaaggtgaatctagcttattttgaggctttcaggttttagtttttaaaatatcttttgacctgtggtgcaaaagcagaaaatacagctggattgggttatgaatatttacgtttttgtaaattaatcttttatattgataacagcactgactagggaaatgatcagtttttttttatacactgtaatgaaccgctgaatatgaggcatttggcatttatttgtgatgacaactggaatagttttttttttttttttttttttttgccttcaactaaaaacaaaggagataaatctagtatacattgtctctaaattgtgggtctatttctagttattacccagagtttttatgtagcagggaaaatatatatctaaatttagaaatcatttgggttaatatggctcttcataattctaagactaatgctctctagaaacctaaccacctaccttacagtgagggctatacatggtagccagttgaatttatggaatctaccaactgtttagggccctgatttgctgggcagtttttctgtattttataagtatcttcatgtatccctgttactgatagggatacatgctcttagaaaattcactattggctgggagtggtggctcatgcctgtaatcccagcacttggagaggctgaggttgcgccactacactccagcctgggtgacagagtgagactctgcctcaaaaaaaaaaaaaaaaaaaaa

SEQ ID NO: 14176 - DNA, 2148 bp, Homo sapiens
cgggtcacatggcccgcgggacaacatggctgcgcccgcactagggctggtgtgtggacgttgccctgagctgggtctcgtcctcttgctgctgctgctctcgctgctgtgtggagcggcagggagccaggaggccgggaccggtgcgggcgcggggtcccttgcgggttcttgcggctgcggcacgccccagcggcctggcgcccatggcagttcggcagccgctcaccgatactcgcgggaggctaacgctccgggccccgtacccggagagcggcaactcgcgcactcaaagatggtccccatccctgctggagtatttacaatgggcacagatgatcctcagataaagcaggatggggaagcacctgcgaggagagttactattgatgccttttacatggatgcctatgaagtcagtaatactgaatttgagaagtttgtgaactcaactggctatttgacagaggctgagaagtttggcgactcctttgtctttgaaggcatgttgagtgagcaagtgaagaccaatattcaacaggcagttgcagctgctccctggtggttacctgtgaaaggcgctaactggagacacccagaagggcctgactctactattctgcacaggccggatcatccagttctccatgtgtcctggaatgatgcggttgcctactgcacttgggcagggaagcggctgcccacggaagctgagtgggaatacagctgtcgaggaggcctgcataatagacttttcccctggggcaacaaactgcagcccaaaggccagcattatgccaacatttggcagggcgagtttccggtgaccaacactggtgaggatggcttccaaggaactgcgcctgttgatgccttccctcccaatggttatggcttatacaacatagtggggaacgcatgggaatggacttcagactggtggactgttcatcattctgttgaagaaacgcttaacccaaaaggtcccccttctgggaaagaccgagtgaagaaaggtggatcctacatgtgccataggtcttattgttacaggtatcgctgtgctgctcggagccagaacacacctgatagctctgcttcgaatctgggattccgctgtgcagccgaccgcctgcccactatggactgacaaccaaggaaagtcttccccagtccaaggagcagtcgtgtctgacctacattgggcttttctcagaactttgaacgatcccatgcaaagaattcccaccctgaggtgggttacatacctgcccaatggccaaaggaaccgccttgtgagaccaaattgctgacctgggtcagtgcatgtgctttatggtgtggtgcatctttggagatcatcaccatattttacttttgagagtctttaaagaggaaggggagtggagggaaccctgagctaggcttcaggaggcccgcgtcctacgcaggctctgccacaggggttagaccccaggtccgacgcttgaccttcctgggcctcaagtgccctcccctatcaaatgaagggatggacagcatgacctctgggtgtctctccaactcaccagttctaaaaagggtatcagattctattgtgacttcatagtgagaatttattatagattattttttagctattttttccatgtgtgaaccttgagtgatactaatcatgtaaagtaagagttctcttatgtattattttcggaagaggggtgtggtgactcctttatattcgtactgcactttgtttttccaaggaaatcagtgtcttttacgttgttatgatgaatcccacatggggccggtgatggtatgctgaagttcagccgttgaacacataggaatgtctgtggggtgactctactgtgctttatcttttaacattaagtgcctttggttcagaggggcagtcataagctctgtttccccctctccccaaagccttcagcgaacgtgaaatgtgcgctaaacggggaaacctgtttaattctagatatagggaaaaaggaacgaggaccttgaatgagctatattcagggtatccggtattttgtaatagggaataggaaaccttgttggctgtggaatatccgatgctttgaatcatgcactgtgttgaataaacgtatctgctaaatcagg

SEQ ID NO: 14177 - DNA, 2379 bp, Homo sapiens
gagagtcggcgcccgcaacgcggagccgggaagtcgtcgctactctggtggaactcagagttggttctggaggcggcggacgcggaggtccctcagaggatccagcgaggggcgccaacaagaggcgaagaggtggcaccagggcggcggcaggaagaggagcgggagcaggagcgcggagcggagcgtcccgacccgccgtgcgtactttctggagggaaggggcgggggaatcggcccctgagggaagcgcccggtggcgagggggttagccaagttccggctgcggcgccactccctcggttccacgagaggaaagttttttttttccagacgcttccgccggctcgcgccctccgggcccagcctcccgagccttcggagcgggcgccgtcccagcccagctccggggaaacgcgagccgcgatgcctggggggtgctcccggggccccgccgccggggacgggcgtctgcggctggcgcgactagcgctggtactcctgggctgggtctcctcgtcttctcccacctcctcggcatcctccttctcctcctcggcgccgttcctggcttccgccgtgtccgcccagcccccgctgccggaccagtgccccgcgctgtgcgagtgctccgaggcagcgcgcacagtcaagtgcgttaaccgcaatctgaccgaggtgcccacggacctgcccgcctacgtgcgcaacctcttccttaccggcaaccagctggccgtgctccctgccggcgccttcgcccgccggccgccgctggcggagctggccgcgctcaacctcagcggcagccgcctggacgaggtgcgcgcgggcgccttcgagcatctgcccagcctgcgccagctcgacctcagccacaacccactggccgacctcagtcccttcgctttctcgggcagcaatgccagcgtctcggcccccagtccccttgtggaactgatcctgaaccacatcgtgccccctgaagatgagcggcagaaccggagcttcgagggcatggtggtggcggccctgctggcgggccgtgcactgcaggggctccgccgcttggagctggccagcaaccacttcctttacctgccgcgggatgtgctggcccaactgcccagcctcaggcacctggacttaagtaataattcgctggtgagcctgacctacgtgtccttccgcaacctgacacatctagaaagcctccacctggaggacaatgccctcaaggtccttcacaatggcaccctggctgagttgcaaggtctaccccacattagggttttcctggacaacaatccctgggtctgcgactgccacatggcagacatggtgacctggctcaaggaaacagaggtagtgcagggcaaagaccggctcacctgtgcatatccggaaaaaatgaggaatcgggtcctcttggaactcaacagtgctgacctggactgtgacccgattcttcccccatccctgcaaacctcttatgtcttcctgggtattgttttagccctgataggcgctattttcctcctggttttgtatttgaaccgcaaggggataaaaaagtggatgcataacatcagagatgcctgcagggatcacatggaagggtatcattacagatatgaaatcaatgcggaccccagattaacgaacctcagttctaactcggatgtctgagaaatattagaggacagaccaaggacaactctgcatgagatgtagacttaagctttatccctactaggcttgctccactttcatcctccactatagatacaacggactttgactaaaagcagtgaaggggatttgcttccttgttatgtaaagtttctcggtgtgttctgttaatgtaagacgatgaacagttgtgtatagtgttttaccctcttctttttcttggaactcctcaacacgtatggagggatttttcaggtttcagcatgaacatgggcttcttgctgtctgtctctctctcagtacagttcaaggtgtagcaagtgtacccacacagatagcattcaacaaaagctgcctcaactttttcgagaaaaatactttattcataaatatcagttttattctcatgtacctaagttgtggagaaaataattgcatcctataaactgcctgcagacgttagcaggctcttcaaaataactccatggtgcacaggagcacctgcatccaagagcatgcttacattttactgttctgcatattacaaaaaataacttgcaacttcataacttctttgacaaagtaaattacttttttgattgcagtttatatgaaaatgtactgatttttttttaataaactgcatcgagatccaaccgactgaattgttaaaaaaaaaaaaaaaaa

SEQ ID NO: 14178 - DNA, 2536 bp, Homo sapiens
agccggaagctagcatggcggccgccggggctgcggctacacacctagaggtggcccggggcaagcgcgccgccctcttcttcgctgcggtggccatcgtgctggggctaccgctctggtggaagaccacggagacctaccgggcctcgttgccttactcccagatcagtggcctgaatgcccttcagctccgcctcatggtgcctgtcactgtcgtgtttacgcgggagtcagtgcccctggacgaccaggagaagctgcccttcaccgttgtgcatgaaagagagattcctctgaaatacaaaatgaaaatcaaatgccgtttccagaaggcctatcggagggctttggaccatgaggaggaggccctgtcatcgggcagtgtgcaagaggcagaagccatgttagatgagcctcaggaacaagcggagggctccctgactgtgtacgtgatatctgaacactcctcacttcttccccaggacatgatgagctacattgggcccaagaggacagcagtggtgcgggggataatgcaccgggaggcctttaacatcattggccgccgcatagtccaggtggcccaggccatgtctttgactgaggatgtgcttgctgctgctctggctgaccaccttccagaggacaagtggagcgctgagaagaggcggcctctcaagtccagcttgggctatgagatcaccttcagtttactcaacccagaccccaagtcccatgatgtctactgggacattgagggggctgtccggcgctatgtgcaacctttcctgaatgccctcggtgccgctggcaacttctctgtggactctcagattctttactatgcaatgttgggggtgaatccccgctttgactcagcttcctccagctactatttggacatgcacagcctcccccatgtcatcaacccagtggagtcccggctgggatccagtgctgcctccttgtaccctgtgctcaactttctactctacgtgcctgagcttgcacactcaccgctgtacattcaggacaaggatggcgctccagtggccaccaatgccttccatagtccccgctggggtggcattatggtatataatgttgactccaaaacctataatgcctcagtgctgccagtgagagtcgaggtggacatggtgcgagtgatggaggtgttcctggcacagttgcggttgctctttgggattgctcagccccagctgcctccaaaatgcctgctttcagggcctacgagtgaagggctaatgacctgggagctagaccggctgctctgggctcggtcagtggagaacctggccacagccaccaccacccttacctccctggcgcagcttctgggcaagatcagcaacattgtcattaaggacgacgtggcatctgaggtgtacaaggctgtagctgccgtccagaagtcggcagaagagttggcgtctgggcacctggcatctgcctttgtcgccagccaggaagctgtgacatcctctgagcttgccttctttgacccgtcactcctccacctcctttatttccctgatgaccagaagtttgccatctacatcccactcttcctgcctatggctgtgcccatcctcctgtccctggtcaagatcttcctggagacccgcaagtcctggagaaagcctgagaagacagactgagcagggcagcacctccataggaagccttcctttctggccaaggtgggcggtgttagattgtgaggcacgtacatggggcctgccggaatgacttaaatatttgtctccagtctccactgttggctctccagcaaccaaagtacaacactccaagatgggttcatcttttcttcctttcccattcacctggctcaatcctcctccaccaccaggggcctcaaaaggcacatcatccgggtctccttatcttgtttgataaggctgctgcctgtctccctctgtggcaaggactgtttgttcttttgccccatttctcaacatagcacacttgtgcactgagaggagggagcattatgggaaagtccctgccttccacacctctctctagtccctgtgggacagccctagcccctgctgtcatgaaggggccaggcattggtcacctgtgggaccttctccctcactcccctccctcctagttggctttgtctgtcaggtgcagtctggcgggagtccaggaggcagcagctcaggacatggtgctgtgtgtgtgtgtgtgtgtgtgtgtgtgtgtgtgtgtgtgtcagaggttccagaaagttccagatttggaatcaaacagtcctgaattcaaatccttgtttttgcacttattgtctggagagctttggataaggtattgaatctctctgagcctcagtttttcatttgttcaaatggcactgatgatgtctcccttacaagatggttgtgaggagtaaatgtgatcagcatgtaaagtgtctggcgtgtagtaggctcttaataaacactggctgaatatgaattggaatgataaaaaaaaaaaaaaaaaa

SEQ ID NO: 14179 - DNA, 2100 bp, Homo sapiens
agcccaagatttctagggcattggccgcgctgctgggtgatccctccgggctcaagttgcaagggggcgggccgggccggaggtggagtctcccgccaattgaagcctccgctataaattgaactccctgcactgctgaagcccagatgcctcgccaggccacgtcgcggttggtggtcggagagggcgaggggtcccagggggcttcggggcctgcagccaccatgctccgctccctgctgcttcactccttgaggctctgcgcccagaccgcctcgtgcctcgtgctcttcccgcgcttcctcggcacggccttcatgctctggcttctcgatttcttgtgtatccgcaagcatttcctgggccgccgccgccgggggcagcccgagcccgaagtggagctcaacagtgaaggcgaggaggtgcctcccgatgacccgcccatctgcgtgtccgacgacaaccgcctgtgcaccctggcgtcgctcaaggcggtgtggcatggccagaagttggatttcttcaagcaggcgcacgagggcggtccggcgcccaactccgaggtggttctgcccgacggcttccagagccagcacatcctcgactacgcgcaagggaaccgcccgctggttctcaatttcggcagctgcacctgaccaccgttcatggcgcgcatgagcgccttccagcgcctggtcactaagtaccagcgcgacgtcgacttcctcatcatctacatcgaggaagcgcacccctccgacggctgggtcaccacggactctccctacatcatcccacagcaccggagcctggaggaccgggtcagcgcagcgagggtactgcagcaaggtgcacccggctgcgctctggtcctcgacaccatggccaactccagcagctcggcctatggcgcctacttcgagcgtctctatgtcatccagagtggcactattatgtaccagggcggccgtggccccgacggctaccaggtctctgagctgcgcacttggttggaacgctatgatgagcaactgcacggcgctcggccccggagggtgtaaacatccaacggacaattgactgaacttggtgggctgggccttcgagccttcgaagcccacgtgcaagcgcctcaaaccaagtcacgcttggcgaggccccagtgacactgatgtgctgagccaccatttcagactgagtctgcaccctcagccacatgaacaatctcccctacctccctgggactctgcttctgtaactgtctcattcacacctgcctggctcactggaaatcctcttttgagcgcgggatatggcttgcccttgtccgtgtgcccccaggactttgcctctacagcattttcttacaccccctccccagcgtgccctcagccaagtgctttggcccggtgcttcccgcagctgcacagagaccttggccacgcccgcgcgccctgagcgcagctgggttccaggagactctcagctcagctgagctagttgcctggcacccacctgtcgcgcgcggagagggggttccctgttgcttttgtgtctgtttcctgtccctggtaggggaagtgatgtcgtggatggggaggggtgggcagggtagtttcccccgcttgttttgggtgcacaggagccccactgctgatgacgaactatctctaactggtcttgaccacgagctagttctgaattgcaggggcctcaaagcagcacctaaaccttgagggggagggtgctctgggtttccgtgaggtaaccaccttaaatgggagggaagttggggtgtctgctttgggaccagaggaagatagcttgagaggcattggcgaggttcgcagcgccccagggagagagaaaaagctgagactcctggggaatgacgttggggtgatggagtccggggaaagagaggtggggggagagcctgaggtccccaagtgaggggagtcctaggcagagctgctgattgtggggctgggaggtggagggcccctgattcgaaggccatttggtgagtgttttgctggaaatatttcctgtatataaacttctttcaatctacaataataaaggcttgaggtaaactgc

SEQ ID NO: 14180 - DNA, 3547 bp, Homo sapiens
gcactcgcccggctcgcccgctttcgcacccagttcacgcgccacagctatgtgtccccgagccgcgcgggcgcccgcgacgctactcctcgccctgggcgcggtgctgtggcctgcggctggcgcctgggagcttacgattttgcacaccaacgacgtgcacagccggctggagcagaccagcgaggactccagcaagtgcgtcaacgccagccgctgcatgggtggcgtggctcggctcttcaccaaggttcagcagatccgccgcgccgaacccaacgtgctgctgctggacgccggcgaccagtaccagggcactatctggttcaccgtgtacaagggcgccgaggtggcgcacttcatgaacgccctgcgctacgatgccatggcactgggaaatcatgaatttgataatggtgtggaaggactgatcgagccactcctcaaagaggccaaatttccaattctgagtgcaaacattaaagcaaaggggccactagcatctcaaatatcaggactttatttgccatataaagttcttcctgttggtgatgaagttgtgggaatcgttggatacacttccaaagaaaccccttttctctcaaatccagggacaaatttagtgtttgaagatgaaatcactgcattacaacctgaagtagataagttaaaaactctaaatgtgaacaaaattattgcactgggacattcgggttttgaaatggataaactcatcgctcagaaagtgaggggtgtggacgtcgtggtgggaggacactccaacacatttctttacacaggcaatccaccttccaaagaggtgcctgctgggaagtacccattcatagtcacttctgatgatgggcggaaggttcctgtagtccaggcctatgcttttggcaaatacctaggctatctgaagatcgagtttgatgaaagaggaaacgtcatctcttcccatggaaatcccattcttctaaacagcagcattcctgaagatccaagcataaaagcagacattaacaaatggaggataaaattggataattattctacccaggaattagggaaaacaattgtctatctggatggctcctctcaatcatgccgctttagagaatgcaacatgggcaacctgatttgtgatgcaatgattaacaacaacctgagacacacggatgaaatgttctggaaccacgtatccatgtgcattttaaatggaggtggtatccggtcgcccattgatgaacgcaacaatggcacaattacctgggagaacctggctgctgtattgccctttggaggcacatttgacctagtccagttaaaaggttccaccctgaagaaggcctttgagcatagcgtgcaccgctacggccagtccactggagagttcctgcaggtgggcggaatccatgtggtgtatgatctttcccgaaaacctggagacagagtagtcaaattagatgttctttgcaccaagtgtcgagtgcccagttatgaccctctcaaaatggacgaggtatataaggtgatcctcccaaacttcctggccaatggtggagatgggttccagatgataaaagatgaattattaagacatgactctggtgaccaagatatcaacgtggtttctacatatatctccaaaatgaaagtaatttatccagcagttgaaggtcggatcaagttttccacaggaagtcactgccatggaagcttttctttaatatttctttcactttgggcagtgatctttgttttataccaatagccaaaaattctccttgcctttaatgtgtgaaactgcattttttcaagtgagattcaaatctgccttttaggacctggctttgtgacagcaaaaaccatctttacaggctcctagaagctgaaggttagagcattataaaatgaagagacagacatgattactcagggtcagcaacctagtgagttagaaaaaaaattaacatagggccctataaggagaaagccaactatgttaagtttacgtgtccaaattttaatgaaattttactaacaattttaaaccatatttttcttcttcatatccatttctaatccatcaaacagcttatgtttacataaaattttatcattcacaaggaagttttaagcacactgtctcatttgatatccacaacttatttttggtaggaaagagagatgtttttcccacctgtcagatgaaaaaactgaagctcaaaaagggttgacttgaccatacagctaatgctgacagatccaagacctagacctaggtcttttgaactcaagtccagcattctcaactatatcaagttactgttcagaatacttaatatctcctctcttcataattatcaatagccccaagctcatggatgacaaatctctgctttatttcttgtctctattttttcactttatagctcctgttataatagcaagtttaatggtataaacacaggataccatcctctcttgcaacacccatgtgcctttgatgagtcaggtagcaagctgtagtagataatgagaaaggccagaggctgcaaagacagtcaaaggacacgagagaaaggaaggggaagaacaggactccaggactgttttatattatagaaaagcaagagctaaagagcatttacacatgttaaacagatacttgttaagcatagtgcctgacacacggcattagctgttattttatgagattccatcagctctgcctctgtcctctttcttctaacatgaaggtatcatgagaagagaaccttctaacataagctgtaattctaaacctgcacttgtccctctccagcaagaggctagcactgaattcattctactcatactacacacccagttatggaatgtccagagttctcgaagaaaataaatgactttaggaagaggtatacattttttaagtcgctctgcctccaaatctgaacagtcactgtaaatcattcttaagcccagatatgagaacttctgctggaaagtgggaccctctgagtgggtggtcagaaaatacccatgctgatgaaatgacctatgcccaaagaacaaatacttaacgtgggagtggaaccacatgagcctgctcagctctgcataagtaattcaagaaatgggaggcttcaccttaaaaacagtgtgcaaatggcagctagaggttttgataggaagtatgtttgtttcttagtgtttacaaatattaagtactcttgatacaaaatatacttttaaacttcataacctttttataaaagttgttgcagcaaaataatagcctcggttctatgcatatatggattgctataaaaaatgtcaataagattgtacaaggaaaattagagaaagtcacatttagggtttattttttacacttggccagtaaaatagggtaaatcctattagaaattttttaaagaactttttttaagtttcctaaatctgtgtgtgtattgtgaagtggtataagaaatgactttgaaccactttgcaattgtagattcccaacaataaaattgaagat

SEQ ID NO: 14181 - DNA, 1616 bp, Homo sapiens
gccaaggctggggcaggggagtcagcagaggcctcgctcgggcgcccagtggtcctgccgcctggtctcacctcgctatggttcgtctgcctctgcagtgcgtcctctggggctgcttgctgaccgctgtccatccagaaccacccactgcatgcagagaaaaacagtacctaataaacagtcagtgctgttctttgtgccagccaggacagaaactggtgagtgactgcacagagttcactgaaacggaatgccttccttgcggtgaaagcgaattcctagacacctggaacagagagacacactgccaccagcacaaatactgcgaccccaacctagggcttcgggtccagcagaagggcacctcagaaacagacaccatctgcacctgtgaagaaggctggcactgtacgagtgaggcctgtgagagctgtgtcctgcaccgctcatgctcgcccggctttggggtcaagcagattgctacaggggtttctgataccatctgcgagccctgcccagtcggcttcttctccaatgtgtcatctgctttcgaaaaatgtcacccttggacaagctgtgagaccaaagacctggttgtgcaacaggcaggcacaaacaagactgatgttgtctgtggtccccaggatcggctgagagccctggtggtgatccccatcatcttcgggatcctgtttgccatcctcttggtgctggtctttatcaaaaaggtggccaagaagccaaccaataaggccccccaccccaagcaggaaccccaggagatcaattttcccgacgatcttcctggctccaacactgctgctccagtgcaggagactttacatggatgccaaccggtcacccaggaggatggcaaagagagtcgcatctcagtgcaggagagacagtgaggctgcacccacccaggagtgtggccacgtgggcaaacaggcagttggccagagagcctggtgctgctgctgctgtggcgtgagggtgaggggctggcactgactgggcatagctccccgcttctgcctgcacccctgcagtttgagacaggagacctggcactggatgcagaaacagttcaccttgaagaacctctcacttcaccctggagcccatccagtctcccaacttgtattaaagacagaggcagaagtttggtggtggtggtgttggggtatggtttagtaatatccaccagaccttccgatccagcagtttggtgcccagagaggcatcatggtggcttccctgcgcccaggaagccatatacacagatgcccattgcagcattgtttgtgatagtgaacaactggaagctgcttaactgtccatcagcaggagactggctaaataaaattagaatatatttatacaacagaatctcaaaaacactgttgagtaaggaaaaaaaggcatgctgctgaatgatgggtatggaactttttaaaaaagtacatgcttttatgtatgtatattgcctatggatatatgtataaatacaatatgcatcatatattgatataacaagggttctggaagggtacacagaaaacccacagctcgaagagtggtgacgtctggggtggggaagaagggtctggggg

SEQ ID NO: 14182 - DNA, 6738 bp, Homo sapiens
ggggggtctgctctgtgcggtgaagcttctcttcttggcacctgcctggcatcggaagagggccccttctccctccctgggcttttatgtggacactgtaatgcctcagttttctttctttctttttgtttttgacacagggtctcactctatcacccaagctggagtgcagtggcaccatcttagctcaccgcagcctcaaactccccagctcgggtgattcttcctgcctcagcctcctgagtagtagcagctgggaccacagacgtctgccaccaagcccagctgcaccgccagttccggggagggccctgggccagcggctgtccgccccccctcctttataaagtcctggcctcgggacagcccgcacagctgcccagcctgcggagacgggacagccctgtcccactcactctttcccctgctgctcctgccggcagctcagctggaaccatgggaggccgcgtctttctcgtctttctcgcattctgtgtctggctgactctgccgggagctgaaacccaggactccaggggctgtgcccggtggtgccctcaggactcctcgtgtgtcaatgccaccgcctgtcgctgcaatccagggttcagctctttttctgagatcatcaccacccccatggagacttgtgacgacatcaacgagtgtgcaacactgtcgaaagtgtcatgcggaaaattctcggactgctggaacacagaggggagctacgactgcgtgtgcagcccaggatatgagcctgtttctggggcaaaaacattcaagaatgagagcgagaacacgtgtcaagatgtggacgaatgtcagcagaacccaaggctctgtaaaagctacggcacctgcgtcaacaccctcggcagctacacgtgccagtgcctgcctggcttcaagctcaaacctgaggacccgaagctctgcacagatgtgaatgaatgcacctccggacaaaacccatgccacagctccacccactgcctcaacaacgtgggcagctatcagtgccgctgccgcccgggctggcaaccgattccggggtcccccaatggcccaaacaataccgtctgtgaagatgtggacgagtgcagctccgggcagcatcagtgtgacagctccaccgtctgcttcaacaccgtgggttcatacagctgccgctgccgcccaggctggaagcccagacacggaatcccgaataaccaaaaggacactgtctgtgaagatatgactttctccacctggaccccgccccctggagtccacagccagacgctttcccgattcttcgacaaagtccaggacctgggcagagactacaagccaggcttggccaataacaccatccagagcatcttacaggcgctggatgagctgctggaggcccctggggacctggagaccctgccccgcttacagcagcactgtgtggccagtcacctgctggatggcctagaggatgtcctcagaggcctgagcaagaacctttccaatgggctgttgaacttcagttatcctgcaggcacagaattgtccctggaggtgcagaagcaagtagacaggagtgtcaccttgagacagaatcaggcagtgatgcagctcgactggaatcaggcacagaaatctggtgacccagggatgggcaagttgctggctgaggcccctctggtcctggaacctgagaagcagatgcttctgcatgagacacaccagggcttgctgcaggacggctcccccatcctgctctcagatgtgatctctgcctttctgagcaacaacgacacccaaaacctcagctccccagttaccttcaccttctcccaccgttcagtgatcccgagacagaaggtgctctgtgtcttctgggagcatggccagaatggatgtggtcactgggccaccacaggctgcagcacaataggcaccagagacaccagcaccatctgccgttgcacccacctgagcagctttgccgtcctcatggcccactacgatgtgcaggaggaggatcccgtgctgactgtcatcacctacatggggctgagcgtctctctgctgtgcctcctcctggcggccctcacttttctcctgtgtaaagccatccagaacaccagcacctcactgcatctgcagctctcgctctgcctcttcctggcccacctcctcttcctcgtggcaattgatcaaaccggacacaaggtgctgtgctccatcatcgccggtaccttgcactatctctacctggccaccttgacctggatgctgctggaggccctgtacctcttcctcactgcacggaacctgacggtggtcaactactcaagcatcaacagattcatgaagaagctcatgttccctgtgggctacggagtcccagctgtgacagtggccatttctgcagcctccaggcctcacctttatggaacaccttcccgctgctggctccaaccagaaaagggatttatatggggcttccttggacctgtctgcgccatcttctctgtgaatttagttctctttctggtgactctctggattttgaaaaacagactctcctccctcaatagtgaagtgtccaccctccggaacacaaggatgctggcatttaaagcgacagctcagctgttcatcctgggctgcacgtggtgtctgggcatcttgcaggtgggtccggctgcccgggtcatggcctacctcttcaccatcatcaacagcctgcagggtgtcttcatcttcctggtgtactgcctcctcagccagcaggtccgggagcaatatgggaaatggtccaaagggatcaggaaattgaaaactgagtctgagatgcacacactctccagcagtgctaaggctgacacctccaaacccagcacggttaactagaaaaatcttctgaataagatcttccctctttgcccgtggaaaatctgaacaatctttgagccatctagaggggaaagaaaagactttgttctgtgtgtttcaagaaattcaccatgtcagcaatatgaaggatgttatggaaggcgtgctaggcattcaattcctgcagaaaccggaaatcttccatgccctgcaatgtgctcatcaaactctcagcatatggacggccagctgtggcccatatcttggtcactctgaagcacaatatttatgaagctatagaacgttaagacctctttcacagcctctccttcctacaaagactcctccaaatcttaaaatgaagcaggaaaacgagcctaagaggactttcataccgacaacatctgaaaggactagaatgttcacaccacgatctggatttcttaattttttgtttttgtttttgttgttctctagttctacgggtttgattatttagtcatgtgaaaaatattgattactcacacatagatcaagagagacacggctcctgccttcatggagcttttaggggaaaatgaagtggctcttgcagctagagttgactcagaagccgaaattcctagaaatcaggtttctactgctaggcaattgaagtataaactattttataaacactgtcttctttcgtcttcacaccaacatgcagaaaagtttctaatctcagatcggggatgtgcaacaaattccatttcaaaggaatgacctgcaaaactcctaaatattccaagcaaatgcccttaaccctgtctgttatctgctttccttgaacagaaattctacatgaccataaaacctcgaagatgggtatggcacagttcatgccctgtaatcctagcactttgggagggtgaggcaggaggatggctcaagcccaggagtttgagaccagtgtgggcaacagagtgagaaccatctctacccaaaaaaaaaattaaaaattagccaagcatggtgatgatataggagttaaggagaaatcatttaggcaaatagcaagggtaggaagtcctcagtaaggttttccatttaatgaaaagcagcccccaaaatcattttcttttctaacaaagaacagcctgtaaaatcgagctgcagacatagacaagcaagctggaagcttccacgggtgaatgccggcagctgtgccaataggaaaaagctacctagactaggcatgtccaaaatggcggctccaagttcccttctctttgccagccatgtgtacagtaaaaagcaggcaacatagtgtcagccaaagctcatttgcataataagattagggtggggtggccagctcacataggggtaggccctaggtaaatcagacaccgccttctcaagcctgtctataaaatctggtacactatgacgagggtcagatttcccattcagacgcccctctcccatgcaagagaaagagctgttctcctttctctttcttttgcctattaaacctctgctcctggccaggcacagtggctcacgcctataatcccagcactttgggaggctgaggtggtcagatcacctaaggtcaggagttcaagaccagcctggtcaacatggtgaaatcttgtctctagtaaaaatacaaaaatatatgaaatctcacatagatgataatattaagttccaaaagcaactcaacctggtagattctaattttttttgaggcagggtcttgctttgtcacccatgctggagtacaatggcacaaacactgctcactgcagcctcgacctcccaaggcctaagcaatcctcctgcctcagtccccctccaggtatttgaaactacaggtgtgtaccaccacaccgggctaatttttgtattttttgtagagacgtgggtctcactatgctgcccaggctcaggtcttaatctcctgagctcaggcaatccgcaggcctcagcctccctaagtgcggggattacaggcttgagccactgcacctagcctctatttgttttacaaaagagaaattgagatcctgaatgttaagtgacttgcctgaggccatcccactaacaggagccagggttaggattcaaaccccatccaactggtcccagagctggagcttcttgcactgccctacactacctaccatctccatcctctgggcacctttttataagaaccaaaacattacagagcattgctttgtcaactcagctgggaacatttcccagtgcaactcacatttttcactgctctgtgcctgtccgtataagctcaatgagtattgatttaggggctttggagaactttgaatgctaccccccaagtaaccattgttggcaacctggtacctctacttttagccatttctccttctctataaatagtgcagaagtaacccacttggtaacaggcatccttgccaagcctccaccactaggtcagtgtaagaattaaagaaagaggaaagaaacacaaaaagtggcttgatggttaagacaggtttattttagagaaaacacacctgagaggggctgctggctgaattaggttagagtcttttctacagactaagagtgtttaaggatttagggtgggagagtttcttagaggcttggactgcttctgtgttttttttgttgtgcttatatgggagggagagtggtgtgtttgcttttatacatttttctgcagctgtaggcataccccccaagtctgcttttagcttccctattttagtgcacctggagggaaaggaatgtgcttattaaggcccactgttttactggggcccattgtatgagggtgaagtttggcagttacccaagagacttttcctccaccttcctctgtgcccgagctgttttatctgcattttactgtctgctttttttggctgcttatagtttttaaaaaagtaatttccttaaatccagaaggctaaaaatgaagctgaaacttaaagtggcggtgtttgtccaaaataacggggctcctgctctgccagtcagtaccctcaagtcactcctgatcctcaacctccatgcctaaggctggttcaagagaccacataatatctgccttttattacatacatgatgggtgcatgggattctgcgtgccctttgcttgatatagactgctaaggtgagatggggaatatcagagtcagctgctgcttgaggaagcagaacacacagctggaggcttggaacatgtgggtccctatgagtgtagagcccatatccccatagagtctacctagagcaggggtcgccaaatgttttcttaaagagcctgatagtgtatatgttaggctttgtgagccaggtatttacagcaactcaattctaccactgtggtatgaaaacagctatagacaatcataaatgaatgatcatggctatgttttaataaaactttacagacactgaacttgaacttccattgtgatatgaaaacagctatagacaatcataaatgaatgatcatggctatgttttaataaaactttatggacactgagcttgaacttcatatatcagtcatgtgacacaaaatatcattcttctttttatttgttttcacccatttgaaaaatgtaaaaactattcttagctgtacagaaacagatggtgggtcagatttgactcactgcccatagtttccagaccatgatgttcaggttcatggaagcacttcactctacactaatttattcatccattcatcacatatgtgatgagcacatacagacacacctcagagatattgcaggctccactccagatcaccacaataatgtgaatattgcaataaagcaagtcatacacatt

SEQ ID NO: 14183 - DNA, 6591 bp, Homo sapiens
ggggggtctgctctgtgcggtgaagcttctcttcttggcacctgcctggcatcggaagagggccccttctccctccctgggcttttatgtggacactgtaatgcctcagttttctttctttctttttgtttttgacacagggtctcactctatcacccaagctggagtgcagtggcaccatcttagctcaccgcagcctcaaactccccagctcgggtgattcttcctgcctcagcctcctgagtagtagcagctgggaccacagacgtctgccaccaagcccagctgcaccgccagttccggggagggccctgggccagcggctgtccgccccccctcctttataaagtcctggcctcgggacagcccgcacagctgcccagcctgcggagacgggacagccctgtcccactcactctttcccctgctgctcctgccggcagctcagctggaaccatgggaggccgcgtctttctcgtctttctcgcattctgtgtctggctgactctgccgggagctgaaacccaggactccaggggctgtgcccggtggtgccctcaggactcctcgtgtgtcaatgccaccgcctgtcgctgcaatccagggttcagctctttttctgagatcatcaccacccccatggagacttgtgacgacatcaacgagtgtgcaacactgtcgaaagtgtcatgcggaaaattctcggactgctggaacacagaggggagctacgactgcgtgtgcagcccaggatatgagcctgtttctggggcaaaaacattcaagaatgagagcgagaacacgtgtcaagatgtggacgaatgtcagcagaacccaaggctctgtaaaagctacggcacctgcgtcaacaccctcggcagctacacgtgccagtgcctgcctggcttcaagctcaaacctgaggacccgaagctctgcacagatgtggacgagtgcagctccgggcagcatcagtgtgacagctccaccgtctgcttcaacaccgtgggttcatacagctgccgctgccgcccaggctggaagcccagacacggaatcccgaataaccaaaaggacactgtctgtgaagatatgactttctccacctggaccccgccccctggagtccacagccagacgctttcccgattcttcgacaaagtccaggacctgggcagagactacaagccaggcttggccaataacaccatccagagcatcttacaggcgctggatgagctgctggaggcccctggggacctggagaccctgccccgcttacagcagcactgtgtggccagtcacctgctggatggcctagaggatgtcctcagaggcctgagcaagaacctttccaatgggctgttgaacttcagttatcctgcaggcacagaattgtccctggaggtgcagaagcaagtagacaggagtgtcaccttgagacagaatcaggcagtgatgcagctcgactggaatcaggcacagaaatctggtgacccagggatgggcaagttgctggctgaggcccctctggtcctggaacctgagaagcagatgcttctgcatgagacacaccagggcttgctgcaggacggctcccccatcctgctctcagatgtgatctctgcctttctgagcaacaacgacacccaaaacctcagctccccagttaccttcaccttctcccaccgttcagtgatcccgagacagaaggtgctctgtgtcttctgggagcatggccagaatggatgtggtcactgggccaccacaggctgcagcacaataggcaccagagacaccagcaccatctgccgttgcacccacctgagcagctttgccgtcctcatggcccactacgatgtgcaggaggaggatcccgtgctgactgtcatcacctacatggggctgagcgtctctctgctgtgcctcctcctggcggccctcacttttctcctgtgtaaagccatccagaacaccagcacctcactgcatctgcagctctcgctctgcctcttcctggcccacctcctcttcctcgtggcaattgatcaaaccggacacaaggtgctgtgctccatcatcgccggtaccttgcactatctctacctggccaccttgacctggatgctgctggaggccctgtacctcttcctcactgcacggaacctgacggtggtcaactactcaagcatcaacagattcatgaagaagctcatgttccctgtgggctacggagtcccagctgtgacagtggccatttctgcagcctccaggcctcacctttatggaacaccttcccgctgctggctccaaccagaaaagggatttatatggggcttccttggacctgtctgcgccatcttctctgtgaatttagttctctttctggtgactctctggattttgaaaaacagactctcctccctcaatagtgaagtgtccaccctccggaacacaaggatgctggcatttaaagcgacagctcagctgttcatcctgggctgcacgtggtgtctgggcatcttgcaggtgggtccggctgcccgggtcatggcctacctcttcaccatcatcaacagcctgcagggtgtcttcatcttcctggtgtactgcctcctcagccagcaggtccgggagcaatatgggaaatggtccaaagggatcaggaaattgaaaactgagtctgagatgcacacactctccagcagtgctaaggctgacacctccaaacccagcacggttaactagaaaaatcttctgaataagatcttccctctttgcccgtggaaaatctgaacaatctttgagccatctagaggggaaagaaaagactttgttctgtgtgtttcaagaaattcaccatgtcagcaatatgaaggatgttatggaaggcgtgctaggcattcaattcctgcagaaaccggaaatcttccatgccctgcaatgtgctcatcaaactctcagcatatggacggccagctgtggcccatatcttggtcactctgaagcacaatatttatgaagctatagaacgttaagacctctttcacagcctctccttcctacaaagactcctccaaatcttaaaatgaagcaggaaaacgagcctaagaggactttcataccgacaacatctgaaaggactagaatgttcacaccacgatctggatttcttaattttttgtttttgtttttgttgttctctagttctacgggtttgattatttagtcatgtgaaaaatattgattactcacacatagatcaagagagacacggctcctgccttcatggagcttttaggggaaaatgaagtggctcttgcagctagagttgactcagaagccgaaattcctagaaatcaggtttctactgctaggcaattgaagtataaactattttataaacactgtcttctttcgtcttcacaccaacatgcagaaaagtttctaatctcagatcggggatgtgcaacaaattccatttcaaaggaatgacctgcaaaactcctaaatattccaagcaaatgcccttaaccctgtctgttatctgctttccttgaacagaaattctacatgaccataaaacctcgaagatgggtatggcacagttcatgccctgtaatcctagcactttgggagggtgaggcaggaggatggctcaagcccaggagtttgagaccagtgtgggcaacagagtgagaaccatctctacccaaaaaaaaaattaaaaattagccaagcatggtgatgatataggagttaaggagaaatcatttaggcaaatagcaagggtaggaagtcctcagtaaggttttccatttaatgaaaagcagcccccaaaatcattttcttttctaacaaagaacagcctgtaaaatcgagctgcagacatagacaagcaagctggaagcttccacgggtgaatgccggcagctgtgccaataggaaaaagctacctagactaggcatgtccaaaatggcggctccaagttcccttctctttgccagccatgtgtacagtaaaaagcaggcaacatagtgtcagccaaagctcatttgcataataagattagggtggggtggccagctcacataggggtaggccctaggtaaatcagacaccgccttctcaagcctgtctataaaatctggtacactatgacgagggtcagatttcccattcagacgcccctctcccatgcaagagaaagagctgttctcctttctctttcttttgcctattaaacctctgctcctggccaggcacagtggctcacgcctataatcccagcactttgggaggctgaggtggtcagatcacctaaggtcaggagttcaagaccagcctggtcaacatggtgaaatcttgtctctagtaaaaatacaaaaatatatgaaatctcacatagatgataatattaagttccaaaagcaactcaacctggtagattctaattttttttgaggcagggtcttgctttgtcacccatgctggagtacaatggcacaaacactgctcactgcagcctcgacctcccaaggcctaagcaatcctcctgcctcagtccccctccaggtatttgaaactacaggtgtgtaccaccacaccgggctaatttttgtattttttgtagagacgtgggtctcactatgctgcccaggctcaggtcttaatctcctgagctcaggcaatccgcaggcctcagcctccctaagtgcggggattacaggcttgagccactgcacctagcctctatttgttttacaaaagagaaattgagatcctgaatgttaagtgacttgcctgaggccatcccactaacaggagccagggttaggattcaaaccccatccaactggtcccagagctggagcttcttgcactgccctacactacctaccatctccatcctctgggcacctttttataagaaccaaaacattacagagcattgctttgtcaactcagctgggaacatttcccagtgcaactcacatttttcactgctctgtgcctgtccgtataagctcaatgagtattgatttaggggctttggagaactttgaatgctaccccccaagtaaccattgttggcaacctggtacctctacttttagccatttctccttctctataaatagtgcagaagtaacccacttggtaacaggcatccttgccaagcctccaccactaggtcagtgtaagaattaaagaaagaggaaagaaacacaaaaagtggcttgatggttaagacaggtttattttagagaaaacacacctgagaggggctgctggctgaattaggttagagtcttttctacagactaagagtgtttaaggatttagggtgggagagtttcttagaggcttggactgcttctgtgttttttttgttgtgcttatatgggagggagagtggtgtgtttgcttttatacatttttctgcagctgtaggcataccccccaagtctgcttttagcttccctattttagtgcacctggagggaaaggaatgtgcttattaaggcccactgttttactggggcccattgtatgagggtgaagtttggcagttacccaagagacttttcctccaccttcctctgtgcccgagctgttttatctgcattttactgtctgctttttttggctgcttatagtttttaaaaaagtaatttccttaaatccagaaggctaaaaatgaagctgaaacttaaagtggcggtgtttgtccaaaataacggggctcctgctctgccagtcagtaccctcaagtcactcctgatcctcaacctccatgcctaaggctggttcaagagaccacataatatctgccttttattacatacatgatgggtgcatgggattctgcgtgccctttgcttgatatagactgctaaggtgagatggggaatatcagagtcagctgctgcttgaggaagcagaacacacagctggaggcttggaacatgtgggtccctatgagtgtagagcccatatccccatagagtctacctagagcaggggtcgccaaatgttttcttaaagagcctgatagtgtatatgttaggctttgtgagccaggtatttacagcaactcaattctaccactgtggtatgaaaacagctatagacaatcataaatgaatgatcatggctatgttttaataaaactttacagacactgaacttgaacttccattgtgatatgaaaacagctatagacaatcataaatgaatgatcatggctatgttttaataaaactttatggacactgagcttgaacttcatatatcagtcatgtgacacaaaatatcattcttctttttatttgttttcacccatttgaaaaatgtaaaaactattcttagctgtacagaaacagatggtgggtcagatttgactcactgcccatagtttccagaccatgatgttcaggttcatggaagcacttcactctacactaatttattcatccattcatcacatatgtgatgagcacatacagacacacctcagagatattgcaggctccactccagatcaccacaataatgtgaatattgcaataaagcaagtcatacacatt

SEQ ID NO: 14184 - DNA, 6624 bp, Homo sapiens
ggggggtctgctctgtgcggtgaagcttctcttcttggcacctgcctggcatcggaagagggccccttctccctccctgggcttttatgtggacactgtaatgcctcagttttctttctttctttttgtttttgacacagggtctcactctatcacccaagctggagtgcagtggcaccatcttagctcaccgcagcctcaaactccccagctcgggtgattcttcctgcctcagcctcctgagtagtagcagctgggaccacagacgtctgccaccaagcccagctgcaccgccagttccggggagggccctgggccagcggctgtccgccccccctcctttataaagtcctggcctcgggacagcccgcacagctgcccagcctgcggagacgggacagccctgtcccactcactctttcccctgctgctcctgccggcagctcagctggaaccatgggaggccgcgtctttctcgtctttctcgcattctgtgtctggctgactctgccgggagctgaaacccaggactccaggggctgtgcccggtggtgccctcaggactcctcgtgtgtcaatgccaccgcctgtcgctgcaatccagggttcagctctttttctgagatcatcaccacccccatggagacttgtgacgacatcaacgagtgtgcaacactgtcgaaagtgtcatgcggaaaattctcggactgctggaacacagaggggagctacgactgcgtgtgcagcccaggatatgagcctgtttctggggcaaaaacattcaagaatgagagcgagaacacgtgtcaagatgtggacgaatgtcagcagaacccaaggctctgtaaaagctacggcacctgcgtcaacaccctcggcagctacacgtgccagtgcctgcctggcttcaagctcaaacctgaggacccgaagctctgcacagatgtggacgagtgcagctccgggcagcatcagtgtgacagctccaccgtctgcttcaacaccgtgggttcatacagctgccgctgccgcccaggctggaagcccagacacggaatcccgaataaccaaaaggacactgtctgtgaagatatgactttctccacctggaccccgccccctggagtccacagccagacgctttcccgattcttcgacaaagtccaggacctgggcagagactacaagccaggcttggccaataacaccatccagagcatcttacaggcgctggatgagctgctggaggcccctggggacctggagaccctgccccgcttacagcagcactgtgtggccagtcacctgctggatggcctagaggatgtcctcagaggcctgagcaagaacctttccaatgggctgttgaacttcagttatcctgcaggcacagaattgtccctggaggtgcagaagcaagtagacaggagtgtcaccttgagacagaatcaggcagtgatgcagctcgactggaatcaggcacagaaatctggtgacccaggcccttctgtggtgggccttgtctccattccagggatgggcaagttgctggctgaggcccctctggtcctggaacctgagaagcagatgcttctgcatgagacacaccagggcttgctgcaggacggctcccccatcctgctctcagatgtgatctctgcctttctgagcaacaacgacacccaaaacctcagctccccagttaccttcaccttctcccaccgttcagtgatcccgagacagaaggtgctctgtgtcttctgggagcatggccagaatggatgtggtcactgggccaccacaggctgcagcacaataggcaccagagacaccagcaccatctgccgttgcacccacctgagcagctttgccgtcctcatggcccactacgatgtgcaggaggaggatcccgtgctgactgtcatcacctacatggggctgagcgtctctctgctgtgcctcctcctggcggccctcacttttctcctgtgtaaagccatccagaacaccagcacctcactgcatctgcagctctcgctctgcctcttcctggcccacctcctcttcctcgtggcaattgatcaaaccggacacaaggtgctgtgctccatcatcgccggtaccttgcactatctctacctggccaccttgacctggatgctgctggaggccctgtacctcttcctcactgcacggaacctgacggtggtcaactactcaagcatcaacagattcatgaagaagctcatgttccctgtgggctacggagtcccagctgtgacagtggccatttctgcagcctccaggcctcacctttatggaacaccttcccgctgctggctccaaccagaaaagggatttatatggggcttccttggacctgtctgcgccatcttctctgtgaatttagttctctttctggtgactctctggattttgaaaaacagactctcctccctcaatagtgaagtgtccaccctccggaacacaaggatgctggcatttaaagcgacagctcagctgttcatcctgggctgcacgtggtgtctgggcatcttgcaggtgggtccggctgcccgggtcatggcctacctcttcaccatcatcaacagcctgcagggtgtcttcatcttcctggtgtactgcctcctcagccagcaggtccgggagcaatatgggaaatggtccaaagggatcaggaaattgaaaactgagtctgagatgcacacactctccagcagtgctaaggctgacacctccaaacccagcacggttaactagaaaaatcttctgaataagatcttccctctttgcccgtggaaaatctgaacaatctttgagccatctagaggggaaagaaaagactttgttctgtgtgtttcaagaaattcaccatgtcagcaatatgaaggatgttatggaaggcgtgctaggcattcaattcctgcagaaaccggaaatcttccatgccctgcaatgtgctcatcaaactctcagcatatggacggccagctgtggcccatatcttggtcactctgaagcacaatatttatgaagctatagaacgttaagacctctttcacagcctctccttcctacaaagactcctccaaatcttaaaatgaagcaggaaaacgagcctaagaggactttcataccgacaacatctgaaaggactagaatgttcacaccacgatctggatttcttaattttttgtttttgtttttgttgttctctagttctacgggtttgattatttagtcatgtgaaaaatattgattactcacacatagatcaagagagacacggctcctgccttcatggagcttttaggggaaaatgaagtggctcttgcagctagagttgactcagaagccgaaattcctagaaatcaggtttctactgctaggcaattgaagtataaactattttataaacactgtcttctttcgtcttcacaccaacatgcagaaaagtttctaatctcagatcggggatgtgcaacaaattccatttcaaaggaatgacctgcaaaactcctaaatattccaagcaaatgcccttaaccctgtctgttatctgctttccttgaacagaaattctacatgaccataaaacctcgaagatgggtatggcacagttcatgccctgtaatcctagcactttgggagggtgaggcaggaggatggctcaagcccaggagtttgagaccagtgtgggcaacagagtgagaaccatctctacccaaaaaaaaaattaaaaattagccaagcatggtgatgatataggagttaaggagaaatcatttaggcaaatagcaagggtaggaagtcctcagtaaggttttccatttaatgaaaagcagcccccaaaatcattttcttttctaacaaagaacagcctgtaaaatcgagctgcagacatagacaagcaagctggaagcttccacgggtgaatgccggcagctgtgccaataggaaaaagctacctagactaggcatgtccaaaatggcggctccaagttcccttctctttgccagccatgtgtacagtaaaaagcaggcaacatagtgtcagccaaagctcatttgcataataagattagggtggggtggccagctcacataggggtaggccctaggtaaatcagacaccgccttctcaagcctgtctataaaatctggtacactatgacgagggtcagatttcccattcagacgcccctctcccatgcaagagaaagagctgttctcctttctctttcttttgcctattaaacctctgctcctggccaggcacagtggctcacgcctataatcccagcactttgggaggctgaggtggtcagatcacctaaggtcaggagttcaagaccagcctggtcaacatggtgaaatcttgtctctagtaaaaatacaaaaatatatgaaatctcacatagatgataatattaagttccaaaagcaactcaacctggtagattctaattttttttgaggcagggtcttgctttgtcacccatgctggagtacaatggcacaaacactgctcactgcagcctcgacctcccaaggcctaagcaatcctcctgcctcagtccccctccaggtatttgaaactacaggtgtgtaccaccacaccgggctaatttttgtattttttgtagagacgtgggtctcactatgctgcccaggctcaggtcttaatctcctgagctcaggcaatccgcaggcctcagcctccctaagtgcggggattacaggcttgagccactgcacctagcctctatttgttttacaaaagagaaattgagatcctgaatgttaagtgacttgcctgaggccatcccactaacaggagccagggttaggattcaaaccccatccaactggtcccagagctggagcttcttgcactgccctacactacctaccatctccatcctctgggcacctttttataagaaccaaaacattacagagcattgctttgtcaactcagctgggaacatttcccagtgcaactcacatttttcactgctctgtgcctgtccgtataagctcaatgagtattgatttaggggctttggagaactttgaatgctaccccccaagtaaccattgttggcaacctggtacctctacttttagccatttctccttctctataaatagtgcagaagtaacccacttggtaacaggcatccttgccaagcctccaccactaggtcagtgtaagaattaaagaaagaggaaagaaacacaaaaagtggcttgatggttaagacaggtttattttagagaaaacacacctgagaggggctgctggctgaattaggttagagtcttttctacagactaagagtgtttaaggatttagggtgggagagtttcttagaggcttggactgcttctgtgttttttttgttgtgcttatatgggagggagagtggtgtgtttgcttttatacatttttctgcagctgtaggcataccccccaagtctgcttttagcttccctattttagtgcacctggagggaaaggaatgtgcttattaaggcccactgttttactggggcccattgtatgagggtgaagtttggcagttacccaagagacttttcctccaccttcctctgtgcccgagctgttttatctgcattttactgtctgctttttttggctgcttatagtttttaaaaaagtaatttccttaaatccagaaggctaaaaatgaagctgaaacttaaagtggcggtgtttgtccaaaataacggggctcctgctctgccagtcagtaccctcaagtcactcctgatcctcaacctccatgcctaaggctggttcaagagaccacataatatctgccttttattacatacatgatgggtgcatgggattctgcgtgccctttgcttgatatagactgctaaggtgagatggggaatatcagagtcagctgctgcttgaggaagcagaacacacagctggaggcttggaacatgtgggtccctatgagtgtagagcccatatccccatagagtctacctagagcaggggtcgccaaatgttttcttaaagagcctgatagtgtatatgttaggctttgtgagccaggtatttacagcaactcaattctaccactgtggtatgaaaacagctatagacaatcataaatgaatgatcatggctatgttttaataaaactttacagacactgaacttgaacttccattgtgatatgaaaacagctatagacaatcataaatgaatgatcatggctatgttttaataaaactttatggacactgagcttgaacttcatatatcagtcatgtgacacaaaatatcattcttctttttatttgttttcacccatttgaaaaatgtaaaaactattcttagctgtacagaaacagatggtgggtcagatttgactcactgcccatagtttccagaccatgatgttcaggttcatggaagcacttcactctacactaatttattcatccattcatcacatatgtgatgagcacatacagacacacctcagagatattgcaggctccactccagatcaccacaataatgtgaatattgcaataaagcaagtcatacacatt

SEQ ID NO: 14185 - DNA, 6771 bp, Homo sapiens
ggggggtctgctctgtgcggtgaagcttctcttcttggcacctgcctggcatcggaagagggccccttctccctccctgggcttttatgtggacactgtaatgcctcagttttctttctttctttttgtttttgacacagggtctcactctatcacccaagctggagtgcagtggcaccatcttagctcaccgcagcctcaaactccccagctcgggtgattcttcctgcctcagcctcctgagtagtagcagctgggaccacagacgtctgccaccaagcccagctgcaccgccagttccggggagggccctgggccagcggctgtccgccccccctcctttataaagtcctggcctcgggacagcccgcacagctgcccagcctgcggagacgggacagccctgtcccactcactctttcccctgctgctcctgccggcagctcagctggaaccatgggaggccgcgtctttctcgtctttctcgcattctgtgtctggctgactctgccgggagctgaaacccaggactccaggggctgtgcccggtggtgccctcaggactcctcgtgtgtcaatgccaccgcctgtcgctgcaatccagggttcagctctttttctgagatcatcaccacccccatggagacttgtgacgacatcaacgagtgtgcaacactgtcgaaagtgtcatgcggaaaattctcggactgctggaacacagaggggagctacgactgcgtgtgcagcccaggatatgagcctgtttctggggcaaaaacattcaagaatgagagcgagaacacgtgtcaagatgtggacgaatgtcagcagaacccaaggctctgtaaaagctacggcacctgcgtcaacaccctcggcagctacacgtgccagtgcctgcctggcttcaagctcaaacctgaggacccgaagctctgcacagatgtgaatgaatgcacctccggacaaaacccatgccacagctccacccactgcctcaacaacgtgggcagctatcagtgccgctgccgcccgggctggcaaccgattccggggtcccccaatggcccaaacaataccgtctgtgaagatgtggacgagtgcagctccgggcagcatcagtgtgacagctccaccgtctgcttcaacaccgtgggttcatacagctgccgctgccgcccaggctggaagcccagacacggaatcccgaataaccaaaaggacactgtctgtgaagatatgactttctccacctggaccccgccccctggagtccacagccagacgctttcccgattcttcgacaaagtccaggacctgggcagagactacaagccaggcttggccaataacaccatccagagcatcttacaggcgctggatgagctgctggaggcccctggggacctggagaccctgccccgcttacagcagcactgtgtggccagtcacctgctggatggcctagaggatgtcctcagaggcctgagcaagaacctttccaatgggctgttgaacttcagttatcctgcaggcacagaattgtccctggaggtgcagaagcaagtagacaggagtgtcaccttgagacagaatcaggcagtgatgcagctcgactggaatcaggcacagaaatctggtgacccaggcccttctgtggtgggccttgtctccattccagggatgggcaagttgctggctgaggcccctctggtcctggaacctgagaagcagatgcttctgcatgagacacaccagggcttgctgcaggacggctcccccatcctgctctcagatgtgatctctgcctttctgagcaacaacgacacccaaaacctcagctccccagttaccttcaccttctcccaccgttcagtgatcccgagacagaaggtgctctgtgtcttctgggagcatggccagaatggatgtggtcactgggccaccacaggctgcagcacaataggcaccagagacaccagcaccatctgccgttgcacccacctgagcagctttgccgtcctcatggcccactacgatgtgcaggaggaggatcccgtgctgactgtcatcacctacatggggctgagcgtctctctgctgtgcctcctcctggcggccctcacttttctcctgtgtaaagccatccagaacaccagcacctcactgcatctgcagctctcgctctgcctcttcctggcccacctcctcttcctcgtggcaattgatcaaaccggacacaaggtgctgtgctccatcatcgccggtaccttgcactatctctacctggccaccttgacctggatgctgctggaggccctgtacctcttcctcactgcacggaacctgacggtggtcaactactcaagcatcaacagattcatgaagaagctcatgttccctgtgggctacggagtcccagctgtgacagtggccatttctgcagcctccaggcctcacctttatggaacaccttcccgctgctggctccaaccagaaaagggatttatatggggcttccttggacctgtctgcgccatcttctctgtgaatttagttctctttctggtgactctctggattttgaaaaacagactctcctccctcaatagtgaagtgtccaccctccggaacacaaggatgctggcatttaaagcgacagctcagctgttcatcctgggctgcacgtggtgtctgggcatcttgcaggtgggtccggctgcccgggtcatggcctacctcttcaccatcatcaacagcctgcagggtgtcttcatcttcctggtgtactgcctcctcagccagcaggtccgggagcaatatgggaaatggtccaaagggatcaggaaattgaaaactgagtctgagatgcacacactctccagcagtgctaaggctgacacctccaaacccagcacggttaactagaaaaatcttctgaataagatcttccctctttgcccgtggaaaatctgaacaatctttgagccatctagaggggaaagaaaagactttgttctgtgtgtttcaagaaattcaccatgtcagcaatatgaaggatgttatggaaggcgtgctaggcattcaattcctgcagaaaccggaaatcttccatgccctgcaatgtgctcatcaaactctcagcatatggacggccagctgtggcccatatcttggtcactctgaagcacaatatttatgaagctatagaacgttaagacctctttcacagcctctccttcctacaaagactcctccaaatcttaaaatgaagcaggaaaacgagcctaagaggactttcataccgacaacatctgaaaggactagaatgttcacaccacgatctggatttcttaattttttgtttttgtttttgttgttctctagttctacgggtttgattatttagtcatgtgaaaaatattgattactcacacatagatcaagagagacacggctcctgccttcatggagcttttaggggaaaatgaagtggctcttgcagctagagttgactcagaagccgaaattcctagaaatcaggtttctactgctaggcaattgaagtataaactattttataaacactgtcttctttcgtcttcacaccaacatgcagaaaagtttctaatctcagatcggggatgtgcaacaaattccatttcaaaggaatgacctgcaaaactcctaaatattccaagcaaatgcccttaaccctgtctgttatctgctttccttgaacagaaattctacatgaccataaaacctcgaagatgggtatggcacagttcatgccctgtaatcctagcactttgggagggtgaggcaggaggatggctcaagcccaggagtttgagaccagtgtgggcaacagagtgagaaccatctctacccaaaaaaaaaattaaaaattagccaagcatggtgatgatataggagttaaggagaaatcatttaggcaaatagcaagggtaggaagtcctcagtaaggttttccatttaatgaaaagcagcccccaaaatcattttcttttctaacaaagaacagcctgtaaaatcgagctgcagacatagacaagcaagctggaagcttccacgggtgaatgccggcagctgtgccaataggaaaaagctacctagactaggcatgtccaaaatggcggctccaagttcccttctctttgccagccatgtgtacagtaaaaagcaggcaacatagtgtcagccaaagctcatttgcataataagattagggtggggtggccagctcacataggggtaggccctaggtaaatcagacaccgccttctcaagcctgtctataaaatctggtacactatgacgagggtcagatttcccattcagacgcccctctcccatgcaagagaaagagctgttctcctttctctttcttttgcctattaaacctctgctcctggccaggcacagtggctcacgcctataatcccagcactttgggaggctgaggtggtcagatcacctaaggtcaggagttcaagaccagcctggtcaacatggtgaaatcttgtctctagtaaaaatacaaaaatatatgaaatctcacatagatgataatattaagttccaaaagcaactcaacctggtagattctaattttttttgaggcagggtcttgctttgtcacccatgctggagtacaatggcacaaacactgctcactgcagcctcgacctcccaaggcctaagcaatcctcctgcctcagtccccctccaggtatttgaaactacaggtgtgtaccaccacaccgggctaatttttgtattttttgtagagacgtgggtctcactatgctgcccaggctcaggtcttaatctcctgagctcaggcaatccgcaggcctcagcctccctaagtgcggggattacaggcttgagccactgcacctagcctctatttgttttacaaaagagaaattgagatcctgaatgttaagtgacttgcctgaggccatcccactaacaggagccagggttaggattcaaaccccatccaactggtcccagagctggagcttcttgcactgccctacactacctaccatctccatcctctgggcacctttttataagaaccaaaacattacagagcattgctttgtcaactcagctgggaacatttcccagtgcaactcacatttttcactgctctgtgcctgtccgtataagctcaatgagtattgatttaggggctttggagaactttgaatgctaccccccaagtaaccattgttggcaacctggtacctctacttttagccatttctccttctctataaatagtgcagaagtaacccacttggtaacaggcatccttgccaagcctccaccactaggtcagtgtaagaattaaagaaagaggaaagaaacacaaaaagtggcttgatggttaagacaggtttattttagagaaaacacacctgagaggggctgctggctgaattaggttagagtcttttctacagactaagagtgtttaaggatttagggtgggagagtttcttagaggcttggactgcttctgtgttttttttgttgtgcttatatgggagggagagtggtgtgtttgcttttatacatttttctgcagctgtaggcataccccccaagtctgcttttagcttccctattttagtgcacctggagggaaaggaatgtgcttattaaggcccactgttttactggggcccattgtatgagggtgaagtttggcagttacccaagagacttttcctccaccttcctctgtgcccgagctgttttatctgcattttactgtctgctttttttggctgcttatagtttttaaaaaagtaatttccttaaatccagaaggctaaaaatgaagctgaaacttaaagtggcggtgtttgtccaaaataacggggctcctgctctgccagtcagtaccctcaagtcactcctgatcctcaacctccatgcctaaggctggttcaagagaccacataatatctgccttttattacatacatgatgggtgcatgggattctgcgtgccctttgcttgatatagactgctaaggtgagatggggaatatcagagtcagctgctgcttgaggaagcagaacacacagctggaggcttggaacatgtgggtccctatgagtgtagagcccatatccccatagagtctacctagagcaggggtcgccaaatgttttcttaaagagcctgatagtgtatatgttaggctttgtgagccaggtatttacagcaactcaattctaccactgtggtatgaaaacagctatagacaatcataaatgaatgatcatggctatgttttaataaaactttacagacactgaacttgaacttccattgtgatatgaaaacagctatagacaatcataaatgaatgatcatggctatgttttaataaaactttatggacactgagcttgaacttcatatatcagtcatgtgacacaaaatatcattcttctttttatttgttttcacccatttgaaaaatgtaaaaactattcttagctgtacagaaacagatggtgggtcagatttgactcactgcccatagtttccagaccatgatgttcaggttcatggaagcacttcactctacactaatttattcatccattcatcacatatgtgatgagcacatacagacacacctcagagatattgcaggctccactccagatcaccacaataatgtgaatattgcaataaagcaagtcatacacatt

SEQ ID NO: 14186 - DNA, 3247 bp, Homo sapiens
cgccccccctccttcataaagtcctggcctcgggacagcctgcacagctgcctagcctgtggagacgggacagccctgtcccactcactctttcccctgccgctcctgccggcagctccaaccatgggaggccgcgtctttctcgcattctgtgtctggctgactctgccgggagctgaaacccaggactccaggggctgtgcccggtggtgccctcagaactcctcgtgtgtcaatgccaccgcctgtcgctgcaatccagggttcagctctttttctgagatcatcaccaccccgacggagacttgtgacgacatcaacgagtgtgcaacaccgtcgaaagtgtcatgcggaaaattctcggactgctggaacacagaggggagctacgactgcgtgtgcagcccgggatatgagcctgtttctggggcaaaaacattcaagaatgagagcgagaacacctgtcaagatgtggacgaatgtcagcagaacccaaggctctgtaaaagctacggcacctgcgtcaacacccttggcagctatacctgccagtgcctgcctggcttcaagttcatacctgaggatccgaaggtctgcacagatgtgaatgaatgcacctccggacaaaacccgtgccacagctccacccactgcctcaacaacgtgggcagctatcagtgccgctgccgcccgggctggcaaccgattccggggtcccccaatggcccaaacaataccgtctgtgaagatgtggacgagtgcagctccgggcagcatcagtgtgacagctccaccgtctgcttcaacaccgtgggttcatacagctgccgctgccgcccaggctggaagcccagacacggaatcccgaataaccaaaaggacactgtctgtgaagatatgactttctccacctggaccccgccccctggagtccacagccagacgctttcccgattcttcgacaaagtccaggacctgggcagagactccaagacaagctcagccgaggtcaccatccagaatgtcatcaaattggtggatgaactgatggaagctcctggagacgtagaggccctggcgccacctgtccggcacctcatagccacccagctgctctcaaaccttgaagatatcatgaggatcctggccaagagcctgcctaaaggccccttcacctacatttccccttcgaacacagagctgaccctgatgatccaggagcggggggacaagaacgtcactatgggtcagagcagcgcacgcatgaagctgaattgggctgtggcagctggagccgaggatccaggccccgccgtggcgggcatcctctccatccagaacatgacgacattgctggccaatgcctccttgaacctgcattccaagaagcaagccgaactggaggagatatatgaaagcagcatccgtggtgtccaactcagacgcctctctgccgtcaactccatctttctgagccacaacaacaccaaggaactcaactcccccatccttttcgccttctcccaccttgagtcctccgatggggaggcgggaagagaccctcctgccaaggacgtgatgcctgggccacggcaggagctgctctgtgccttctggaagagtgacagcgacaggggagggcactgggccaccgagggctgccaggtgctgggcagcaagaacggcagcaccacctgccaatgcagccacctgagcagctttgcgatccttatggctcattatgacgtggaggactggaagctgaccctgatcaccagggtgggactggcgctgtcactcttctgcctgctgctgtgcatcctcactttcctgctggtgcggcccatccagggctcgcgcaccaccatacacctgcacctctgcatctgcctcttcgtgggctccaccatcttcctggccggcatcgagaacgaaggcggccaggtggggctgcgctgccgcctggtggccgggctgctgcactactgtttcctggccgccttctgctggatgagcctcgaaggcctggagctctactttcttgtggtgcgcgtgttccaaggccagggcctgagtacgcgctggctctgcctgatcggctatggcgtgcccctgctcatcgtgggcgtctcggctgccatctacagcaagggctacggccgccccagatactgctggttggactttgagcagggcttcctctggagcttcttgggacctgtgaccttcatcattttgtgcaatgctgtcattttcgtgactaccgtctggaagctcactcagaagttttctgaaatcaatccagacatgaagaaattaaagaaggcgagggcgctgaccatcacggccatcgcgcagctcttcctgttgggctgcacctgggtctttggcctgttcatcttcgacgatcggagcttggtgctgacctatgtgtttaccatcctcaactgcctgcagggcgccttcctctacctgctgcactgcctgctcaacaagaaggttcgggaagaataccggaagtgggcctgcctagttgctggggggagcaagtactcagaattcacctccaccacgtctggcactggccacaatcagacccgggccctcagggcatcagagtccggcatatgaaggcgcatggttctggacggcccagcagctcctgtggccacagcagctttgtacacgaagaccatccatcctcccttcgtccaccactctactccctccaccctccctccctgatcccgtgtgccaccaggagggagtggcagctatagtctggcaccaaagtccaggacacccagtggggtggagtcggagccactggtcctgctgctggctgcctctctgctccaccttgtgacccagggtggggacaggggctggcccagggctgcaatgcagcatgttgccctggcacctgtggccagtactcgggacagactaagggcgcttgtcccatcctggacttttcctctcatgtctttgctgcagaactgaagagactaggcgctggggctcagcttccctcttaagctaagactgatgtcagaggccccatggcgaggccccttggggccactgcctgaggctcacggtacagaggcctgccctgcctggccgggcaggaggttctcactgttgtgaaggttgtagacgttgtgtaatgtgtttttatctgttaaaatttttcagtgttgacacttaaaattaaacacatgcatacagaaaaaaaaaaaaaaaa

SEQ ID NO: 14187 - DNA, 3682 bp, Homo sapiens
tgtgtcatttcctttcttcatgtaccagatgctgaaatactatgagataaagattttaggtttcaattgtaaagagagagaagtggataaatcagtgctgctttctttaggacgaaagaagtatggagcagtgggatcactttcacaatcaacaggaggacactgatagctgctccgaatctgtgaaatttgatgctcgctcaatgacagctttgcttcctccgaatcctaaaaacagcccttcccttcaagagaaactgaagtccttcaaagctgcactgattgccctttacctcctcgtgtttgcagttctcatccctctcattggaatagtggcagctcaactcctgaagtgggaaacgaagaattgctcagttagttcaactaatgcaaatgatataactcaaagtctcacgggaaaaggaaatgacagcgaagaggaaatgagatttcaagaagtctttatggaacacatgagcaacatggagaagagaatccagcatattttagacatggaagccaacctcatggacacagagcatttccaaaatttcagcatgacaactgatcaaagatttaatgacattcttctgcagctaagtaccttgttttcctcagtccagggacatgggaatgcaatagatgaaatctccaagtccttaataagtttgaataccacattgcttgatttgcagctcaacatagaaaatctgaatggcaaaatccaagagaataccttcaaacaacaagaggaaatcagtaaattagaggagcgtgtttacaatgtatcagcagaaattatggctatgaaagaagaacaagtgcatttggaacaggaaataaaaggagaagtgaaagtactgaataacatcactaatgatctcagactgaaagattgggaacattctcagaccttgagaaatatcactttaattcaaggtcctcctggacccccgggtgaaaaaggagatcgaggtcccactggagaaagtggtccacgaggatttccaggtccaataggtcctccgggtcttaaaggtgatcggggagcaattggctttcctggaagtcgaggactcccaggatatgccggaaggccaggaaattctggaccaaaaggccagaaaggggaaaaggggagtggaaacacattaactccatttacgaaagttcgactggtcggtgggagcggccctcacgaggggagggtggagatactccacagcggccagtggggtacaatttgtgacgatcgctgggaagtgcgcgttggacaggtcgtctgtaggagcttgggatacccaggtgttcaagccgtgcacaaggcagctcactttggacaaggtactggtccaatatggctgaatgaagtgttttgttttgggagagaatcatctattgaagaatgtaaaattcggcaatgggggacaagagcctgttcacattctgaagatgctggagtcacttgcactttataatgcatcatattttcattcacaactatgaaatcgctgctcaaaaatgattttattaccttgttcctgtaaaatccatttaatcaatatttaagagattaagaatattgcccaaataatattttagattacaggattaatatattgaacaccttcatgcttactattttatgtctatatttaaatcattttaacttctataggtttttaaatggaattttctaatataatgacttatatgctgaattgaacattttgaagtttatagcttccagattacaaaggccaagggtaatagaaatgcataccagtaattggctccaattcataatatgttcaccaggagattacaattttttgctcttcttgtctttgtaatctatttagttgattttaattactttctgaataacggaagggatcagaagatatcttttgtgcctagattgcaaaatctccaatccacacatattgttttaaaataagaatgttatccaactattaagatatctcaatgtgcaataacttgtgtattagatatcaatgttaatgatatgtcttggccactatggaccagggagcttatttttcttgtcatgtactgacaactgtttaattgaatcatgaagtaaattgaaagcaggacatatgagaaaactgaccatcagtatatttgtccagataattggtggatcaaaaatgccacttaacaggaagtttagtttgttatgcactttaaatggaataattagcttgttacaattctaggacatggtgtttaaaatttaaatctgattaatccattttaacaaacaatgcaaacatcttcagtgcagaaggaagagtggtttcaactgtttggagtcttttatgaagtcagtcaacatgtacaaccaaagggcgggggggggggtggggggtgcgtctttagtcctaaagggacaataactctgagcatgccccaaaaaagtagtttagcaaccttttgttggtagtcaacccatccccagggccatagtgtagagtgtgaaaagctaccctgaaacccagtaattctaccctgaaagtgactgcctgcagaaagaccagcagttgatattaaagcgcaaatgaattcaacctcagccctgaaaataacagaattctgaagtttcctatgactaattcacaaaaaaagtaattgtaaactagtactattatggaattactctactgttctttctttaatagtggcaaatgaaagcataagcttaagcattttttcatattctgaagtctcaccacacataataaccaagtggtagactcacagccgtccaacttaaaaaggcaaaaccttaccttggaattggaattactgtaaacagcctactgaaaatgcatttttatcatgtaacattcttctacttgtttaacattgctgattttctctggcagcataattttgtggttaagagaatgaattctgaatgtacactttctgtctcaaaccctggctgtaatttcagctagttaataattctttgtgttcagttccactatctaggtattttcttcaaaaggtaaatacaatggtttctgaaagaatcatttgcattatcagcctgtttgggatgtctgagatcagtgcctctgggttgttaatactgtattgctgtatggtatatgtatgctgatttactacttatgcgtaagtggtatgcatgggatgtctgaaatcagtgcctatgggttgtcaatagtattaactattagtgttaactgttagtattaactattagtattattaacactaataatagtactattactattactatttttattttaaaataaaatttacctttaaaataataatagtactattgctagtactagtactattgctattactagtactattactagtactagtactatgacactgttaatagtactattaacaacccataggcacttgggatgtctgagatcagtgcctatgggttgttaatactatattgctgtatggtatatgcatgctgatttaccacttatgcatagatatatctttaataagtaatctaaaaatcctttttgtatttgagagaatctactaagttcagtccagtcaagaaaagaacctaatagcaccaatacaaattgaggacttaatttactttggaatgttgaattgcatttgttccattaaaaaaaacagaaatttg

SEQ ID NO: 14188 - DNA, 2823 bp, Homo sapiens
tgtgtcatttcctttcttcatgtaccagatgctgaaatactatgagataaagattttaggtttcaattgtaaagagagagaagtggataaatcagtgctgctttctttaggacgaaagaagtatggagcagtgggatcactttcacaatcaacaggaggacactgatagctgctccgaatctgtgaaatttgatgctcgctcaatgacagctttgcttcctccgaatcctaaaaacagcccttcccttcaagagaaactgaagtccttcaaagctgcactgattgccctttacctcctcgtgtttgcagttctcatccctctcattggaatagtggcagctcaactcctgaagtgggaaacgaagaattgctcagttagttcaactaatgcaaatgatataactcaaagtctcacgggaaaaggaaatgacagcgaagaggaaatgagatttcaagaagtctttatggaacacatgagcaacatggagaagagaatccagcatattttagacatggaagccaacctcatggacacagagcatttccaaaatttcagcatgacaactgatcaaagatttaatgacattcttctgcagctaagtaccttgttttcctcagtccagggacatgggaatgcaatagatgaaatctccaagtccttaataagtttgaataccacattgcttgatttgcagctcaacatagaaaatctgaatggcaaaatccaagagaataccttcaaacaacaagaggaaatcagtaaattagaggagcgtgtttacaatgtatcagcagaaattatggctatgaaagaagaacaagtgcatttggaacaggaaataaaaggagaagtgaaagtactgaataacatcactaatgatctcagactgaaagattgggaacattctcagaccttgagaaatatcactttaattcaaggtcctcctggacccccgggtgaaaaaggagatcgaggtcccactggagaaagtggtccacgaggatttccaggtccaataggtcctccgggtcttaaaggtgatcggggagcaattggctttcctggaagtcgaggactcccaggatatgccggaaggccaggaaattctggaccaaaaggccagaaaggggaaaaggggagtggaaacacattaagaccagtacaactcactgatcatattagggcagggccctcttaagatcaggtgggttgggcgggacatcctctgctaccatctcattaaaaggcccttcacctctggacaagtcatctgcacaactgacttccaagatccttttgtgactcctccaaatgactttggttcccgtgttgtacctgacttccacatggccttctctcctggtccctggtgctgtttgggcctctgctcccatgctcatacctcttcttactccaattactccaccatcacctctctcccctatcacccccagcctggacacctctcatgcacggactggagggctgctccaaccagtcctcagttctctgccacccattgacctagagtcttgaacccaatttaatttattgggttctaggagaactgctgtgttctcaccctaacttggaagagtgatgtttcagtcaagcaaagcgattcctaccatacaatataacacttgtgtgaggctctgtcctaaatatctcaattaccaatatgtggtttggtagtatttctcgccatgctttgctcatgcgcaatgagactacaactagggtgtaaattttaagtatcccatctaaaactcatacaatgataggaaaaatccatttgtttttcatttgatttttactgaggaatcagctcaatcttcaatgaatactggtctctttccaaagcatttttgatcaaagtaaagactgagtcaagggctttttttttttctttttcttgttttaagagacagagccttgttctattgcacaggctggactacacgcattcacctagagtctagaacacaatttaatttattgggttctaggagaactgtcatgagtattgataatatgagagttctttatattcaaacattattctcaaccagagatagggatgtcatagaagaaaatccattcattcaatcattaattcacatgtccattatgtacctccatgagctggacataacagctaataagagataattgtctctggttttacagagctaattgtccctaagagatgtagacaaatgaacaagcaattacaatacatctaagctatactgggggaggaacagggctggataggtatgcagaggagataaaaaaattttaattccttagaatattttttaaaaattgattcttattttaccttctcatcttcttattttccaaattacagcatatatatatatttttttaagttttgaagtgtagtcgagcttgggcaatttatccaacccatttaaaccaaaaataaaacttttcatgtattacctggtcatttcaaacaaaaatattttgatcatgaaaaagaataccaatattcttttgttctaaaaatctcttatgggattacatgttatatttttggtttctctctactgatcaacagactacattttcacaactcttctttcctttacgttttaacacacagacccaagattcatactattaagattctagtagaactctagatggtatgcctctgtgtatctcagcatttttattcccactcttgtataatgaacatgttaacacctacctcacagggttgttgtgaggatcaagtaagatattgtgtgtgtgaagatgctctgtgaaatcataaagtcctttaaagatgt

SEQ ID NO: 14189 - DNA, 3493 bp, Homo sapiens
tgtgtcatttcctttcttcatgtaccagatgctgaaatactatgagataaagattttaggtttcaattgtaaagagagagaagtggataaatcagtgctgctttctttaggacgaaagaagtatggagcagtgggatcactttcacaatcaacaggaggacactgatagctgctccgaatctgtgaaatttgatgctcgctcaatgacagctttgcttcctccgaatcctaaaaacagcccttcccttcaagagaaactgaagtccttcaaagctgcactgattgccctttacctcctcgtgtttgcagttctcatccctctcattggaatagtggcagctcaactcctgaagtgggaaacgaagaattgctcagttagttcaactaatgcaaatgatataactcaaagtctcacgggaaaaggaaatgacagcgaagaggaaatgagatttcaagaagtctttatggaacacatgagcaacatggagaagagaatccagcatattttagacatggaagccaacctcatggacacagagcatttccaaaatttcagcatgacaactgatcaaagatttaatgacattcttctgcagctaagtaccttgttttcctcagtccagggacatgggaatgcaatagatgaaatctccaagtccttaataagtttgaataccacattgcttgatttgcagctcaacatagaaaatctgaatggcaaaatccaagagaataccttcaaacaacaagaggaaatcagtaaattagaggagcgtgtttacaatgtatcagcagaaattatggctatgaaagaagaacaagtgcatttggaacaggaaataaaaggagaagtgaaagtactgaataacatcactaatgatctcagactgaaagattgggaacattctcagaccttgagaaatatcactttaattcaaggtcctcctggacccccgggtgaaaaaggagatcgaggtcccactggagaaagtggtccacgaggatttccaggtccaataggtcctccgggtcttaaaggtgatcggggagcaattggctttcctggaagtcgaggactcccaggatatgccggaaggccaggaaattctggaccaaaaggccagaaaggggaaaaggggagtggaaacacattaagtactggtccaatatggctgaatgaagtgttttgttttgggagagaatcatctattgaagaatgtaaaattcggcaatgggggacaagagcctgttcacattctgaagatgctggagtcacttgcactttataatgcatcatattttcattcacaactatgaaatcgctgctcaaaaatgattttattaccttgttcctgtaaaatccatttaatcaatatttaagagattaagaatattgcccaaataatattttagattacaggattaatatattgaacaccttcatgcttactattttatgtctatatttaaatcattttaacttctataggtttttaaatggaattttctaatataatgacttatatgctgaattgaacattttgaagtttatagcttccagattacaaaggccaagggtaatagaaatgcataccagtaattggctccaattcataatatgttcaccaggagattacaattttttgctcttcttgtctttgtaatctatttagttgattttaattactttctgaataacggaagggatcagaagatatcttttgtgcctagattgcaaaatctccaatccacacatattgttttaaaataagaatgttatccaactattaagatatctcaatgtgcaataacttgtgtattagatatcaatgttaatgatatgtcttggccactatggaccagggagcttatttttcttgtcatgtactgacaactgtttaattgaatcatgaagtaaattgaaagcaggacatatgagaaaactgaccatcagtatatttgtccagataattggtggatcaaaaatgccacttaacaggaagtttagtttgttatgcactttaaatggaataattagcttgttacaattctaggacatggtgtttaaaatttaaatctgattaatccattttaacaaacaatgcaaacatcttcagtgcagaaggaagagtggtttcaactgtttggagtcttttatgaagtcagtcaacatttacaaccaaagggcgggggggggggtggggggtgcgtctttagtcctaaagggacaataactctgagcatgccccaaaaaagtagtttagcaaccttttgttggtagtcaacccatccccagggccatagtgtagagtgtgaaaagctaccctgaaacccagtaattctaccctgaaagtgactgcctgcagaaagaccagcagttgatattaaagcgcaaatgaattcaacctcagccctgaaaataacagaattctgaagtttcctatgactaattcacaaaaaaagtaattgtaaactagtactattatggaattactctactgttctttctttaatagtggcaaatgaaagcataagcttaagcattttttcatattctgaagtctcaccacacataataaccaagtggtagactcacagccgtccaacttaaaaaggcaaaaccttaccttggaattggaattactgtaaacagcctactgaaaatgcatttttatcatgtaacattcttctacttgtttaacattgctgattttctctggcagcataattttgtggttaagagaatgaattctgaatgtacactttctgtctcaaaccctggctgtaatttcagctagttaataattctttgtgttcagttccactatctaggtattttcttcaaaaggtaaatacaatggtttctgaaagaatcatttgcattatcagcctgtttgggatgtctgagatcagtgcctctgggttgttaatactgtattgctgtatggtatatgtatgctgatttactacttatgcgtaagtggtatgcatgggatgtctgaaatcagtgcctatgggttgtcaatagtattaactattagtgttaactgttagtattaactattagtattattaacactaataatagtactattactattactatttttattttaaaataaaatttacctttaaaataataatagtactattgctagtactagtactattgctattactagtactattactagtactagtactatgacactgttaatagtactattaacaacccataggcacttgggatgtctgagatcagtgcctatgggttgttaatactatattgctgtatggtatatgcatgctgatttaccacttatgcatagatatatctttaataagtaatctaaaaatcctttttgtatttgagagaatctactaagttcagtccagtcaagaaaagaacctaatagcaccaatacaaattgaggacttaatttactttggaatgttgaattgcatttgttccattaaaaaaaacagaaatttg

SEQ ID NO: 14190 - DNA, 3868 bp, Homo sapiens
cgctcgctcgcagagaagccgcggcccatggagcccgccggcccggcccccggccgcctcgggccgctgctctgcctgctgctcgccgcgtcctgcgcctggtcaggagtggcgggtgaggaggagctgcaggtgattcagcctgacaagtccgtgttggttgcagctggagagacagccactctgcgctgcactgcgacctctctgatccctgtggggcccatccagtggttcagaggagctggaccaggccgggaattaatctacaatcaaaaagaaggccacttcccccgggtaacaactgtttcagacctcacaaagagaaacaacatggacttttccatccgcatcggtaacatcaccccagcagatgccggcacctactactgtgtgaagttccggaaagggagccccgatgacgtggagtttaagtctggagcaggcactgagctgtctgtgcgcgccaaaccctctgcccccgtggtatcgggccctgcggcgagggccacacctcagcacacagtgagcttcacctgcgagtcccacggcttctcacccagagacatcaccctgaaatggttcaaaaatgggaatgagctctcagacttccagaccaacgtggaccccgtaggagagagcgtgtcctacagcatccacagcacagccaaggtggtgctgacccgcgaggacgttcactctcaagtcatctgcgaggtggcccacgtcaccttgcagggggaccctcttcgtgggactgccaacttgtctgagaccatccgagttccacccaccttggaggttactcaacagcccgtgagggcagagaaccaggtgaatgtcacctgccaggtgaggaagttctacccccagagactacagctgacctggttggagaatggaaacgtgtcccggacagaaacggcctcaaccgttacagagaacaaggatggtacctacaactggatgagctggctcctggtgaatgtatctgcccacagggatgatgtgaagctcacctgccaggtggagcatgacgggcagccagcggtcagcaaaagccatgacctgaaggtctcagcccacccgaaggagcagggctcaaataccgccgctgagaacactggatctaatgaacggaacatctatattgtggtgggtgtggtgtgcaccttgctggtggccctactgatggcggccctctacctcgtccgaatcagacagaagaaagcccagggctccacttcttctacaaggttgcatgagcccgagaagaatgccagagaaataacacaggacacaaatgatatcacatatgcagacctgaacctgcccaaggggaagaagcctgctccccaggctgcggagcccaacaaccacacggagtatgccagcattcagaccagcccgcagcccgcgtcggaggacaccctcacctatgctgacctggacatggtccacctcaaccggacccccaagcagccggcccccaagcctgagccgtccttctcagagtacgccagcgtccaggtcccgaggaagtgaatgggaccgtggtttgctctagcacccatctctacgcgctttcttgtcccacagggagccgccgtgatgagcacagccaacccagttcccggagggctggggcggtgcaggctctgggacccaggggccagggtggctcttctctccccacccctccttggctctccagcacttcctgggcagccacggccccctccccccacattgccacatacctggaggctgacgttgccaaaccagccagggaaccaacctgggaagtggccagaactgcctggggtccaagaactcttgtgcctccgtccatcaccatgtgggttttgaagaccctcgactgcctccccgatgctccgaagcctgatcttccagggtggggaggagaaaatcccacctcccctgacctccaccacctccaccaccaccaccaccaccaccaccaccactaccaccaccacccaactggggctagagtggggaagatttcccctttagatcaaactgccccttccatggaaaagctggaaaaaaactctggaacccatatccaggcttggtgaggttgctgccaacagtcctggcctcccccatccctaggctaaagagccatgagtcctggaggaggagaggacccctcccaaaggactggagacaaaaccctctgcttccttgggtccctccaagactccctggggcccaactgtgttgctccacccggacccatctctcccttctagacctgagcttgcccctccagctagcactaagcaacatctcgctgtggacgcctgtaaattactgagaaatgtgaaacgtgcaatcttgaaactgaggtgttagaaaacttgatctgtggtgttttgttttgttttttttcttaaaacaacagcaacgtgatcttggctgtctgtcatgtgttgaagtccatggttgggtcttgtgaagtctgaggtttaacagtttgttgtcctggagggattttcttacagcgaagacttgagttcctccaagtcccagaaccccaagaatgggcaagaaggatcaggtcagccactccctggagacacagccttctggctgggactgacttggccatgttctcagctgagccacgcggctggtagtgcagccttctgtgaccccgctgtggtaagtccagcctgcccagggctgctgagggctgcctcttgacagtgcagtcttatcgagacccaatgcctcagtctgctcatccgtaaagtggggatagtgaagatgacacccctccccaccacctctcataagcactttaggaacacacagagggtagggatagtggccctggccgtctatcctacccctttagtgaccgcccccatcccggctttctgagctgatccttgaagaagaaatcttccatttctgctctcaaaccctactgggatcaaactggaataaattgaagacagccagggggatggtgcagctgtgaagctcgggctgattccccctctgtcccagaaggttggccagagggtgtgacccagttaccctttaacccccacccttccagtcgggtgtgagggcctgaccgggcccagggcaagcagatgtcgcaagccctatttattcagtcttcactataactcttagagttgagacgctaatgttcatgactcctggccttgggatgcccaagggatttctggctcaggctgtaaaagtagctgagccatcctgcccattcctggaggtcctacaggtgaaactgcaggagctcagcatagacccagctctctgggggatggtcacctggtgatttcaatgatggcatccaggaattagctgagccaacagaccatgtggacagctttggccagagctcccgtgtggcatctgggagccacagtgacccagccacctggctcaggctagttccaaattccaaaagattggcttgtaaaccttcgtctccctctcttttacccagagacagcacatacgtgtgcacacgcatgcacacacacattcagtattttaaaagaatgttttcttggtgccattttcattttattttattttttaattcttggagggggaaataagggaataaggccaaggaagatgtatagctttagctttagcctggcaacctggagaatccacataccttgtgtattgaaccccaggaaaaggaagaggtcgaaccaaccctgcggaaggagcatggtttcaggagtttattttaagactgctgggaaggaaacaggccccattttgtatatagttgcaacttaaactttttggcttgcaaaatatttttgtaataaagatttctgggtaataatga

SEQ ID NO: 14191 - DNA, 1158 bp, Homo sapiens
gcctgctgctctggcccctggtcctgtcctcttctccagcatggtgtgtctgaagctccctggaggctccagcttggcagcgttgacagtgacactgatggtgctgagctcccgactggctttcgctggggacacccgaccacgtttcttggagctgcgtaagtctgagtgtcatttcttcaatgggacggagcgggtgcggtacctggacagatacttccataaccaggaggagttcctgcgcttcgacagcgacgtgggggagtaccgggcggtgacggagctggggcggcctgtcgccgagtcctggaacagccagaaggacctcctggagcagaagcggggccgggtggacaattactgcagacacaactacggggttggtgagagcttcacagtgcagcggcgagtccatcctcaggtgactgtgtatcctgcaaagacccagcccctgcagcaccacaacctcctggtctgctctgtgagtggtttctatccaggcagcattgaagtcaggtggttccggaacggccaggaagagaaggctggggtggtgtccacgggcctgatccagaatggagactggaccttccagaccctggtgatgctagaaacagttcctcggagtggagaggtttacacttgccaagtggagcacccaagcgtaacgagcgctctcacagtggaatggagagcacggtctgaatctgcacagagcaagatgctgagtggagtcgggggctttgtgctgggcctgctcttccttggggccgggctgttcatctacttcaggaatcagaaaggacactctggacttcagccaacaggattcctgagctgaagtgcagatgacaatttaaggaagaatcttctgccccagctttgcaggatgaaaagctttcccgcctggctgttattcttccacgagagagggctttctcaggacctagttgctactggttcagcaactgcagaaaatgtcctcccttgtggcttcctcagttcctgcccttggcctgaagtcccagcattgatggcagcgcctcatcttcaacttttgtgctcccctttgcctaaaccctatggcctcctgtgcatctgtactcaccctgtaccacaaacacattacattattaaatgtttctcaaagatggagtt

SEQ ID NO: 14192 - DNA, 1159 bp, Homo sapiens
agtgccccaggagctatgacaagcaaaggaacatacttgcctggagatagcctttgcgatatttaaatgtccgtggatacagaaatctctgcaggcaagttgctccagagcatattgcaggacaagcctgtaacgaatagttaaattcacggcatctggattcctaatccttttccgaaatggcaggtgtgagtgcctgtataaaatattctatgtttaccttcaacttcttgttctggctatgtggtatcttgatcctagcattagcaatatgggtacgagtaagcaatgactctcaagcaatttttggttctgaagatgtaggctctagctcctacgttgctgtggacatattgattgctgtaggtgccatcatcatgattctgggcttcctgggatgctgcggtgctataaaagaaagtcgctgcatgcttctgttgtttttcataggcttgcttctgatcctgctcctgcaggtggcgacaggtatcctaggagctgttttcaaatctaagtctgatcgcattgtgaatgaaactctctatgaaaacacaaagcttttgagcgccacaggggaaagtgaaaaacaattccaggaagccataattgtgtttcaagaagagtttaaatgctgcggtttggtcaatggagctgctgattggggaaataattttcaacactatcctgaattatgtgcctgtctagataagcagagaccatgccaaagctataatggaaaacaagtttacaaagagacctgtatttctttcataaaagacttcttggcaaaaaatttgattatagttattggaatatcatttggactggcagttattgagatactgggtttggtgttttctatggtcctgtattgccagatcgggaacaaatgaatctgtggatgcatcaacctatcgtcagtcaaacccctttaaaatgttgctttggctttgtaaatttaaatatgtaagtgctatataagtcaggagcagctgtctttttaaaatgtctcggctagctagaccacagatatcttctagacatattgaacacatttaagatttgagggatataagggaaaatgatatgaatgtgtatttttactcaaaataaaagtaactgtttacgttaaaaaaaaaaaaaaaaaaaaaaaaaaaaa

SEQ ID NO: 14193 - DNA, 2634 bp, Homo sapiens
acaggcacaggtgaggaactcaactcaaactcctctctctgggaaaacgcggtgcttgctcctcccggagtggccttggcagggtgttggagccctcggtctgccccgtccggtctctggggccaaggctgggtttccctcatgtatggcaagagctctactcgtgcggtgcttcttctccttggcatacagctcacagctctttggcctatagcagctgtggaaatttatacctcccgggtgctggaggctgttaatgggacagatgctcggttaaaatgcactttctccagctttgcccctgtgggtgatgctctaacagtgacctggaattttcgtcctctagacgggggacctgagcagtttgtattctactaccacatagatcccttccaacccatgagtgggcggtttaaggaccgggtgtcttgggatgggaatcctgagcggtacgatgcctccatccttctctggaaactgcagttcgacgacaatgggacatacacctgccaggtgaagaacccacctgatgttgatggggtgataggggagatccggctcagcgtcgtgcacactgtacgcttctctgagatccacttcctggctctggccattggctctgcctgtgcactgatgatcataatagtaattgtagtggtcctcttccagcattaccggaaaaagcgatgggccgaaagagctcataaagtggtggagataaaatcaaaagaagaggaaaggctcaaccaagagaaaaaggtctctgtttatttagaagacacagactaacaattttagatggaagctgagatgatttccaagaacaagaaccctagtatttcttgaagttaatggaaacttttctttggcttttccagttgtgacccgttttccaaccagttctgcagcatattagattctagacaagcaacacccctctggagccagcacagtgctcctccatatcaccagtcatacacagcctcattattaaggtcttatttaatttcagagtgtaaattttttcaagtgctcattaggttttataaacaagaagctacatttttgcccttaagacactacttacagtgttatgacttgtatacacatatattggtatcaaaagggataaaagccaatttgtctgttacatttcctttcacgtatttcttttagcagcacttctgctactaaagttaatgtgtttactctctttccttcccacattctcaattaaaaggtgagctaagcctcctcggtgtttctgattaacagtaaatcctaaattcaaactgttaaatgacatttttatttttatgtctctccttaactatgagacacatcttgttttactgaatttctttcaatattccaggtgatagatttttgttgttttgttaattaatccaagatttacaatagcacaacgctaaatcacacagtaactacaaaaggttacatagatatgaaaagattggcagaggccattgcaggatgaatcacttgtcacttttcttctgtgctgggaaaaataatcaacaatgtgggtctttcatgagcagtgacggatagtttagcttactatgtttcccccccaattcaatgatctataacaacagagcaaagtctatgctcatttgcagactggaatcattaagtaatttaataaaaaaattgtgaaacagcatattacaagtttgaaaattcagggctggtgaaaaaaatcaactctaaatgatgataattttgtacagttttatataaaactctgagaactagaagaaattattaactttttttcttttttaattctaattcacttgtttattttgggggaggaagactttggtatggagcaaagaaataccaaaactactttaaatggaataaaaccaactttattctttttttcccccatactggtagataaagcaaactttataagtgggctattgaaagaaaagttacaagcttaagatacagaagcatttgttcaaaggatagaaagcatctaaaagtttaggctcaagatcaatctttacagattgatattttcagtttttaatcgactggactgcagatgttttttcttttaacaaactggaattttcaaacagattatctgtatttaaatgtatagaccttgatatttttccaatactattttttaaaaaattgtatgatttacatatgaacctcagttctgaaattcattacatatctgtctcattctgccttttatactgtctaaaaaagcaaagttttaaagtgcaattttaaaactgtaaattacatctgaaggctatatatcctttaatcacattttatattttttcttcacaattctaacctttgaaaatattataactggatatttcttcaaacagatgtcctggatgatggtccataagaataatgaagaagtagttaaaaatgtatggacagtttttccggcaaaatttgtagcttatgtcttggctaaatagtcaaggggtaatatgggcctgttgtttagtgtctccttcctaaagagcacttttgtattgtaatttattttttattatgctttaaacactatgtaaataaacctttagtaataaagaattatcagttataaaaaaaaaaaaaaaaaaa

SEQ ID NO: 14194 - DNA, 1154 bp, Homo sapiens
acaggcacaggtgaggaactcaactcaaactcctctctctgggaaaacgcggtgcttgctcctcccggagtggccttggcagggtgttggagccctcggtctgccccgtccggtctctggggccaaggctgggtttccctcatgtatggcaagagctctactcgtgcggtgcttcttctccttggcatacagctcacagctctttggcctatagcagctgtggaaatttatacctcccgggtgctggaggctgttaatgggacagatgctcggttaaaatgcactttctccagctttgcccctgtgggtgatgctctaacagtgacctggaattttcgtcctctagacgggggacctgagcagtttgtattctactaccacatagatcccttccaacccatgagtgggcggtttaaggaccgggtgtcttgggatgggaatcctgagcggtacgatgcctccatccttctctggaaactgcagttcgacgacaatgggacatacacctgccaggtgaagaacccacctgatgttgatggggtgataggggagatccggctcagcgtcgtgcacactgtacgcttctctgagatccacttcctggctctggccattggctctgcctgtgcactgatgatcataatagtaattgtagtggtcctcttccagcattaccggaaaaagcgatgggccgaaagagctcataaagtggtggagataaaatcaaaagaagaggaaaggctcaaccaagagaaaaaggtctctgtttatttagaagacacagactaacaattttagatggtaaggttcacaaataggttgatttctttcttcagctttctgacatgtccagcccatctctaatgaggactcccagatcatcactttatggctgttaggtgtttcccatatgaaattagaggagctgggtcagggagacaaaagtcttctattagtcttatggatagctcctccttgagtgtattttgtgcaaaagattaagaagctggactctactgccattaaagctgagagaatcctaaggttatttgtggcttcggggttatatttattactactactactaataaatattcaacaagtaaataaatcttttttaaatcaaaaaaaaaaaaaaaaaaaaaaaaaaaaaa

SEQ ID NO: 14195 - DNA, 2744 bp, Homo sapiens
ctcatctttgtcagtgcacaaaatggcgccctacagcctactggtgactcggctgcagaaagctctgggtgtgcggcagtaccatgtggcctcagtcctgtgccaacgggccaaggtggcgatgagccactttgagcccaacgagtacatccattatgacctgctagagaagaacattaacattgttcgcaaacgactgaaccggccgctgacactctcggagaagattgtgtatggacacctggatgaccccgccagccaggaaattgagcgaggcaagtcgtacctgcggctgcggccggaccgtgtggccatgcaggatgcgacggcccagatggccatgctccagttcatcagcagcgggctgtccaaggtggctgtgccatccaccatccactgtgaccatctgattgaagcccaggttgggggcgagaaagacctgcgccgggccaaggacatcaaccaggaagtttataatttcctggcaactgcaggtgccaaatatggcgtgggcttctggaagcctggatctggaatcattcaccagattattctggaaaactatgcgtaccctggtgttcttctgattggcactgactcccacacccccaatggtggcggccttgggggcatctgcattggagttgggggtgccgatgctgtggatgtcatggctgggatcccctgggagctgaagtgccccaaggtgattggcgtgaagctgacgggctctctctccggttggtcctcacccaaagatgtgatcctgaaggtggcaggcatcctcacggtgaaaggtggcacaggtgcaatcgtggaataccacgggcctggtgtagactccatctcctgcactggcatggcgacaatctgcaacatgggtgcagaaattggggccaccacttccgtgttcccttacaaccacaggatgaagaagtacctgagcaagaccggccgggaagacattgccaatctagctgatgaattcaaggatcacttggtgcctgaccctggctgccattatgaccaactaattgaaattaacctcagtgagctgaagccacacatcaatgggcccttcacccctgacctggctcaccctgtggcagaagtgggcaaggtggcagagaaggaaggatggcctctggacatccgagtgggtctaattggtagctgcaccaattcaagctatgaagatatggggcgctcagcagctgtggccaagcaggcactggcccatggcctcaagtgcaagtcccagttcaccatcactccaggttccgagcagatccgcgccaccattgagcgggacggctatgcacagatcttgagggatctgggtggcattgtcctggccaatgcttgtggcccctgcattggccagtgggacaggaaggacatcaagaagggggagaagaacacaatcgtcacctcctacaacaggaacttcacgggccgcaacgacgcaaaccccgagacccatgcctttgtcacgtccccagagattgtcacagccctggccattgcgggaaccctcaagttcaacccagagaccgactacctgacgggcacggatggcaagaagttcaggctggaggctccggatgcagatgagcttcccaaaggggagtttgacccagggcaggacacctaccagcacccacccaaggacagcagcgggcagcatgtggacgtgagccccaccagccagcgcctgcagctcctggagccttttgacaagtgggatggcaaggacctggaggacctgcagatcctcatcaaggtcaaagggaagtgtaccactgaccacatctcagctgctggcccctggctcaagttccgtgggcacttggataacatctccaacaacctgctcattggtgccatcaacattgaaaacggcaaggccaactccgtgcgcaatgccgtcactcaggagtttggccccgtccctgacactgcccgctactacaagaaacatggcatcaggtgggtggtgatcggagacgagaactacggcgagggctcgagccgggagcatgcagctctggagcctcgccaccttgggggccgggccatcatcaccaagagctttgccaggatccacgagaccaacctgaagaaacagggcctgctgcctctgaccttcgctgacccggctgactacaacaagattcaccctgtggacaagctgaccattcagggcctgaaggacttcacccctggcaagcccctgaagtgcatcatcaagcaccccaacgggacccaggagaccatcctcctgaaccacaccttcaacgagacgcagattgagtggttccgcgctggcagtgccctcaacagaatgaaggaactgcaacagtgagggcagtgcctccccgccccgccgctggcgtcaagttcagctccacgtgtgccatcagtggatccgatccgtccagccatggcttcctattccaagatggtgtgaccagacatgcttcctgctccccgcttagcccacggagtgactgtggttgtggtgggggggttcttaaaataactttttagcccccgtcttcctattttgagtttggttcagatcttaagcagctccatgcaactgtatttatttttgatgacaagactcccatctaaagtttttctcctgcctgatcatttcattggtggctgaaggattctagagaaccttttgttcttgcaaggaaaacaagaatccaaaaccagtgactgttctgtgaaaa

SEQ ID NO: 14196 - DNA, 3765 bp, Homo sapiens
agcggagcggcgacggcgtcggcggcggcggcggcagcggctccggccgaggtgcgcgctgggggggagggggggccggagaggagcatgaatggagcaaaatggcggatcatgtgcagagcctggcccaactagagaatctgtgcaaacagctgtatgaaaccacagacacaaccactcgactccaggcagagaaagccttggttgaatttaccaacagccctgattgcctgagcaagtgccagctactcctcgaaagaggaagttcctcttactcccagttactggcagctacatgccttaccaagcttgtatcacgcacaaacaaccccctaccattggaacagcgaatagatattcggaactatgtgctcaactaccttgccactcggccgaagttggctactttcgtgacacaagcacttattcagttatatgccagaatcacaaaactgggctggtttgactgtcagaaggatgactatgtcttcagaaatgcaatcacagacgtcacaaggtttttacaggatagtgttgaatactgcatcattggtgtcacaattttatctcagctaaccaatgaaattaatcaagcagacaccacccatcctttaaccaagcacagaaaaatagcctcttcttttcgcgattcatcattatttgatatcttcacactttcctgcaatttactaaaacaggcttcaggaaagaatctaaacttgaatgatgaaagtcagcatggcttgctcatgcaactgctcaagctcactcataactgcctcaactttgacttcatcggcacttccactgatgagtcctcagacgacctgtgtacagtgcagattcccaccagctggagatcagccttcttagattcttcaaccttgcagctgttttttgacctgtatcattccatccctccttcattttcacctctggtattatcctgcttggtacagatcgcttcagtcagaagatccctgtttaacaatgcagagagggccaagtttctctctcatcttgttgatggtgttaaacgaatactggaaaacccacagagtttatcagacccaaacaattaccatgagttttgcagactactggcccgattgaagagtaactatcaactgggagaattggtaaaggtggaaaactaccctgaggtcatccgattgatagccaacttcacagtgaccagcctacagcactgggaatttgctccaaatagtgtgcactatcttctgagcctgtggcagcggctggcagcctctgtgccgtatgtcaaagccacagacccccacatgctggaaacttacactcctgaggtcaccaaagcctacatcacatcccggttggaatctgtgcacatcatactgagagatggcctggaagatcccctggaggatacggggctggtccagcagcagttggaccagctgtccaccattgggcgttgtgaatatgagaagacgtgtgcactcctcgtgcagttgtttgaccagtcggcccagtcgtaccaggagctgctacagagcgccagcgcaagcccaatggacattgcagtgcaggagggaaggctgacatggctggtttacattattggagcagtgatcggtggccgggtttcttttgccagcactgatgagcaagacgccatggatggtgagcttgtctgtcgggtgctccagctgatgaacctaacagattctcgtttggcccaggcgggtaatgagaagctagagttggccatgctgagcttttttgaacagtttcgtaagatctacattggggaccaagtgcagaaatcctctaagctgtaccgccgactctcagaagttctgggcttgaatgatgagaccatggtcctaagcgtcttcataggaaaaatcatcaccaacttgaagtactggggccgttgtgaaccaatcacctccaagacactacagcttctcaatgacctgtccattgggtacagtagcgtaaggaagctagtgaagcttagtgcggtacagttcatgctgaacaatcacacgagcgagcacttttcatttttgggtattaacaatcagtccaacctgacagacatgcggtgtcggactaccttctacacagcacttgggcgtctcctcatggtggatttaggagaggatgaagatcagtatgagcagttcatgctgccactcacagcagcatttgaggctgtggcccagatgtttagcaccaatagtttcaacgagcaggaggcaaagcgaactctagttggcctagtaagagacctgagagggatcgctttcgctttcaatgccaagaccagcttcatgatgctctttgaatggatatatccatcctatatgccaattctccaacgggcaattgagctctggtaccatgatccagcctgtactacacctgtactcaagttgatggctgaattggttcataataggtcccagcgactccagtttgatgtctcttcccccaatggcatcttactcttccgagaaaccagcaagatgataacaatgtatggcaatcgcatcctgacactaggagaggtcccaaaggatcaggtctatgctctgaagctcaagggcatctccatctacttctccatgctgaaggctgctctcagtgggagttacgtcaatttcggagtctttcgtctctatggagacgatgccctggacaatgctctgcagaccttcatcaagctgctcctctctattcctcacagtgatctcttggattaccccaagctcagccagtcttattattcactactggaagtcctgacccaggaccatatgaactttattgcaagcctggaacctcacgtcatcatgtatattctctcttccatttctgaaggacttactgcacttgacaccatggtatgcacaggctgctgctcctgcctggaccacattgtgacatacctcttcaagcagctgtcacgtagcaccaagaagaggaccacacccctgaaccaggagagcgaccgctttctgcacatcatgcagcagcatccagagatgatccagcagatgctgtccacggtgctgaacatcatcatctttgaagactgtaggaaccagtggtctatgtcccgaccactacttggcttgatattgcttaatgaaaagtatttttctgacctaagaaacagtattgtgaacagccagccaccggagaagcagcaggccatgcacctgtgttttgagaacctgatggaaggcatcgagcgaaatcttcttacgaaaaacagagacaggttcacccagaacctgtcagcattccgtcgagaagtcaacgactcaatgaagaattccacttatggcgtgaatagcaatgacatgatgagctgacacctccttggactctacctgtacagagcagcgtccctttggtttggcccagaggggcgaacaattgcaagggagagggcctggctgatcctggctcttttctccaggggtgtggggaaaatggcaaaggtcaactagctgcttccccagggaataggggtgtgagtacactcactagggggcagggcgctgctggttcctgggggactgggtgggaagggtggtgggaggagataagagatacaaactgagactccagcctctcctcctggggccacccaagtggggagaacccctagtgtcctgccataacctgccttgtataaacatgtacattttttcataacattttgaacaaggtttatattgactcaagtttaaaaacgaaaaaaaaaaaaaa

SEQ ID NO: 14197 - DNA, 4020 bp, Homo sapiens
atggcggaccctctgaggaggacgctgtccaggctccggggaaggcgggacaccctcccacgtgagcacgccgggggacacgggcggagcctacagcagccctcgccgtcacctgaggcgtggggtcccggggcgcgggtccccggagggcacccggagcagttgggggcgctcgggcctcggccgcgcgacgactacgacgccgactactacgaaaacctgcccggcggctcgcagtctgcgcccgagcctgagggggcggaggcggaacggcgtcccccgcctcccccagcggcgggctcctccctgggggcggagggcggccgcctggagacaggcaggctgcggacccagttgcgagaggcctattatctgctgatccaggccatgcacgacctgccccctgactcgggcgcgcggcggggcggcaggggcttggcggatcacagcttccccgcgggagcccgggctccgggccagccgccttcccgcggcgccgcgtaccgccgagcctgcccccgggacggggagcggggaggcggcggacgccctcggcagcaggtgtccccgccccggtcgcctcagagggagccgcggggaggccagctgcggactcctcggatgcggccgtcctgcagcagaagcctcgagagcctccgggtgggtgccaagccgcctcccttccagcggtggccgagcgacagctggatcaggtgcggcgcgcaccgggactgggacgagcccccgccacgtggaggcaggatggacggctggagtggggaccgcgcccgggcggctgcacccaccggcctccagcctccaggctgcaaggaccacggctgctcctcgggaagccctttcagggatccagcggggtcctctgtgatacgcagtggcaaaggagaccgccaggaaggcccctccttcctcaggccgccggcagtgacagtcaagaagctgcagaagtggatgtacaaagggcgtctgctgtccctgggaatgaagggtcgtgcccgtgggacggctcccaaagtcacaggaacgcaggcagcctccccaaatgtgggcgctttgaaagtgcgtgaaaaccgtgtcctgtcggtgcctccagaccaaagaattacgctgacagatttatttgaaaatgcctatgggtcttcaatgaagggaagagaacttgaagagctgaaggataatattgaattcagaggtcataagccacttaacagcatcactgtttcaaagaaacgcaattggctatatcagagtactctgaggcctcttaatctggaagaagaaaataagaaatgccaagatagaagtcatttatccatctcacctgtgtctctacctaaacatcagctatcacagtctttcctcaaatcatctaaagagtactgtacatatgtggtatgtaacgctacaaactcttcattatcgaaaaactgtgctttagattttaatgaggaaaatgatgcagatgatgaaggagaaatatggtacaatcccattcctgaggatgatgaccttggtatatcaagtgccttgagttttggtgaggccgactctgctgttctgaagctccctgctgtcaatttgagcatgttgtctggcagtgacctgatgaaagcagagcggcatactgaagactcactgtgctcttccgaacatgcaggtgatattcagaccacacggtcaaatggaatgaatcctatacatcctgcccattccacagaatttgtgcagcagtacaagcaaaagctaggacacaagacacaagaaggtataatggtggaggacagtcccatgttgaaatctccttttgcaggttctgggatcctggctgctacaaatagtactgaattgggaattatggaaccatcttctccaaatcctagccctgtgaaaaaaggcagttcaattaattggtcattgccagataaaataaaatctccacgaactgtgaggaaactttccatgaaaatgaaaaagttgccagaatttagccgaaagctaagcgttaagggaacattgaattatataaacagtccagataatactccttctttgtctaaatataactgccgagaagttcatcatactgatattctgccctctgggaacacaaccaccgctgctaagaggaatgttataagccgataccatcttgataccagtgtatcctcccagcagagctaccagaagaaaaactctatgagttctaagtattcctgcaaaggtggttaccttagtgatggagactcacctgaacttacaactaaagctagcaaacatggatctgaaaacaaatttggaaaaggaaaagaaataatttcaaatagttgtagcaagaatgaaatagacattgatgcttttaggcattatagcttttctgatcaacctaagtgttcacagtacatatctgggctcatgagtgtacatttctatggtgctgaggatttaaaaccacctcggatagattcaaaagacgtcttttgtgcaattcaggtagattcagtaaacaaagcaagaacagctttgctcacatgccgaacaacatttttagacatggatcacactttcaacatagaaattgaaaatgcacaacatttgaaactagtagtattcagttgggaacccactccaagaaaaaatcgagtttgttgtcatggaactgttgttcttcccaccttatttagagtgacaaagactcatcagttggctgtcaaacttgaacctagaggtcttatttatgtgaaagtgactcttatggaacagtgggagaattctcttcatggactagatataaaccaagaaccaataatatttggagttgatattcaaaaagttgtagagaaagaaaatataggactgatggtgccccttctgatacagaaatgtattatggaaattgaaaagagaggctgtcaggtagtaggcctgtatcgattatgtggttcggcagcagtcaagaaagaactgcgagaggcttttgagagagatagcaaagctgttggtctgtgtgaaaaccagtacccagatataaatgtaataacaggtgttcttaaggattatttaagagaactcccttctcctctgataacaaagcagctttatgaggctgtattagatgcaatggcaaaaagtcctttgaaaatgtcatcaaatggttgtgagaatgacccaggtgactctaagtacactgttgacctgctggattgtctgccagagattgagaaggcaaccctaaagatgttgttggatcatttgaaattggtggcttcctatcatgaagtgaataagatgacgtgccagaatttggctgtgtgctttggaccagtattattaagtcagaggcaagagccttccacccataacaacagagtctttactgattcagaagaacttgcaagtgctttggattttaaaaaacacattgaagttcttcattacttactccaactctggccagtgcagcgtttaactgtcaaaaaatcaacagacaatttattcccagagcagaagtcttctctgaattatctgaggcagaagaaagaacgacctcatatgttaaatttgagtggtactgattcatcaggagtacttaggccaaggcaaaaccgattagacagtccacttagcaatcgttatgcaggagactggagcagctgtggggaaaactactttttaaatacaaaagaaaatttaaatgatgtggattatgatgatgtcccttcagaagatagaaaaatcggagaaaattatagcaaaatggatgggccagaagtaatgattgaacagccaattcccatgtccaaagagtgtacatttcagacatatttgacaatgcagacagttgagtctacagtggatcgaaaaaacaatctcaaagatctacaagaaagtattgatactttgattggaaatctggaacgtgagctcaacaaaaacaagcttaatatgagtttttgagattgagggtttttttttgtaatgtcttaaagtttcaaatctgttttt

SEQ ID NO: 14198 - DNA, 6408 bp, Homo sapiens
gcagtcaacacatatttactgggcgcattctatgcacgagttattgaagacagctgttgtaagcatttcaggacaatgcacctcccttaacaccgagtccgggatttggggcggggtgccggaaaacgccaggtcccgccagcagagggcacggtcccggcctcgctgcagcctcgggacccaccgaggcttccaggctcccacgctcgctcccgagcgcgtccccgccctcgcgtcacgtgacgtggccgcggaacctgagctgcggggcctaagccgagctaaattcgttgcaggtggccgcggcgggtgcaaccacaaaggctaatccgaaggagtcggggaggctcgtggagtcgatgcttcctcttccaagtcaggtcggctcccgttaccttctcagcattcgccgttccggtcttcctgagcgcgtgcatgaggtctttcgcgtggggaagctccggtgaccatgtaggggacaagagtgaggaagctcctggtgcttgggacgaggtcagcgctgtcggcgcgctgctccagcgcccaccacaccctggtgcgggccgacgggccctgggccctggtgggagctccggcctccggtcaaggcctggccgggagcgccacgaattctcgcgtcgtctcgcgagagtccaagttaaagaacatggcgacgtctaatctgttaaagaataaaggttctcttcagtttgaagacaaatgggattttatgcgcccgattgttttgaagcttttacgccaggaatctgttacaaaacagcagtggtttgatctgttttcggatgtgcatgcagtctgtctttgggatgataaaggcccagcaaaaattcatcaggctttaaaagaagatattcttgagtttattaagcaagcacaggcacgagtactgagccatcaagatgatacggctttgctaaaagcatatattgttgaatggcgaaagttctttacacaatgtgatattttaccaaaacctttttgtcaactagagattactttaatgggtaaacagggcagcaataaaaaatcaaatgtggaagacagtattgttcgaaagcttatgcttgatacatggaatgagtcaatcttttcaaacataaaaaacagactccaagatagtgcaatgaagctggtacatgctgagagattgggagaagcttttgattctcagctggttattggagtaagagaatcctatgttaacctttgttctaatcctgaggataaacttcaaatttatagggacaattttgagaaggcatacttggattcaacagagagattttatagaacacaagcaccctcgtatttacaacaaaatggtgtacagaattatatgaaatatgcagatgctaaattaaaagaagaagaaaaacgagcactacgttatttagaaacaagacgagaatgtaactccgttgaagcactcatggaatgctgtgtaaatgccctggtgacatcatttaaagagactatcttagctgagtgccaaggcatgatcaagagaaatgaaactgaaaaattacatttaatgttttcattgatggacaaagttcctaatggtatagagccaatgttgaaagacttggaggaacatatcattagtgctggcctggcagatatggtagcagctgctgaaactattactactgactctgagaaatacgttgagcagttacttacactatttaatagatttagtaaactcgtcaaagaagcttttcaagatgatccacgatttcttactgcaagagataaggcgtataaagcagttgttaatgatgctaccatatttaaacttgaattacctttgaagcagaagggggtgggattaaaaactcagcctgaatcaaaatgccctgagctgcttgccaattactgtgacatgttgctaagaaaaacaccattaagcaaaaaactaacctctgaagagattgaagcaaagcttaaagaagtgctcttggtacttaagtatgtacagaacaaagatgtttttatgaggtatcataaagctcatttgacacgacgtcttatattagacatctctgccgatagtgaaattgaagaaaacatggtagagtggctaagagaagttggtatgccagcggattatgtaaacaagcttgctagaatgtttcaggacataaaagtatctgaagatttgaaccaagcttttaaggaaatgcacaaaaataataaattggcattaccagctgattcagttaatataaaaattctgaatgctggcgcctggtcaagaagttctgagaaagtctttgtctcacttcctactgaactggaggacttgataccggaagtagaagaattctacaaaaaaaatcatagtggtagaaaattacattggcatcatctcatgtcaaatggaattataacatttaagaatgaagttggtcaatatgatttggaggtaaccacgtttcagctcgctgtattgtttgcatggaaccaaagacccagagagaaaatcagctttgaaaatcttaagcttgcaactgaactccctgatgctgaacttaggaggactttatggtctttagtagctttcccaaaactcaaacggcaagttttgttgtatgaacctcaagtcaactcacccaaagactttacagaaggtaccctcttctcagtgaaccaggagttcagtttaataaaaaatgcaaaggttcagaaaaggggtaaaatcaacttgattggacgtttgcagctcactacagaaaggatgagagaagaagagaatgaaggaatagttcaactacgaatactaagaacccaggaagctatcatacaaataatgaaaatgagaaagaaaattagtaatgctcagctgcagactgaattagtagaaattttgaaaaacatgttcttgccacaaaagaaaatgataaaagagcaaatagagtggctaatagagcacaaatacatcagaagagatgaatctgatatcaacactttcatatatatggcataattttgaatatcatggacaatatttagaacccaaattttggagtgcttgggcagaaagttgtaaagtttgtgctggagaaaggtttatttggactttgattacataaatattaaaatctctgccttaccttacaaaaacaactatattttgccaatcacattagttagcatgatggcattcccttcatgttgcacactctttgacagcatgctgttttgtggagaaacttgcattcatgaagagcccattatcaacttttaaaagtgaatttgatttgtacccaccaggagaaatacagttgggaagggtgagggtggggttcttgttgcttttttctcttttttcctctcttaaaaaatgtacttgcacaaggaaggatcttcagatattcatgcactgaaaaatgctgttatcttttgtttttaaaaaatgcaattaaaactagaaatagcactcttggtttcttttgatgaaaagagtgagctggtcaatgcaacattgggaaacggcagatgtaggtgagaagttaagtatttaatagtatcaaattgttcaaacattgctcagtataataactggattttaatggtgacctaaaaatggtattaaatattttcaactttcaaatgttggttttctttaagcaggagactgctattttagttgttgttaaatgatgaggagtttttttttttttaaatatggctggaaagcttgttttgaaaaatgaagcttatattaattgttgcttcaatagtttaaaaaatttatggagataggtaggtcattatgattgcagagccaaaatagcaaaacaaacatattaagtgtgtttactaaacatattgtgtgtttactaacacacttaatgtttatatacctaatatttattatgccatatctgaatttattaaaaacaacacagaaatctcctgctctgatatagttatgtaactgatctcttaatctgtagcatagaagtattttggtattttaaggtctcatgattagggatttgtagcctcaggtttgaatcagtcacctaggggtaagagaaaaaccacaacataagacctgaaaaacagaagcaaaattgttgcactcttaatacgagcagtaaacttgccaaatatatgtacatatatatttatatattttaaaaataaacattttttaaatcgtcagaaggcaacatttaccatgttcctttcagtctatccaaagtagcaacttaactagttgctggcaactgaatacccagagtagtggaaattttaggacttgaggacgtgaacaacttgaaagagaaaattgattccccttgaggaaagaatggctcaacgtggatttttattcattgtggtgcacgtttcaaattttcttgcaaattattttatatcttatttgatgttaagtaatatttttaaagtatggtttttgaagatagtaggaaatggagtacagaaaggcatacagtattatgttacagtggagtgctttcaagagcatttcgtaggatctgtccccatccgaagaggctttgtgaactgcctgctgaatggaaggaaagcaactttaaaacatttagagttttgctgagtatagccaaatgcctgttctgaaacttataggaaattggaattttgtttaaaattttacactttaaggtagcaaatgtcaattattagaccgagcatattgtgaagaattaaactaaaattaatacgtacagttttctctaattaggtgactgttcataatgggtatatttggaatttagaagaaataattttgtagtaattgtggcccttatgtttaacagataattcagcattggcgtatttgcttgtcccaatacaagaatgccaaaggaggaaacaggaaaaattgccgtccattttaaaaatttaggtttgttgttttaaaccataattgttctcagaacttttttggaacttctaattttgggtcatttaatttaagaatgagagtcatgatgttttgatttatgaaggtgaatttaatgcaaaagtgggtaacactacattcatagcaaagttttttattaaattttataaatttttaatagccaattatgtcctaattgtattttggggaatgaacagcagcaaatactgtaaatgtacagttttcttttttttttttttttggttatgtatacaaaagttttaactactttttggtgtttatgaaaatcatttagttgacaaggtgcctatgccattgttaaattttctttaagtaatttaacaacagatttgctaatttaaaaaaaaatgaaaaaaaaaatcttaccagcagtttgtaaaggtctggaatcacagttggcatcctttattcaggtctcttctctccagcgtacacttaaaattggtgccgagcagggatataacctgcagttaagtgaaaagaaaatccagcctccccctccaaaaaaaaaaaaaaaatttaatttttaaaaattagtggtatggcaataagacacttcagaggctatcttaacctctgaatacccatcttctagtttaaagacagagacatcccatctggaaaatgttaacttgtgttgccatctcgttgccggagtaagtagacataagacagagtttaagaagtaaaaatatagaaaaattttgatggtcacaatgagataaatattagaatattactattccaatgattaaatgaggatcttgaaataaattctgaagtcttccaatttttacatttattggaggggtccctgagttctgtcaacttttttatttaagtctcttgctcttattttgtgcataaatgttaaaccttccaaaaatgaaatgttagctttctttcttttactttttattaaatttaatagaaaatatgacctgagtagttaaaaagtattttgcattatttgcagtaagatgtctctagcactgctcaaagggcaaattttaaaacttcagtctgggtgaaagatttgctagttttacagaaagatttgctatcttaaactcaagctggtttttctgttctcatgtaagtgactgggatgctgtcttatgaattcttccaaggtcatgtttgtgaaataaacattacatgagagctttcctgtcatctacactatatgttgtctggagtgttgaacaaatttattttagtttctaagttgtaatctatcctcatatggtctatacgattttgaatgtgtgccactacatactgagatgataatgctgtacaattttaagtggtagcagtttctgtatgcagtaggctgaaatattttgatgaactgcttaatttttggattttattttttaagttgtataatttattttcttgcaaaataaaaatgtaatataaaaaaaaataaaaaaaaaaaaaaa

SEQ ID NO: 14199 - DNA, 4307 bp, Homo sapiens
cctcagcctggggagctgaaggggagacgcgtctgggtggggctgctcggagcccgggcctggtggcccctggggctcccgggcgggcagggtagggcagagtagagcgggcttcaacatgatggcggccgaggccggcagtgaggagggcggcccggtaacagccggagctggaggaggcggcgcggcagcgggctccagtgcctatcccgcagtgtgtcgggtgaagatacccgcggccctgcctgtggcagccgccccctatcctgggctggtggagaccggagtggctggaactctgggtggcggagccgctttggggtcagagttcctaggagccgggtctgtggcaggggcactggggggagctggactgacagggggaggtactgctgctggcgtagctggtgctgctgctggcgtggccggtgctgctgttgctggacctagtggagacatggctctcaccaaactgcccacttcgttgcttgctgagactctcgggccaggcggcggttttccccctctgccccctcccccttacctgccccctttgggggcgggcctcgggacagtggacgaaggtgactctctggatggaccagaatacgaggaggaagaggtggccataccgttgaccgctcctccaactaaccagtggtatcacggaaaacttgacagaacgatagcagaagaacgcctcaggcaggcagggaagtctggcagttatcttataagagagagtgatcggaggccagggtcctttgtactttcatttcttagccagatgaatgttgtcaaccattttaggattattgctatgtgtggagattactacattggtggaagacgtttttcttcactgtcagacctaataggttattacagtcatgtttcttgtttgcttaaaggagaaaaattactttacccagttgcaccaccagagccagtagaagatagaaggcgtgtacgagctattctaccttacacaaaagtaccagacactgatgaaataagtttcttaaaaggagatatgttcattgttcataatgaattagaagatggatggatgtgggttacaaatttaagaacagatgaacaaggccttattgttgaagacctagtagaagaggtgggccgggaagaagatccacatgaaggaaaaatatggttccatgggaagatttccaaacaggaagcttataatttactaatgacagttggtcaagtctgcagttttcttgtgaggccctcagataatactcctggcgattattcactttatttccggaccaatgaaaatattcagcgatttaaaatatgtccaacgccaaacaatcagtttatgatgggaggccggtattataacagcattggggacatcatagatcactatcgaaaagaacagattgttgaaggatattatcttaaggaacctgtaccaatgcaggatcaagaacaagtactcaatgacacagtggatggcaaggaaatctataataccatccgtcgtaaaacaaaggatgccttttataaaaacattgttaagaaaggttatcttctgaaaaagggcaaaggaaaacgttggaaaaatttatattttatcttagagggtagtgatgcccaacttatttattttgaaagcgaaaaacgagctaccaaaccaaaaggattaatagatctcagtgtatgttctgtctatgtcgttcatgatagtctctttggcaggccaaactgttttcagatagtagttcagcactttagtgaagaacattacatcttttactttgcaggagaaactccagaacaagcagaggattggatgaaaggtctgcaggcattttgcaatttacggaaaagtagtccagggacatccaataaacgccttcgtcaggtcagcagccttgttttacatattgaagaagcccataaactcccagtaaaacattttactaatccatattgtaacatctacctgaatagtgtccaagtagcaaaaactcatgcaagggaagggcaaaacccagtatggtcagaagagtttgtctttgatgatcttcctcctgacatcaatagatttgaaataactcttagtaataaaacaaagaaaagcaaagatcctgatatcttatttatgcgctgccagttgagccgattacagaaagggcatgccacagatgaatggtttctgctcagctcccatataccattaaaaggtattgaaccagggtccctgcgtgttcgagcacgatactctatggaaaaaatcatgccagaagaagagtacagtgaatttaaagagcttatactgcaaaaggaacttcatgtagtctatgctttatcacatgtatgtggacaagaccgaacactactggccagcatcctactgaggatttttcttcacgaaaagcttgaatcgttgttgttatgcacactaaatgacagagaaataagcatggaagatgaagccactaccctatttcgagccacaacacttgcaagcaccttgatggagcagtatatgaaagccactgctacacagtttgttcatcatgctttgaaagactctattttaaagataatggaaagcaagcagtcttgtgagttaagtccatcaaagttagaaaaaaatgaagatgtgaacactaatttaacacacctattgaacatactttcagagcttgtggagaaaatattcatggcttcagaaatacttccaccgacattgagatatatttatgggtgtttacagaaatctgttcagcataagtggcctacaaataccaccatgagaacaagagttgttagtggttttgtttttcttcgactcatctgtcctgccatcctgaatccacggatgttcaatatcatctcagattctccatctcctattgctgcaagaacactgatattagtggctaaatctgtgcagaacttagcaaatcttgtggaatttggagctaaggagccctacatggaaggtgtcaatccattcatcaaaagcaacaaacatcgtatgatcatgtttttagatgaacttgggaatgtacctgaacttccggacactacagagcattctagaacggacctgtcccgtgatttagcagcattgcatgagatttgcgtggctcattcagatgaacttcgaacgctcagtaatgagcgtggtgcacagcagcacgtattgaaaaagcttctggctataacagaactgcttcaacaaaaacaaaaccagtatacaaaaaccaatgatgtcaggtagcagccttcgccccagtgttctgcatggattcagcatgtccaacatggtaattcacttcagtttaatgtctcctttgctcttgccaaaaaatagcacacttttccacattccagtgatgtgtgagctatgcaaacaaaatccaagattctgctggtgaataactatgccagcaaccttgtaagctatctgtgcaggatatttgcactatttccacatggaatcaatctttaacaacctctgagccttggtgtacagaccacctttcacaaaacgaaatgctatgactgtatcttgatatctcgaactttcaaaatatattttcagtacacccagttgccaaagttttgctgtctcttagagaaagaactatgaaatcaactgacaagaaacacattcttattgacaattgtgtataactggattgcagactgttcttactgtaactacttcctgattaggaatatgaccatttgactgttcaatgattatttgtatttacagtttccagagtttgtcattataataggaacaatctttgctgtatacttttaaaaaatactctgctatttctcttgctggaactgttgaaagaaaatatatagaatgatctattgctcatcagctttattttttaaacatacgacttattttgttgaaattgtcaaagactgtatttagatctcataatgctttgttaaatgtttacaagtaaatagtttgaattcagtaaatattattggttgttgtattgatcaatgcatgttacccattcaaccattttatagactaccaatttcttttatgttaactagaatgcttttgttaaaagttatttgttcattatttgtgctacccctttgattatgcagacaacctcatcagctgcctaacttatccatctttgaacttctgactacttgttgtatctgctggatatttagttcaactgtatagttttatttacttctgtatgtgtatttttgtgaagtattcacaaaggttaagttaaaataaaaccaagggatatcttgcaaaaaaaaaaaaa

SEQ ID NO: 14200 - DNA, 3757 bp, Homo sapiens
ggaagaggtggccataccgttgaccgctcctccaactaaccagtaagttaagactgctgttcaggaatttgggaagctggctccagaaaagaagtggaaatgaaggggtggtatcacggaaaacttgacagaacgatagcagaagaacgcctcaggcaggcagggaagtctggcagttatcttataagagagagtgatcggaggccagggtcctttgtactttcatttcttagccagatgaatgttgtcaaccattttaggattattgctatgtgtggagattactacattggtggaagacgtttttcttcactgtcagacctaataggttattacagtcatgtttcttgtttgcttaaaggagaaaaattactttacccagttgcaccaccagagccagtagaagatagaaggcgtgtacgagctattctaccttacacaaaagtaccagacactgatgaaataagtttcttaaaaggagatatgttcattgttcataatgaattagaagatggatggatgtgggttacaaatttaagaacagatgaacaaggccttattgttgaagacctagtagaagaggtgggccgggaagaagatccacatgaaggaaaaatatggttccatgggaagatttccaaacaggaagcttataatttactaatgacagttggtcaagtctgcagttttcttgtgaggccctcagataatactcctggcgattattcactttatttccggaccaatgaaaatattcagcgatttaaaatatgtccaacgccaaacaatcagtttatgatgggaggccggtattataacagcattggggacatcatagatcactatcgaaaagaacagattgttgaaggatattatcttaaggaacctgtaccaatgcaggatcaagaacaagtactcaatgacacagtggatggcaaggaaatctataataccatccgtcgtaaaacaaaggatgccttttataaaaacattgttaagaaaggttatcttctgaaaaagggcaaaggaaaacgttggaaaaatttatattttatcttagagggtagtgatgcccaacttatttattttgaaagcgaaaaacgagctaccaaaccaaaaggattaatagatctcagtgtatgttctgtctatgtcgttcatgatagtctctttggcaggccaaactgttttcagatagtagttcagcactttagtgaagaacattacatcttttactttgcaggagaaactccagaacaagcagaggattggatgaaaggtctgcaggcattttgcaatttacggaaaagtagtccagggacatccaataaacgccttcgtcaggtcagcagccttgttttacatattgaagaagcccataaactcccagtaaaacattttactaatccatattgtaacatctacctgaatagtgtccaagtagcaaaaactcatgcaagggaagggcaaaacccagtatggtcagaagagtttgtctttgatgatcttcctcctgacatcaatagatttgaaataactcttagtaataaaacaaagaaaagcaaagatcctgatatcttatttatgcgctgccagttgagccgattacagaaagggcatgccacagatgaatggtttctgctcagctcccatataccattaaaaggtattgaaccagggtccctgcgtgttcgagcacgatactctatggaaaaaatcatgccagaagaagagtacagtgaatttaaagagcttatactgcaaaaggaacttcatgtagtctatgctttatcacatgtatgtggacaagaccgaacactactggccagcatcctactgaggatttttcttcacgaaaagcttgaatcgttgttgttatgcacactaaatgacagagaaataagcatggaagatgaagccactaccctatttcgagccacaacacttgcaagcaccttgatggagcagtatatgaaagccactgctacacagtttgttcatcatgctttgaaagactctattttaaagataatggaaagcaagcagtcttgtgagttaagtccatcaaagttagaaaaaaatgaagatgtgaacactaatttaacacacctattgaacatactttcagagcttgtggagaaaatattcatggcttcagaaatacttccaccgacattgagatatatttatgggtgtttacagaaatctgttcagcataagtggcctacaaataccaccatgagaacaagagttgttagtggttttgtttttcttcgactcatctgtcctgccatcctgaatccacggatgttcaatatcatctcagattctccatctcctattgctgcaagaacactgatattagtggctaaatctgtgcagaacttagcaaatcttgtggaatttggagctaaggagccctacatggaaggtgtcaatccattcatcaaaagcaacaaacatcgtatgatcatgtttttagatgaacttgggaatgtacctgaacttccggacactacagagcattctagaacggacctgtcccgtgatttagcagcattgcatgagatttgcgtggctcattcagatgaacttcgaacgctcagtaatgagcgtggtgcacagcagcacgtattgaaaaagcttctggctataacagaactgcttcaacaaaaacaaaaccagtatacaaaaaccaatgatgtcaggtagcagccttcgccccagtgttctgcatggattcagcatgtccaacatggtaattcacttcagtttaatgtctcctttgctcttgccaaaaaatagcacacttttccacattccagtgatgtgtgagctatgcaaacaaaatccaagattctgctggtgaataactatgccagcaaccttgtaagctatctgtgcaggatatttgcactatttccacatggaatcaatctttaacaacctctgagccttggtgtacagaccacctttcacaaaacgaaatgctatgactgtatcttgatatctcgaactttcaaaatatattttcagtacacccagttgccaaagttttgctgtctcttagagaaagaactatgaaatcaactgacaagaaacacattcttattgacaattgtgtataactggattgcagactgttcttactgtaactacttcctgattaggaatatgaccatttgactgttcaatgattatttgtatttacagtttccagagtttgtcattataataggaacaatctttgctgtatacttttaaaaaatactctgctatttctcttgctggaactgttgaaagaaaatatatagaatgatctattgctcatcagctttattttttaaacatacgacttattttgttgaaattgtcaaagactgtatttagatctcataatgctttgttaaatgtttacaagtaaatagtttgaattcagtaaatattattggttgttgtattgatcaatgcatgttacccattcaaccattttatagactaccaatttcttttatgttaactagaatgcttttgttaaaagttatttgttcattatttgtgctacccctttgattatgcagacaacctcatcagctgcctaacttatccatctttgaacttctgactacttgttgtatctgctggatatttagttcaactgtatagttttatttacttctgtatgtgtatttttgtgaagtattcacaaaggttaagttaaaataaaaccaagggatatcttgcaaaaaaaaaaaaa

SEQ ID NO: 14201 - DNA, 1951 bp, Homo sapiens
gagcccggagcaggccgggctcaagaaagaggaaagttgaggacgccccacctcggagaggcggcgcccctgagtaggccaggagcctctcttgcaacttctgccaccgcgggccaccgcggccgcctgatcccgcagaggaaggtcgcggccgtggagcgatgacccgcggcggtccgggcgggcgcccggggctgccacagccgccgccgcttctgctgctgctgctgctgctgccgctgttgttagtcaccgcggagccgccgaaacctgcaggagtctactatgcaactgcatactggatgcctgctgaaaagacagtacaagtcaaaaatgtaatggacaagaatggggacgcctatggcttttacaataactctgtgaaaaccacaggctggggcatcctggagatcagagctggctatggctctcaaaccctgagcaatgagatcatcatgtttgtggctggctttttggagggttacctcactgccccacacatgaatgaccactacacaaacctctacccacagctgatcacgaaaccttccatcatggataaagtgcaggattttatggagaagcaagataagtggacccggaaaaatatcaaagaatacaagactgattcattttggagacatacaggctatgtgatggcacaaatagatggcctctatgtaggagcaaagaagagggctatattagaagggacaaagccaatgaccctgttccagattcagttcctgaatagtgttggagatctattggatctgattccctcactctctcccacaaaaaacggcagcctaaaggtttttaagagatgggacatgggacattgctccgctcttatcaaggttcttcctggatttgagaacatcctttttgctcactcaagctggtacacgtatgcagccatgctcaggatatataaacactgggacttcaacatcatagataaagataccagcagtagtcgcctctctttcagcagttacccagggtttttggagtctctggatgatttttacattcttagcagtggattgatattgctgcagaccacaaacagtgtgtttaataaaaccctgctaaagcaggtaatacccgagactctcctgtcctggcaaagagtccgtgtggccaatatgatggcagatagtggcaagaggtgggcagacatcttttcaaaatacaactctggcacctataacaatcaatacatggttctggacctgaagaaagtaaagctgaaccacagtcttgacaaaggcactctgtacattgtggagcaaattcctacatatgtagaatattctgaacaaactgatgttctacggaaaggatattggccctcctacaatgttcctttccatgaaaaaatctacaactggagtggctatccactgttagttcagaagctgggcttggactactcttatgatttagctccacgagccaaaattttccggcgtgaccaagggaaagtgactgatacggcatccatgaaatatatcatgcgatacaacaattataagaaggatccttacagtagaggtgacccctgtaataccatctgctgccgtgaggacctgaactcacctaacccaagtcctggaggttgttatgacacaaaggtggcagatatctacctagcatctcagtacacatcctatgccataagtggtcccacagtacaaggtggcctccctgtttttcgctgggaccgtttcaacaaaactctacatcagggcatgccagaggtctacaactttgattttattaccatgaaaccaattttgaaacttgatataaaatgaaggagggagatgacggactagaagactgtaaataagataccaaaggcactattttagctatgtttttcccatcagaattatgcaataaaatatattaatttgtcactttcaaaaaaaaaaaaaaaaaa

SEQ ID NO: 14202 - DNA, 11137 bp, Homo sapiens
tgctgcttgcagctttttagatcaggactgcaatggagatacaattaaatcctaaaggtactttagaagcagggggtgttgtaatgtcttttctagataatggtgtgacactatgaagagatatcaagtttaattcttacaaattagaaagcatcatctgactaaactgagtgtctctggggcttaatcagcttgtatcactagtggggttttgtcatgcaaactgcactcctttaaatcataaggatgtgctggaaggctgctttcactttttagaattaaacttttcccccagtctcgtgagtattgcaactctcttaatgctttgaggagcttcaaagcatccttaagaaagggaaactaacttttgagaatattatggaaaaactgcgaatcaagtattccgaaatgtacaccatagtccctgcagagattgaatcccaggtggaagaatgcagaaaagctttagaagacatagatgagaagattagcaatgaagtcttaaaaagctcaccatcatatgcaatgaggagaaaaatagaagaaattaacaatgggcttcataatgttgaaaagatgttgcagcagaaaagcaaaaatattgagaaagctcaagaaattcaaaagaaaatgtgggacgagttagatctatggcattccaaactaaatgagctggattctgaagttcaggacattgttgaacaggacccaggacaggctcaagaatggatggataacttgatgattcctttccagcagtatcagcaagtatcacagagagcagagtgtagaacctcacagttgaataaggccacagttaagatggaggaatatagtgaccttctgaagagcactgaggcttggatagaaaataccagtcatttgctggccaatcctgctgactatgactctttgaggacactgagtcaccatgctagcactgtgcaggattccaagtgttttagaagtggaccaagaccaaatatttatgtttcttattatgttacagttatacagatggctttggaagattcagaacagaagcacaatcttttacattcaatctttatggatctagaagacctgtcaataatttttgaaacagatgaattaacccaatccatacaagagttaagtaatcaagtaacagctttacaacaaaaaataatggaaagccttccacagattcagcgaatggctgatgatgtggttgctattgaatctgaagtaaaatcaatggaaaaaagagtttcaaaaatcaaaactatcctattatcaaaagaaatatttgatttttcacctgaagaacatctcaaacatggggaggtcatacttgaaaatatacgtcccatgaagaaaaccattgctgagatagtgtcttaccaagtggaactgaggttgccccaaacaggaatgaaacctctgcctgtgtttcagcggacaaatcagcttttacaagatataaaactattggaaaatgtgactcaagaacaaaatgagttattaaaggtagtcataaaacagaccaatgaatgggatgaagaaatagaaaatttgaaacagatcttaaataattattcagctcagttctcccttgaacatatgtcaccagaccaagctgacaagctgccacaactacagggagaaatcgaacgtatggagaaacagattctgagtttgaaccagagaaaagaagacctgttggtggacttgaaggccaccgtactaaaccttcaccagcatttgaagcaagaacaagaaggagtagaaagagataggctgccagctgtaacatcagaggaaggtggagtggcagagagggatgcttctgagcggaagttgaacagaagaggctccatgtcttacctggcagcagtcgaggaagaggtggaagaaagttccgtgaagagcgataatggagatgagaaggcagagccatcgcctcagtcttggtcttcactttggaagcatgacaaggacatggaagaagacagagcttcctcatcctctggaacaattgttcaggaagcatatgggaaaataagcacctctgataattccatggcacaaatcctcacaccagactcactaaacactgagcaaggcccagaatgttccctaaggcccaaccaaacagaagagggcaccacacctcctattgaggctgacactctggactcttctgacgcgcaaggaggtttggagcccagggtggagaaaactaggccggagcccacagaagtcctgcatgcctgcaagacccaggtggccgagctggagctgtggctgcaacaagccaacgtggcagttgagccggaaacattaaacgcagacatgcagcaggtgctggaacagcagctggtagggtgccaggctatgctaacagagattgagcacaaggttgcctttctgttagagacttgcaaagatcagggcctgggagataatggagccactcaacatgaggctgaagcgctttccctgaaactgaaaacagtgaagtgcaatttagaaaaagtccagatgatgcttcaggagaagcacagtgaagatcagcatcctaccattctaaagaaatcctcagagccagagcatcaagaagctctccaaccagttaacctttctgaattggaatccattgtaactgaaaggccacaattcagcagacaaaaagatttccagcagcaacaggttctggagttaaaaccaatggaacagaaagatttcatcaaattcatagaatttaatgctaagaaaatgtggccccagtattgccaacatgataacgatacaactcaggaatcatctgcaagcaaccaggcatccagccctgaaaatgacgttccagactcgatcttgtcaccccagggccaaaatggagataagtggcaatatctgcatcatgaactctcatcaaaaataaagctcccactccctcagcttgtggagcctcaggtttccacaaatatgggtattctacccagcgtgactatgtataactttagatacccaacaactgaagaactgaaaacctataccacccaacttgaagacctgcgccaagaagcaagtaaccttcagacacaggaaaatatgacagaagaagcatatatcaatttggataaaaaattgtttgaactattcctgaccctcagtcagtgcctcagcagtgtggaggagatgctggagatgcccagactttacagggaggatggttctggccagcaggtgcactacgagacgctggctcttgagttgaagaaactttatttagcgctaagtgacaagaagggtgatcttttgaaagccatgacttggcctggcgagaacaccaacttgctccttgaatgttttgacaaccttcaagtctgcctggagcacactcaggctgcagctgtctgtagaagcaagtccctgaaagctggcctcgattacaaccgcagttaccagaatgaaataaagagattatatcatcagctcattaagagtaagacatctttacaacagtctttgaatgaaatcagtgggcagagtgttgctgaacagcttcagaaagcagatgcatatacagtggagctggagaacgccgagagccgagtggccaaactaagagatgaaggggagaggcttcatttaccttatgctttactccaggaggtttacaaattagaggatgtacttgacagtatgtggggaatgctaagagccaggtacacagaactcagcagccctttcgtcactgagagccagcaagatgctttgttgcaaggcatggtggaactggtgaagattgggaaggaaaagcttgctcatggccacttaaaacaaaccaaaagtaaagtggcgttacaggctcaaatagaaaatcacaaggtttttttccagaagcttgttgctgacatgttgttgatccaagcatactctgccaaaatacttccttctttattgcaaaacagagagacattttgggcagaacaagtaacagaagttaaaatactagaagaaaagtcacgccaatgtggtatgaagctgcagagtttgttgcagaaatgggaagaatttgatgaaaactatgcatctcttgaaaaggacctggaaattcttatatctacattgccctctgtgagtttggtggaagaaacagaggaaagattagtggaaaggatttcattttaccagcaaataaaaagaaacattggtggaaaacacgcccggctttaccaaactctgaacgaaggcaaacagttggtggcgtctgtgagctgtcctgaattagagggccagatcgcaaaactggaagagcagtggttgtccctgaacaagaaaattgaccatgagctccacaggctgcaagctcttctcaagcatctgctcagttataacagagattcggatcagttaaccaagtggttggaatcttcccagcatactctgaattactggaaagaacagtccctcaatgtgtctcaggacttggatacaatcagaagcaacatcaacaatttttttgagttttcaaaagaagttgatgaaaaatcctccttgaagactgccgttatcagtatcgggaaccagcttcttcacctgaaagaaactgatacagctacactgagagcttctttagcacagtttgaacaaaaatggacaatgctcataactcaacttccagatattcaagaaaaacttcaccagcttcaaatggagaaattgccgtctcgtaaagcaatcacagaaatgattagctggatgaacaatgtggagcatcaaacttcagatgaagactccgtgcattcaccaagttctgcatctcaagttaaacatcttcttcagaagcacaaggagtttagaatggaaatggactataaacagtggatagttgacttcgttaaccagtcattacttcagctaagcacctgtgatgtagaaagcaagcgctatgaaagaacggagtttgcagagcacctgggggagatgaaccgccagtggcaccgtgtacatggaatgctgaatagaaagatacaacatttagaacaacttctagaaagtatcactgagagtgaaaataaaatacagatcttgaacaactggctggaagcacaagaagagagactgaaaactttacaaaaacctgaaagtgtgatctcagtgcagaagctgctcctggactgtcaggatatagaaaatcaacttgcaattaaatccaaagcactagatgagttgaaacaaagttatctgactttggagagtggggcagtgccattgttagaagatacagcatcccgaattgatgagttatttcaaaagagaagcagtgttctcactcaggtcaatcagctcaaaacctccatgcagtcagttttacaggagtggaagatttatgatcaactctatgatgaagtgaatatgatgacaatccgattctggtactgcatggaacacagcaagcctgtggtgttatcattggagaccttgagatgccaggtggagaaccttcagtctctgcaagatgaagctgagagcagtgaagggagttgggagaaactccaggaggttatcggcaaactcaaaggtctctgcccctctgttgctgaaataatcgaagagaaatgccaaaatactcataaaaggtggactcaggtgaaccaagccattgcagaccagttgcagaaggcccagagtctgctccagctctggaaggcctatagcaatgctcatggtgaagctgccgcaaggctgaagcagcaggaagcaaagtttcaacagctcgcaaacatcagcatgtctggaaacaacctggcagagatcctgcccccagccctgcaggacataaaggagctgcagcatgatgtgcagaaaacaaaagaagcctttctccaaaattccagtgtcctggatcgactcccacaacccgcagagtccagcacccacatgctcctcccgggccccctgcactctctccagagggctgcttatttggaaaagatgctgcttgtgaaagcaaatgaatttgagtttgttctctcacagtttaaggattttggagtccggctggaatctttaaaaggtcttattatgcatgaagaagagaatttggatagacttcaccaacaggaaaaagaaaatcctgactcattcctgaatcatgtgctggcactgacagcccaatcacctgatattgaacatttgaatgaagtgagcctcaagctcccacttagtgacgtagctgtgaagacgttacaaaatatgaaccggcaatggattcgggccacggccacggcactggagcgctgcagtgagcttcagggaattggattgaatgaaaagtttctttattgctgtgaaaagtggatccaacttttggagaagatagaagaagcactcaaagtggatgtggctaacagccttcctgagctcctggagcagcagaaaacctataagatgttagaagctgaagtttctataaaccagacaattgctgattcctatgtcacccagtccttacaactcctggacacaacagaaatagagaacagaccagaatttattacagaattctcaaagctgacggatcggtggcagaatgctgtccagggtgttcggcagaggaagggtgacgttgatgggctggtgaggcagtggcaagatttcactacttctgtggagaacttgtttcgcttcctcactgacaccagccacctgctatctgcagtgaagggccaggagcgcttcagcctctaccaaaccagaagtctgatccatgagctgaagaataaagaaattcattttcaaaggaggcgaactacctgtgccctaaccttggaagctggagaaaagttactgctcacaactgacctgaaaactaaagagtctgtgggtaggagaatcagtcaacttcaggacagctggaaagacatggagccccagctggcagagatgattaagcagttccagagcactgtagagacctgggaccagtgtgaaaagaaaatcaaggagttgaaaagcaggctgcaagttttaaaggcacaaagtgaagatcctcttccagagcttcacgaggacctccataacgaaaaagagctgattaaggaactagaacagtctttggctagctggactcagaacttgaaagaacttcaaactatgaaggcggacttaacccggcacgttctcgtggaagatgtgatggttttgaaggagcaaatagagcatttgcacagacaatgggaggacctctgcttaagggtggccatacgtaaacaggagattgaagacagactcaatacatgggttgtattcaatgaaaaaaataaagagttgtgtgcctggctggtgcagatggaaaacaaagttctacagacagcggacattagtattgaagaaatgattgaaaagttacagaaggactgcatggaagaaataaacttgtttagtgaaaacaagttacagttaaagcagatgggtgaccagttgatcaaggccagcaacaaatcaagagcagctgagatcgatgacaagctcaacaaaattaacgatcgttggcaacatctttttgatgtcatcggatcaagggtgaagaagctgaaggagacctttgcttttattcagcagttggacaaaaacatgagcaaccttcgcacctggttggctcgaattgagtctgagctttccaagcctgttgtttatgatgtctgcgatgatcaagagatccagaagaggctcgctgagcagcaggatctacagcgagatattgaacaacacagcgcaggggtggagtccgtgtttaacatctgtgacgtcctactgcacgactccgatgcctgtgcaaatgagaccgagtgtgactcgatccagcagaccaccaggagcctggacagacgctggaggaacatttgtgccatgtccatggagcggcgcatgaaaatcgaggagacgtggcgcctgtggcagaagtttttagacgactattctcgctttgaggactggctcaagtcagctgagaggacggcagcctgcccaaattcctcagaggtgttgtacacgagtgccaaagaggaactgaagaggtttgaggcctttcagcggcagattcatgagcggctcactcagctggagctcatcaacaagcagtaccggcggctggcccgggagaaccgcacagacacggccagcaggctgaagcagatggtccacgagggcaaccagcgctgggacaaccttcagaggcgggtcacagccgtcctgcggagactcaggcatttcaccaaccagagggaagaatttgagggcaccagggagagcattctggtgtggctcacagagatggacctgcagctgaccaacgtggagcacttctcagagagtgacgccgatgacaagatgcgccaactgaatggcttccaacaggaaattacattaaataccaacaagattgatcagctcattgtgtttggggagcagctgattcagaagagcgagcccctggatgctgtgctgattgaggatgagctggaggaactccaccgctactgccaggaggtgtttggaagggtctcccggttccaccggcggctcacctcctgcactccgggcttggaagatgaaaaggaggcctctgagaatgaaacagacatggaagaccccagagaaatccagactgattcttggcgtaaacggggagagagcgaggaaccgtcatctcctcagtccctgtgtcatctagtggccccagggcacgagcggtctggctgcgagacccctgtcagcgtggactccatccccctggagtgggaccacacaggcgacgtggggggctcctcctctcacgaagaggacgaggagggcccatactacagcgcactgtcaggtaaatccatttcggatggccactcgtggcatgttcccgacagcccttcctgtcccgagcatcactacaagcaaatggaaggtgacaggaatgttccacctgttccccctgcgtccagcaccccttataaaccaccctatggaaagctactattacctccaggcacggatggtggcaaagaaggcccgcgagtcctgaatggcaacccacagcaggaagacgggggactggccggtatcacagagcagcagtcaggtgccttcgacagatgggagatgattcaagcacaggagcttcacaataagctcaaaataaaacaaaatttgcaacagctgaactctgatatcagcgccatcactacttggctgaaaaaaactgaagcagagctggaaatgttaaagatggcaaagcctccctctgatatccaggaaatagaactgagagtgaagagactgcaggagatactgaaagcctttgacacttacaaggcattagtggtctctgtcaacgtgagcagcaaggaatttctgcaaaccgagagccccgaatccacagagctccaaagtagactccgccagctgagcctgctctgggaagcagcacagggcgcagtggacagctggagagggggcttacgacagtcgctcatgcagtgccaggacttccaccagttgagtcaaaatctgctgctgtggttagcgagtgccaagaaccggaggcagaaggctcatgtcaccgatccaaaggcagacccccgggctctcctagagtgtcggagggaactaatgcaactggaaaaggagctggtagaacgtcaacctcaagtggacatgttacaggagatttcaaacagccttctcattaagggacatggagaagactgtattgaagctgaagaaaaggtgcatgttattgagaagaaactcaaacagttacgggagcaagtgtcccaagatttaatggccttgcagggaacccagaacccagcctcacccctgcccagcttcgacgaggtagactcgggggaccagcctcctgcaacatccgtgccagctccccgagcaaagttcagagcagtgagaactacagaaggcgaggaggagacagagagcagggtccccggcagcacacggccacagcgctccttcctctcaagggtggtccgggcagccctacccctgcagctgctcctcctgctgctgctgctcctggcctgcctgctgccctcctccgaagaagactacagctgcactcaggccaacaactttgcccggtccttttaccccatgctgaggtacaccaatgggccaccccccacatagagggcatagctggccacagtgctacaccacctgcctgattgccaagggtgcccagcacgtggccccagaccaatctgagtgacttagtgttggcaaggtcccgggacctgtgcagacttcttctgggcttacccagcacgggctccctggagcccagggcagctttcagattgtgttcctccccaggagcagggaacctgtgtggcaggtgccccgggtattttggcagaactagttgattagtttagggatctctggaaatgtcagtttcctgaagagccaagcactttgtgaattctggtttgtttgtaaaacagcattattataatgtaggtatggtcaatgagcagtggtgtccatcacatatattatagaagcaagcgaggacattccaccctagaaatggttcagaaactcataggcacccttagctgatggaaacaatcaatcatatttaatacgcttagaatcagttttactccaatcagctggcaattttgagctgccggttatacaccaaaatgttctgttcagtacctagctctgctcttttatattgctttaaatttttaaagaaattgtattgcatggatgtggttatttgtgcatattttttaacaatgcccaatctgtatgaataatgtaaacttcgatttttttttaaaaaaattagattttagctggagcttttgactaatgtaaagtaaatgccaaactaccgacttgatagggatgtttttgtaagttaattttctaagactttttcacatccaaagtgatgctttgctttgggttttaactgtttggccacggcgggggtgggggcggggggttggtacagaaacttgaagctgtttgtgatatgtacaactcagatgtttctcattaaaaaacaaaattagccagaaaaaaaaaaaaaaaaaaaaaaaaaaaaaaaaaaaaaaaaaaa

SEQ ID NO: 14203 - DNA, 6930 bp, Homo sapiens
aatgttcttaaattattcctgatttttttttaaccaagctgccaagaaaagaacgtattcccctcttagtcctattctaatttttatgtgagtgaatctaaactgctgaggaaaaccatatgtgattgttaaattatatatatctatatttttactccgcgcaaggcttattcttctacatccatagatgcttgagaagctctgtttttgtcattcatgtacattttcctttggaaaaagaaagcgcctattttactaaccaaagacttgatttttaccctcttcatttttattccctcctaaaaataagcccaattggatccaagtcaatgttttaagagatttttttaagagttgttttttctttcagagaccagaattccaaatcagaacaatttaaggtgataagctgcgatctttgagctagctataaataagacatttcaagcaagcaagcaaacaacttaaatttggggtagaggaaaaaaaaggcgtgagacatcaggttgtcattttttattgtgagattctgctcctaaaaataataaatgggggattacgggtttggagtgctagtgcaaagcaatactgggaataaatctgcttttccagtcagattccatccacatctgcagcctccacaccatcaccaaaatgccacccccagccctgctgcttttataaataataacacagctgccaatggcagcagtgctgggtcagcttggctttttcctgctccagctacccataacattcaggatgagatcttggggtcagaaaaagcaaaaagtcagcaacaggaacagcaagaccccttagaaaagcagcagctttccccaagtccaggtcaggaagctggaatactgcctgaaacagagaaggcaaaatcagaagaaaatcaaggggacaattcttcggaaaatggcaatgggaaggagaaaataaggatcgaatctccagtgttgacagggtttgattatcaagaagccactgggctaggtacttcaacccaacccttgacatctagcgcatcgtctcttactggtttcagtaactggtcagcagcgatagcgccttcctcctctacaataatcaatgaagatgcaagtttctttcaccagggaggggtccctgctgcttcggctaataacggtgctctgttgtttcaaaatttcccccatcatgtcagccctggctttggaggcagcttctctcctcagatcgggcttctctcacagcaccacccacatcaccctcatttccagcatcatcacagccagcatcagcagcaaaggaggtctcctgccagtccccatcccccacccttcacacatagaaatgctgcttttaaccagctgcctcatttggcgaataatcttaacaaacccccctctccgtggagcagctaccagagtccgtcaccaacaccctcctcttcctggagcccgggcggtggtggatatggtggctggggaggttcccaaggccgagatcaccgcagagggctgaatggtggaataacgcccctgaactccatctcgcctttgaagaaaaattttgcaagcaatcatattcagctccagaagtatgctcgccccagctctgcctttgcacctaaatcctggatggaagatagcttgaacagggctgacaacatttttccttttccggatcgccccaggacattcgacatgcactcactggagagttcactcattgacataatgagagctgaaaatgataccattaaaggtcgtctaaactattcatatccaggatccgatagctctctgcttattaatgcaaggacatatgggcgaaggagaggtcagtcttcactgtttccaatggaagatggattcttggatgatggccgtggggatcagcctcttcatagtggcctgggttcacctcactgcttcagtcaccagaatggggaaagagtggaacgatattctcgaaaggtgtttgtaggcggattgcctccagacattgatgaagatgagatcacagctagttttcgtcgctttggccctctgattgtggattggcctcataaagctgagagcaaatcctattttcctcctaaaggctatgcattcctgctgtttcaagatgaaagctctgtgcaggctctcattgatgcatgcattgaagaagatggaaaactctacctttgtgtatcaagtcccactatcaaggataagccagtccagattcggccttggaatctcagtgacagcgactttgtgatggatggttcacagccacttgacccacgaaaaactatatttgttggtggtgttcctcgaccattacgagctgtggagcttgcgatgataatggatcggctatatggaggtgtgtgctacgctgggattgataccgaccctgagctaaaatacccaaaaggagctgggagagttgcgttctctaatcaacagagttacatagctgctatcagtgcccgctttgttcagctgcagcatggagagatagataaacgggtggaagttaagccatatgtcttggatgatcagctgtgtgatgaatgtcagggggcccgttgtggggggaaatttgctccatttttctgtgctaatgttacctgtctgcagtattactgtgaatattgctgggctgctatccattctcgtgctggcagggaattccacaagcccctggtgaaggaaggcggtgaccgccctcggcatatttcattccgctggaactaaaggataactgcagtgctcattttcaggcctcagaataagtgcactcttctgttcattctgaccccttcctcaacctcttcacgctggcatgtccttttgtagcagtctgtaacttaactatagtataatgaaaagaatgacctataatataggtgttttgtagattcttgtgtcactgcaaacaatatgaactcctttttcgtattgccatcgggttgcatggaagttttattctcttgttttgctggaaaccaagaggatccaaacttcctgcaacattttcttagaggagagagagaaatattaaaagagaaatgaaacaatagagtattttgggtttttaattaaattattgttaataatataacatataagaatacttttattaaaataaccatgcaacaataacactatcggtctatctgacagtttttcccccagggaagtgcttttgccttttcctttctatttttttttttttttcatcttttttgtctctctcttttttccatccctttttaatttttttaacagcaatggaggaagttaacaatttttaatggaaagagcatgttagagcaaacaaatgcataagcaagactgagcagcattataattaattttcagggttttgaggctgaacataatttcattatccctcaaaaagttaccaccacatcagaaaaaataaaaaaaaaatagtaaagtaggcagagctaggtttattttctcttaaacaatttttaaaattcagaatgtaaaaattgggtaaatttactactgaggggagtgcacttatttatttaacttacttatctggtcaaagccccaggaaacctaccaaagctagaattaatgacaactggtgggaaacctagcatttcctctcctgaagaataaatgtataaatgttatttttgatgtttatatataaactctatatcctaatttactaatactcatcagatgtcagcctttgctctccattttgacgttaaaaaacaacaacagatctagagatacctcaaggatatcatttttgattttgtgttacagtacacttgtagccaaaactggaagacaaaaccaatatataatttggctgctgattggcttacttttagatttaaagttactttgggtatcctgtaatttagttgtaacatagaaaatgaaaaaacagttaaaaaaagtgaagtagttgcaaagtgttttgcactgttgaactaagtaactgtgtaaatctgtgcaaaggtacgtatgtttatcttactcttcctataaactaaaataacattacagtttccgaatttagcatgggacatagtcagtgtttgaagtgccaacttcatcaagtaatgcatgctttattataaataaaattctagctttgaaaggcgttatgtgttgaacagtatgcttcaggggtaaatttaaaatagtctcttgaagccctagtcatggaagtaacttttattttaattgacattctcttattaaatgccctatccatcattaaaaggtttattatcagtgggcaaaacatgaaataatatgatcgaatggcaatcttgctagttgcgctacctaacagtaccatcttggatccttcaaaaccaaagacttgccccagcactgctgtggaaccacctggcttatgacccctatggatgatctttaggaaaagcagccctttacttttaatacaggctttaatgaactatacctgttaagttccaaaggtcaaaatggaggcatttgctgtctaatattcaaacatagaaagggagctgcttttaaagaattccctgcaaatactgaaagcagtcatgcgaatggagggtgctcttgtgtagctggtcagggacttttttttcttttctcctgaactacatgattctaattggaatgttcatttgcctctttttactcttttaaatgcttgtaggtggcttggggtgtgctatcgtgctgttcctactcagtaaacaggtgtgatgagttaacaagaaataacactgtttgagaactagctttgaataataatttttccctttgtacatgacctgctgaatttcggtacagtgtttttgtagctaacttattttgtcatgcacataatgtatatttgttatgcactacttttgtatatcttgtttttccaacagtgaacatttttaggcacacttttcactgacgggatatctctttatgcaatacctcaatttttcatattgcaaagagtagctttttgtacttttattactgagagatcttcatatacttcattttttaatataaataattttaataaattttattttcttatattctgctttttatacatttcagtgctctgcatacattttaaattatgaatgtcgtgcactggcaatgctattttagagtctgcagagaagagaaagcatgttgcttaaacatccttccccagcaccagctattggtgtacctataatttaagaaatagtctatgtaaagtcacaaattaatgaaaaaaattcgcatgaaaatgacagataacactgtagttcctaaaaaaaaaattaaatgcataagcataaggtagaaattaaaataacaaaattgtccacagcttcttactaagtttttaaaattattcataaaatgcagacatttttggtgaatgtttagccatttttaatattaataaattgatgttaagtgtttgattcagagatgtctgctcttttaaattatatataaggaaaaaaaatagcctgccttgggacaggtgtgtaatgttagtgtgcatgactaatgtaagaaattgttattctactaatatttacttgtgattgtgtgacaagtgtgtttacagattattggttacacttcaatttacagggcataaacaatgattatctattactctgaactttatgattacatgttcttcagattacatgggattgtagttgggagttaccatgtaactcaaacataattaacatgtaattagtttacagattgtagggcatcacttcaattcaccaagcatgtagttctagcgcactagcatggcgccagccatgtacttacaatgtagttacagagtaattacatggtgatttttgcaatgtaaaataaagtgtttctgattattttctatgtaaaggaaccctctcctttccccttctggtccctgcgctttggtataatatatatacttctccatacacagacctctgcagaatgcaaaataaaacttgcagtgaatgaatttagcattttatgagagtgctgttggaaagacttgataattcaccccttttgttttgaagagttgaatcttctgttaaaaggtgatttaaaacttgaatgtgatgaattgtggcaagttaacttcaagttatgtgcaatacttatttcaaacttttgaaagatctttgcagtgtaattctttgtttttaattgcagacatttaaaaatgtcattttctactgttaagagtaatcctctttcttgctggtgtttctaaagaaaagaatcagaaatcaatctttctactaatgtaaatttgagattatttttaaaaatggaataaaagaggttttggtcatttgctttattttattattttaaagctactgtgattgatagcattgtaagaatcgggacaatattgtattcaactgttttattttttatatttttaaaatttaaagtataattagtttttataattttcatcagatttttgttatattttttggaagtgaaacttttagcaagtgggtgtctagtttttactaatccctaattttttttccagtgtattgctcatattatcagaaggaaaagttatttaagtatgtcagttaattgtactacttggctgaatttccatatagtttttactgtgtatggggaggttgtagtatttattatagcattttaaataagggtaattcattttttattaaagtcattttcacgttaagttcctatttttgtatgttctactcttaagttatataacacagttccttttttaaaagagttcatttgttgaagtgctagtgaaaaattaatgttattaaatagtttgcaaatgactatttataccagtatgcatataatttttaaatatttgtaatgtgagatgttgaatgaataaaacttttaactcaaaaaaaaaaaaaaaaaaaaa

SEQ ID NO: 14204 - DNA, 3168 bp, Homo sapiens
ccgctttcgtctccgtcctgctgccgttaccgccgctgctgccgccgcttgcgtcccccgctccggtctgtggtgcagccgggacccaggaccatgtctctgtctcgctcagaggagatgcaccggctcacggaaaatgtctataagaccatcatggagcagttcaaccctagcctccggaacttcatcgccatggggaagaattacgagaaggcactggcaggtgtgacgtatgcagccaaaggctactttgacgccctggtgaagatgggggagctggccagcgagagccagggctccaaagaactcggagacgttctcttccagatggctgaagtccacaggcagatccagaatcagctggaagaaatgctgaagtcttttcacaacgagctgcttacgcagctggagcagaaggtggagctggactccaggtatctgagtgctgcgctgaagaaataccagactgagcaaaggagcaaaggcgacgccctggacaagtgtcaggctgagctgaagaagcttcggaagaagagccagggcagcaagaatcctcagaagtactcggacaaggagctgcagtacatcgacgccatcagcaacaagcagggcgagctggagaattacgtgtccgacggctacaagaccgcactgacagaggagcgcaggcgcttctgcttcctggtggagaagcagtgcgccgtggccaagaactccgcggcctaccactccaagggcaaggagctgctggcgcagaagctgccgctgtggcaacaggcctgtgccgaccccagcaagatcccggagcgcgcggtgcagctcatgcagcaggtggccagcaacggcgccaccctccccagcgccctgtcggcctccaagtccaacctggtcatttccgaccccattccgggggccaagcccctgccggtgccccccgagctggcaccgttcgtggggcggatgtctgcccaggagagcacacccatcatgaacggcgtcacaggcccggatggcgaggactacagcccgtgggctgaccgcaaggctgcccagcccaaatccctgtctcctccgcagtctcagagcaagctcagcgactcctactccaacacactccccgtgcgcaagagcgtgaccccaaaaaacagctatgccaccaccgagaacaagactctgcctcgctcgagctccatggcagccggcctggagcgcaatggccgtatgcgggtgaaggccatcttctcccacgctgctggggacaacagcaccctcctgagcttcaaggagggtgacctcattaccctgctggtgcctgaggcccgcgatggctggcactacggagagagtgagaagaccaagatgcggggctggtttcccttctcctacacccgggtcttggacagcgatggcagtgacaggctgcacatgagcctgcagcaagggaagagcagcagcacgggcaacctcctggacaaggacgacctggccatcccaccccccgattacggcgccgcctcccgggccttccccgcccagacggccagcggcttcaagcagaggccctacagtgtggccgtgcccgccttctcccagggcctggatgactatggagcgcggtccatgagcagtggcagcggcacgctggtgtccacagtgtgaggacgctgaccccgggcagccgctgctctgaagagcttccgcgccttccccctggtctcgtccgttttcctcctcagctctcgctggtttgttcttgggttgtttttcttttccacctgccccatgccttttggttggtgaccccagactctgtgatcccccagggtccatggtgctgctccatccgccccccctcccctgtgtttacgcgccccatcctgtgtgtcccagccttttgagcagaaatgccaggcaggacctgctgggccgtgcggggcaccctcggcctcaccctgcagtgtctgtggcactcactgcttttctaaggctcgccgtgagccaggtctaaagtttgaagaaaaagaaaaatcttaaaaaaaaaaaaaaaaaaagaaaaaaagaaaaacaggaaaaaggactttttttttcctgaaaaacaaaaaccgatctgcatggactccggtgtgcgctgttatctcgcatccgacttccccggtgcgatggcctctgtccggacagggaaggtgctggggtccctggccgccccggcccctgtggaggggtgcacagagaaagggggctcgtgccaagctcgaggggcctcctgaggaagccggccgctcctgtgagggaggccgggcccgggcacctgagggcttctccctctggacactgcgggccaggtgtacatagagcagcgcggcacagtggcctcacctcccgtcgggcactggcgggagcaaggtcgggggcaggcgctgcccagctggccgcacacggacattccaaagacctccagagaccaccccacccccacattcctttgaccagccttgtgagggcatcgatgctgccccgggctacctggctgctctgggcagggtgtgcgggccgggcccggctgggggagggcagctctgggcacgccgcacccacgccccccacctgggggaaacaggcggttcctgcccggttcttcctaaacgctctcgtctttttgtgtgtcttggtgactttagaaacaaacacagtggactcagtggctactggtattgtctcttcccacactgaactctggggaattgagtgcagggcacagcccggctcagcctgcccgctggtgggagcccctgggaagctgcggcgctcctttatctgatgtggtttagtaaaagcctcccacacacctccccgtggcctgggacgtggctggtagtgtttgtgtgggaagcagctcaagacgcggaccgcgtgacattaaggagagcgcaagggcggaccgggccctgtgtagagacccttccgcgccggcgttcccgctccgctaaagatttcaaatccaggggattccatgctcaatggatgaatgtagacacaaaacagcaacacttgtatgaagatgtaaagtgctgaacatatttttttcctgtttcctttccttttttttaaaaaatctgaattgtgccctgtactgcagttacttgtttgaataaaagttttatttattgc

SEQ ID NO: 14205 - DNA, 2129 bp, Homo sapiens
ccgctttcgtctccgtcctgctgccgttaccgccgctgctgccgccgcttgcgtcccccgctccggtctgtggtgcagccgggacccaggaccatgtctctgtctcgctcagaggagatgcaccggctcacggaaaatgtctataagaccatcatggagcagttcaaccctagcctccggaacttcatcgccatggggaagaattacgagaaggcactggcaggtgtgacgtatgcagccaaaggctactttgacgccctggtgaagatgggggagctggccagcgagagccagggctccaaagaactcggagacgttctcttccagatggctgaagtccacaggcagatccagaatcagctggaagaaatgctgaagtcttttcacaacgagctgcttacgcagctggagcagaaggtggagctggactccaggtatctgagtgctgcgctgaagaaataccagactgagcaaaggagcaaaggcgacgccctggacaagtgtcaggctgagctgaagaagcttcggaagaagagccagggcagcaagaatcctcagaagtactcggacaaggagctgcagtacatcgacgccatcagcaacaagcagggcgagctggagaattacgtgtccgacggctacaagaccgcactgacagaggagcgcaggcgcttctgcttcctggtggagaagcagtgcgccgtggccaagaactccgcggcctaccactccaagggcaaggagctgctggcgcagaagctgccgctgtggcaacaggcctgtgccgaccccagcaagatcccggagcgcgcggtgcagctcatgcagcaggtggccagcaacggcgccaccctccccagcgccctgtcggcctccaagtccaacctggtcatttccgaccccattccgggggccaagcccctgccggtgccccccgagctggcaccgttcgtggggcggatgtctgcccaggagagcacacccatcatgaacggcgtcacaggcccggatggcgaggactacagcccgtgggctgaccgcaaggctgcccagcccaaatccctgtctcctccgcagtctcagagcaagctcagcgactcctactccaacacactccccgtgcgcaagagcgtgaccccaaaaaacagctatgccaccaccgagaacaagactctgcctcgctcgagctccatggcagccggcctggagcgcaatggccgtatgcgggtgaaggccatcttctcccacgctgctggggacaacagcaccctcctgagcttcaaggagggtgacctcattaccctgctggtgcctgaggcccgcgatggctggcactacggagagagtgagaagaccaagatgcggggctggtttcccttctcctacacccgggtcttggacagcgatggcagtgacaggctgcacatgagcctgcagcaagggaagagcagcagcacgggcaacctcctggacaaggacgacctggccatcccaccccccgattacggcgccgcctcccgggccttccccgcccagacggccagcggcttcaagcagaggccctacagtgtggccgtgcccgccttctcccagggcctggatgactatggagcgcggtccatgagcagcgccgatgtggaagtggccagattctgagccgcctgactagagttagaatccctttgcccacgtccagctgaagccgacagtgaccaacgacaggtctgcccccctcctcagctgatggccacatctgcagtgctgcccatctggtggcttcccccgcccttcccatgtagcctgttctgtcatcatctgtgcgttcctgtgtagagaacatccaggccccggctgcctggtcttgccccacttgagtctggcctggactggatcccagctgttctaggcagggccgggcagagtggggcgcaggcccctgaagggcgagacccagtggctgggctgcccagggctgaggggccgcctcttgagggtacacgcctctggtcacatggccatggagccttgggtacccctgagttaagggaggacatttggccagctggtggctgggaggggagcctggctgccctgctgcttctcctgcctaataaacaggcttctcctgc

SEQ ID NO: 14206 - DNA, 2877 bp, Homo sapiens
ccgctttcgtctccgtcctgctgccgttaccgccgctgctgccgccgcttgcgtcccccgctccggtctgtggtgcagccgggacccaggaccatgtctctgtctcgctcagaggagatgcaccggctcacggaaaatgtctataagaccatcatggagcagttcaaccctagcctccggaacttcatcgccatggggaagaattacgagaaggcactggcaggtgtgacgtatgcagccaaaggctactttgacgccctggtgaagatgggggagctggccagcgagagccagggctccaaagaactcggagacgttctcttccagatggctgaagtccacaggcagatccagaatcagctggaagaaatgctgaagtcttttcacaacgagctgcttacgcagctggagcagaaggtggagctggactccaggtatctgagtgctgcgctgaagaaataccagactgagcaaaggagcaaaggcgacgccctggacaagtgtcaggctgagctgaagaagcttcggaagaagagccagggcagcaagaatcctcagaagtactcggacaaggagctgcagtacatcgacgccatcagcaacaagcagggcgagctggagaattacgtgtccgacggctacaagaccgcactgacagaggagcgcaggcgcttctgcttcctggtggagaagcagtgcgccgtggccaagaactccgcggcctaccactccaagggcaaggagctgctggcgcagaagctgccgctgtggcaacaggcctgtgccgaccccagcaagatcccggagcgcgcggtgcagctcatgcagcaggtggccagcaacggcgccaccctccccagcgccctgtcggcctccaagtccaacctggtcatttcggaccccattccgggggccaagcccctgccggtgccccccgagctggcaccgttcgtggggcggatgtctgcccaggagagcacacccatcatgaacggcgtcacaggcccggatggcgaggactacagcccgtgggctgaccgcaaggctgcccagcccaaatccctgtctcctccgcagtctcagagcaagctcagcgactcctactccaacacactccccgtgcgcaagagcgtgaccccaaaaaacagctatgccaccaccgagaacaagactctgcctcgctcgagctccatggcagccggcctggagcgcaatggccgtatgcgggtgaaggccatcttctcccacgctgctggggacaacagcaccctcctgagcttcaaggagggtgacctcattaccctgctggtgcctgaggcccgcgatggctggcactacggagagagtgagaagaccaagatgcggggctggtttcccttctcctacacccgggtcttggacagcgatggcagtgacaggctgcacatgagcctgcagcaagggaagagcagcagcacgggcaacctcctggacaaggacgacctggccatcccaccccccgattacggcgccgcctcccgggccttccccgcccagacggccagcggcttcaagcagaggccctacagtgtggccgtgcccgccttctcccagggcctggatgactatggagcgcggtccatgagcaggaatccctttgcccacgtccagctgaagccgacagtgaccaacgacaggtgtgatctgtccgcccaagggccagaaggccgggagcacggggatgggagcgcccgcaccctggctggaagatgaacttcccgtaagcacgtaattcctgcaggtccggcagctacacctggagtgtggggcctggtccctccccatgcccctcggtggggctctcttgggcccctcactcccactggcaatgtcacaagggctccccaggcccctccctgcctcgggcagcccccagccctcctccttacccaacctcccatccagaaccttgctgccagggcctcccagctcgctcctgcgccaaaggccagctgtcaggtgctatgcggggtcaccagcagagtgcccgctggcaggtgggggcttccccgcttccggggtctgccccaggactcctgggtggacctcccccacccacctccgctgactcctgcaggcactggggagctctgctggaattgggggtttaaaacttcattagcagatttgtgctcttccatactgtttgtttgtttgttaggtgaaatacagtgtggtgagctgcactggtgacaacagcccttacctggctggggaggtgtctccagcgagagctcactcccgcctacagccactcacaccccggggacaggaagctgtagagttggcgggccaggagggcagttgagagctggccagcggagggtgcagggaagcccagctgtgctcaactctcctgcctccgccttccaccctgggcccagggacagacagacattgccctcagaagggcagggaggaggttgtcctggagaggcctgtaggtccattcttcacccgtccctaccaggccaactcggcctgcaggaagggagacctgcagggcgctacccctgcgcccccacacacagtagggccagaacaccatcccctccaccggggtgtgccgaggacagtggggaggagaggagaggggcagcttcctcctggccccaggaagggctggcatcgggttcctggcacagcccctcctgtccaggactttatcatcggcagacctcagaagacaacacacaaaggtttcttttttcttagcttcatttctcttaaaaaacaaggaacaagaaaacattgcaccagcgttctaagcctcaaacaaaacacaaaacaaatccccctgcgaagcaacaataaactttacatctctttggcaacaat

SEQ ID NO: 14207 - DNA, 3737 bp, Homo sapiens
ggcgtccgcgcacacctccccgcgccgccgccgccaccgcccgcactccgccgcctctgcccgcaaccgctgagccatccatgggggtcgcgggccgcaaccgtcccggggcggcctgggcggtgctgctgctgctgctgctgctgccgccactgctgctgctggcgggggccgtcccgccgggtcggggccgtgccgcggggccgcaggaggatgtagatgagtgtgcccaagggctagatgactgccatgccgacgccctgtgtcagaacacacccacctcctacaagtgctcctgcaagcctggctaccaaggggaaggcaggcagtgtgaggacatcgatgaatgtggaaatgagctcaatggaggctgtgtccatgactgtttgaatattccaggcaattatcgttgcacttgttttgatggcttcatgttggctcatgacggtcataattgtcttgatgtggacgagtgcctggagaacaatggcggctgccagcatacctgtgtcaacgtcatggggagctatgagtgctgctgcaaggaggggtttttcctgagtgacaatcagcacacctgcattcaccgctcggaagagggcctgagctgcatgaataaggatcacggctgtagtcacatctgcaaggaggccccaaggggcagcgtcgcctgtgagtgcaggcctggttttgagctggccaagaaccagagagactgcatcttgacctgtaaccatgggaacggtgggtgccagcactcctgtgacgatacagccgatggcccagagtgcagctgccatccacagtacaagatgcacacagatgggaggagctgccttgagcgagaggacactgtcctggaggtgacagagagcaacaccacatcagtggtggatggggataaacgggtgaaacggcggctgctcatggaaacgtgtgctgtcaacaatggaggctgtgaccgcacctgtaaggatacttcgacaggtgtccactgcagttgtcctgttggattcactctccagttggatgggaagacatgtaaagatattgatgagtgccagacccgcaatggaggttgtgatcatttctgcaaaaacatcgtgggcagttttgactgcggctgcaagaaaggatttaaattattaacagatgagaagtcttgccaagatgtggatgagtgctctttggataggacctgtgaccacagctgcatcaaccaccctggcacatttgcttgtgcttgcaaccgagggtacaccctgtatggcttcacccactgtggagacaccaatgagtgcagcatcaacaacggaggctgtcagcaggtctgtgtgaacacagtgggcagctatgaatgccagtgccaccctgggtacaagctccactggaataaaaaagactgtgtggaagtgaaggggctcctgcccacaagtgtgtcaccccgtgtgtccctgcactgcggtaagagtggtggaggagacgggtgcttcctcagatgtcactctggcattcacctctcttcagatgtcaccaccatcaggacaagtgtaacctttaagctaaatgaaggcaagtgtagtttgaaaaatgctgagctgtttcccgagggtctgcgaccagcactaccagagaagcacagctcagtaaaagagagcttccgctacgtaaaccttacatgcagctctggcaagcaagtcccaggagcccctggccgaccaagcacccctaaggaaatgtttatcactgttgagtttgagcttgaaactaaccaaaaggaggtgacagcttcttgtgacctgagctgcatcgtaaagcgaaccgagaagcggctccgtaaagccatccgcacgctcagaaaggccgtccacagggagcagtttcacctccagctctcaggcatgaacctcgacgtggctaaaaagcctcccagaacatctgaacgccaggcagagtcctgtggagtgggccagggtcatgcagaaaaccaatgtgtcagttgcagggctgggacctattatgatggagcacgagaacgctgcattttatgtccaaatggaaccttccaaaatgaggaaggacaaatgacttgtgaaccatgcccaagaccaggaaattctggggccctgaagaccccagaagcttggaatatgtctgaatgtggaggtctgtgtcaacctggtgaatattctgcagatggctttgcaccttgccagctctgtgccctgggcacgttccagcctgaagctggtcgaacttcctgcttcccctgtggaggaggccttgccaccaaacatcagggagctacttcctttcaggactgtgaaaccagagttcaatgttcacctggacatttctacaacaccaccactcaccgatgtattcgttgcccagtgggaacataccagcctgaatttggaaaaaataattgtgtttcttgcccaggaaatactacgactgactttgatggctccacaaacataacccagtgtaaaaacagaagatgtggaggggagctgggagatttcactgggtacattgaatccccaaactacccaggcaattacccagccaacaccgagtgtacgtggaccatcaacccaccccccaagcgccgcatcctgatcgtggtccctgagatcttcctgcccatagaggacgactgtggggactatctggtgatgcggaaaacctcttcatccaattctgtgacaacatatgaaacctgccagacctacgaacgccccatcgccttcacctccaggtcaaagaagctgtggattcagttcaagtccaatgaagggaacagcgctagagggttccaggtcccatacgtgacatatgatgaggactaccaggaactcattgaagacatagttcgagatggcaggctctatgcatctgagaaccatcaggaaatacttaaggataagaaacttatcaaggctctgtttgatgtcctggcccatccccagaactatttcaagtacacagcccaggagtcccgagagatgtttccaagatcgttcatccgattgctacgttccaaagtgtccaggtttttgagaccttacaaatgactcagcccacgtgccactcaatacaaatgttctgctatagggttggtgggacagagctgtcttccttctgcatgtcagcacagtcgggtattgctgcctcccgtatcagtgactcattagagttcaatttttatagataatacagatattttggtaaattgaacttggtttttctttcccagcatcgtggatgtagactgagaatggctttgagtggcatcagcttctcactgctgtgggcggatgtcttggatagatcacgggctggctgagctggactttggtcagcctaggtgagactcacctgtccttctggggtcttactcctcctcaaggagtctgtagtggaaaggaggccacagaataagctgcttattctgaaacttcagcttcctctagcccggccctctctaagggagccctctgcactcgtgtgcaggctctgaccaggcagaacaggcaagaggggagggaaggagacccctgcaggctccctccacccaccttgagacctgggaggactcagtttctccacagccttctccagcctgtgtgatacaagtttgatcccaggaacttgagttctaagcagtgctcgtgaaaaaaaaaagcagaaagaattagaaataaataaaaactaagcacttctggagacat

SEQ ID NO: 14208 - DNA, 2302 bp, Homo sapiens
gttcctcgtgccaacgtgtcttgtaaggtgcggctagaaactggggacatggcagcgcctggcccagcgctctgcctcttcgacgtggatgggaccctcaccgccccgcggcagaaaattaccaaagaaatggatgacttcctacaaaaattgaggcagaagatcaaaatcggagtggtaggcggatcggactttgagaaagtgcaggagcaactgggaaatgatgtggttgaaaaatacgattatgtgtttccagaaaatggcttggtagcatacaaagatgggaaactcttgtgtagacagaatattcaaagtcatctgggtgaggccctaatccaagatttaatcaactactgtctgagctacattgcgaaaattaaactcccgaagaagaggggtactttcattgaattccgaaatgggatgttaaacgtgtcccctattggaagaagctgcagccaagaagaacgcattgagttctacgaactcgataaaaaagaaaatataagacaaaagtttgtagcagatctacggaaagagtttgctggaaaaggcctcacgttttccataggaggccagatcagctttgatgtctttcctgatggatgggacaagagatactgtctgcgacatgtggaaaatgacggttataagaccatttatttctttggagacaaaactatgccaggtggcaatgaccatgagatcttcacagaccccagaaccatgggctactccgtgacagcgcctgaggacacgcgcaggatctgtgaactgctgttctcctaacgtgggagcgggaggggcggggtcccggctgacaagcagcatagggcattcggtggccagagccgagggtcctcccacacgtgctcacccacccgcagcctaggcaggctctgcatgctatgccaggcatgtgccgtctggacttccacctccagtgccagaaacttccagaaagaaggagaaactcttgtcaagaatggcccagaggaatgcctcgcacaaaaggtcttccccacccacccccagccccctagtctaatacccaccctgatacgtgcaatcatgtagttttggcggaaatttccccatcattctaggatgatacagaaagaaaactgtgcctggaccctccctcttggtgggtctgtggaaacataagcggtttttttaatgggcccctgcatcaataccaaacatgggggtttggtaatgagaaaccaggacaggccatctgcagtgacccagcccaggacgaagtttacaaacacctcctggaacgaagctcccgcctgcatgtcaccttgatgggggctgtgagtggggcagtgtgatacccagtgactagacgcactctgcgttttcccgtgtttggggctgaggcctgctggacagatggctggccaagtgggagcagaccctagggagtttgcacctcggctgggccggattcggaccggctctgtgttcactacactcagaatagcctgctgcttctctgtctccgagaccggagtacttgggaacaacagctgggctggagagttggtgctggcaaaacagtccttcccctggggccggttcttacccaggtccagagaaaccaacgcgggatgtcagacttcaccaaaaggactttctggttgcccctggctggcttcctggaggcgttcgcctctagtttctcagggatggagcgagagcccagccagagaacagtaagaggagctgctctcctatctgcactcacccaggccttcacccagactttaccgcggaggcggctgagtgcagctacagctaggtccgcgtccctcactcttttcatcttctgcacgttcttcgtgaaactggaaggatcccgggtctcagctagaacacggtggaagagaactttcctaggaaacggttcatgtgtcacttttcaggatgtggaaacactgagccatacaccctccattgcttggtgctggggttgtgtggcctccactgggcacttgccgacctgagtctggggccaggggagcccaggctgccctgcactcctgcctcccagcccacagccaggtgctttcatcacagctaaacctggttccctccaaacctcccagccactcgggcttgtaactgtctgagccccggatccggtggggtgaaagcagccagctcatcccagtgactcacaggacacagccatccagcggcatctttccttgtcgaatgatactgtaatgaccttccaaagtgaagagtagcacattaaagtgattttattgtttaaaaaaaaaaaaaaaaa

SEQ ID NO: 14209 - DNA, 4955 bp, Homo sapiens
gcttaaaaaagcacagggagatcgcgggcagctttgcagtcgctgccttctcgcgcctgaccatgcacccctgcatcttcctgctgggccacaggcgagcgctttatttctggagctgagggctaaaacttttttgacttttcttctcctcaacatctgaatcatgccatgtgcccagaggagctggcttgcaaacctttccgtggtggctcagctccttaactttggggcgctttgctatgggagacagcctcagccaggcccggttcgcttcccggacaggaggcaagagcattttatcaagggcctgccagaataccacgtggtgggtccagtccgagtagatgccagtgggcattttttgtcatatggcttgcactatcccatcacgagcagcaggaggaagagagatttggatggctcagaggactgggtgtactacagaatttctcacgaggagaaggacctgttttttaacttgacggtcaatcaaggatttctttccaatagctacatcatggagaagagatatgggaacctctcccatgttaagatgatggcttcctctgcccccctctgccatctcagtggcacggttctacagcagggcaccagagttgggacggcagccctcagtgcctgccatggactgactggatttttccaactaccacatggagactttttcattgaacccgtgaagaagcatccactggttgagggagggtaccacccgcacatcgtttacaggaggcagaaagttccagaaaccaaggagccaacctgtggattaaaggacagtgttaacatctcccagaagcaagagctatggcgggagaagtgggagaggcacaacttgccaagcagaagcctctctcggcgttccatcagcaaggagagatgggtggagacactggtggtggccgacacaaagatgattgaataccatgggagtgagaatgtggagtcctacatcctcaccatcatgaacatggtcactgggttgttccataacccaagcattggcaatgcaattcacattgttgtggttcggctcattctactcgaagaagaagagcaaggactgaaaatagttcaccatgcagaaaagacactgtctagcttctgcaagtggcagaagagtatcaatcccaagagtgacctcaatcctgttcatcacgacgtggctgtccttctcaccagaaaggacatctgtgctggtttcaatcgcccctgcgagaccctgggcctgtctcacctttcaggaatgtgtcagcctcaccgcagttgtaacatcaatgaagattcgggactccctctggctttcacaattgcccatgagctaggacacagcttcggcatccagcatgatgggaaagaaaatgactgtgagcctgtgggcagacatccgtacatcatgtcccgccagctccagtacgatcccactccgctgacatggtccaagtgcagcgaggagtacatcacccgcttcttggaccgaggctgggggttctgtcttgatgacatacctaaaaagaaaggcttgaagtccaaggtcattgcccccggagtgatctatgatgttcaccaccagtgccagctacaatatggacccaatgctaccttctgccaggaagtagaaaacgtctgccagacactgtggtgctccgtgaagggcttttgtcgctctaagctggacgctgctgcagatggaactcaatgtggtgagaagaagtggtgtatggcaggcaagtgcatcacagtggggaagaaaccagagagcattcctggaggctggggccgctggtcaccctggtcccactgttccaggacctgtggggctggagtccagagcgcagagaggctctgcaacaaccccgagccaaagtttggagggaaatattgcactggagaaagaaaacgctatcgcttgtgcaacgtccacccctgtcgctcagaggcaccaacatttcggcagatgcagtgcagtgaatttgacactgttccctacaagaatgaactctaccactggtttcccatttttaacccagcacatccttgtgagctctactgccgacccatagatggccagttttctgagaaaatgctggatgctgtcattgatggtaccccttgctttgaaggcggcaacagcagaaatgtctgtattaatggcatatgtaagatggttggctgtgactatgagatcgattccaatgccaccgaggatcgctgcggtgtgtgcctgggagatggctcttcctgccagactgtgagaaagatgtttaagcagaaggaaggatctggttatgttgacattgggctcattccaaaaggagcaagggacataagagtgatggaaattgagggagctggaaacttcctggccatcaggagtgaagatcctgaaaaatattacctgaatggagggtttattatccagtggaacgggaactataagctggcagggactgtctttcagtatgacaggaaaggagacctggaaaagctgatggccacaggtcccaccaatgagtctgtgtggatccagcttctattccaggtgactaaccctggcatcaagtatgagtacacaatccagaaagatggccttgacaatgatgttgagcagcagatgtacttctggcagtacggccactggacagagtgcagtgtgacctgcgggacaggtatccgccgccaaactgcccattgcataaagaagggccgcgggatggtgaaagctacattctgtgacccagaaacacagcccaatgggagacagaagaagtgccatgaaaaggcttgtccacccaggtggtgggcaggggagtgggaagcatgctcggcgacatgcgggccccacggggagaagaagcgaaccgtgctgtgcatccagaccatggtctctgacgagcaggctctcccgcccacagactgccagcacctgctgaagcccaagaccctcctttcctgcaacagagacatcctgtgcccctcggactggacagtgggcaactggagtgagtgttctgtttcctgtggtggtggagtgcggattcgcagtgtcacatgtgccaagaaccatgatgaaccttgcgatgtgacaaggaaacccaacagccgagctctgtgtggcctccagcaatgcccttctagccggagagttctgaaaccaaacaaaggcactatttccaatggaaaaaacccaccaacactaaagcccgtccctccacctacatccaggcccagaatgctgaccacacccacagggcctgagtctatgagcacaagcactccagcaatcagcagccctagtcctaccacagcctccaaagaaggagacctgggtgggaaacagtggcaagatagctcaacccaacctgagctgagctctcgctatctcatttccactggaagcacttcccagcccatcctcacttcccaatccttgagcattcagccaagtgaggaaaatgtttccagttcagatactggtcctacctcggagggaggccttgtagctacaacaacaagtggttctggcttgtcatcttcccgcaaccctatcacttggcctgtgactccattttacaataccttgaccaaaggtccagaaatggagattcacagtggctcaggggaagaaagagaacagcctgaggacaaagatgaaagcaatcctgtaatatggaccaagatcagagtacctggaaatgacgctccagtggaaagtacagaaatgccacttgcacctccactaacaccagatctcagcagggagtcctggtggccacccttcagcacagtaatggaaggactgctccccagccaaaggcccactacttccgaaactgggacacccagagttgaggggatggttactgaaaagccagccaacactctgctccctctgggaggagaccaccagccagaaccctcaggaaagacggcaaaccgtaaccacctgaaacttccaaacaacatgaaccaaacaaaaagttctgaaccagtcctgactgaggaggatgcaacaagtctgattactgagggctttttgctaaatgcctccaattacaagcagctcacaaacggccacggctctgcacactggatcgtcggaaactggagcgagtgctccaccacatgtggcctgggggcctactggagaagggtggagtgcagcacccagatggattctgactgtgcggccatccagagacctgaccctgcaaaaagatgccacctccgtccctgtgctggctggaaagtgggaaactggagcaagtgctccagaaactgcagtgggggcttcaagatacgcgagattcagtgcgtggacagccgggaccaccggaacctgaggccatttcactgccagttcctggccggcattcctcccccattgagcatgagctgtaacccggagccctgtgaggcgtggcaggtggagccttggagccagtgctccaggtcctgtggaggtggagttcaggagagaggagtgttctgtccaggaggcctctgtgattggacaaaaagacccacatccaccatgtcttgcaatgagcacctgtgctgtcactgggccactgggaactgggacctgtgttccacttcctgtggaggtggctttcagaagaggactgtccaatgtgtgccctcagagggcaataaaactgaagaccaagaccaatgtctatgtgatcacaaacccagacctccagaattcaaaaaatgcaaccagcaggcctgcaagaaaagtgccgatttactttgcactaaggacaaactgtcagccagtttctgccagacactgaaagccatgaagaaatgttctgtgcccaccgtgagggctgagtgctgcttctcgtgtccccagacacacatcacacacacccaaaggcaaagaaggcaacggttgctccaaaagtcaaaagaactctaagcccaaa

SEQ ID NO: 14210 - DNA, 1151 bp, Homo sapiens
cttcctccaggagtctctggtgcagctggggtggaatctggccaggccctgcttaggcccccatcctggggtcaggaaatttggaggataaggcccttcagccccaaggatgagctggagcacagcctgggggagagtgcggcccagggggcagctggagtggtgctctgggtgagctgggaaaatacaagaaccaaggaatcatgtcaggccatcaaggagtatatggacactacactggggcccttcatcctgaacgtgaccagtggggcccttctctgcagtcaagccctgtgctccggccatggccgctgtgtccgccgcaccagccaccccaaagccctcctcctccttaaccctgccagtttctccatccagctcacgcctggtggtgggcccctgagcctgcggggtgccctctcacttgaagatcaggcacagatggctgtggagttcaaatgtcgatgctaccctggctggcaggcaccgtggtgtgagcggaagagcatgtggtgattggccacacactgagttgcacatattgagaacctaatgcactctgggtctggccagggcttcctcaaatacatgcacagtcatacaagtcatggtcacagtaaagagtacactcagccactgtcacaggcatattccctgcacacacatgcatacttacagactggaatagtggcataaggagttagaaccacagcagacaccattcattccatgtccatatgcatctacttggcaaggtcatagacaattcctccagagacactgagccagtctttgaactgcagcaatcacaaaggctgacattcactgagtgcctactctttgccaatccccgtgctaagcgttttatgtggacttattcattcctcacaatgaggctatgaggaaactgagtcactcacattgagagtaagcacgttgcccaaggttgcacagcaagaaaagggagaagttgagattcaaacccaggctgtctagctccgggggtacagcccttgcactcctactgagtttgtggtaaccagccctgcacgacccctgaatctgctgagaggcaccagtccagcaaataaagcagtcatgatttacttaaaaaaaaaaaaaaaaaaaaaaaaaaaaaaaaaaaaaaaaaa

SEQ ID NO: 14211 - DNA, 1718 bp, Homo sapiens
cttcctccaggagtctctggtgcagctggggtggaatctggccaggccctgcttaggcccccatcctggggtcaggaaatttggaggataaggcccttcagccccaaggacatcctggctgccatacctgctcctgacttctcagggctggcagtcatcgactgggaggcatggcgcccacgctgggccttcaactgggacaccaaggacatttaccggcagcgctcacgggcactggtacaggcacagcaccctgattggccagctcctcaggtggaggcagtagcccaggaccagttccagggagctgcacgggcctggatggcaggcaccctccagctggggcgggcactgcgtcctcgcggcctctggggcttctatggcttccctgactgctacaactatgactttctaagccccaactacaccggccagtgcccatcaggcatccgtgcccaaaatgaccagctagggtggctgtggggccagagccgtgccctctatcccagcatctacatgcccgcagtgctggagggcacagggaagtcacagatgtatgtgcaacaccgtgtggccgaggcattccgtgtggctgtggctgctggtgaccccaatctgccggtgctgccctatgtccagatcttctatgacacgacaaaccactttctgcccctggatgagctggagcacagcctgggggagagtgcggcccagggggcagctggagtggtgctctgggtgagctgggaaaatacaagaaccaaggaatcatgtcaggccatcaaggagtatatggacactacactggggcccttcatcctgaacgtgaccagtggggcccttctctgcagtcaagccctgtgctccggccatggccgctgtgtccgccgcaccagccaccccaaagccctcctcctccttaaccctgccagtttctccatccagctcacgcctggtggtgggcccctgagcctgcggggtgccctctcacttgaagatcaggcacagatggctgtggagttcaaatgtcgatgctaccctggctggcaggcaccgtggtgtgagcggaagagcatgtggtgattggccacacactgagttgcacatattgagaacctaatgcactctgggtctggccagggcttcctcaaatacatgcacagtcatacaagtcatggtcacagtaaagagtacactcagccactgtcacaggcatattccctgcacacacatgcatacttacagactggaatagtggcataaggagttagaaccacagcagacaccattcattccatgtccatatgcatctacttggcaaggtcatagacaattcctccagagacactgagccagtctttgaactgcagcaatcacaaaggctgacattcactgagtgcctactctttgccaatccccgtgctaagcgttttatgtggacttattcattcctcacaatgaggctatgaggaaactgagtcactcacattgagagtaagcacgttgcccaaggttgcacagcaagaaaagggagaagttgagattcaaacccaggctgtctagctccgggggtacagcccttgcactcctactgagtttgtggtaaccagccctgcacgacccctgaatctgctgagaggcaccagtccagcaaataaagcagtcatgatttacttaaaaaaaaaaaaaaaaaaaaaaaaaaaaaaaaaaaaaaaaaa

SEQ ID NO: 14212 - DNA, 1300 bp, Homo sapiens
cttcctccaggagtctctggtgcagctggggtggaatctggccaggccctgcttaggcccccatcctggggtcaggaaatttggaggataaggcccttcagccccaagtgctggagggcacagggaagtcacagatgtatgtgcaacaccgtgtggccgaggcattccgtgtggctgtggctgctggtgaccccaatctgccggtgctgccctatgtccagatcttctatgacacgacaaaccactttctgcccctggatgagctggagcacagcctgggggagagtgcggcccagggggcagctggagtggtgctctgggtgagctgggaaaatacaagaaccaaggaatcatgtcaggccatcaaggagtatatggacactacactggggcccttcatcctgaacgtgaccagtggggcccttctctgcagtcaagccctgtgctccggccatggccgctgtgtccgccgcaccagccaccccaaagccctcctcctccttaaccctgccagtttctccatccagctcacgcctggtggtgggcccctgagcctgcggggtgccctctcacttgaagatcaggcacagatggctgtggagttcaaatgtcgatgctaccctggctggcaggcaccgtggtgtgagcggaagagcatgtggtgattggccacacactgagttgcacatattgagaacctaatgcactctgggtctggccagggcttcctcaaatacatgcacagtcatacaagtcatggtcacagtaaagagtacactcagccactgtcacaggcatattccctgcacacacatgcatacttacagactggaatagtggcataaggagttagaaccacagcagacaccattcattccatgtccatatgcatctacttggcaaggtcatagacaattcctccagagacactgagccagtctttgaactgcagcaatcacaaaggctgacattcactgagtgcctactctttgccaatccccgtgctaagcgttttatgtggacttattcattcctcacaatgaggctatgaggaaactgagtcactcacattgagagtaagcacgttgcccaaggttgcacagcaagaaaagggagaagttgagattcaaacccaggctgtctagctccgggggtacagcccttgcactcctactgagtttgtggtaaccagccctgcacgacccctgaatctgctgagaggcaccagtccagcaaataaagcagtcatgatttacttaaaaaaaaaaaaaaaaaaaaaaaaaaaaaaaaaaaaaaaaaa

SEQ ID NO: 14213 - DNA, 7368 bp, Homo sapiens
caagctttcaagcattcaaaggtctaaatgaaaaaggctaagtattatttcaaaaggcaagtatatcctaatatagcaaaacaaacaaagcaaaatccatcagctactcctccaattgaagtgatgaagcccaaataattcatatagcaaaatggagaaaattagaccggccatctaaaaatctgccattggtgaagtgatgaagaacatttactgtcttattccgaagcttgtcaattttgcaactcttggctgcctatggatttctgtggtgcagtgtacagttttaaatagctgcctaaagtcgtgtgtaactaatctgggccagcagcttgaccttggcacaccacataatctgagtgaaccgtgtatccaaggatgtcacttttggaactctgtagatcagaaaaactgtgctttaaagtgtcgggagtcgtgtgaggttggctgtagcagcgcggaaggtgcatatgaagaggaagtactggaaaatgcagacctaccaactgctccctttgcttcttccattggaagccacaatatgacattacgatggaaatctgcaaacttctctggagtaaaatacatcattcagtggaaatatgcacaacttctgggaagctggacttatactaagactgtgtccagaccgtcctatgtggtcaagcccctgcaccccttcactgagtacattttccgagtggtttggatcttcacagcgcagctgcagctctactcccctccaagtcccagttacaggactcatcctcatggagttcctgaaactgcacctttgattaggaatattgagagctcaagtcccgacactgtggaagtcagctgggatccacctcaattcccaggtggacctattttgggttataacttaaggctgatcagcaaaaatcaaaaattagatgcagggacacagagaaccagtttccagttttactccactttaccaaatactatctacaggttttctattgcagcagtaaatgaagttggtgagggtccagaagcagaatctagtattaccacttcatcttcagcagttcaacaagaggaacagtggctctttttatccagaaaaacttctctaagaaagagatctttaaaacatttagtagatgaagcacattgccttcggttggatgctatataccataatattacaggaatatctgttgatgtccaccagcaaattgtttatttctctgaaggaactctcatatgggcgaagaaggctgccaacatgtctgatgtatctgacctgagaattttttacagaggttcaggattaatttcttctatctccatagattggctttatcaaagaatgtatttcatcatggatgaactggtatgtgtctgtgatttagagaactgctcaaacatcgaggaaattactccaccctctattagtgcacctcaaaaaattgtggctgattcatacaatgggtatgtcttttacctcctgagagatggcatttatagagcagaccttcctgtaccatctggccggtgtgcagaagctgtgcgtattgtggagagttgcacgttaaaggactttgcaatcaagccacaagccaagcgaatcatttacttcaatgacactgcccaagtcttcatgtcaacatttctggatggctctgcttcccatctcatcctacctcgcatcccctttgctgatgtgaaaagttttgcttgtgaaaacaatgactttcttgtcacagatggcaaggtcattttccaacaggatgctttgtcttttaatgaattcatcgtgggatgtgacctgagtcacatagaagaatttgggtttggtaacttggtcatctttggctcatcctcccagctgcaccctctgccaggccgcccgcaggagctttcggtgctgtttggctctcaccaggctcttgttcaatggaagcctcctgcccttgccataggagccaatgtcatcctgatcagtgatattattgaactctttgaattaggcccttctgcctggcagaactggacctatgaggtgaaagtatccacccaagaccctcctgaagtcactcatattttcttgaacataagtggaaccatgctgaatgtacctgagctgcagagtgctatgaaatacaaggtttctgtgagagcaagttctccaaagaggccaggcccctggtcagagccctcagtgggtactaccctggtgccagctagtgaaccaccatttatcatggctgtgaaagaagatgggctttggagtaaaccattaaatagctttggcccaggagagttcttatcctctgatataggaaatgtgtcagacatggattggtataacaacagcctctactacagtgacacgaaaggcgacgtttttgtgtggctgctgaatgggacggatatctcagagaattatcacctacccagcattgcaggagcaggggctttagcttttgagtggctgggtcactttctctactgggctggaaagacatatgtgatacaaaggcagtctgtgttgacgggacacacagacattgttacccacgtgaagctattggtgaatgacatggtggtggattcagttggtggatatctctactggaccacactctattcagtggaaagcaccagactaaatggggaaagttcccttgtactacagacacagccttggttttctgggaaaaaggtaattgctctaactttagacctcagtgatgggctcctgtattggttggttcaagacagtcaatgtattcacctgtacacagctgttcttcggggacagagcactggggataccaccatcacagaatttgcagcctggagtacttctgaaatttcccagaatgcactgatgtactatagtggtcggctgttctggatcaatggctttaggattatcacaactcaagaaataggtcagaaaaccagtgtctctgttttggaaccagccagatttaatcagttcacaattattcagacatcccttaagcccctgccagggaacttttcctttacccctaaggttattccagattctgttcaagagtcttcatttaggattgaaggaaatgcttcaagttttcaaatcctgtggaatggtccccctgcggtagactggggtgtagttttctacagtgtagaatttagtgctcattctaagttcttggctagtgaacaacactctttacctgtatttactgtggaaggactggaaccttatgccttatttaatctttctgtcactccttatacctactggggaaagggccccaaaacatctctgtcacttcgagcacctgaaacagttccatcagcaccagagaaccccagaatatttatattaccaagtggaaaatgctgcaacaagaatgaagttgtggtggaatttaggtggaacaaacctaagcatgaaaatggggtgttaacaaaatttgaaattttctacaatatatccaatcaaagtattacaaacaaaacatgtgaagactggattgctgtcaatgtcactccctcagtgatgtcttttcaacttgaaggcatgagtcccagatgctttattgccttccaggttagggcctttacatctaaggggccaggaccatatgctgacgttgtaaagtctacaacatcagaaatcaacccatttcctcacctcataactcttcttggtaacaagatagtttttttagatatggatcaaaatcaagttgtgtggacgttttcagcagaaagagttatcagtgccgtttgctacacagctgataatgagatgggatattatgctgaaggggactcactctttcttctgcacttgcacaatcgctctagctctgagcttttccaagattcactggtttttgatatcacagttattacaattgactggatttcaaggcacctctactttgcactgaaagaatcacaaaatggaatgcaagtatttgatgttgatcttgaacacaaggtgaaatatcccagagaggtgaagattcacaataggaattcaacaataatttctttttctgtatatcctcttttaagtcgcttgtattggacagaagtttccaattttggctaccagatgttctactacagtattatcagtcacaccttgcaccgaattctgcaacccacagctacaaaccaacaaaacaaaaggaatcaatgttcttgtaatgtgactgaatttgagttaagtggagcaatggctattgatacctctaacctagagaaaccattgatatactttgccaaagcacaagagatctgggcaatggatctggaaggctgtcagtgttggagagttatcacagtacctgctatgctcgcaggaaaaacccttgttagcttaactgtggatggagatcttatatactggatcatcacagcaaaggacagcacacagatttatcaggcaaagaaaggaaatggggccatcgtttcccaggtgaaggccctaaggagtaggcatatcttggcttacagttcagttatgcagccttttccagataaagcgtttctgtctctagcttcagacactgtggaaccaactatacttaatgccactaacactagcctcacaatcagattacctctggccaagacaaacctcacatggtatggcatcaccagccctactccaacatacctggtttattatgcagaagttaatgacaggaaaaacagctctgacttgaaatatagaattctggaatttcaggacagtatagctcttattgaagatttacaaccattttcaacatacatgatacagatagctgtaaaaaattattattcagatcctttggaacatttaccaccaggaaaagagatttggggaaaaactaaaaatggagtaccagaggcagtgcagctcattaatacaactgtgcggtcagacaccagcctcattatatcttggagagaatctcacaagccaaatggacctaaagaatcagtccgttatcagttggcaatctcacacctggccctaattcctgaaactcctctaagacaaagtgaatttccaaatggaaggctcactctccttgttactagactgtctggtggaaatatttatgtgttaaaggttcttgcctgccactctgaggaaatgtggtgtacagagagtcatcctgtcactgtggaaatgtttaacacaccagagaaaccttattccttggttccagagaacactagtttgcaatttaattggaaggctccattgaatgttaacctcatcagattttgggttgagctacagaagtggaaatacaatgagttttaccatgttaaaacttcatgcagccaaggtcctgcttatgtctgtaatatcacaaatctacaaccttatacttcatataatgtcagagtagtggtggtttataagacgggagaaaatagcacctcacttccagaaagctttaagacaaaagctggagtcccaaataaaccaggcattcccaaattactagaagggagtaaaaattcaatacagtgggagaaagctgaagataatggatgtagaattacatactatatccttgagataagaaagagcacttcaaataatttacagaaccagaatttaaggtggaagatgacatttaatggatcctgcagtagtgtttgcacatggaagtccaaaaacctgaaaggaatatttcagttcagagtagtagctgcaaataatctagggtttggtgaatatagtggaatcagtgagaatattatattagttggagatgatttttggataccagaaacaagtttcatacttactattatagttggaatatttctggttgttacaatcccactgacctttgtctggcatagaagattaaagaatcaaaaaagtgccaaggaaggggtgacagtgcttataaacgaagacaaagagttggctgagctgcgaggtctggcagccggagtaggcctggctaatgcctgctatgcaatacatactcttccaacccaagaggagattgaaaatcttcctgccttccctcgggaaaaactgactctgcgtctcttgctgggaagtggagcctttggagaagtgtatgaaggaacagcagtggacatcttaggagttggaagtggagaaatcaaagtagcagtgaagactttgaagaagggttccacagaccaggagaagattgaattcctgaaggaggcacatctgatgagcaaatttaatcatcccaacattctgaagcagcttggagtttgtctgctgaatgaaccccaatacattatcctggaactgatggagggaggagaccttcttacttatttgcgtaaagcccggatggcaacgttttatggtcctttactcaccttggttgaccttgtagacctgtgtgtagatatttcaaaaggctgtgtctacttggaacggatgcatttcattcacagggatctggcagctagaaattgccttgtttccgtgaaagactataccagtccacggatagtgaagattggagactttggactcgccagagacatctataaaaatgattactatagaaagagaggggaaggcctgctcccagttcggtggatggctccagaaagtttgatggatggaatcttcactactcaatctgatgtatggtcttttggaattctgatttgggagattttaactcttggtcatcagccttatccagctcattccaaccttgatgtgttaaactatgtgcaaacaggagggagactggagccaccaagaaattgtcctgatgatctgtggaatttaatgacccagtgctgggctcaagaacccgaccaaagacctacttttcatagaattcaggaccaacttcagttattcagaaattttttcttaaatagcatttataagtccagagatgaagcaaacaacagtggagtcataaatgaaagctttgaaggtgaagatggcgatgtgatttgtttgaattcagatgacattatgccagttgctttaatggaaacgaagaaccgagaagggttaaactatatggtacttgctacagaatgtggccaaggtgaagaaaagtctgagggtcctctaggctcccaggaatctgaatcttgtggtctgaggaaagaagagaaggaaccacatgcagacaaagatttctgccaagaaaaacaagtggcttactgcccttctggcaagcctgaaggcctgaactatgcctgtctcactcacagtggatatggagatgggtctgattaatagcgttgtttgggaaatagagagttgagataaacactctcattcagtagttactgaaagaaaactctgctagaatgataaatgtcatggtggtctataactccaaataaacaatgcaacgttcc

SEQ ID NO: 14214 - DNA, 4064 bp, Homo sapiens
atgcccgggccccgaggggctgctggcggcctggcccctgagatgcgcggggcgggggcggcggggctgctggcgctgctgctgctgctgctgctgctgctgctgggcctgggcggcagggtcgagggggggccggccggcgagcggggcgcaggcgggggcggggcgctggcccgcgagcgcttcaaggtggtctttgcgccggtgatctgcaagcggacctgtctcaagggccagtgtcgggacagttgtcagcagggctccaacatgacgctcatcggagagaacggccacagcacagacacgctcacgggctccggcttccgcgtggtggtgtgccctctcccctgcatgaatggcggccagtgctcctcgcgaaaccagtgcctgtgtcccccggacttcactgggcgcttctgccaggtgcccgcaggaggagccggtgggggtaccggcggctcaggccccggcctgagcaggacaggggccctgtccacaggggcgctgccgcccctggctccggagggcgactctgtggccagcaagcacgccatctacgccgtccaggtgatcgctgaccctcctgggcccggggaggggcctcctgcccagcacgcagccttcctggtgcccctaggcccgggacagatctcagcagaagtgcaggccccgccccccgtggtgaatgtgcgcgtccatcacccgcccgaggcctcagtccaggtgcaccgcattgagagctcgaacgccgagagcgcagccccctcccagcacctgctgccgcaccccaagccctcgcacccccggccgcccacccagaagcccctgggccgctgctttcaggacactctgcccaagcagccgtgtggcagcaaccccctccccggcctcaccaagcaggaagactgctgcggtagcatcggcactgcctggggccagagcaagtgccacaagtgtccccagctgcagtacacaggagtgcagaagccagggcctgtacgtggggaagtgggcgctgactgtccccagggctacaagaggcttaacagcacccactgccaggacatcaacgagtgcgcaatgccgggcgtgtgtcgccatggtgactgcctcaacaaccctggctcctatcgctgtgtctgcccacctggccatagtttaggcccctcccgtacacagtgcattgcagacaaaccggaggagaagagcctgtgtttccgcctggtgagccctgagcaccagtgccagcacccactgaccacccgcctgacccgccagctctgctgctgcagtgtcggcaaggcctggggcgcgcggtgtcagcgctgcccaacagatggcaccgctgcgttcaaggagatctgcccagctgggaagggataccacattctcacctcccaccagacgctcaccattcagggcgagagtgacttttcccttttcctgcaccctgacgggccacccaagccccagcagcttccggagagccctagccaggctccaccacctgaggacacagaggaagagagaggggtgaccacggactcaccggtgagtgaggagaggtcagtgcagcagagccacccaactgccaccacgactcctgcccggccctaccccgagctgatctcccgtccctcgcccccgaccatgcgctggttcctgccggacttgcctccttcccgcagcgccgtagagatcgctcccactcaggtcacagagactgatgagtgccgactgaaccagaacatctgtggccacggagagtgcgtgccgggcccccctgactactcctgccactgcaaccccggctaccggtcacatccccagcaccgctactgcgtggatgtgaacgagtgcgaggcagagccctgtggcccggggaggggcatctgcatgaacaccggcggctcctacaattgccactgcaaccgcggctaccgcctgcacgtgggcgccggggggcgctcgtgcgtggacctgaacgaatgcgccaagccccacctgtgcggcgacggcggcttctgcatcaactttcccggtcactacaagtgcaactgctaccccggctaccggctcaaagcctcccggcctcctgtgtgcgaagacatcgacgagtgccgggacccaagctcttgcccggatggcaaatgcgagaacaagcccgggagcttcaagtgcatcgcctgtcagcctggctaccgcagccaggggggcggggcctgtcgcgacgtgaacgagtgcgccgagggcagcccctgctcgcctggctggtgcgagaacctcccgggctccttccgctgcacctgtgcccagggctacgcgcccgcgcccgacggccgcagttgcttggatgtggacgagtgtgaggctggggacgtgtgtgacaatggcatctgcagcaacacgccaggatctttccagtgtcagtgcctctctggctaccatctgtccagggaccggagccactgcgaggacattgatgagtgtgacttccctgcagcctgcattgggggtgactgcatcaataccaatggctcctacagatgtctttgcccccaggggcatcggctggtgggtggcaggaaatgccaagacatagatgagtgcagccaggacccgagcctgtgccttccccatggggcctgcaagaaccttcagggctcctatgtgtgtgtctgcgatgagggcttcactcccacccaggaccagcacggttgtgaggaggtggagcagccccaccacaagaaggagtgctacctgaacttcgatgacacagtgttctgcgacagcgtattggccaccaacgtgacccagcaggagtgctgctgctctctgggggccggctggggcgaccactgcgaaatctacccctgcccagtctacagctcagccgagttccacagcctctgcccagacggaaagggctacacccaggacaacaacatcgtcaactacggcatcccagcccaccgtgacatcgacgagtgcatgttgttcgggtcggagatttgcaaggagggcaagtgcgtgaacacgcagcctggctacgagtgctactgcaagcagggcttctactacgacgggaacctgctggaatgcgtggacgtggacgagtgcctggacgagtccaactgccggaacggagtgtgtgagaacacgcgcggcggctaccgctgtgcctgcacgccccctgccgagtacagtcccgcgcagcgccagtgcctgagcccggaagagatggagcgtgccccggagcggcgcgacgtgtgctggagccagcgcggagaggacggcatgtgcgctggccccctggccgggcctgccctcaccttcgacgactgctgctgccgccagggccgcggctggggcgcccaatgccgaccgtgcccgccgcgcggcgcggggtcccattgcccgacatcgcagagcgagagcaattccttctgggacacaagccccctgctgttggggaagcccccaagagatgaggacagttcagaggaggattcagacgagtgtcgctgcgtgagtggccgctgcgtgccgcggccgggcggcgccgtgtgcgagtgtcccggcggcttccagctcgacgcctcccgcgcccgctgcgtggatatcgacgagtgccgagagctgaaccagcgcgggctgctgtgcaagagcgagcgctgcgtgaacaccagcggctccttccgctgcgtctgcaaagccggcttcgcgcgcagccgcccgcacggggcctgcgttccccagcgccgccgctgacgccgccgacgccgccctcggcccagacctcggtgatcactgagggatttccgcgagctcggcctcacttctgccccgacttgtggctcggacccagggaccttcagggcccgcagaccctcccggcgccttgagacccgaggcgcccctaccggcccccctccccggttagcgggcggttgtaaggtctccggcgggcgctgcctgccttcctcccagagggtgtttcctagaaactgataaatcagatcgtgcctctttacccttggctttcgaaaaaaaaaaaaaaaaaa

SEQ ID NO: 14215 - DNA, 1171 bp, Homo sapiens
ccagcatggtgtgtctgaagctccctggaggttcctacatggcaaagctgacagtgacactgatggtgctgagctccccactggctttggctggggacacccgaccacgtttcttgcagcaggataagtatgagtgtcatttcttcaacgggacggagcgggtgcggttcctgcacagagacatctataaccaagaggaggacttgcgcttcgacagcgacgtgggggagtaccgggcggtgacggagctggggcggcctgacgctgagtactggaacagccagaaggacttcctggaagacaggcgcgccgcggtggacacctactgcagacacaactacggggttggtgagagcttcacagtgcagcggcgagttgagcctaaggtgactgtgtatcctgcaaggacccagaccctgcagcaccacaacctcctggtctgctctgtgaatggtttctatccaggcagcattgaagtcaggtggttccggaacagccaggaagagaaggctggggtggtgtccacaggcctgattcagaatggagactggaccttccagaccctggtgatgctggaaacagttcctcgaagtggagaggtttacacctgccaagtggagcacccaagcgtgacgagccctctcacagtggaatggagagcacagtctgaatctgcacagagcaagatgctgagtggagtcgggggctttgtgctgggcctgctcttccttggggccgggctattcatctacttcaagaatcagaaagggcactctggacttcacccaacaggactcgtgagctgaagtgcagatgaccacattcaagggggaaccttctgccccagctttgcatgatgaaaagctttcctgcttggctcttattcttccacaagagaggactttctcaggccctggttgctaccggttcagcaactctgcagaaaatgtccatccttgtggcttcctcagctcctgcccttggcctgaagtcccagcattgatggcagtgcctcatcttcaactttagtgctcccctttacctaaccctacggcctcccatgcatctgtactccccctgtgtgccacaaatgcactacgttattaaatttttctgaagcccagagttaaaaatcatctgtccacctggctccaaagacaaaaaataaaaa

SEQ ID NO: 14216 - DNA, 2588 bp, Homo sapiens
agcgttgtttttccttggcagctgcggagacccgtgataattcgttaactaattcaacaaacgggacccttctgtgtgccagaaaccgcaagcagttgctaacccagtgggacaggcggattggaagagcgggaaggtcctggcccagagcagtgtggtgagcgctgtgctggaagggaatgcgggcagtgggtacttggtagagcactgactgcctccggccagaggacttcccggaggaggtgacccatgagctggagtggtcagaggaaggctggcaaaagggcatcgtggacagaggaacagcctatgtgagtgggagcagagaccttggccaatgccattccttatggccttgtagtggaagcaaggtgatggggaaggaacactgtaggggatagctgtccacggacgctgtctacaagaccctggagtgagataacgtgcctggtactgtgccctgcatgtgtaagatgcccagttgaccttcgcagcaggagcctggatcagggcacttcctgcctcaggtattgctggacagcccagacacttccctctgtgaccatgaaactctgggtgtctgcattgctgatggcctggtttggtgtcctgagctgtgtgcaggccgaattcttcacctctattgggcacatgactgacctgatttatgcagagaaagagctggtgcagtctctgaaagagtacatccttgtggaggaagccaagctttccaagattaagagctgggccaacaaaatggaagccttgactagcaagtcagctgctgatgctgagggctacctggctcaccctgtgaatgcctacaaactggtgaagcggctaaacacagactggcctgcgctggaggaccttgtcctgcaggactcagctgcaggttttatcgccaacctctctgtgcagcggcagttcttccccactgatgaggacgagataggagctgccaaagccctgatgagacttcaggacacatacaggctggacccaggcacaatttccagaggggaacttccaggaaccaagtaccaggcaatgctgagtgtggatgactgctttgggatgggccgctcggcctacaatgaaggggactattatcatacggtgttgtggatggagcaggtgctaaagcagcttgatgccggggaggaggccaccacaaccaagtcacaggtgctggactacctcagctatgctgtcttccagttgggtgatctgcaccgtgccctggagctcacccgccgcctgctctcccttgacccaagccacgaacgagctggagggaatctgcggtactttgagcagttattggaggaagagagagaaaaaacgttaacaaatcagacagaagctgagctagcaaccccagaaggcatctatgagaggcctgtggactacctgcctgagagggatgtttacgagagcctctgtcgtggggagggtgtcaaactgacaccccgtagacagaagaggcttttctgtaggtaccaccatggcaacagggccccacagctgctcattgcccccttcaaagaggaggacgagtgggacagcccgcacatcgtcaggtactacgatgtcatgtctgatgaggaaatcgagaggatcaaggagatcgcaaaacctaaacttgcacgagccaccgttcgtgatcccaagacaggagtcctcactgtcgccagctaccgggtttccaaaagctcctggctagaggaagatgatgaccctgttgtggcccgagtaaatcgtcggatgcagcatatcacagggttaacagtaaagactgcagaattgttacaggttgcaaattatggagtgggaggacagtatgaaccgcacttcgacttctctaggaatgatgagcgagatactttcaagcatttagggacggggaatcgtgtggctactttcttaaactacatgagtgatgtagaagctggtggtgccaccgtcttccctgatctgggggctgcaatttggcctaagaagggtacagctgtgttctggtacaacctcttgcggagcggggaaggtgactaccgaacaagacatgctgcctgccctgtgcttgtgggctgcaagtgggtctccaataagtggttccatgaacgaggacaggagttcttgagaccttgtggatcaacagaagttgactgacatccttttctgtccttccccttcctggtccttcagcccatgtcaacgtgacagacacctttgtatgttcctttgtatgttcctatcaggctgatttttggagaaatgaatgtttgtctggagcagagggagaccatactagggcgactcctgtgtgactgaagtcccagcccttccattcagcctgtgccatccctggccccaaggctaggatcaaagtggctgcagcagagttagctgtctagcgcctagcaaggtgcctttgtacctcaggtgttttaggtgtgagatgtttcagtgaaccaaagttctgataccttgtttacatgtttgtttttatggcatttctatctattgtggctttaccaaaaaataaaatgtccctaccagaagccttaaaaaaaaaaaaaaaaaaa

SEQ ID NO: 14217 - DNA, 2795 bp, Homo sapiens
atcagcgagggattcacggcgaaatgagactgttcgtgagtgatggcgtcccgggttgcttgccggtgctggccgccgccgggagagcccggggcagagcagaggtgctcatcagcactgtaggcccggaagattgtgtggtcccgttcctgacccggcctaaggtccctgtcttgcagctggatagcggcaactacctcttctccactagtgcaatctgccgatatttttttttgttatctggctgggagcaagatgacctcactaaccagtggctggaatgggaagcgacagagctgcagccagctttgtctgctgccctgtactatttagtggtccaaggcaagaagggggaagatgttcttggttcagtgcggagagccctgactcacattgaccacagcttgagtcgtcagaactgtcctttcctggctggggagacagaatctctagccgacattgttttgtggggagccctatacccattactgcaagatcccgcctacctccctgaggagctgagtgccctgcacagctggttccagacactgagtacccaggaaccatgtcagcgagctgcagagactgtactgaaacagcaaggtgtcctggctctccggccttacctccaaaagcagccccagcccagccccgctgagggaagggctgtcaccaatgagcctgaggaggaggagctggctaccctatctgaggaggagattgctatggctgttactgcttgggagaagggcctagaaagtttgcccccgctgcggccccagcagaatccagtgttgcctgtggctggagaaaggaatgtgctcatcaccagtgccctcccttacgtcaacaatgtcccccaccttgggaacatcattggttgtgtgctcagtgccgatgtctttgccaggtactctcgcctccgccagtggaacaccctctatctgtgtgggacagatgagtatggtacagcaacagagaccaaggctctggaggagggactaaccccccaggagatctgcgacaagtaccacatcatccatgctgacatctaccgctggtttaacatttcgtttgatatttttggtcgcaccaccactccacagcagaccaaaatcacccaggacattttccagcagttgctgaaacgaggttttgtgctgcaagatactgtggagcaactgcgatgtgagcactgtgctcgcttcctggctgaccgcttcgtggagggcgtgtgtcccttctgtggctatgaggaggctcggggtgaccagtgtgacaagtgtggcaagctcatcaatgctgtcgagcttaagaagcctcagtgtaaagtctgccgatcatgccctgtggtgcagtcgagccagcacctgtttctggacctgcctaagctggagaagcgactggaggagtggttggggaggacattgcctggcagtgactggacacccaatgcccagtttatcacccgttcttggcttcgggatggcctcaagccacgctgcataacccgagacctcaaatggggaacccctgtacccttagaaggttttgaagacaaggtattctatgtctggtttgatgccactattggctatctgtccatcacagccaactacacagaccagtgggagagatggtggaagaacccagagcaagtggacctgtatcagttcatggccaaagacaatgttcctttccatagcttagtctttccttgctcagccctaggagctgaggataactataccttggtcagccacctcattgctacagagtacctgaactatgaggatgggaaattctctaagagccgcggtgtgggagtgtttggggacatggcccaggacacggggatccctgctgacatctggcgcttctatctgctgtacattcggcctgagggccaggacagtgctttctcctggacggacctgctgctgaagaataattctgagctgcttaacaacctgggcaacttcatcaacagagctgggatgtttgtgtctaagttctttgggggctatgtgcctgagatggtgctcacccctgatgatcagcgcctgctggcccatgtcaccctggagctccagcactatcaccagctacttgagaaggttcggatccgggatgccttgcgcagtatcctcaccatatctcgacatggcaaccaatatattcaggtgaatgagccctggaagcggattaaaggcagtgaggctgacaggcaacgggcaggaacagtgactggcttggcagtgaatatagctgccttgctctctgtcatgcttcagccttacatgcccacggttagtgccacaatccaggcccagctgcagctcccacctccagcctgcagtatcctgctgacaaacttcctgtgtaccttaccagcaggacaccagattggcacagtcagtcccttgttccaaaaattggaaaatgaccagattgaaagtttaaggcagcgctttggagggggccaggcaaaaacgtccccgaagccagcagttgtagagactgttacaacagccaagccacagcagatacaagcgctgatggatgaagtgacaaaacaaggaaacattgtccgagaactgaaagcacaaaaggcagacaagaacgaggttgctgcggaggtggcgaaactcttggatctaaagaaacagttggctgtagctgaggggaaaccccctgaagcccctaaaggcaagaagaaaaagtaaaagaccttggctcatagaaagtcactttaatagatagggacagtaataaataaatgtacaatctctata

SEQ ID NO: 14218 - DNA, 2326 bp, Homo sapiens
ggcctttgtcaagtcatcccctcttctcctcaggaactgctcaaacctgtgccccaaagatgagggcccaggaggacctcgagggccggacacagcatgaaaccaccagggacccctcgaccccgctacccacagagcctaagtttgacatgttgtacaagatcgaggacgtgccaccttggtacctgtgcatcctgctgggcttccagcactacctgacatgcttcagtggtaccatcgccgtgcccttcctgctggctgaggcgctgtgtgtgggccacgaccagcacatggttagtcagctcatcggcaccatcttcacgtgcgtgggcatcaccactctcatccagaccaccgtgggcatccggctgccgctgttccaggccagtgcctttgcatttctggttccagccaaagccatactggctctggagagatggaaatgccccccggaagaggagatctacggtaactggagtctgcccctgaacacctctcatatttggcacccacggatacgggaggtccagggtgcaatcatggtgtccagcgtggtggaggtggtgattggcctgctggggctgcctggggccctgctcaactacattgggcctctcacagtcacccccactgtctccctcattggcctttctgtcttccaagctgctggcgaccgagctggctcccactggggcatctcagcttgctccattctcctgatcatcctcttctcccagtacctgcgcaacctcaccttcctgctgcctgtctaccgctggggcaagggcctcactctcctccgcatccagatcttcaaaatgtttcctatcatgctggccatcatgaccgtgtggctgctctgctatgtcctgaccttgacagacgtgctgcccacagacccaaaagcctatggcttccaggcacgaaccgatgcccgtggtgacatcatggctattgcaccctggatccgcatcccctacccctgtcagtggggcctgcccacggtgactgcggctgctgtcctgggaatgttcagcgccactctggcaggcatcattgagtccatcggagattactacgcctgtgcccgcctggctggtgcaccaccccctccagtacatgctatcaacaggggcatcttcaccgaaggcatttgctgcatcatcgcggggctattgggcacgggcaacgggtccacctcgtccagtcccaacattggcgtcctgggaattaccaaggtgggcagccggcgcgtggtgcagtatggtgcggctatcatgctggtcctgggcaccatcggcaagttcacggccctcttcgcctcgctccctgaccccatcctggggggcatgttctgcactctctttggcatgattacagctgtggggctgtccaacctgcaatttgtggacatgaactcctctcgcaacctcttcgtgctgggattttccatgttcttcgggctcacgctgcccaattacctggagtccaaccctggcgccatcaatacaggcattcttgaagtggatcagattctgattgtgctgctgaccacggagatgtttgtgggcgggtgccttgctttcatacttgacaacacagtgccagggagcccagaggagcgtggtctgatacagtggaaagctggggctcatgccaacagtgacatgtcttccagcctcaagagctacgatttccccattgggatgggcatagtaaaaagaattacctttctgaaatacattcctatctgcccagtcttcaaaggattttcttcaagttcaaaagatcagattgcaattccagaagacactccagaaaatacagaaactgcatctgtgtgcaccaaggtctgaaaaatgacttccaggaaaggaagcatggtatataacaggaaaagaaaactacatggggaaccagaagacctaagcctgaaatcccagccctgcccctaactaacttctgtgtaaactcagataagtcacctttctctgggattcaaatttttgcatcagttaaaaaaaaaggggtgggggggaatgggccaaagtctgagtcttagagacttgtaccaatgttatgctatgtctctaaatctttactctcctaagtagacttgtcagcatctaggaagaacagctagaaattttcctctgtgatattttagactgcaagttgaaaaaaataaaaagaaatgagggcaggttccagggcctgaaatgtaggtatgctgcaaggcttttacattgaatttgaccctacatcacttcaagactaatgcataatattaaacatcatgttgaagaaaaaaaaaaaaaaaaaaaaa

SEQ ID NO: 14219 - DNA, 2338 bp, Homo sapiens
ggcctttgtcaagtcatcccctcttctcctcaggaactgctcaaacctgtgccccaaagatgagggcccaggaggacctcgagggccggacacagcatgaaaccaccagggacccctcgaccccgctacccacagagcctaagtttgacatgttgtacaagatcgaggacgtgccaccttggtacctgtgcatcctgctgggcttccagcactacctgacatgcttcagtggtaccatcgccgtgcccttcctgctggctgaggcgctgtgtgtgggccacgaccagcacatggttagtcagctcatcggcaccatcttcacgtgcgtgggcatcaccactctcatccagaccaccgtgggcatccggctgccgctgttccaggccagtgcctttgcatttctggttccagccaaagccatactggctctggagagatggaaatgccccccggaagaggagatctacggtaactggagtctgcccctgaacacctctcatatttggcacccacggatacgggaggtgggtttgcatgtccagggtgcaatcatggtgtccagcgtggtggaggtggtgattggcctgctggggctgcctggggccctgctcaactacattgggcctctcacagtcacccccactgtctccctcattggcctttctgtcttccaagctgctggcgaccgagctggctcccactggggcatctcagcttgctccattctcctgatcatcctcttctcccagtacctgcgcaacctcaccttcctgctgcctgtctaccgctggggcaagggcctcactctcctccgcatccagatcttcaaaatgtttcctatcatgctggccatcatgaccgtgtggctgctctgctatgtcctgaccttgacagacgtgctgcccacagacccaaaagcctatggcttccaggcacgaaccgatgcccgtggtgacatcatggctattgcaccctggatccgcatcccctacccctgtcagtggggcctgcccacggtgactgcggctgctgtcctgggaatgttcagcgccactctggcaggcatcattgagtccatcggagattactacgcctgtgcccgcctggctggtgcaccaccccctccagtacatgctatcaacaggggcatcttcaccgaaggcatttgctgcatcatcgcggggctattgggcacgggcaacgggtccacctcgtccagtcccaacattggcgtcctgggaattaccaaggtgggcagccggcgcgtggtgcagtatggtgcggctatcatgctggtcctgggcaccatcggcaagttcacggccctcttcgcctcgctccctgaccccatcctggggggcatgttctgcactctctttggcatgattacagctgtggggctgtccaacctgcaatttgtggacatgaactcctctcgcaacctcttcgtgctgggattttccatgttcttcgggctcacgctgcccaattacctggagtccaaccctggcgccatcaatacaggcattcttgaagtggatcagattctgattgtgctgctgaccacggagatgtttgtgggcgggtgccttgctttcatacttgacaacacagtgccagggagcccagaggagcgtggtctgatacagtggaaagctggggctcatgccaacagtgacatgtcttccagcctcaagagctacgatttccccattgggatgggcatagtaaaaagaattacctttctgaaatacattcctatctgcccagtcttcaaaggattttcttcaagttcaaaagatcagattgcaattccagaagacactccagaaaatacagaaactgcatctgtgtgcaccaaggtctgaaaaatgacttccaggaaaggaagcatggtatataacaggaaaagaaaactacatggggaaccagaagacctaagcctgaaatcccagccctgcccctaactaacttctgtgtaaactcagataagtcacctttctctgggattcaaatttttgcatcagttaaaaaaaaaggggtgggggggaatgggccaaagtctgagtcttagagacttgtaccaatgttatgctatgtctctaaatctttactctcctaagtagacttgtcagcatctaggaagaacagctagaaattttcctctgtgatattttagactgcaagttgaaaaaaataaaaagaaatgagggcaggttccagggcctgaaatgtaggtatgctgcaaggcttttacattgaatttgaccctacatcacttcaagactaatgcataatattaaacatcatgttgaagaaaaaaaaaaaaaaaaaaaaa

SEQ ID NO: 14220 - DNA, 1209 bp, Homo sapiens
acctctcaagcagccagcgcctgcctgaatctgttctgccccctccccacccatttcaccaccaccatgacaccgggcacccagtctcctttcttcctgctgctgctcctcacagtgcttacagttgttacgggttctggtcatgcaagctctaccccaggtggagaaaaggagacttcggctacccagagaagttcagtgcccagctctactgagaagaatgctttgtctactggggtctctttctttttcctgtcttttcacatttcaaacctccagtttaattcctctctggaagatcccagcaccgactactaccaagagctgcagagagacatttctgaaatgtttttgcagatttataaacaagggggttttctgggcctctccaatattaagttcaggccaggatctgtggtggtacaattgactctggccttccgagaaggtaccatcaatgtccacgacgtggagacacagttcaatcagtataaaacggaagcagcctctcgatataacctgacgatctcagacgtcagcgtgagtgatgtgccatttcctttctctgcccagtctggggctggggtgccaggctggggcatcgcgctgctggtgctggtctgtgttctggttgcgctggccattgtctatctcattgccttggctgtctgtcagtgccgccgaaagaactacgggcagctggacatctttccagcccgggatacctaccatcctatgagcgagtaccccacctaccacacccatgggcgctatgtgccccctagcagtaccgatcgtagcccctatgagaaggtttctgcaggtaatggtggcagcagcctctcttacacaaacccagcagtggcagccacttctgccaacttgtaggggcacgtcgcccgctgagctgagtggccagccagtgccattccactccactcaggttcttcagggccagagcccctgcaccctgtttgggctggtgagctgggagttcaggtgggctgctcacagcctccttcagaggccccaccaatttctcggacacttctcagtgtgtggaagctcatgtgggcccctgagggctcatgcctgggaagtgttgtggtgggggctcccaggaggactggcccagagagccctgagatagcggggatcctgaactggactgaataaaacgtggtctcccactgcgccaaaaaaaaaaaa

SEQ ID NO: 14221 - DNA, 6131 bp, Homo sapiens
agctatttcaaggcgcgcgcctcgtggtggactcaccgctagcccgcagcgctcggcttcctggtaattcttcacctcttttctcagctccctgcagcatgggtgctgggccctccttgctgctcgccgccctcctgctgcttctctccggcgacggcgccgtgcgctgcgacacacctgccaactgcacctatcttgacctgctgggcacctgggtcttccaggtgggctccagcggttcccagcgcgatgtcaactgctcggttatgggaccacaagaaaaaaaagtagtggtgtaccttcagaagctggatacagcatatgatgaccttggcaattctggccatttcaccatcatttacaaccaaggctttgagattgtgttgaatgactacaagtggtttgccttttttaaggatgtcactgattttatcagtcatttgttcatgcagctgggaactgtggggatatatgatttgccacatctgaggaacaaactggttattaaatagagcatctgttgagggactcttttaaaaccacagccatgaacagacgttggggctaagagacagagcagcctgcgacagtgtggacctacctgtagcagctagcaaaggcctctagcagctacagtcccttctggagtctttatttgcatgcaaaatgcaaaggagtcctggtgacctacctccaaggcagctgccctcctgaacactcccttggaaaacagtaaacatcattttggaatgtgaacaaccagagactacacaggagaaaggaaaaaaaaattctgaagatgcaaaatcttgggtggcttcaccgttcagttttttaataaaaggaacaatatacaacacgttgttctttttctcttttgaaatcccttctattacagtgatttttttctaagattgtcaggatttgaagtgtatgttttgttttattcacagcgtaaattttattcacagtttaactgtctgcctgagtgtctttcctttctctaattaccttgaggaacccaagagcctgttgtaaggagaaaataaggcccttggatctcttgagattcacagatataagttattgaagggaagatggtcctatggaggacatatttaaagaagggaaaaaagaggctttctcagatatgtcagactgctatagtatacttctacagattatagacctccagtacctctggccagaaagatggtatcgtaaacaccctattttttttcttttcttttttcattaggtacaagctttgtgctaagaagttgacatactataagctacaaaagttctgtaaagtagatataactagtttcattttatagatagagaaaattaatctcttacagtgctaagctcacagagtttctaactgtaaaatgctagaacttgtctttcaagcctaaagacttccttggggctaaatagtgaaaaaagccatttcacaaataagtaaatggtatttagaggcatatttggatttcctggtaaattccagtctgtgagcatcatgaatattagtttaatgttgcatgggctcatgttgaagttttaagagaagaactgccttgaagcttaggtttccttagctattaggctactgactttcttgcctaaaccagggttttttcattgaagaccaaaacttaccttctccttcagtttgtagtttggaaattggtagaagagctttgtaaacttcaaattaagtacaaactaagtgtcatagtcaaatttactaatcttaattacagtattgttcaactgattgctatcttctagctctttcctgccgaataatggtcttgtttcctgctctgttggtttagagctgacttctttcagctttggtaagcctgaaattatggggttatgtttaattcatattgtctgggtggactttcctctcttgcatttctgcttgaatagaagaatttttctctagagagtagtttgtcatccttactctgttgattcagatgactctttgtatgatctgagaggtatactgttctgctattctgagaagaagtatttcagaaagatgaattaagagtacagtggactgctcccacctggaaacttttatctatctcacctctggacctgataaattctttatcactcaggaccttgatgacgctgctctctgaaaccctccccagctctctctattaccgtgagaaacatcagaactttggttcccattgcatatcgcaggtacctctgctttcatgccatgctgtaatggagtgattgggtagcatgttttcatctctttccagattgaaaatctgtatttctccctgtatatcttcaacacctaatgcacatagaactttgtaggtacctggaaaatgcaccacagttttcttttctttttgcagacttttcacaagtattaccaacttacaaagaattaattttgtaggattctagaaagacaaatcaggaatggtgccatatacatcttttttgattccctgctctaaagaatattatcaggttaccttcctgcagagttttaaaagaattgcatatttcaagctgactttcaggatgtaaatataaccaaagcaactgatatgtaaaaaatatattcaatggcattcctagattttcttctagggtgttttattgttttgggttttacatttaagtctttaatccatcttgagttaatttttgtataggtataagaaaggggtccagttttaattttctgcgtatggctagccagttctcccagcaccatttattaaatagggaatcctttccctattgtttgtttttgtacggtttgtcaaagattagatggttgtagatgtgtggtcttatttctgagatcttcattctcttccactggtctatgtgtctgtttttgtaccatgcttttttggttactgtagccttgtagtatagtatgaaagatagcatgatgcctccaggtttgttctttttgcttaggattgtcttggctatacgagcttttttttggttctatatgaattttaaaatagtttcttctaattgtgtgaagaatgttaatggtagtttaatgggaatagcattgaatctgtgaattgctttgggcagtatggccattttcatgatattgattcttcctatccatgagcatgtaacgtttttcccttcgtttgtgtcctctctcatttccttgagtagtggtttgtagttctccttgaagagatccttcacttcttctgtattcctagatattttattctctctgtagctattgggaatgggagttcattcatgattttgctctctgcttgccttttgttggtgtatagggatcctggtgacttctgcacattgattttgtatcctgagactttaccgaagttgcttatcagcttaagaagcttttgggctgagatgatggggttttctagatataggatcatgttatcttcaaacaaagacaatttgacttcctctcttcctatttgagtacgctttatttctttctcttgcctgattgccctggccagaactcccaatactatattgaataagaatggtgagagagggcatccttgtcttgtgccagttttcacggggaatgcttccagcttttgcccattcagtatgatattatctgtgggtttctcataaaaagctcttattatttgagatacgttccttcaatacctagtttattgagagtttttaacatgaagcgatgttgaattgtatcgaaggccttttctgtgtctattgagataatcatgtggtttttgtctttagttctgtttatgtgatgaatgacgtttattgatttgcatatgttgaaccggccttgcatcctggggatgaagccaacttgactgtggtagataagcttttggatgtgctgctggatttggtttatcagtatttcattgagattttttgcgtcgaagttcatcagggatattggactgaagttttctttttgttgtcgtatctctgccaggttttggtatcaggatgatgctggcctcataaaatgagttagggaggagtccctccttttcaattgtttggaatagtttcagaagaaagggtatcagctcctctttgtacctctggtagaattcaactgtaaatccatctggtcctggactttttttcattagtaggctatttattactgcctcactttcataacttgttattgatctattcagggatccaacttcttcctgattcagtcttgggagtgtgtatgcatccaggaatttatccatttcttctagattttctagtttctttgcatagaggtgtttgtagtatttgctgttggttgtttgtacttctgtgagatcagtggtggtatcctgtttatcattttttattgtgtctgtttgattcttctcttatttttgacaaagctgacaaaaagaagcaatagggaaaggactctctattcaattaatcctactgtatatctggctagccatatgcagaaaattgaaactgttcctgtttcttaatccatatacgaaaatcaacttacgatggattaaagacttaaatgtaaaacccaaaattataaaaccctggaatagaatataggcaatatcattctggacataggaatgggcaaagattttatgagaaagacaccaaaagcaattacaacaaaagcaaaaattggcaaatgagatctaattaaactaaagagctctgcacagcaaaagaaactactgtcagagtgaacaggcaaccaacagaatgggagaaaattttttcaatctatccatatgacaaaggtctaacatccagaatctacaaggaacttaacaaatttacaagaaaaaaggagccccattaaaaagttggcaaagaacatgaacagacacttcccagaagatattcatgtggccaataaacatgaagaaaagctcaacatcactgaccattagagacgtgcatatcaaaatcacaatgagataccatctcatgtcacaatggtgattattaaaaagtcaaacaacatgctagtgaggttgtagagaaataagaacgcttttacactgttggtgggaatgtcaactaattcaaccactgtggaagacagtgtggtgattcctcaaggatttagaaccagaaatatcattactgcatatagacccaaaggaatagaaatcattctattacaaagatacatgcacatgtatgtttattacagcactattcacaatagcaaagacatggaatcaacccaaatgctcatcagtgatagactggaaaaagagaatgtggaacataaacaccatggaatactatgcagcaataaaaaggaatgagatcctgtccttttcagggacatggatggagttggaagctgttatcctcagcaaactaatgcaggaacagaaaaccaaccaccacatgttctcacttataagtgggagctgaacaatagaacacatgggcacagggaggggaataacacacactggggccagtcagggggtggggggtcaagctgagggagagcattagaaaaaatagctaatgcattctgggcttaacccatttatgcctagtgttccatttctggaatgctaagcatgtggaagttctttatatcctgctcaaggtcattgccaaggtctgatttttcacattcaacaaattgcaacctctggcataaatgggttaatacctaggtgatgagttgataggtgcaggaaaccaccatggcacatgtttatctatgtaagaaacctgcacatcctacacatgtaccctggaacttaaaaaatttaaaatatatatgtatatatatttaatatggaattttaaaaattactaatgagttcttttatctgagtaattttgcatcaacatgcttttattatggaagagaagattcagtgagtacaaaattgcagatacatgtgtcagaagatccctgaatataataaggcttagtattctgtgtcataattgcctgtttgtattcctctctggtctttaaacttcattagggcaaggatcaactccatcttactaaccatttgattccctatgtattacacgatatatgaccaataataagccttcaataaatacttgtaaaataaagaatgttatgtaat

SEQ ID NO: 14222 - DNA, 3705 bp, Homo sapiens
gatcggcggagctcccacctccgcttacagctcgctgccgccgtcctgccccgcgcccccaggagacctggaccagaccacgatgtggaaacgctggctcgcgctcgcgctcgcgctggtggcggtcgcctgggtccgcgccgaggaagagctaaggagcaaatccaagatctgtgccaatgtgttttgtggagccggccgggaatgtgcagtcacagagaaaggggaacccacctgtctctgcattgagcaatgcaaacctcacaagaggcctgtgtgtggcagtaatggcaagacctacctcaaccactgtgaactgcatcgagatgcctgcctcactggatccaaaatccaggttgattacgatggacactgcaaagagaagaaatccgtaagtccatctgccagcccagttgtttgctatcagtccaaccgtgatgagctccgacgtcgcatcatccagtggctggaagctgagatcattccagatggctggttctctaaaggcagcaactacagtgaaatcctagacaagtattttaagaactttgataatggtgattctcgcctggactccagtgaattcctgaagtttgtggaacagaatgaaactgccatcaatattacaacgtatccagaccaggagaacaacaagttgcttaggggactctgtgttgatgctctcattgaactgtctgatgaaaatgctgattggaaactcagcttccaagagtttctcaagtgcctcaacccatctttcaaccctcctgagaagaagtgtgccctggaggatgaaacgtatgcagatggagctgagaccgaggtggactgtaaccgctgtgtctgtgcctgtggaaattgggtctgtacagccatgacctgtgacggaaagaatcagaagggggcccagacccagacagaggaggagatgaccagatatgtccaggagctccaaaagcatcaggaaacagctgaaaagaccaagagagtgagcaccaaagagatctaatgaggaggcacagaccagtgtctggatcccagcatcttctccacttcagcgctgagttcagtatacacaagtgtctgctacagtcgccaaatcaccagtatttgcttatatagcaatgagttttattttgtttatttgttttgcaataaaggatatgaaggtggctggctaggaagggaagggccacagccttcatttctaggagtgctttaagagaaactgtaaatggtgctctggggctggaggctagtaaggaaactgcatcacgattgaaagaggaacagacccaaatctgaacctcttttgagtttactgcatctgtcagcaggctgcagggagtgcacacgatgccagagagaacttagcagggtgtccccggaggagaggtttgggaagctccacggagaggaacgctctctgcttccagcctctttccattgccgtcagcatgacagacctccagcatccacgcatctcttggtcccaataactgcctctagatacatagccatactgctagttaacccagtgtccctcagacttggatggagtttctgggagggtacacccaaatgatgcagatacttgtatactttgagccccttagcgacctaaccaaattttaaaaatactttttaccaaaggtgctatttctctgtaaaacactttttttttggcaagttgactttattcttcaattattatcattatattattgttttttaatattttattttcttgactaggtattaagcttttgtaattatttttcagtagtcccaccacttcataggtggaaggagtttggggttcttcctggtgcaggggctgaaataacccagatgcccccaccctgccacatactagatgcagcccatagttggcccccctagcttccagcagtccactatctgccagaggagcaagggtgccttagaccgaagccaggggaagaagcatcttcataaaaaactttcaagatccaaacattaatttgtttttatttattctgagaagttgaggcaaatcagtattcccaaggatggcgacaagggcagccaagcagggcttaggatatcccagcctaccaatatgctcattcgactaactaggagggtgagttggccctgtctcttcttttttctggacctcagtttcctcagtgagctggtaagaatgcactaaccttttgatttgataagttataaattctgtggttctgatcattggtccagaggggagataggttcctgtgatttttccttcttctctatagaataaatgaaatcttgttactagaacaagaaatgtcagatggccaaaaacaagatgaccagatttgatctcagcctgatgaccctacaggtcgtgctatgatatggagtcctcatgggtaaagcaggaagagagtgggaaagagaaccaccccactctgtcttcatatttgcatttcatgtttaacctccggctggaaatagaaagcattcccttagagatgaggataaaagaaagtttcagattcaacagggggaagaaaatggagatttaatcctaaaactgtgacttggggaggtcagtcatttacagttagtcctgtgtctttcgacttctgtgattattaaccccactcactaccctgtttcagatgcatttggaataccaaagattaaatccttgacataagatctcatttgcagaaagcagattaaagaccatcagaaggaaattatttaggttgtaatgcacaggcaactgtgagaaactgttgtgccaaaaatagaattccttctagtttttcttgttctcatttgaaaggagaaaattccactttgtttagcatttcaagcttttatgtatccatcccatctaaaaactcttcaaactccacttgttcagtctgaaatgcagctccctgtccaagtgccttggagaactcacagcagcacgccttaatcaaaggttttaccagcccttggacactatgggaggagggcaagagtacaccaatttgttaaaagcaagaaaccacagtgtctcttcactagtcatttagaacatggttatcatccaagactactctaccctgcaacattgaactcccaagagcaaatccacattcctcttgagttctgcagcttctgtgtaaatagggcagctgtcgtctatgccgtagaatcacatgatctgaggaccattcatggaagctgctaaatagcctagtctggggagtcttccataaagttttgcatggagcaaacaaacaggattaaactaggtttggttccttcagccctctaaaagcatagggcttagcctgcaggcttccttgggctttctctgtgtgtgtagttttgtaaacactatagcatctgttaagatccagtgtccatggaaacattcccacatgccgtgactctggactatatcagtttttggaaagcagggttcctctgcctgctaacaagcccacgtggaccagtctgaatgtctttcctttacacctatgtttttaagtagtcaaacttcaagaaacaatctaaacaagtttctgttgcatatgtgtttgtgaacttgtatttgtatttagtaggcttctatattgcatttaacttgtttttgtaactcctgattcttccttttcggatactattgatgaataaagaaattaaagtgaaaaaaaaaaaaaaaaaaaaaaa

SEQ ID NO: 14223 - DNA, 1571 bp, Homo sapiens
aataggcgttcgccattggctctggcgacctccgcgcgttgggaggtgtagcgcggctctgaacgcgctgagggccgttgagtgtcgcaggcggcgagggcgcgagtgaggagcagacccaggcatcgcgcgccgagaaggccgggcgtccccacactgaaggtccggaaaggcgacttccgggggctttggcacctggcggaccctcccggagcgtcggcacctgaacgcgaggcgctccattgcgcgtgcgcgttgaggggcttcccgcacctgatcgcgagaccccaacggctggtggcgtcgcctgcgcgtctcggctgagctggccatggcgcagctgtgcgggctgaggcggagccgggcgtttctcgccctgctgggatcgctgctcctctctggggtcctggcggccgaccgagaacgcagcatccacgacttctgcctggtgtcgaaggtggtgggcagatgccgggcctccatgcctaggtggtggtacaatgtcactgacggatcctgccagctgtttgtgtatgggggctgtgacggaaacagcaataattacctgaccaaggaggagtgcctcaagaaatgtgccactgtcacagagaatgccacgggtgacctggccaccagcaggaatgcagcggattcctctgtcccaagtgctcccagaaggcaggattctgaagaccactccagcgatatgttcaactatgaagaatactgcaccgccaacgcagtcactgggccttgccgtgcatccttcccacgctggtactttgacgtggagaggaactcctgcaataacttcatctatggaggctgccggggcaataagaacagctaccgctctgaggaggcctgcatgctccgctgcttccgccagcaggagaatcctcccctgccccttggctcaaaggtggtggttctggcggggctgttcgtgatggtgttgatcctcttcctgggagcctccatggtctacctgatccgggtggcacggaggaaccaggagcgtgccctgcgcaccgtctggagctccggagatgacaaggagcagctggtgaagaacacatatgtcctgtgaccgccctgtcgccaagaggactggggaagggaggggagactatgtgtgagctttttttaaatagagggattgactcggatttgagtgatcattagggctgaggtctgtttctctgggaggtaggacggctgcttcctggtctggcagggatgggtttgctttggaaatcctctaggaggctcctcctcgcatggcctgcagtctggcagcagccccgagttgtttcctcgctgatcgatttctttcctccaggtagagttttctttgcttatgttgaattccattgcctcttttctcatcacagaagtgatgttggaatcgtttcttttgtttgtctgatttatggtttttttaagtataaacaaaagttttttattagcattctgaaagaaggaaagtaaaatgtacaagtttaataaaaaggggccttcccctttagaataaatttcagcatgtgctttcaaaaaaaaaaaaaaaaaaa

SEQ ID NO: 14224 - DNA, 3927 bp, Homo sapiens
gcggcggcaggcctagcagcacgggaaccgtcccccgcgcgcatgcgcgcgcccctgaagcgcctgggggacgggtatgggcgggaggtaggggcgcggctccgcgtgccagttgggtgcccgcgcgtcacgtggtgaggaaggaggcggaggtctgagtttcgaaggagggggggagagaagagggaacgagcaagggaaggaaagcggggaaaggaggaaggaaacgaacgagggggagggaggtccctgttttggaggagctaggagcgttgccggcccctgaagtggagcgagagggaggtgcttcgccgtttctcctgccaggggaggtcccggcttcccgtggaggctccggaccaagccccttcagcttctccctccggatcgatgtgctgctgttaacccgtgaggaggcggcggcggcggcagcggcagcggaagatggtgttgctgagagtgttaattctgctcctctcctgggcggcggggatgggaggtcagtatgggaatcctttaaataaatatatcagacattatgaaggattatcttacaatgtggattcattacaccaaaaacaccagcgtgccaaaagagcagtctcacatgaagaccaatttttacgtctagatttccatgcccatggaagacatttcaacctacgaatgaagagggacacttcccttttcagtgatgaatttaaagtagaaacatcaaataaagtacttgattatgatacctctcatatttacactggacatatttatggtgaagaaggaagttttagccatgggtctgttattgatggaagatttgaaggattcatccagactcgtggtggcacattttatgttgagccagcagagagatatattaaagaccgaactctgccatttcactctgtcatttatcatgaagatgatattaactatccccataaatacggtcctcaggggggctgtgcagatcattcagtatttgaaagaatgaggaaataccagatgactggtgtagaggaagtaacacagatacctcaagaagaacatgctgctaatggtccagaacttctgaggaaaaaacgtacaacttcagctgaaaaaaatacttgtcagctttatattcagactgatcatttgttctttaaatattacggaacacgagaagctgtgattgcccagatatccagtcatgttaaagcgattgatacaatttaccagaccacagacttctccggaatccgtaacatcagtttcatggtgaaacgcataagaatcaatacaactgctgatgagaaggaccctacaaatcctttccgtttcccaaatattggtgtggagaagtttctggaattgaattctgagcagaatcatgatgactactgtttggcctatgtcttcacagaccgagattttgatgatggcgtacttggtctggcttgggttggagcaccttcaggaagctctggaggaatatgtgaaaaaagtaaactctattcagatggtaagaagaagtccttaaacactggaattattactgttcagaactatgggtctcatgtacctcccaaagtctctcacattacttttgctcacgaagttggacataactttggatccccacatgattctggaacagagtgcacaccaggagaatctaagaatttgggtcaaaaagaaaatggcaattacatcatgtatgcaagagcaacatctggggacaaacttaacaacaataaattctcactctgtagtattagaaatataagccaagttcttgagaagaagagaaacaactgttttgttgaatctggccaacctatttgtggaaatggaatggtagaacaaggtgaagaatgtgattgtggctatagtgaccagtgtaaagatgaatgctgcttcgatgcaaatcaaccagagggaagaaaatgcaaactgaaacctgggaaacagtgcagtccaagtcaaggtccttgttgtacagcacagtgtgcattcaagtcaaagtctgagaagtgtcgggatgattcagactgtgcaagggaaggaatatgtaatggcttcacagctctctgcccagcatctgaccctaaaccaaacttcacagactgtaataggcatacacaagtgtgcattaatgggcaatgtgcaggttctatctgtgagaaatatggcttagaggagtgtacgtgtgccagttctgatggcaaagatgataaagaattatgccatgtatgctgtatgaagaaaatggacccatcaacttgtgccagtacagggtctgtgcagtggagtaggcacttcagtggtcgaaccatcaccctgcaacctggatccccttgcaacgattttagaggttactgtgatgttttcatgcggtgcagattagtagatgctgatggtcctctagctaggcttaaaaaagcaatttttagtccagagctctatgaaaacattgctgaatggattgtggctcattggtgggcagtattacttatgggaattgctctgatcatgctaatggctggatttattaagatatgcagtgttcatactccaagtagtaatccaaagttgcctcctcctaaaccacttccaggcactttaaagaggaggagacctccacagcccattcagcaaccccagcgtcagcggccccgagagagttatcaaatgggacacatgagacgctaactgcagcttttgccttggttcttcctagtgcctacaatgggaaaacttcactccaaagagaaacctattaagtcatcatctccaaactaaaccctcacaagtaacagttgaagaaaaaatggcaagagatcatatcctcagaccaggtggaattacttaaattttaaagcctgaaaattccaatttgggggtgggaggtggaaaaggaacccaattttcttatgaacagatatttttaacttaatggcacaaagtcttagaatattattatgtgccccgtgttccctgttcttcgttgctgcattttcttcacttgcaggcaaacttggctctcaataaacttttaccacaaattgaaataaatatatttttttcaactgccaatcaaggctaggaggctcgaccacctcaacattggagacatcacttgccaatgtacataccttgttatatgcagacatgtatttcttacgtacactgtacttctgtgtgcaattgtaaacagaaattgcaatatggatgtttctttgtattataaaatttttccgctcttaattaaaaattactgtttaattgacatactcaggataacagagaatggtggtattcagtggtccaggattctgtaatgctttacacaggcagttttgaaatgaaaatcaatttacctttctgttacgatggagttggttttgatactcattttttctttatcacatggctgctacgggcacaagtgactatactgaagaacacagttaagtgttgtgcaaactggacatagcagcacatactacttcagagttcatgatgtagatgtctggtttctgcttacgtcttttaaactttctaattcaattccatttttcaattaataggtgaaattttattcatgctttgatagaaattatgtcaatgaaatgattctttttatttgtagcctacttatttgtgtttttcatatatctgaaatatgctaattatgttttctgtctgatatggaaaagaaaagctgtgtctttatcaaaatatttaaacggttttttcagcatatcatcactgatcattggtaaccactaaagatgagtaatttgcttaagtagtagttaaaattgtagataggccttctgacattttttttcctaaaatttttaacagcattgaaggtgaaacagcacaatgtcccattccaaatttatttttgaaacagatgtaaataattggcattttaaagag

SEQ ID NO: 14225 - DNA, 5179 bp, Homo sapiens
acctctactggggagacgaggaccccgaggttctggggggcgacgcgacctgcccgaagtgacaagggtcctgggccgcactgctccgccggggtctgcgctcctcggcggagcgggtgggaaggatgagtcctcggggtggagaaggaggagcgggtccccgggtaccgctcacccggccttaggagcccgggagcgcgcgtagggacgcggagttgaggctctccatctgcggccagggaaagggatacagtcccccgggcccctcccggccgctcggaacccaccccaggcgcgtccccgcgggcgcgcgctccaggcggggccgacgggctcggaggcgcgcgcccgctgccgggtccgccgcgcgcgctccctccgctcctctcccccgcccctcccgggcccgcgcgctcccagggtccgccgcgcgcgcgcctcgcgtcgctccccatccccgcccctcccgccgccaccccgcccccggccgggtaccctcgccggacccgagagagagcgccgccgccatcttagttgctgccgctgccttcagcaagacgctgctctgaggcggggagggcgccgcgtcctgagcgcgcggcccagcgtcacggcggcggcggcggcggctcctccttggacccccggagctccccgcgccgcggagcagctggccccaggcccctagagccccgagagctccgagagctccgctcggcgtcccgcgcgcctccctgccgctcccgccccgggctggcgatgctgcgccgccccgctcccgcgctggccccggccgcccggctgctgctggccgggctgctgtgcggcggcggggtctgggccgcgcgagttaacaagcacaagccctggctggagcccacctaccacggcatagtcacagagaacgacaacaccgtgctcctcgaccccccactgatcgcgctggataaagatgcgcctctgcgatttgcaggtgagatttgtggatttaaaattcacgggcagaatgtcccctttgatgcagtggtagtggataaatccactggtgagggagtcattcgctccaaagagaaactggactgtgagctgcagaaagactattcattcaccatccaggcctatgattgtgggaagggacctgatggcaccaacgtgaaaaagtctcataaagcaactgttcatattcaggtgaacgacgtgaatgagtacgcgcccgtgttcaaggagaagtcctacaaagccacggtcatcgaggggaagcagtacgacagcattttgagggtggaggccgtggatgccgactgctcccctcagttcagccagatttgcagctacgaaatcatcactccagacgtgccctttactgttgacaaagatggttatataaaaaacacagagaaattaaactacgggaaagaacatcaatataagctgaccgtcactgcctatgactgtgggaagaaaagagccacagaagatgttttggtgaagatcagcattaagcccacctgcacccctgggtggcaaggatggaacaacaggattgagtatgagccgggcaccggcgcgttggccgtctttccaaatatccacctggagacatgtgacgagccagtcgcctcagtacaggccacagtggagctagaaaccagccacatagggaaaggctgcgaccgagacacctactcagagaagtccctccaccggctctgtggtgcggccgcgggcactgccgagctgctgccatccccgagtggatccctcaactggaccatgggcctgcccaccgacaatggccacgacagcgaccaggtgtttgagttcaacggcacccaggcagtgaggatcccggatggcgtcgtgtcggtcagccccaaagagccgttcaccatctcggtgtggatgagacatgggccattcggcaggaagaaggagacaattctttgcagttctgataaaacagatatgaatcggcaccactactccctctatgtccacgggtgccggctgatcttcctcttccgtcaggatccttctgaggagaagaaatacagacctgcagagttccactggaagttgaatcaggtctgtgatgaggaatggcaccactacgtcctcaatgtagaattcccgagtgtgactctctatgtggatggcacgtcccacgagcccttctctgtgactgaggattacccgctccatccatccaagatagaaactcagctcgtggtgggggcttgctggcaagagttttcaggagttgaaaatgacaatgaaactgagcctgtgactgtggcctctgcaggtggcgacctgcacatgacccagtttttccgaggcaatctggctggcttaactctccgttccgggaaactcgcggataagaaggtgatcgactgtctgtatacctgcaaggaggggctggacctgcaggtcctcgaagacagtggcagaggcgtgcagatccaagcacaccccagccagttggtattgaccttggagggagaagacctcggggaattggataaggccatgcagcacatctcgtacctgaactcccggcagttccccacgcccggaattcgcagactcaaaatcaccagcacaatcaagtgttttaacgaggccacctgcatttcggtccccccggtagatggctacgtgatggttttacagcccgaggagcccaagatcagcctgagtggcgtccaccattttgcccgagcagcttctgaatttgaaagctcagaaggggtgttccttttccctgagcttcgcatcatcagcaccatcacgagagaagtggagcctgaaggggacggggctgaggaccccacagttcaagaatcactggtgtccgaggagatcgtgcacgacctggatacctgtgaggtcacggtggagggagaggagctgaaccacgagcaggagagcctggaggtggacatggcccgcctgcagcagaagggcattgaagtgagcagctctgaactgggcatgaccttcacaggcgtggacaccatggccagctacgaggaggttttgcacctgctgcgctatcggaactggcatgccaggtccttgcttgaccggaagtttaagctcatctgctcagagctgaatggccgctacatcagcaacgaatttaaggtggaggtgaatgtaatccacacggccaaccccatggaacacgccaaccacatggctgcccagccacagttcgtgcacccggaacaccgctcctttgttgacctgtcaggccacaacctggccaacccccacccgttcgcagtcgtccccagcactgcgacagttgtgatcgtggtgtgcgtcagcttcctggtgttcatgattatcctgggggtatttcggatccgggccgcacatcggcggaccatgcgggatcaggacaccgggaaggagaacgagatggactgggacgactctgccctgaccatcaccgtcaaccccatggagacctatgaggaccagcacagcagtgaggaggaggaggaagaggaagaggaagaggaaagcgaggacggcgaagaagaggatgacatcaccagcgccgagtcggagagcagcgaggaggaggagggggagcagggcgacccccagaacgcaacccggcagcagcagctggagtgggatgactccaccctcagctactgacccgtgcccccggccacctcggtttctgctttcgaagactctgctgccatccgttctcccagtcccaagggtccacgatgtacaaagtcatttcggccagtaggtgtgcagacccctccccgccacgatcgtcgctgtgcttggtgtgtaggaccctaggctccccgcccaccctctgcctggtcgcgctcttcagtcccacgaggagctgacacgtcctctctggccgccatccggctcgcacaggggcctcccagcgcctcaggccccgcgtttgtgtctggagtctccccccggggagaggacactggcccctcgcactccagaaaagccatgccagctgggctcgttgacaaagggtaaaacatgctcactcccacccggtaatcatttttttctttttttaaaaaaagtttttattttttccaaactagtgcatgtataaataatggcaggatggggggtactgtgtagatgattaactgactttttaatattttgtaaataaatcggattccttgtgtcctttgtgctagtgtaacccgggactggaatgtaaagtgaagttcggagctctgagcacgggctcttcccgccgggtcctccctccccagaccccagagggagaggcccaccccgcccagccccgccccagcccctgctcaggtctgagtatggctgggagtcgggggccacaggcctctagctgtgctgctcaagagactggatcagggtagctacaagtggccgggccttgcctttgggattctacctgttcctaatttggtgtggggtgcggggtccctggccccttttccacactcctcctccgacagcagctccctgggcagtggcctggtctcaccgtgtgcagccttgtggtttatgcttaaatgtacattttcctgctggtaaaaggagaaactgagaggtgtcctgcagaccggctgaccactccttttggagacggcaggaggcctgagcgatccgtactcagaacgtccaggagagacgcatggcccgaagtcaaagtgctggaattttccaaaacagcctgttctctcctctctcctccccagagcaccccctgccatcaggggggttgaaatccctctcccccaggagccctgctgctttgcttggtggtagggcaggagagcaaacaaacagtcatggtctaaaacccacatagcactttgctcttagttacatgtaaaattttagatttctaaaacaggtgggcaatcattttgaatactgttctgtgaccctgactgctagttctgaggacactggtggctgtgctatgtgtggccatcctccatgtcccgtccctgtagctgctctgtttagacagcggacagacgctcacgcccaggggatgtcctcacgctgtcgccgcgcggtttcccttcgcagatgtgtatactcatgataggtcagaaagtgtatccgctacaataaagttctggttctaactaactccaaaaaaaaaaaaaaaaaa

SEQ ID NO: 14226 - DNA, 1574 bp, Homo sapiens
gcttctctccatcttgtgattcctttttcctcctgaaccctccagtgggggtgcgagtttgtctttatcaccccccatcccaccgccttcttttcttctcgctctcctacccctccccagcttggtgggcgcctctttcctttctcgccccctttcatttttatttattcatatttatttggcgcccgctctctctctgtccctttgcctgcctccctccctccggatccccgctctctccccggagtggcgcgtcgggggctccgccgctggccaggcgtgatgttgcacgtggagatgttgacgctggtgtttctggtgctctggatgtgtgtgttcagccaggacccgggctccaaggccgtcgccgaccgctacgctgtctactggaacagcagcaaccccagattccagaggggtgactaccatattgatgtctgtatcaatgactacctggatgttttctgccctcactatgaggactccgtcccagaagataagactgagcgctatgtcctctacatggtgaactttgatggctacagtgcctgcgaccacacttccaaagggttcaagagatgggaatgtaaccggcctcactctccaaatggaccgctgaagttctctgaaaaattccagctcttcactcccttttctctaggatttgaattcaggccaggccgagaatatttctacatctcctctgcaatcccagataatggaagaaggtcctgtctaaagctcaaagtctttgtgagaccaacaaatagctgtatgaaaactataggtgttcatgatcgtgttttcgatgttaacgacaaagtagaaaattcattagaaccagcagatgacaccgtacatgagtcagccgagccatcccgcggcgagaacgcggcacaaacaccaaggatacccagccgccttttggcaatcctactgttcctcctggcgatgcttttgacattatagcacagtctcctcccatcacttgtcacagaaaacatcagggtcttggaacaccagagatccacctaactgctcatcctaagaagggacttgttattgggttttggcagatgtcagatttttgttttctttctttcagcctgaattctaagcaacaacttcaggttgggggcctaaacttgttcctgcctccctcaccccaccccgccccacccccagccctggcccttggcttctctcacccctcccaaattaaatggactccagatgaaaatgccaaattgtcatagtgacaccagtggttcgtcagctcctgtgcattctcctctaagaactcacctccgttagcgcactgtgtcagcgggctatggacaaggaagaatagtggcagatgcagccagcgctggctagggctgggagggttttgctctcctatgcaatatttatgccttctcattcagaactgtaagatgatcgcgcagggcatcatgtcaccatgtcaggtccggaggggaggtattaagaatagatacgatattacaccatttcctataggagtatgtaaatgaacaggcttctaaaaggttgagacactggttttttttttt

SEQ ID NO: 14227 - DNA, 5982 bp, Homo sapiens
cgagcatggagagctgccgccgcggccggccggcgacgctggcgacgctttcgcccctgaggtagtttggcgaccgcgaagaaggaaaaagggcgggcgggcggctgtcctctcaccgtcctcaccccgcgaggcccggcccgctcctccgtcgtggatttcgcggcgatccccccggcagctctttgcaaagctgcttgaaacttctcccaaactcggcatggatacgactgcggcggcggcgctgcctgcttttgtggcgctcttgctcctctctccttggcctctcctgggatcggcccaaggccagttctccgcaggtggctgtacttttgatgatggtccaggggcctgtgattaccaccaggatctgtatgatgactttgaatgggtgcatgttagtgctcaagagcctcattatctaccacccgagatgccccaaggttcctatatgatagtggactcttcagatcacgaccctggagaaaaagccagacttcagctgcctacaatgaaggagaacgacactcactgcattgatttcagttacctattatatagccagaaaggactgaatcctggcactttgaacatattagttagggtgaataaaggacctcttgccaatccaatttggaatgtgactggattcacgggtagagattggcttcgggctgagctagcagtgagcaccttttggcccaatgaatatcaggtaatatttgaagctgaagtctcaggagggagaagtggttatattgccattgatgacatccaagtactgagttatccttgtgataaatctcctcatttcctccgtctaggggatgtagaggtgaatgcagggcaaaacgctacatttcagtgcattgccacagggagagatgctgtgcataacaagttatggctccagagacgaaatggagaagatataccagtagcccagactaagaacatcaatcatagaaggtttgccgcttccttcagattgcaagaagtgacaaaaactgaccaggatttgtatcgctgtgtaactcagtcagaacgaggttccggtgtgtccaattttgctcaacttattgtgagagaaccgccaagacccattgctcctcctcagcttcttggtgttgggcctacatatttgctgatccaactaaatgccaactcgatcattggcgatggtcctatcatcctgaaagaagtagagtaccgaatgacatcaggatcctggacagaaacccatgcagtcaatgctccaacttacaaattatggcatttagatccagataccgaatatgagatccgagttctacttacaagacctggtgaaggtggaacggggctcccaggacctccactaatcaccagaacaaaatgtgcagaacctatgagaaccccaaagacattaaagattgctgaaatacaggcaagacggattgctgtggactgggaatccttgggttacaacattacgcgttgccacacttttaatgtcactatctgctaccattacttccgtggtcacaacgagagcaaggcagactgtttggacatggaccccaaagcccctcagcatgttgtgaaccatctgccaccttatacaaatgtcagcctcaagatgatcctaaccaatccagagggaaggaaggagagtgaagagacaattattcaaactgatgaagatgtgcctggtcccgtaccagtaaaatctcttcaaggaacatcctttgaaaataagatcttcttgaactggaaagaacctttggatccaaatggaatcatcactcaatatgagatcagctatagcagtataagatcatttgatcctgcagttccagtggctggacctccccagactgtatcaaatttatggaacagtacacaccatgtctttatgcatctccaccctggaaccacgtaccagtttttcataagagccagcacggtcaaaggctttggtccagccacagccatcaatgtcaccaccaatatctcagctccaactttacctgactatgaaggagttgatgcctctctcaatgaaactgccaccacaataactgtattgttgagaccagcacaagccaaaggtgctcctatcagtgcttatcagattgttgtggaagaactgcacccacaccgaaccaagagagaagccggagccatggaatgctaccaggttcctgtcacataccaaaatgccatgagtgggggtgcaccgtattactttgctgcagaactccccccgggaaacctacctgagcctgccccgttcactgtgggtgacaatcggacctaccaaggcttttggaaccctcctttggctccgcgcaaaggatacaacatctatttccaggcgatgagcagtgtggagaaggaaactaaaacccagtgcgtacgcattgctacaaaagcagcagcaacagaagaaccagaagtgatcccagatcccgccaagcagacagacagagtggtgaaaatagcaggaattagtgctggaattttggtgttcatcctccttctcctagttgtcatattaattgtaaaaaagagcaaacttgctaaaaaacgcaaagatgccatggggaatacccggcaggagatgactcacatggtgaatgcaatggatcgaagttatgctgatcagagcactctgcatgcagaagatcctctttccatcaccttcatggaccaacataactttagtccaagatatgagaaccacagtgctacagcagagtccagtcgccttctagacgtacctcgctacctctgtgaggggacggaatccccttaccagacaggacagctgcatccagccatcagggtagctgatttactgcagcacattaatctcatgaagacatcagacagctatgggttcaaagaggaatatgagagcttttttgaaggacagtcagcatcttgggatgtagctaaaaaagatcaaaatagagcaaaaaaccgatatggaaacattatagcatatgatcactccagagtgattttgcaacccgtagaggatgatccttcctcagattatattaatgccaactatattgatggctaccagagaccaagtcattacattgcaacccaaggtcccgttcatgaaacagtgtatgatttctggaggatgatttggcaagaacaatctgcttgcattgtgatggttacaaatttagttgaggttggccgggttaaatgctataaatattggcctgatgatactgaagtttatggtgacttcaaagtaacgtgtgtagaaatggaaccacttgctgaatatgtagttaggacattcaccctggaaaggagggggtacaatgaaatccgtgaagttaaacagttccatttcacgggctggcctgaccatggagtgccctaccatgctacagggctgctttcctttatccggcgagtcaagttatcaaaccctcccagtgctggccccatcgttgtacattgcagtgctggtgctggacgaactggctgctacattgtgattgacatcatgctagacatggctgaaagagagggtgttgttgatatttacaattgtgtcaaagccttaagatctcggcgtattaatatggtccagacagaggaacagtacatttttattcatgatgccattttagaagcctgcttatgtggagaaactgccatacctgtctgtgaatttaaagctgcatattttgatatgattagaatagactcccagactaactcttcacatctcaaggatgaatttcagactctgaattcagtcacccctcgactacaagctgaagactgcagtatagcgtgcctgccaaggaaccatgacaagaaccgtttcatggacatgctgccacctgacagatgtctgccttttttaattacaattgatggggagagcagtaactacatcaatgctgctcttatggacagctacaggcaaccagctgctttcatcgtcacacaataccctctgccaaacactgtaaaagacttctggagattagtgtatgattatggctgtacctccattgtgatgttaaacgaagtcgacttgtcccagggctgccctcagtactggccagaggaagggatgctacgatatggccccatccaagtggaatgtatgtcttgttcaatggactgtgatgtgatcaaccggatttttaggatatgcaatctaacaagaccacaggaaggttatctgatggtgcaacagtttcagtacctaggatgggcttctcatcgagaagtgcctggatccaaaaggtcattcttgaaactgatacttcaggtggaaaagtggcaggaggaatgcgaggaaggggaaggccggacgattatccactgcctaaatggtggcgggcgaagtggcatgttctgtgctataggcatcgttgttgaaatggtgaaacggcaaaatgttgtcgatgttttccatgcagtaaagacactgaggaacagcaagccaaacatggtggaagccccggagcaataccgtttctgctatgatgtagctttggagtacctggaatcatcttagttgggtgagactctttaaagtgcatccatgaagaaacctgtccatctattgagccagcagctgttgtacctgttacacttgtgcagaaagattttaatgtggggggtgggagacttttacatttgagaggtaaaagtattttttttatgaagttgtgtatcttaataaaaaggactgaattagtttttattactatattaaagcatcaacatttcatgccacataaattatatttaataagaaccagattgaaatgagaacgtattggtgtttgtacagtgaacatgccaccttttttctcatggtttcagtagagcagctaccacatgttgcatgagttcatactttctacgtggcatttttctccctttctaaaatgaaagctgatgaatcttaaaaggaagaagaaaagaaaagctgtgcaaattcatagtaaagttcgttttttatatgtttccagtgtagcagatctctatataaatatataaatatatataactggcttattttcttttaatgtgcaatgatggctggatcatttaaagttctttttagaaaataacataagccaaagactcaagtgtaaatatgtctatatggagaaagcacattatatttattggttacttacattccttttttgatggctaaaatactaccaccacacaatcatctttttttcctgaagaaagctttttctttagctaaaatcaattgtaaacgatttttgtagattattttttgtatgttttagtgtaagtagaagataaactttttattcataaaccaggaagcaatgttctttatagtgattctcttgtgtacatgcttgtgaattaaatttgtgtaaaatcccttggcaattgggtcttttaatataggaccaaattaaaacattttgctgaatatgtatagtttttcacaatttcattaggtaaataatggtttggtgatcatacatgagaaatgtacacattaaaaggccttgctgacaacttgcacaatgttgaacatagcctttaagcatcatttaaattttaaaggaatggagtttttcagcctgtggcccagcactggtcaagaaaacaagatggcaacatatatgctttcagggtcaaatttgagcaaactgtaaactgtcagggtgataaaatgtttctcttgatgtttacatgcacaagctttgcgttctgactataaaaagtgtgaacaaatcaatgccagattcctgttttgcgcattgtcatgggattcttaagtgaacctttctaaatgtggtcttgttcacatgctccacgtagctgtaacttcacatcatcagcttgcagtttgtaattgactaaagcattccagtgtcctctttctagattgccagctcatgacatggtgcttataaagatttaattaaagtaagaatgaaataaagtttttataattat

SEQ ID NO: 14228 - DNA, 4111 bp, Homo sapiens
cggcagggttggaaaatgatggaagaggcggaggtggaggcgaccgagtgctgagaggaacctgcggaatcggccgagatggggtctggcgcgcgctttccctcggggacccttcgtgtccggtggttgctgttgcttggcctggtgggcccagtcctcggtgcggcgcggccaggctttcaacagacctcacatctttcttcttatgaaattataactccttggagattaactagagaaagaagagaagcccctaggccctattcaaaacaagtatcttatgttattcaggctgaaggaaaagagcatattattcacttggaaaggaacaaagaccttttgcctgaagattttgtggtttatacttacaacaaggaagggactttaatcactgaccatcccaatatacagaatcattgtcattatcggggctatgtggagggagttcataattcatccattgctcttagcgactgttttggactcagaggattgctgcatttagagaatgcgagttatgggattgaacccctgcagaacagctctcattttgagcacatcatttatcgaatggatgatgtctacaaagagcctctgaaatgtggagtttccaacaaggatatagagaaagaaactgcaaaggatgaagaggaagagcctcccagcatgactcagctacttcgaagaagaagagctgtcttgccacagacccggtatgtggagctgttcattgtcgtagacaaggaaaggtatgacatgatgggaagaaatcagactgctgtgagagaagagatgattctcctggcaaactacttggatagtatgtatattatgttaaatattcgaattgtgctagttggactggagatttggaccaatggaaacctgatcaacatagttgggggtgctggtgatgtgctggggaacttcgtgcagtggcgggaaaagtttcttatcacacgtcggagacatgacagtgcacagctagttctaaagaaaggttttggtggaactgcaggaatggcatttgtgggaacagtgtgttcaaggagccacgcaggcgggattaatgtgtttggacaaatcactgtggagacatttgcttccattgttgctcatgaattgggtcataatcttggaatgaatcacgatgatgggagagattgttcctgtggagcaaagagctgcatcatgaattcaggagcatcgggttccagaaactttagcagttgcagtgcagaggactttgagaagttaactttaaataaaggaggaaactgccttcttaatattccaaagcctgatgaagcctatagtgctccctcctgtggtaataagttggtggacgctggggaagagtgtgactgtggtactccaaaggaatgtgaattggacccttgctgcgaaggaagtacctgtaagcttaaatcatttgctgagtgtgcatatggtgactgttgtaaagactgtcggttccttccaggaggtactttatgccgaggaaaaaccagtgagtgtgatgttccagagtactgcaatggttcttctcagttctgtcagccagatgtttttattcagaatggatatccttgccagaataacaaagcctattgctacaacggcatgtgccagtattatgatgctcaatgtcaagtcatctttggctcaaaagccaaggctgcccccaaagattgtttcattgaagtgaattctaaaggtgacagatttggcaattgtggtttctctggcaatgaatacaagaagtgtgccactgggaatgctttgtgtggaaagcttcagtgtgagaatgtacaagagatacctgtatttggaattgtgcctgctattattcaaacgcctagtcgaggcaccaaatgttggggtgtggatttccagctaggatcagatgttccagatcctgggatggttaacgaaggcacaaaatgtggtgctggaaagatctgtagaaacttccagtgtgtagatgcttctgttctgaattatgactgtgatgttcagaaaaagtgtcatggacatggggtatgtaatagcaataagaattgtcactgtgaaaatggctgggctcccccaaattgtgagactaaaggatacggaggaagtgtggacagtggacctacatacaatgaaatgaatactgcattgagggacggacttctggtcttcttcttcctaattgttccccttattgtctgtgctatttttatcttcatcaagagggatcaactgtggagaagctacttcagaaagaagagatcacaaacatatgagtcagatggcaaaaatcaagcaaacccttctagacagccggggagtgttcctcgacatgtttctccagtgacacctcccagagaagttcctatatatgcaaacagatttgcagtaccaacctatgcagccaagcaacctcagcagttcccatcaaggccacctccaccacaaccgaaagtatcatctcagggaaacttaattcctgcccgtcctgctcctgcacctcctttatatagttccctcacttgatttttttaaccttctttttgcaaatgtcttcagggaactgagctaatactttttttttttcttgatgttttcttgaaaagcctttctgttgcaactatgaatgaaaacaaaacaccacaaaacagacttcactaacacagaaaaacagaaactgagtgtgagagttgtgaaatacaaggaaatgcagtaaagccagggaatttacaataacatttccgtttccatcattgaataagtcttattcagtcatcggtgaggttaatgcactaatcatggattttttgaacatgttattgcagtgattctcaaattaactgtattggtgtaagatttttgtcattaagtgtttaagtgttattctgaattttctaccttagttatcattaatgtagttcctcattgaacatgtgataatctaatacctgtgaaaactgactaatcagctgccaataatatctaatatttttcatcatgcacgaattaataatcatcatactctagaatcttgtctgtcactcactacatgaataagcaaatattgtcttcaaaagaatgcacaagaaccacaattaagatgtcatattattttgaaagtacaaaatatactaaaagagtgtgtgtgtattcacgcagttactcgcttccatttttatgacctttcaactataggtaataactcttagagaaattaatttaatattagaatttctattatgaatcatgtgaaagcatgacattcgttcacaatagcactattttaaataaattataagctttaaggtacgaagtatttaatagatctaatcaaatatgttgattcatggctataataaagcaggagcaattataaaatcttcaatcaattgaacttttacaaaaccacttgagaatttcatgagcactttaaaatctgaactttcaaagcttgctattaaatcatttagaatgtttacatttactaaggtgtgctgggtcatgtaaaatattagacactaatattttcatagaaattaggctggagaaagaaggaagaaatggttttcttaaatacctacaaaaaagttactgtggtatctatgagttatcatcttagctgtgttaaaaatgaatttttactatggcagatatggtatggatcgtaaaattttaagcactaaaaattttttcataacctttcataataaagtttaataataggtttattaactgaatttcattagttttttaaaagtgtttttggtttgtgtatatatacatatacaaatacaacatttacaataaataaaatacttgaaattctcttttgtgtctcctagtagcttcctactcaactatttataatctcattaattaaaaagttataattttagataaaaattctagtcaaatttttacagatattatctcactaattttcagacttttgccaaagtgtgcacaatggctttttgttaataaagaacagattagttttgaagaaggcaaaaatttcagttttctgaagacagcatgttattttaacaatcaagtatacatattaaaaattgtgagcaatctcaaaaaaaaaaaaaaa

SEQ ID NO: 14229 - DNA, 1298 bp, Homo sapiens
ctctgctccggtgcaggcccgcagggcgccctgggctgggagcaacgcgactgaccgtggtcgtgggcggacggcggctgcagcgtggaggagctggggtcgctgtgggtcgcgaagcagagcccgggacgtgcgcgcttggtgcacgatcctgaaggggagctccgaggggcccgggtcgccagggctgctgcggccattcccggagcccggcgcggggcccgcgagatactggtttaggccgtcccagggctccgggcgcacccggtggccgctgctgcagcggagggagcgcggcggcgcgggggctcggagacagcgtttctcccggaagtcttcctcgggcagcaggtgggaagtgggagccggagcggcagctggcagcgttctctccgcaggtcggcaccatgcgccctgcagccctgcgcggggccctgctgggctgcctctgcctggcgttgctttgcctgggcggtgcggacaagcgcctgcgtgacaaccatgagtggaaaaaactaattatggttcagcactggcctgagacagtatgcgagaaaattcaaaacgactgtagagaccctccggattactggacaatacatggactatggcccgataaaagtgaaggatgtaatagatcgtggcccttcaatttagaagagattaaggatcttttgccagaaatgagggcatactggcctgacgtaattcactcgtttcccaatcgcagccgcttctggaagcatgagtgggaaaagcatgggacctgcgccgcccaggtggatgcgctcaactcccagaagaagtactttggcagaagcctggaactctacagggagctggacctcaacagtgtgcttctaaaattggggataaaaccatccatcaattactaccaagttgcagattttaaagatgcccttgccagagtatatggagtgatacccaaaatccagtgccttccaccaagccaggatgaggaagtacagacaattggtcagatagaactgtgcctcactaagcaagaccagcagctgcaaaactgcaccgagccgggggagcagccgtcccccaagcaggaagtctggctggcaaatggggccgccgagagccggggtctgagagtctgtgaagatggcccagtcttctatcccccacctaaaaagaccaagcattgatgcccaagttttggaaatattctgttttaaaaagcaagagaaattcacaaactgcagctttctaaaaaacaaaaaaaaaaaaaaaaaaaaaaaaaaaaaaaaaaaaaaaaaaaaaaaaaa

SEQ ID NO: 14230 - DNA, 1124 bp, Homo sapiens
gccgctgccaccgcaccccgccatggagcggccgtcgctgcgcgccctgctcctcggcgccgctgggctgctgctcctgctcctgcccctctcctcttcctcctcttcggacacctgcggcccctgcgagccggcctcctgcccgcccctgcccccgctgggctgcctgctgggcgagacccgcgacgcgtgcggctgctgccctatgtgcgcccgcggcgagggcgagccgtgcgggggtggcggcgccggcagggggtactgcgcgccgggcatggagtgcgtgaagagccgcaagaggcggaagggtaaagccggggcagcagccggcggtccgggtgtaagcggcgtgtgcgtgtgcaagagccgctacccggtgtgcggcagcgacggcaccacctacccgagcggctgccagctgcgcgccgccagccagagggccgagagccgcggggagaaggccatcacccaggtcagcaagggcacctgcgagcaaggtccttccatagtgacgccccccaaggacatctggaatgtcactggtgcccaggtgtacttgagctgtgaggtcatcggaatcccgacacctgtcctcatctggaacaaggtaaaaaggggtcactatggagttcaaaggacagaactcctgcctggtgaccgggacaacctggccattcagacccggggtggcccagaaaagcatgaagtaactggctgggtgctggtatctcctctaagtaaggaagatgctggagaatatgagtgccatgcatccaattcccaaggacaggcttcagcatcagcaaaaattacagtggttgatgccttacatgaaataccagtgaaaaaaggtgaaggtgccgagctataaacctccagaatattattagtctgcatggttaaaagtagtcatggataactacattacctgttcttgcctaataagtttcttttaatccaatccactaacactttagttatattcactggttttacacagagaaatacaaaataaagatcacacatcaagactatctacaaaaatttattatatatttacagaagaaaagcatgcatatcattaaacaaataaaatactttttatcacaaaaaaaaaaaaaaaa

SEQ ID NO: 14231 - DNA, 2374 bp, Homo sapiens
acagtcagctgtcggtggcttctgctgagatggccagaggactccaggttcccctgccgcggctggccacaggactgctgctcctcctcagtgtccagccctgggctgagagtggaaaggtgttggtggtgcccactgatggcagcccctggctcagcatgcgggaggccttgcgggagctccatgccagaggccaccaggcggtggtcctcaccccagaggtgaatatgcacatcaaagaagagaaatttttcaccctgacagcctatgctgttccatggacccagaaggaatttgatcgcgttacgctgggctacactcaagggttctttgaaacagaacatcttctgaagagatattctagaagtatggcaattatgaacaatgtatctttggcccttcataggtgttgtgtggagctactgcataatgaggccctgatcaggcacctgaatgctacttcctttgatgtggttttaacagaccccgttaacctctgtggggcggtgctggctaagtacctgtcgattcctgctgtgtttttttggaggtacattccatgtgacttagactttaagggcacacagtgtccaaatccttcctcctatattcctaagttactaacgaccaattcagaccacatgacattcctgcaaagggtcaagaacatgctctaccctctggccctgtcctacatttgccatactttttctgccccttatgcaagtcttgcctctgagctttttcagagagaggtgtcagtggtggatcttgtcagctatgcatccgtgtggctgttccgaggggactttgtgatggactaccccaggccgatcatgcccaacatggtcttcattgggggcatcaactgtgccaacgggaagccactatctcaggaatttgaagcctacattaatgcttctggagaacatggaattgtggttttctctttgggatcaatggtctcagaaattccagagaagaaagctatggcaattgctgatgctttgggcaaaatccctcagacagtcctgtggcggtacactggaacccgaccatcgaatcttgcgaacaacacgatacttgttaagtggctaccccaaaacgatctgcttggtcacccgatgacccgtgcctttatcacccatgctggttcccatggtgtttatgaaagcatatgcaatggcgttcccatggtgatgatgcccttgtttggtgatcagatggacaatgcaaagcgcatggagactaagggagctggagtgaccctgaatgttctggaaatgacttctgaagatttagaaaatgctctaaaagcagtcatcaatgacaaaagttacaaggagaacatcatgcgcctctccagccttcacaaggaccgcccggtggagccgctggacctggccgtgttctgggtggagtttgtgatgaggcacaagggcgcgccacacctgcgccccgcagcccacgacctcacctggtaccagtaccattccttggacgtgattggtttcctcttggccgtcgtgctgacagtggccttcatcacctttaaatgttgtgcttatggctaccggaaatgcttggggaaaaaagggcgagttaagaaagcccacaaatccaagacccattgagaagtgggtgggaaataaggtaaaattttgaaccattccctagtcatttccaaacttgaaaacagaatcagtgttaaattcattttattcttattaaggaaatactttgcataaattaatcagccccagagtgctttaaaaaattctcttaaataaaaataatagactcgctagtcagtaaagatatttgaatatgtatcgtgccccctctggtgtctttgatcaggatgacatgtgccatttttcagaggacgtgcagacaggctggcattctagattacttttcttactctgaaacatggcctgtttgggagtgcgggattcaaaggtggtcccacggctgcccctactgcaaatggcagttttaatcttatcttttggcttctgcagatggttgcaattgatccttaaccaataatggtcagtcctcatctctgtcgtgcttcataggtgccaccttgtgtgtttaaagaagggaagctttgtacctttagagtgtaggtgaaatgaatgaatggcttggagtgcactgagaacagcatatgatttcttgctttggggaaaaagaatgatgctatgaaattggtgggtggtgtatttgagaagataatcattgcttatgtcaaatggagctgaatttgataaaaacccaaaatacagctatgaagtgctgggcaagtttactttttttctgatgtttcctacaactaaaaataaattaataaatttatataaattct

SEQ ID NO: 14232 - DNA, 2357 bp, Homo sapiens
aggagcaaaggcgccatggctgtggagtcccagggcggacgcccacttgtcctgggcctgctgctgtgtgtgctgggcccagtggtgtcccatgctgggaagatactgttgatcccagtggatggcagccactggctgagcatgcttggggccatccagcagctgcagcagaggggacatgaaatagttgtcctagcacctgacgcctcgttgtacatcagagacggagcattttacaccttgaagacgtaccctgtgccattccaaagggaggatgtgaaagagtcttttgttagtctcgggcataatgtttttgagaatgattctttcctgcagcgtgtgatcaaaacatacaagaaaataaaaaaggactctgctatgcttttgtctggctgttcccacttactgcacaacaaggagctcatggcctccctggcagaaagcagctttgatgtcatgctgacggaccctttccttccttgcagccccatcgtggcccagtacctgtctctgcccactgtattcttcttgcatgcactgccatgcagcctggaatttgaggctacccagtgccccaacccattctcctacgtgcccaggcctctctcctctcattcagatcacatgaccttcctgcagcgggtgaagaacatgctcattgccttttcacagaactttctgtgcgacgtggtttattccccgtatgcaacccttgcctcagaattccttcagagagaggtgactgtccaggacctattgagctctgcatctgtctggctgtttagaagtgactttgtgaaggattaccctaggcccatcatgcccaatatggtttttgttggtggaatcaactgccttcaccaaaatccactatcccaggaatttgaagcctacattaatgcttctggagaacatggaattgtggttttctctttgggatcaatggtctcagaaattccagagaagaaagctatggcaattgctgatgctttgggcaaaatccctcagacagtcctgtggcggtacactggaacccgaccatcgaatcttgcgaacaacacgatacttgttaagtggctaccccaaaacgatctgcttggtcacccgatgacccgtgcctttatcacccatgctggttcccatggtgtttatgaaagcatatgcaatggcgttcccatggtgatgatgcccttgtttggtgatcagatggacaatgcaaagcgcatggagactaagggagctggagtgaccctgaatgttctggaaatgacttctgaagatttagaaaatgctctaaaagcagtcatcaatgacaaaagttacaaggagaacatcatgcgcctctccagccttcacaaggaccgcccggtggagccgctggacctggccgtgttctgggtggagtttgtgatgaggcacaagggcgcgccacacctgcgccccgcagcccacgacctcacctggtaccagtaccattccttggacgtgattggtttcctcttggccgtcgtgctgacagtggccttcatcacctttaaatgttgtgcttatggctaccggaaatgcttggggaaaaaagggcgagttaagaaagcccacaaatccaagacccattgagaagtgggtgggaaataaggtaaaattttgaaccattccctagtcatttccaaacttgaaaacagaatcagtgttaaattcattttattcttattaaggaaatactttgcataaattaatcagccccagagtgctttaaaaaattctcttaaataaaaataatagactcgctagtcagtaaagatatttgaatatgtatcgtgccccctctggtgtctttgatcaggatgacatgtgccatttttcagaggacgtgcagacaggctggcattctagattacttttcttactctgaaacatggcctgtttgggagtgcgggattcaaaggtggtcccacggctgcccctactgcaaatggcagttttaatcttatcttttggcttctgcagatggttgcaattgatccttaaccaataatggtcagtcctcatctctgtcgtgcttcataggtgccaccttgtgtgtttaaagaagggaagctttgtacctttagagtgtaggtgaaatgaatgaatggcttggagtgcactgagaacagcatatgatttcttgctttggggaaaaagaatgatgctatgaaattggtgggtggtgtatttgagaagataatcattgcttatgtcaaatggagctgaatttgataaaaacccaaaatacagctatgaagtgctgggcaagtttactttttttctgatgtttcctacaactaaaaataaattaataaatttatataaattct

SEQ ID NO: 14233 - DNA, 2399 bp, Homo sapiens
atagcagcttagaatcccagctgctggctcgggctgcagttctctcatggctcgcgcagggtggaccagccccgttcctttatgtgtgtgtctactgctgacctgtggctttgccgaggcagggaagctgctggtagtgcccatggatgggagtcactggttcaccatgcagtcggtggtggagaaacttatcctcagggggcatgaggtggttgtagtcatgccagaggtgagttggcaactggaaagatcactgaattgcacagtgaagacttactcaacctcgtacactctggaagatcagaaccgggaattcatggttttcgcccatgctcaatggaaagcacaggcacaaagtatattttctctattaatgagttcatccagtggttttcttgacttatttttttcgcattgcaggagtttgtttaatgaccgaaaattagtagaatacttaaaggagagttcttttgatgcagtgtttctggatccttttgatacctgtggcttaattgttgctaaatatttctccctcccctctgtggtcttcaccaggggaatattttgccaccatcttgaagaaggtgcacagtgccctgctcctctttcctatgtccccaatgatctcttagggttctcagatgccatgactttcaaggagagagtatggaaccacatcgtgcacttggaggaccatttattttgccagtatctttttagaaatgccctagaaatagcctctgaaattctccaaacccctgtcacggcatatgatctctacagtcacacatcaatttggttgttgcgaacggactttgttttggactatcccaaacccgtgatgcccaacatgatcttcattggtggtatcaactgtcatcagggaaagccattgcctatggaatttgaagcctacattaatgcttctggagaacatggaattgtggttttctctttgggatcaatggtctcagaaattccagagaagaaagctatggcaattgctgatgctttgggcaaaatccctcagacagtcctgtggcggtacactggaacccgaccatcgaatcttgcgaacaacacgatacttgttaagtggctaccccaaaacgatctgcttggtcacccgatgacccgtgcctttatcacccatgctggttcccatggtgtttatgaaagcatatgcaatggcgttcccatggtgatgatgcccttgtttggtgatcagatggacaatgcaaagcgcatggagactaagggagctggagtgaccctgaatgttctggaaatgacttctgaagatttagaaaatgctctaaaagcagtcatcaatgacaaaagttacaaggagaacatcatgcgcctctccagccttcacaaggaccgcccggtggagccgctggacctggccgtgttctgggtggagtttgtgatgaggcacaagggcgcgccacacctgcgccccgcagcccacgacctcacctggtaccagtaccattccttggacgtgattggtttcctcttggccgtcgtgctgacagtggccttcatcacctttaaatgttgtgcttatggctaccggaaatgcttggggaaaaaagggcgagttaagaaagcccacaaatccaagacccattgagaagtgggtgggaaataaggtaaaattttgaaccattccctagtcatttccaaacttgaaaacagaatcagtgttaaattcattttattcttattaaggaaatactttgcataaattaatcagccccagagtgctttaaaaaattctcttaaataaaaataatagactcgctagtcagtaaagatatttgaatatgtatcgtgccccctctggtgtctttgatcaggatgacatgtgccatttttcagaggacgtgcagacaggctggcattctagattacttttcttactctgaaacatggcctgtttgggagtgcgggattcaaaggtggtcccacggctgcccctactgcaaatggcagttttaatcttatcttttggcttctgcagatggttgcaattgatccttaaccaataatggtcagtcctcatctctgtcgtgcttcataggtgccaccttgtgtgtttaaagaagggaagctttgtacctttagagtgtaggtgaaatgaatgaatggcttggagtgcactgagaacagcatatgatttcttgctttggggaaaaagaatgatgctatgaaattggtgggtggtgtatttgagaagataatcattgcttatgtcaaatggagctgaatttgataaaaacccaaaatacagctatgaagtgctgggcaagtttactttttttctgatgtttcctacaactaaaaataaattaataaatttatataaattctatttaaaaaaaaaaaaaaaa

SEQ ID NO: 14234 - DNA, 2395 bp, Homo sapiens
agattcccagctgcttgctctcagctgcagttctctgatggcttgcacagggtggaccagcccccttcctctatgtgtgtgtctgctgctgacctgtggctttgccgaggcagggaagctactggtagtgcccatggatgggagccactggttcaccatgaggtcggtggtggagaaactcattctcagggggcatgaggtggttgtagtcatgccagaggtgagttggcaactgggaagatcactgaattgcacagtgaagacttattcaacttcatataccctggaggatctggaccgggagttcaaggcttttgcccatgctcaatggaaagcacaagtacgaagtatatattctctattaatgggttcatacaatgacatttttgacttatttttttcaaattgcaggagtttgtttaaagacaaaaaattagtagaatacttaaaggagagttcttttgatgcagtgtttctcgatccttttgataactgtggcttaattgttgccaaatatttctccctcccctccgtggtcttcgccaggggaatactttgccactatcttgaagaaggtgcacagtgccctgctcctctttcctatgtccccagaattctcttagggttctcagatgccatgactttcaaggagagagtacggaaccacatcatgcacttggaggaacatttattatgccaccgttttttcaaaaatgccctagaaatagcctctgaaattctccaaacacctgttacggagtatgatctctacagccacacatcaatttggttgttgcgaacggactttgttttggactatcccaaacccgtgatgcccaacatgatcttcattggtggtatcaactgccatcagggaaagccgttgcctatggaatttgaagcctacattaatgcttctggagaacatggaattgtggttttctctttgggatcaatggtctcagaaattccagagaagaaagctatggcaattgctgatgctttgggcaaaatccctcagacagtcctgtggcggtacactggaacccgaccatcgaatcttgcgaacaacacgatacttgttaagtggctaccccaaaacgatctgcttggtcacccgatgacccgtgcctttatcacccatgctggttcccatggtgtttatgaaagcatatgcaatggcgttcccatggtgatgatgcccttgtttggtgatcagatggacaatgcaaagcgcatggagactaagggagctggagtgaccctgaatgttctggaaatgacttctgaagatttagaaaatgctctaaaagcagtcatcaatgacaaaagttacaaggagaacatcatgcgcctctccagccttcacaaggaccgcccggtggagccgctggacctggccgtgttctgggtggagtttgtgatgaggcacaagggcgcgccacacctgcgccccgcagcccacgacctcacctggtaccagtaccattccttggacgtgattggtttcctcttggccgtcgtgctgacagtggccttcatcacctttaaatgttgtgcttatggctaccggaaatgcttggggaaaaaagggcgagttaagaaagcccacaaatccaagacccattgagaagtgggtgggaaataaggtaaaattttgaaccattccctagtcatttccaaacttgaaaacagaatcagtgttaaattcattttattcttattaaggaaatactttgcataaattaatcagccccagagtgctttaaaaaattctcttaaataaaaataatagactcgctagtcagtaaagatatttgaatatgtatcgtgccccctctggtgtctttgatcaggatgacatgtgccatttttcagaggacgtgcagacaggctggcattctagattacttttcttactctgaaacatggcctgtttgggagtgcgggattcaaaggtggtcccacggctgcccctactgcaaatggcagttttaatcttatcttttggcttctgcagatggttgcaattgatccttaaccaataatggtcagtcctcatctctgtcgtgcttcataggtgccaccttgtgtgtttaaagaagggaagctttgtacctttagagtgtaggtgaaatgaatgaatggcttggagtgcactgagaacagcatatgatttcttgctttggggaaaaagaatgatgctatgaaattggtgggtggtgtatttgagaagataatcattgcttatgtcaaatggagctgaatttgataaaaacccaaaatacagctatgaagtgctgggcaagtttactttttttctgatgtttcctacaactaaaaataaattaataaatttatataaattctatttaaaaaaaaaaaaaaaaaaaaa

SEQ ID NO: 14235 - DNA, 2435 bp, Homo sapiens
gaaaagcagtggtttgtttagggaaaatacctaggagccctgtgatttggagagtgaaaactctttattaccgttgttactttaactctttccaggatggcctgcctccttcgctcatttcagagaatttctgcaggggttttcttcttagcactttggggcatggttgtaggtgacaagctgctggtggtccctcaggacggaagccactggcttagtatgaaggatatagttgaggttctcagtgaccggggtcatgagattgtagtggtggtgcctgaagttaatttgcttttgaaagaatccaaatactacacaagaaaaatctatccagtgccgtatgaccaagaagagctgaagaaccgttaccaatcatttggaaacaatcactttgctgagcgatcattcctaactgctcctcagacagagtacaggaataacatgattgttattggcctgtacttcatcaactgccagagcctcctgcaggacagggacaccctgaacttctttaaggagagcaagtttgatgctcttttcacagacccagccttaccctgtggggtgatcctggctgagtatttgggcctaccatctgtgtacctcttcaggggttttccgtgttccctggagcatacattcagcagaagcccagaccctgtgtcctacattcccaggtgctacacaaagttttcagaccacatgactttttcccaacgagtggccaacttccttgttaatttgttggagccctatctattttattgtctgttttcaaagtatgaagaactcgcatcagctgtcctcaagagagatgtggatataatcaccttatatcagaaggtctctgtttggctgttaagatatgactttgtgcttgaatatcctaggccggtcatgcccaacatggtcttcattggaggtatcaactgtaagaagaggaaagacttgtctcaggaatttgaagcctacattaatgcttctggagaacatggaattgtggttttctctttgggatcaatggtctcagaaattccagagaagaaagctatggcaattgctgatgctttgggcaaaatccctcagacagtcctgtggcggtacactggaacccgaccatcgaatcttgcgaacaacacgatacttgttaagtggctaccccaaaacgatctgcttggtcacccgatgacccgtgcctttatcacccatgctggttcccatggtgtttatgaaagcatatgcaatggcgttcccatggtgatgatgcccttgtttggtgatcagatggacaatgcaaagcgcatggagactaagggagctggagtgaccctgaatgttctggaaatgacttctgaagatttagaaaatgctctaaaagcagtcatcaatgacaaaagttacaaggagaacatcatgcgcctctccagccttcacaaggaccgcccggtggagccgctggacctggccgtgttctgggtggagtttgtgatgaggcacaagggcgcgccacacctgcgccccgcagcccacgacctcacctggtaccagtaccattccttggacgtgattggtttcctcttggccgtcgtgctgacagtggccttcatcacctttaaatgttgtgcttatggctaccggaaatgcttggggaaaaaagggcgagttaagaaagcccacaaatccaagacccattgagaagtgggtgggaaataaggtaaaattttgaaccattccctagtcatttccaaacttgaaaacagaatcagtgttaaattcattttattcttattaaggaaatactttgcataaattaatcagccccagagtgctttaaaaaattctcttaaataaaaataatagactcgctagtcagtaaagatatttgaatatgtatcgtgccccctctggtgtctttgatcaggatgacatgtgccatttttcagaggacgtgcagacaggctggcattctagattacttttcttactctgaaacatggcctgtttgggagtgcgggattcaaaggtggtcccacggctgcccctactgcaaatggcagttttaatcttatcttttggcttctgcagatggttgcaattgatccttaaccaataatggtcagtcctcatctctgtcgtgcttcataggtgccaccttgtgtgtttaaagaagggaagctttgtacctttagagtgtaggtgaaatgaatgaatggcttggagtgcactgagaacagcatatgatttcttgctttggggaaaaagaatgatgctatgaaattggtgggtggtgtatttgagaagataatcattgcttatgtcaaatggagctgaatttgataaaaacccaaaatacagctatgaagtgctgggcaagtttactttttttctgatgtttcctacaactaaaaataaattaataaatttatataaattct

SEQ ID NO: 14236 - DNA, 2396 bp, Homo sapiens
cttccgcctactgtatcatagcagcttagaatcccagctgctggctcgggctgcagttctctcatggctcgcacagggtggaccagccccattcccctatgtgtttctctgctgctgacctgtggctttgctgaggcagggaagctgctggtagtgcccatggatgggagtcactggttcaccatgcagtcggtggtggagaaacttatcctcagggggcatgaggtggttgtagtcatgccagaggtgagttggcaactgggaaaatcactgaattgcacagtgaagacttactcaacctcatacactctggaggatctggaccgggaattcatggatttcgccgatgctcaatggaaagcacaagtacgaagtttgttttctctatttctgagttcatccaatggtttttttaacttatttttttcgcattgcaggagtttgtttaatgaccgaaaattagtagaatacttaaaggagagttcttttgatgcggtgtttcttgatccttttgatgcctgtggcttaattgttgccaaatatttctccctcccctctgtggtcttcgccaggggaatagcttgccactatcttgaagaaggtgcacagtgccctgctcctctttcctatgtccccagaattctcttagggttctcagatgccatgactttcaaggagagagtacggaaccacatcatgcacttggaggaacatttattttgccagtatttttccaaaaatgccctagaaatagcctctgaaattctccaaacacctgtcacagcatatgatctctacagccacacatcaatttggttgttgcgaacagactttgttttggactatcccaaacccgtgatgcccaatatgatcttcattggtggtatcaactgccatcagggaaagccattgcctatggaatttgaagcctacattaatgcttctggagaacatggaattgtggttttctctttgggatcaatggtctcagaaattccagagaagaaagctatggcaattgctgatgctttgggcaaaatccctcagacagtcctgtggcggtacactggaacccgaccatcgaatcttgcgaacaacacgatacttgttaagtggctaccccaaaacgatctgcttggtcacccgatgacccgtgcctttatcacccatgctggttcccatggtgtttatgaaagcatatgcaatggcgttcccatggtgatgatgcccttgtttggtgatcagatggacaatgcaaagcgcatggagactaagggagctggagtgaccctgaatgttctggaaatgacttctgaagatttagaaaatgctctaaaagcagtcatcaatgacaaaagttacaaggagaacatcatgcgcctctccagccttcacaaggaccgcccggtggagccgctggacctggccgtgttctgggtggagtttgtgatgaggcacaagggcgcgccacacctgcgccccgcagcccacgacctcacctggtaccagtaccattccttggacgtgattggtttcctcttggccgtcgtgctgacagtggccttcatcacctttaaatgttgtgcttatggctaccggaaatgcttggggaaaaaagggcgagttaagaaagcccacaaatccaagacccattgagaagtgggtgggaaataaggtaaaattttgaaccattccctagtcatttccaaacttgaaaacagaatcagtgttaaattcattttattcttattaaggaaatactttgcataaattaatcagccccagagtgctttaaaaaattctcttaaataaaaataatagactcgctagtcagtaaagatatttgaatatgtatcgtgccccctctggtgtctttgatcaggatgacatgtgccatttttcagaggacgtgcagacaggctggcattctagattacttttcttactctgaaacatggcctgtttgggagtgcgggattcaaaggtggtcccacggctgcccctactgcaaatggcagttttaatcttatcttttggcttctgcagatggttgcaattgatccttaaccaataatggtcagtcctcatctctgtcgtgcttcataggtgccaccttgtgtgtttaaagaagggaagctttgtacctttagagtgtaggtgaaatgaatgaatggcttggagtgcactgagaacagcatatgatttcttgctttggggaaaaagaatgatgctatgaaattggtgggtggtgtatttgagaagataatcattgcttatgtcaaatggagctgaatttgataaaaacccaaaatacagctatgaagtgctgggcaagtttactttttttctgatgtttcctacaactaaaaataaattaataaatttatataaattct

SEQ ID NO: 14237 - DNA, 2345 bp, Homo sapiens
atggccacaggactccaggttcccctgccgtggctggccacaggactgctgcttctcctcagtgtccagccctgggctgagagtggaaaggtgttggtggtgcccattgatggcagccactggctcagcatgcgggaggtcttgcgggagctccatgccagaggccaccaggcagtggtcctcaccccagaggtgaatatgcacatcaaagaagagaactttttcaccctgacaacctatgccatttcgtggacccaggatgaatttgatcgccatgtgctgggccacactcaactgtactttgaaacagaacattttctgaagaaatttttcagaagtatggcaatgttgaacaatatgtctttggtctatcataggtcttgtgtggagctactacataatgaggccctgatcaggcacctgaatgctacttcctttgatgtggttttaacagaccccgttaacctctgcgcggcagtgctggctaagtacctgtcgattcctactgtgttttttttgaggaacattccatgtgatttagactttaagggcacacagtgtccaaacccttcctcctatattcctagattactaacaaccaattcagaccacatgacattcatgcaaagggtcaagaacatgctctaccctctggccctgtcctacatttgccatgctttttctgctccttatgcaagccttgcctctgagctttttcagagagaggtgtcagtggtggatattctcagtcatgcatctgtgtggctgttccgaggggactttgtgatggactaccccaggccaatcatgcccaacatggtcttcattgggggcatcaactgtgccaacaggaagccactatctcaggaatttgaagcctacattaatgcttctggagaacatggaattgtggttttctctttgggatcaatggtctcagaaattccagagaagaaagctatggcaattgctgatgctttgggcaaaatccctcagacagtcctgtggcggtacactggaacccgaccatcgaatcttgcgaacaacacgatacttgttaagtggctaccccaaaacgatctgcttggtcacccgatgacccgtgcctttatcacccatgctggttcccatggtgtttatgaaagcatatgcaatggcgttcccatggtgatgatgcccttgtttggtgatcagatggacaatgcaaagcgcatggagactaagggagctggagtgaccctgaatgttctggaaatgacttctgaagatttagaaaatgctctaaaagcagtcatcaatgacaaaagttacaaggagaacatcatgcgcctctccagccttcacaaggaccgcccggtggagccgctggacctggccgtgttctgggtggagtttgtgatgaggcacaagggcgcgccacacctgcgccccgcagcccacgacctcacctggtaccagtaccattccttggacgtgattggtttcctcttggccgtcgtgctgacagtggccttcatcacctttaaatgttgtgcttatggctaccggaaatgcttggggaaaaaagggcgagttaagaaagcccacaaatccaagacccattgagaagtgggtgggaaataaggtaaaattttgaaccattccctagtcatttccaaacttgaaaacagaatcagtgttaaattcattttattcttattaaggaaatactttgcataaattaatcagccccagagtgctttaaaaaattctcttaaataaaaataatagactcgctagtcagtaaagatatttgaatatgtatcgtgccccctctggtgtctttgatcaggatgacatgtgccatttttcagaggacgtgcagacaggctggcattctagattacttttcttactctgaaacatggcctgtttgggagtgcgggattcaaaggtggtcccacggctgcccctactgcaaatggcagttttaatcttatcttttggcttctgcagatggttgcaattgatccttaaccaataatggtcagtcctcatctctgtcgtgcttcataggtgccaccttgtgtgtttaaagaagggaagctttgtacctttagagtgtaggtgaaatgaatgaatggcttggagtgcactgagaacagcatatgatttcttgctttggggaaaaagaatgatgctatgaaattggtgggtggtgtatttgagaagataatcattgcttatgtcaaatggagctgaatttgataaaaacccaaaatacagctatgaagtgctgggcaagtttactttttttctgatgtttcctacaactaaaaataaattaataaatttatataaattct

SEQ ID NO: 14238 - DNA, 2333 bp, Homo sapiens
atggctcgtgcagggtggactggcctccttcccctatatgtgtgtctactgctgacctgtggctttgccaaggcagggaagctgctggtagtgcccatggatgggagccactggttcaccatgcagtcggtggtggagaaactcatcctcagggggcatgaggtggtcgtagtcatgccagaggtgagttggcaactgggaagatcactgaattgcacagtgaagacttactcaacctcatacactctggaggatcaggaccgggagttcatggtttttgccgatgctcgctggacggcaccattgcgaagtgcattttctctattaacaagttcatccaatggtatttttgacttatttttttcaaattgcaggagtttgtttaatgaccgaaaattagtagaatacttaaaggagagttgttttgatgcagtgtttctcgatccttttgatgcctgtggcttaattgttgccaaatatttctccctcccctctgtggtcttcgccaggggaatattttgccactatcttgaagaaggtgcacagtgccctgctcctctttcctatgtccccagacttctcttagggttctcagacgccatgactttcaaggagagagtatggaaccacatcatgcacttggaggaacatttattttgcccctattttttcaaaaatgtcttagaaatagcctctgaaattctccaaacccctgtcacggcatatgatctctacagccacacatcaatttggttgttgcgaactgactttgttttggagtatcccaaacccgtgatgcccaatatgatcttcattggtggtatcaactgtcatcagggaaagccagtgcctatggaatttgaagcctacattaatgcttctggagaacatggaattgtggttttctctttgggatcaatggtctcagaaattccagagaagaaagctatggcaattgctgatgctttgggcaaaatccctcagacagtcctgtggcggtacactggaacccgaccatcgaatcttgcgaacaacacgatacttgttaagtggctaccccaaaacgatctgcttggtcacccgatgacccgtgcctttatcacccatgctggttcccatggtgtttatgaaagcatatgcaatggcgttcccatggtgatgatgcccttgtttggtgatcagatggacaatgcaaagcgcatggagactaagggagctggagtgaccctgaatgttctggaaatgacttctgaagatttagaaaatgctctaaaagcagtcatcaatgacaaaagttacaaggagaacatcatgcgcctctccagccttcacaaggaccgcccggtggagccgctggacctggccgtgttctgggtggagtttgtgatgaggcacaagggcgcgccacacctgcgccccgcagcccacgacctcacctggtaccagtaccattccttggacgtgattggtttcctcttggccgtcgtgctgacagtggccttcatcacctttaaatgttgtgcttatggctaccggaaatgcttggggaaaaaagggcgagttaagaaagcccacaaatccaagacccattgagaagtgggtgggaaataaggtaaaattttgaaccattccctagtcatttccaaacttgaaaacagaatcagtgttaaattcattttattcttattaaggaaatactttgcataaattaatcagccccagagtgctttaaaaaattctcttaaataaaaataatagactcgctagtcagtaaagatatttgaatatgtatcgtgccccctctggtgtctttgatcaggatgacatgtgccatttttcagaggacgtgcagacaggctggcattctagattacttttcttactctgaaacatggcctgtttgggagtgcgggattcaaaggtggtcccacggctgcccctactgcaaatggcagttttaatcttatcttttggcttctgcagatggttgcaattgatccttaaccaataatggtcagtcctcatctctgtcgtgcttcataggtgccaccttgtgtgtttaaagaagggaagctttgtacctttagagtgtaggtgaaatgaatgaatggcttggagtgcactgagaacagcatatgatttcttgctttggggaaaaagaatgatgctatgaaattggtgggtggtgtatttgagaagataatcattgcttatgtcaaatggagctgaatttgataaaaacccaaaatacagctatgaagtgctgggcaagtttactttttttctgatgtttcctacaactaaaaataaattaataaatttatataaattct

SEQ ID NO: 14239 - DNA, 3477 bp, Homo sapiens
acatccaagatggcgtccccaggagctgggagcgggtgaccggcggcggggaagcggcctgggttggccctcagattgcggggtctgggggcatctcgccgggcaaacccttggcccgcctacaaggacttcccccggccagagcaatggccgctgagaacagcaagcagttttggaagaggagcgctaagctgccggggagcattcagcctgtatatggagcacagcatcctcctcttgacccacggctcaccaaaaatttcattaaagaacgatcaaaagtcaacacagttcctctgaagaataagaaggcctccagttttcatgagtttgcacggaataccagtgatgcttgggacattggcgatgatgaggaagaggacttttcctcaccttctttccaaactctgaactcaaaagttgctttggcaactgcagcccaagttctagaaaaccacagcaagctgagagtaaaaccagaacggtcccagtcaacgacatcggacgtccctgccaactacaaggtcataaagtccagcagtgatgcccagctgtccagaaactctagtgatacatgcctgaggaacccactccacaaacagcaatcactccctctccggcccatcatccccctcgttgcccggatctcggatcagaacgcttctggggcccccccaatgactgtccgggagaaaacccgcctagaaaaattccgtcagcttctctccagccagaacactgacttagatgaactgaggaagtgtagctggccaggggttcccagggaggttcgacctataacctggagactcctgtcgggctatctcccagcaaacactgagaggaggaagttgaccctgcagcggaagcgggaggaatattttggcttcattgaacagtattatgactctcgaaacgaggaacatcaccaggatacctacagacagattcacattgacattccaaggacgaatcctctcattccgttgttccagcaaccacttgtacaggagatctttgaaagaattctatttatttgggccatccgccaccctgccagtgggtatgtccagggaattaatgacctggtcactccattctttgtcgtcttcctctcagaatatgtggaagaggatgtggagaactttgacgtgaccaacttgtctcaagacatgctgcgaagcattgaggctgacagcttttggtgcatgagcaagctgctggatggaatccaggataactacacctttgcacaaccaggaatccagaagaaggtgaaggcactggaagagcttgtcagccggattgatgagcaggtacataatcacttcaggaggtacgaggtagaatacctgcagtttgccttccgctggatgaacaacctgcttatgcgggagcttcctcttcgctgcaccatccgcctgtgggacacatatcagtctgaaccagaagggttctcccactttcatctctacgtgtgtgcagccttcttgatcaagtggaggaaagagatcttggatgaggaggattttcagggtctcctcatgctgctacagaacctacctacaatacactggggcaacgaagaaattgggctgcttctcgccgaggcatacagactcaagtacatgtttgccgatgccccaaatcactaccgccgataggtgctgtctcctccggggacccagactgccttcatctctgatggcagtctgatcactgtggccactgtgcgagccgtggaccccggccaggaaccactcctgttgtacaaagctcacacccaccgcccaggtcttaactttctggcatccaccactccatgtctctggatgtgtcacttggaccactgtcagtattccatgccgcgtggatgggcccagttctgggagaggacagaaaaggtggtacagggttgtctgcccctttaaaagaaactggacaaagaaggggaaggctcagggtctcacctcacattgtccctacaaggacaggccccaactgataaccgttgcttttttttttttgtgaacatagtttgatttgatcacaggtcaaaaacgccttatattttcgaaagactcctggcccctcttccctcttcctggtttcctagccgttccccttctgccccagtctgagccagtgaggggtagctttttaaaaccattattctagatggaggaggcactgatgcttgtaactctggaaagaggcctacacccaagggctaggaattttatttttccttttctcaccaggtgtctgcatgtgtgtgtgggtgtgaatgtgtatacatgcccatcagcatttagtcacatgtctgaatttctgtgtccagacgagccccatcaaactagttgggaagggccccagtgaccaagtgtataagcatcccttgaagagggattggggcaggggaggcagaaggggctctccagaccccttttccatgatgacccactccaagatattatgtgtaaattgtgttattatgtatatgggtaaagatgtacaaatatatgtcctctttgtagcagatatgattttatatttataatgtgcatcaacatgtgaaagcaatctaggtcactagcacagaggaagttgccaggaaggtggcttcagcacctccaggttggttctgggtgtcctgctgtgaggggtagaacgggaggctgctgaagtgagtagctgagcagctggagccatcccaagcatcagtgtctcagagtcctcctcgcccctttcttcaccccgccccccaacccccagactttcctggagcatctgccctttgctcctagcagcctccccaggaagggactgcagaggcgggcaagccctctctatgtgtttttatccccaccttccccggaatctggggagggcttttgtttttacgttttcaagttcagcattgtattcggacagaagctgtgactgaagactcagtgccaaggaaaggggcttcttgtgtgtccctcgggtttggggctcttctcagagagcagcactccatatcccttactgtcaccttcactccccacacagctcatgagatgtgtgacccctgtttgagttttggtatttggtagtggagggtggggggatgggggccagcagctgtcatcctcctgggaagccgagcagtgtccctggtgggtaacaccctcaagtctctttgccagtgaggccccaccacatcggtgtgagttaggtttctcatctggagctgtttctcaggcattcttcccaaccctcttccttttccccttcggtgtgcctcagtggtctccttcatagagtgagagggcttgagaccctccctcaaccggactaattaaagaaagacacttgtgttcccaagtggtggttttatttttttagtttttatgtttgtatgggaaattgtggataaagtgaaaagaattgtaaataaatggtgtatttcctcctccaaaaaaaaaaaaaaaa

SEQ ID NO: 14240 - DNA, 5361 bp, Homo sapiens
tttctccttccctccacgggccgggtgagaaagtagccgggggctatcccgacccggcggttcttggggagggggccgaacaagaaaagggaggagatggagataacttccccggatttagcttttttgtctttgtttttgttctcaccacttccatcggatgactggagagtaaaagggaacccggagcggggtggcgagcagcgctttgagaaaatgcaggagtgtgtttggagacgcgtaaagttgcctttcaagctctggcctccgggcacgcgatgctccgcggcgggctgactcagggctgccttgggcctccctgccaccctcctggaaatgatgcaagtcctgactgtcacctggatccctgcagcccagcctggaatgcgtctggattaggggaaagacgagaaacgacactccaggtgttgcacggcccaccaaagcgggaagatagggcagttgctcagaccaaatactgtatctagtgcttctgctcctatcttcaatcgtggggttctttttaatgcaaagtgtcacaaggccaggaattcccatgtgtgctcagttggcccacagcatcattgtgcctaggaaactgcttcaatttatcaagtcctctgggctgggaatctcactgaattccaaacggcggaaagaggaaactttcccaacccgatgtgggtgtgacgcgagccaggggccccagggacactgtcccagagcacaccgtccccctttaacagcaactggagcttggattcgctcttatattgtacagtcctttcgaccattgccctggagcacccgcacacgcgcacgcatctccggccgcgctcacacacactcatacacacgcacgcaaacgcgtggccgccgccaggtcggcaactttgtccggcgctcccagcggcgctcggcttcctcctgtagtagttgagcgcaggccccgcctcccggccgtgttgtcaaaagggccggggtctcggattggtccagccgccgggacaacacctgctcgactccttcattcaagtgacaccagagcttccagggatatttgaggcaccatccctgccattgccgggcactcgcggcgctgctaacggcctggtcacatgctctccggagagctacgggagggcgctgggtaacctctatccgagccgcggccgcgaggaggagggaaaaggcgagcaaaaaggaagagtgggaggaggaggggaagcggcgaaggaggaagaggaggaggaggaagaggggagcacaaaggatccaggtctcccgacgggaggttaataccaagaaccatgtgtgccgagcggctgggccagttcatgaccctggctttggtgttggccacctttgacccggcgcgggggaccgacgccaccaacccacccgagggtccccaagacaggagctcccagcagaaaggccgcctgtccctgcagaatacagcggagatccagcactgtttggtcaacgctggcgatgtggggtgtggcgtgtttgaatgtttcgagaacaactcttgtgagattcggggcttacatgggatttgcatgacttttctgcacaacgctggaaaatttgatgcccagggcaagtcattcatcaaagacgccttgaaatgtaaggcccacgctctgcggcacaggttcggctgcataagccggaagtgcccggccatcagggaaatggtgtcccagttgcagcgggaatgctacctcaagcacgacctgtgcgcggctgcccaggagaacacccgggtgatagtggagatgatccatttcaaggacttgctgctgcacgaaccctacgtggacctcgtgaacttgctgctgacctgtggggaggaggtgaaggaggccatcacccacagcgtgcaggttcagtgtgagcagaactggggaagcctgtgctccatcttgagcttctgcacctcggccatccagaagcctcccacggcgccccccgagcgccagccccaggtggacagaaccaagctctccagggcccaccacggggaagcaggacatcacctcccagagcccagcagtagggagactggccgaggtgccaagggtgagcgaggtagcaagagccacccaaacgcccatgcccgaggcagagtcgggggccttggggctcagggaccttccggaagcagcgagtgggaagacgaacagtctgagtattctgatatccggaggtgaaatgaaaggcctggccacgaaatctttcctccacgccgtccattttcttatctatggacattccaaaacatttaccattagagaggggggatgtcacacgcaggattctgtggggactgtggacttcatcgaggtgtgtgttcgcggaacggacaggtgagatggagacccctggggccgtggggtctcaggggtgcctggtgaattctgcacttacacgtactcaagggagcgcgcccgcgttatcctcgtacctttgtcttctttccatctgtggagtcagtgggtgtcggccgctctgttgtgggggaggtgaaccagggaggggcagggcaaggcagggcccccagagctgggccacacagtgggtgctgggcctcgccccgaagcttctggtgcagcagcctctggtgctgtctccgcggaagtcagggcggctggattccaggacaggagtgaatgtaaaaataaatatcgcttagaatgcaggagaagggtggagaggaggcaggggccgagggggtgcttggtgccaaactgaaattcagtttcttgtgtggggccttgcggttcagagctcttggcgagggtggagggaggagtgtcatttctatgtgtaatttctgagccattgtactgtctgggctgggggggacactgtccaagggagtggcccctatgagtttatattttaaccactgcttcaaatctcgatttcactttttttatttatccagttatatctacatatctgtcatctaaataaatggctttcaaacaaagcaactgggtcattaaaaccagctcaaagggggtttaaaaaaaaaaaaccagcccatcctttgaggctgatttttcttttttttaagttctattttaaaagctatcaaacagcgacatagccatacatctgactgcctgacatggactcctgcccacttgggggaaaccttatacccagaggaaaatacacacctggggagtacatttgacaaatttcccttaggatttcgttatctcaccttgaccctcagccaagattggtaaagctgcgtcctggcgattccaggagacccagctggaaacctggcttctccatgtgaggggatgggaaaggaaagaagagaatgaagactacttagtaattcccatcaggaaatgctgaccttttacataaaatcaaggagactgctgaaaatctctaagggacaggattttccagatcctaattggaaatttagcaataaggagaggagtccaaggggacaaataaaggcagagagaagagacagaactaaaaatacgaggaaaggagagtgaggattttcattaaaagtctcagcagtgggtttcttgggttatttaaaacatcacctaaataggccttttcttcctaattggccatcaaattaaagcctatcctttctcaagcaggagctggtattgtagggagtggccgggtattctgggctgggctcttctggagtagggggtcagcaaacattgtctgcaaagggccagatactgaatccagtactttcagtttggcgagccgtgaggtctctgtcgaaactactcaactctgccgtcctagcacaaaagcagccatagacaacacacaaacgagagggcttggctcccttccaggaagatttatttaacaggctcccagctgaatttcactcacaggacacagtttactgatctctgttctagtgagtgggtcaaaaagcatatgcatccttatccgtcaactcatcagctcttcctcaaggcaacctgaggccagacaccaagaaaccaagcgtatctgctctaaaatgacttgttcctggggaatgccttcaaccaaaacacagctagtatttctatgccccaaatccaatcccagtctttcatgatccatgccggcggttgggtggggaggggaatcattggttgggggaagggaggaaaccccacctccagcccccgccaccgggctccctgggcacccagcaagatctggggctgcagagaacagaagagctggtgcacttaatccagctctgcccttggggggaggaggacctgtgtgtcaggctctgccatgggaacgagtgtaaaccgtggctgtctcctgcagtgagccaccgcggcaggcacgttgactgttttactgacatcactcaaaagctaaagcaataacattctcctgcgttgctgagtcagctgttcatttgtccgccagctcctggactggatgtgtgaaaggcatcacatttccattttcctccgtgtaaatgttttatgtgttcgcctactgatcccattcgttgcttctattgtaaatatttgtcatttgtatttattatctctgtgttttccccctaaggcataaaatggtttactgtgttcatttgaacccatttactgatctctgttgtatatttttcatgccactgctttgttttctcctcagaagtcgggtagatagcatttctatcccatccctcacgttattggaagcatgcaacagtatttattgctcagggtcttctgcttaaaactgaggaaggtccacattcctgcaagcattgattgagacatttgcacaatctaaaatgtaagcaaagtagtcattaaaaatacaccctctacttgggctttatactgcatacaaatttactcatgagccttcctttgaggaaggatgtggatctccaaataaagatttagtgtttattttgagctctgcatcttaacaagatgatctgaacacctctcctttgtatcaataaatagccctgttattctgaagtgagaggaccaagtatagtaaaatgctgacatctaaaactaaataaatagaaaacaccaggccagaactatagtcatactcacacaaagggagaaatttaaactcgaaccaagcaaaaggcttcacggaaatagcatggaaaaacaatgcttccagtggccacttcctaaggaggaacaaccccgtctgatctcagaattggcaccacgtgagcttgctaagtgataatatctgtttctactacggatttaggcaacaggacctgtacattgtcacattgcattatttttcttcaagcgttaataaaagttttaaataaatggcaaaaaaaaaaaaaaaaaa

SEQ ID NO: 14241 - DNA, 1590 bp, Homo sapiens
gccagatctgtgagcccagcgctgactgcgccgcggagaaagccagtgggaacccagacccataggagacccgcgtccccgctcggcctggccaggccccgcgctatggagttcctctgggcccctctcttgggtctgtgctgcagtctggccgctgctgatcgccacaccgtcttctggaacagttcaaatcccaagttccggaatgaggactacaccatacatgtgcagctgaatgactacgtggacatcatctgtccgcactatgaagatcactctgtggcagacgctgccatggagcagtacatactgtacctggtggagcatgaggagtaccagctgtgccagccccagtccaaggaccaagtccgctggcagtgcaaccggcccagtgccaagcatggcccggagaagctgtctgagaagttccagcgcttcacacctttcaccctgggcaaggagttcaaagaaggacacagctactactacatctccaaacccatccaccagcatgaagaccgctgcttgaggttgaaggtgactgtcagtggcaaaatcactcacagtcctcaggcccatgacaatccacaggagaagagacttgcagcagatgacccagaggtgcgggttctacatagcatcggtcacagtgctgccccacgcctcttcccacttgcctggactgtgctgctccttccacttctgctgctgcaaaccccgtgaaggtgtatgccacacctggccttaaagagggacaggctgaagagagggacaggcactccaaacctgtcttggggccactttcagagcccccagccctgggaaccactcccaccacaggcataagctatcacctagcagcctcaaaacgggtcagtattaaggttttcaaccggaaggaggccaaccagcccgacagtgccatccccaccttcacctcggagggatggagaaagaagtggagacagtcctttcccaccattcctgcctttaagccaaagaaacaagctgtgcaggcatggtcccttaaggcacagtgggagctgagctggaaggggccacgtggatgggcaaagcttgtcaaagatgccccctccaggagagagccaggatgcccagatgaactgactgaaggaaaagcaagaaacagtttcttgcttggaagccaggtacaggagaggcagcatgcttgggctgacccagcatctcccagcaagacctcatctgtggagctgccacagagaagtttgtagccaggtactgcattctctcccatcctggggcagcactccccagagctgtgccagcaggggggctgtgccaacctgttcttagagtgtagctgtaagggcagtgcccatgtgtacattctgcctagagtgtagcctaaagggcagggcccacgtgtatagtatctgtatataagttgctgtgtgtctgtcctgatttctacaactggagtttttttatacaatgttctttgtctcaaaataaagcaatgtgttttttcggacatgcttttctgccactccatattaaaacatatgaccattgagtccctgctaaaaaaaaaaaaaaaaaaaaaaaaaa

SEQ ID NO: 14242 - DNA, 1524 bp, Homo sapiens
gccagatctgtgagcccagcgctgactgcgccgcggagaaagccagtgggaacccagacccataggagacccgcgtccccgctcggcctggccaggccccgcgctatggagttcctctgggcccctctcttgggtctgtgctgcagtctggccgctgctgatcgccacaccgtcttctggaacagttcaaatcccaagttccggaatgaggactacaccatacatgtgcagctgaatgactacgtggacatcatctgtccgcactatgaagatcactctgtggcagacgctgccatggagcagtacatactgtacctggtggagcatgaggagtaccagctgtgccagccccagtccaaggaccaagtccgctggcagtgcaaccggcccagtgccaagcatggcccggagaagctgtctgagaagttccagcgcttcacacctttcaccctgggcaaggagttcaaagaaggacacagctactactacatctctcacagtcctcaggcccatgacaatccacaggagaagagacttgcagcagatgacccagaggtgcgggttctacatagcatcggtcacagtgctgccccacgcctcttcccacttgcctggactgtgctgctccttccacttctgctgctgcaaaccccgtgaaggtgtatgccacacctggccttaaagagggacaggctgaagagagggacaggcactccaaacctgtcttggggccactttcagagcccccagccctgggaaccactcccaccacaggcataagctatcacctagcagcctcaaaacgggtcagtattaaggttttcaaccggaaggaggccaaccagcccgacagtgccatccccaccttcacctcggagggatggagaaagaagtggagacagtcctttcccaccattcctgcctttaagccaaagaaacaagctgtgcaggcatggtcccttaaggcacagtgggagctgagctggaaggggccacgtggatgggcaaagcttgtcaaagatgccccctccaggagagagccaggatgcccagatgaactgactgaaggaaaagcaagaaacagtttcttgcttggaagccaggtacaggagaggcagcatgcttgggctgacccagcatctcccagcaagacctcatctgtggagctgccacagagaagtttgtagccaggtactgcattctctcccatcctggggcagcactccccagagctgtgccagcaggggggctgtgccaacctgttcttagagtgtagctgtaagggcagtgcccatgtgtacattctgcctagagtgtagcctaaagggcagggcccacgtgtatagtatctgtatataagttgctgtgtgtctgtcctgatttctacaactggagtttttttatacaatgttctttgtctcaaaataaagcaatgtgttttttcggacatgcttttctgccactccatattaaaacatatgaccattgagtccctgctaaaaaaaaaaaaaaaaaaaaaaaaaa

SEQ ID NO: 14243 - DNA, 3311 bp, Homo sapiens
aaagcctcggctacttccgagggggtgagtggcttcaccgccggtcccttgcagcgctgcctttcgatctctccacatctcggtggcgcgggatctcaagatgcgcctccacctgctcctgctgctcgcgctgtgcggtgcaggcaccaccgccgcggagctcagttacagcttgcgtggcaactggagcatctgcaatgggaacggctcgctggagctgcccggggcggtccctggctgcgtgcacagcgccttgttccagcagggcctgatccaggattcttactacagatttaatgaccttaactacagatgggtctctttggataactggacctatagcaaagaatttaaaatcccctttgaaattagcaaatggcaaaaagtaaatttgattcttgagggagtggatacggtttcaaaaatcctgttcaatgaagtcactattggggaaacagacaatatgttcaatagatatagctttgatattaccaacgtggtcagggacgtgaactccattgagctgcgtttccagtcagcggtgttgtatgcagcacagcagagcaaagctcacactcgctaccaggttcccccagactgccctccacttgtgcagaagggtgaatgccatgtcaactttgttcggaaggagcaatgttcctttagttgggactgggggccttcctttcctacccagggaatctggaaagatgttagaattgaagcctataatatttgtcacctgaactacttcacattttccccaatatatgataagagtgcccaggagtggaatctggaaatagagtctacatttgatgttgtcagctcaaagccagttggtggtcaagtgatcgtagccatccctaagttgcaaacacaacagacatacagcattgaacttcaacctgggaaaaggattgttgagctatttgtgaacattagcaagaatattactgtagaaacttggtggcctcatggacatggaaaccagactgggtacaacatgactgttctttttgaactggatggaggcttaaatattgaaaaatcagctaaggtttattttaggacagtggaacttatagaagagcctataaaagggtctcctggtttgagtttctatttcaaaattaatggatttcccatatttctaaaaggctcaaactggatcccagcagattcattccaggaccgagtaacctctgagttgttacggctccttttacagtctgttgtggatgctaatatgaatactcttcgggtttggggaggaggaatttatgagcaggatgaattctatgaactctgtgatgaactaggaataatggtatggcaggattttatgtttgcctgtgccctttatccaactgatcagggcttcctggattcagtgacagcagaagttgcctaccagatcaagagactgaaatctcatccttctatcatcatatggagtggcaataatgaaaatgaggaggcgctgatgatgaattggtatcatatcagtttcactgaccggccaatctacatcaaggactatgtgacactctatgtgaaaaacatcagagagctcgtactggcaggagacaagagtcgtccttttattacgtccagtcctacaaatggggctgaaactgttgcagaagcctgggtctctcaaaaccctaatagcaattattttggtgatgtacatttttatgactatatcagtgattgctggaactggaaagttttcccaaaagctcgatttgcatctgaatatggatatcagtcctggccgtccttcagtacattagaaaaggtctcgtctacagaggactggtctttcaatagcaagttttcacttcatcgacaacatcacgaaggtggtaacaaacaaatgctttatcaggctggacttcatttcaaactcccccaaagcacagatccattacgcacatttaaagataccatctaccttactcaggtgatgcaggcccagtgtgtcaaaacagaaactgaattctaccgccgtagtcgcagcgagatagtggatcagcaagggcacacgatgggggcactttattggcagttgaatgacatctggcaagctccttcctgggcttctcttgagtacggaggaaagtggaaaatgcttcattactttgctcagaatttctttgctccactgttgccagtaggctttgagaatgaaaacacgttctatatctatggtgtgtcagatcttcactcggattattcgatgacactcagtgtgagagtccatacatggagctccctggagcccgtgtgctctcgtgtgactgaacgttttgtgatgaaaggaggagaggctgtctgcctttatgaggagccagtgtctgaattgctgaggagatgtgggaattgcacacgggaaagctgtgtggtttccttttacctttcagctgaccatgaactcctgagcccgaccaactaccacttcttgtcctcaccgaaggaggccgtggggctctgcaaggcgcagatcactgccatcatctctcagcaaggtgacatatttgtttttgacctggagacctcagctgtcgctccctttgtttggttggatgtaggaagcatcccagggagatttagtgacaatggtttcctcatgactgagaagacacgaactatattattttacccttgggagcccaccagcaagaatgagttggagcaatcttttcatgtgacctccttaacagatatttactgaaggaatctaggttgtattttcagtggacaatgggaataaagcatttctaaagcaccgactggagaggaaggcaacagagacaaggagagaagccgagagacatgtctgcgtgctgccacgcatttgagcgattgctctgtgaagagttgtacactgaacactttcaggggaggctgtttacccaggcaatgtcctcaaacaagcctgtgccggggtgtcctggaatctgtgccaggactgtgtttttagcccttcacctctcagctttagcaggacatgaaccagttataacaagatggccctgcagctggttacaagaatgtgacatggcaggatctatggaaccaaatggaaggttttgaggtgatgtaggtctttcacagctagctttggggaatacggaatactcaaataaagtgctttgttattatttcagagggaatggcgattgaaatgttacaacagagatttcttggtggtagctatttgggtaaaggtatatgggtatttttctgtacatgtgaaattatataaaaataaaagttatataaattacattgacaacttgata

SEQ ID NO: 14244 - DNA, 3783 bp, Homo sapiens
ggggcggggccgggagggtacttagggccggggctggcccaggctacggcggctgcagggctccggcaaccgctccggcaacgccaaccgctccgctgcgcgcaggctgggctgcaggctctcggctgcagcgctgggtggatctaggatccggcttccaacatgtggcagctctgggcctccctctgctgcctgctggtgttggccaatgcccggagcaggccctctttccatcccctgtcggatgagctggtcaactatgtcaacaaacggaataccacgtggcaggccgggcacaacttctacaacgtggacatgagctacttgaagaggctatgtggtaccttcctgggtgggcccaagccaccccagagagttatgtttaccgaggacctgaagctgcctgcaagcttcgatgcacgggaacaatggccacagtgtcccaccatcaaagagatcagagaccagggctcctgtggctcctgctgggccttcggggctgtggaagccatctctgaccggatctgcatccacaccaatgcgcacgtcagcgtggaggtgtcggcggaggacctgctcacatgctgtggcagcatgtgtggggacggctgtaatggtggctatcctgctgaagcttggaacttctggacaagaaaaggcctggtttctggtggcctctatgaatcccatgtagggtgcagaccgtactccatccctccctgtgagcaccacgtcaacggctcccggcccccatgcacgggggagggagatacccccaagtgtagcaagatctgtgagcctggctacagcccgacctacaaacaggacaagcactacggatacaattcctacagcgtctccaatagcgagaaggacatcatggccgagatctacaaaaacggccccgtggagggagctttctctgtgtattcggacttcctgctctacaagtcaggagtgtaccaacacgtcaccggagagatgatgggtggccatgccatccgcatcctgggctggggagtggagaatggcacaccctactggctggttgccaactcctggaacactgactggggtgacaatggcttctttaaaatactcagaggacaggatcactgtggaatcgaatcagaagtggtggctggaattccacgcaccgatcagtactgggaaaagatctaatctgccgtgggcctgtcgtgccagtcctgggggcgagatcggggtagaaatgcattttattctttaagttcacgtaagatacaagtttcagacagggtctgaaggactggattggccaaacatcagacctgtcttccaaggagaccaagtcctggctacatcccagcctgtggttacagtgcagacaggccatgtgagccaccgctgccagcacagagcgtccttccccctgtagactagtgccgtagggagtacctgctgccccagctgactgtggccccctccgtgatccatccatctccagggagcaagacagagacgcaggaatggaaagcggagttcctaacaggatgaaagttcccccatcagttcccccagtacctccaagcaagtagctttccacatttgtcacagaaatcagaggagagacggtgttgggagccctttggagaacgccagtctcccaggccccctgcatctatcgagtttgcaatgtcacaacctctctgatcttgtgctcagcatgattctttaatagaagttttattttttcgtgcactctgctaatcatgtgggtgagccagtggaacagcgggagacctgtgctagttttacagattgcctccttatgacgcggctcaaaaggaaaccaagtggtcaggagttgtttctgacccactgatctctactaccacaaggaaaatagtttaggagaaaccagcttttactgtttttgaaaaattacagcttcaccctgtcaagttaacaaggaatgcctgtgccaataaaagttttctccaacttgaagtctactctgatgggatctcagatcctttgtcactgcctatagacttgtagctgctgtctctctttgtccctgcagagaatcacgtcctggaactgcatgttcttgcgactcttgggacttcatcttaacttctcgctgccccagccatgttttcaaccatggcatccctcccccaattagttccctgtcatcctcgtcaaccttctctgtaagtgcctggtaagcttgcccttgcttaagaactcaaaacatagctgtgctctatttttttgttgttgttgtgactgacagagtgagattccgtctcccaggctggagtgcagtggcgccttctcagctcactgcaacctgcagcctcctagattcaagcgattctcctgcttcagccttccgagtagctgggatgacaggcactcaccaatatgcctgggtaatttttgtatttttaagtacatacaggatttcaccatgttggccaggctagtttcaaactcccggcctcaggtggtctgcctgcctcagcctcccaaagtgttgggattacaggcgtgagccactgggccctgcctgtattttttatcagccacaaatccagcaacaagctgaggattcagctcataaaacaggcttggtgtcttggtgatctcacataaccaagatgctaccccgtggggaaccacatccccctggatgccctccagccttggtttgggctggagtcagggcctgtatacagtattttgaatttgtatgccactggtttgcattgctggtcaggaactctagtgctttgcatagccctggtttagaaacatgttatagcagttcttggtatagagcaaactagaagaaccagcaatcattccactgtcctgccaaggtacacctcagtactccccttcccaactgaagtggtatgaggctagctctttccaaaagcattcaagtttggcttctgatgtgactcagaatttaggaaccagatgctagatcaaataagctctgaaaatctgaggaacattgtaggaaaggtttgttaagcatctcttaagtgccatgatgagcataacagccggccgtcgtggctcacgcctgtaatcccagcactttgggaggccaaggtgggaggatgacaaggtcaggagttcaagaccagcctggccaacatgctgaaacctcacctctactaaaaatacaaaaattagctgggcatggtggcacatgcctgtaatcccagctacttgggaggctgaggcaggagaatcgcttgaacccgggaggcggaggttgcagtgagccaagacagtgccagtgcactccagcctcggtgacagcgcaaggctccgtctcaataattaaaaaaaaaaaaaaaaaaaaaaaggccgggcgcagtggctcaagcctgtaatcccagcactttgggaggctgaggcgggcagatcacctgaggtcaggagttttgagatcagccttggcaacacggtgaaaccccatctctactaaaaatacaaaattagccaagcatgctggcacatgcctgtaatcccagctactcgggaggctgaggtacgagaatcgcttgaacctgggaggcagaggatgcagtgagccgagatcacgccattgcactccagcctgggggacaagagtgaatctgtgtctcaccaaaaaaaaaaagaaaaagaaagatgcttaacaaaggttaccataagccacaaattcataaccacttatccttccagtttcaagtagaatatattcataacctcaataaagttctccctgctcccaaa

SEQ ID NO: 14245 - DNA, 3945 bp, Homo sapiens
ggggcggggccgggagggtacttagggccggggctggcccaggctacggcggctgcagggctccggcaaccgctccggcaacgccaaccgctccgctgcgcgcaggctgggctgcaggctctcggctgcagcgctgggctggtgtgcagtggtgcgaccacggctcacggcagcctcagccacccagatgtaagcgatctggttcccacctcagcctcccgagtagtgtcttcaggcctatggagagcagcttgcgtgggctgggcctgcagtacctggtttgcatagatgattggcaggtggatctaggatccggcttccaacatgtggcagctctgggcctccctctgctgcctgctggtgttggccaatgcccggagcaggccctctttccatcccctgtcggatgagctggtcaactatgtcaacaaacggaataccacgtggcaggccgggcacaacttctacaacgtggacatgagctacttgaagaggctatgtggtaccttcctgggtgggcccaagccaccccagagagttatgtttaccgaggacctgaagctgcctgcaagcttcgatgcacgggaacaatggccacagtgtcccaccatcaaagagatcagagaccagggctcctgtggctcctgctgggccttcggggctgtggaagccatctctgaccggatctgcatccacaccaatgcgcacgtcagcgtggaggtgtcggcggaggacctgctcacatgctgtggcagcatgtgtggggacggctgtaatggtggctatcctgctgaagcttggaacttctggacaagaaaaggcctggtttctggtggcctctatgaatcccatgtagggtgcagaccgtactccatccctccctgtgagcaccacgtcaacggctcccggcccccatgcacgggggagggagatacccccaagtgtagcaagatctgtgagcctggctacagcccgacctacaaacaggacaagcactacggatacaattcctacagcgtctccaatagcgagaaggacatcatggccgagatctacaaaaacggccccgtggagggagctttctctgtgtattcggacttcctgctctacaagtcaggagtgtaccaacacgtcaccggagagatgatgggtggccatgccatccgcatcctgggctggggagtggagaatggcacaccctactggctggttgccaactcctggaacactgactggggtgacaatggcttctttaaaatactcagaggacaggatcactgtggaatcgaatcagaagtggtggctggaattccacgcaccgatcagtactgggaaaagatctaatctgccgtgggcctgtcgtgccagtcctgggggcgagatcggggtagaaatgcattttattctttaagttcacgtaagatacaagtttcagacagggtctgaaggactggattggccaaacatcagacctgtcttccaaggagaccaagtcctggctacatcccagcctgtggttacagtgcagacaggccatgtgagccaccgctgccagcacagagcgtccttccccctgtagactagtgccgtagggagtacctgctgccccagctgactgtggccccctccgtgatccatccatctccagggagcaagacagagacgcaggaatggaaagcggagttcctaacaggatgaaagttcccccatcagttcccccagtacctccaagcaagtagctttccacatttgtcacagaaatcagaggagagacggtgttgggagccctttggagaacgccagtctcccaggccccctgcatctatcgagtttgcaatgtcacaacctctctgatcttgtgctcagcatgattctttaatagaagttttattttttcgtgcactctgctaatcatgtgggtgagccagtggaacagcgggagacctgtgctagttttacagattgcctccttatgacgcggctcaaaaggaaaccaagtggtcaggagttgtttctgacccactgatctctactaccacaaggaaaatagtttaggagaaaccagcttttactgtttttgaaaaattacagcttcaccctgtcaagttaacaaggaatgcctgtgccaataaaagttttctccaacttgaagtctactctgatgggatctcagatcctttgtcactgcctatagacttgtagctgctgtctctctttgtccctgcagagaatcacgtcctggaactgcatgttcttgcgactcttgggacttcatcttaacttctcgctgccccagccatgttttcaaccatggcatccctcccccaattagttccctgtcatcctcgtcaaccttctctgtaagtgcctggtaagcttgcccttgcttaagaactcaaaacatagctgtgctctatttttttgttgttgttgtgactgacagagtgagattccgtctcccaggctggagtgcagtggcgccttctcagctcactgcaacctgcagcctcctagattcaagcgattctcctgcttcagccttccgagtagctgggatgacaggcactcaccaatatgcctgggtaatttttgtatttttaagtacatacaggatttcaccatgttggccaggctagtttcaaactcccggcctcaggtggtctgcctgcctcagcctcccaaagtgttgggattacaggcgtgagccactgggccctgcctgtattttttatcagccacaaatccagcaacaagctgaggattcagctcataaaacaggcttggtgtcttggtgatctcacataaccaagatgctaccccgtggggaaccacatccccctggatgccctccagccttggtttgggctggagtcagggcctgtatacagtattttgaatttgtatgccactggtttgcattgctggtcaggaactctagtgctttgcatagccctggtttagaaacatgttatagcagttcttggtatagagcaaactagaagaaccagcaatcattccactgtcctgccaaggtacacctcagtactccccttcccaactgaagtggtatgaggctagctctttccaaaagcattcaagtttggcttctgatgtgactcagaatttaggaaccagatgctagatcaaataagctctgaaaatctgaggaacattgtaggaaaggtttgttaagcatctcttaagtgccatgatgagcataacagccggccgtcgtggctcacgcctgtaatcccagcactttgggaggccaaggtgggaggatgacaaggtcaggagttcaagaccagcctggccaacatgctgaaacctcacctctactaaaaatacaaaaattagctgggcatggtggcacatgcctgtaatcccagctacttgggaggctgaggcaggagaatcgcttgaacccgggaggcggaggttgcagtgagccaagacagtgccagtgcactccagcctcggtgacagcgcaaggctccgtctcaataattaaaaaaaaaaaaaaaaaaaaaaaggccgggcgcagtggctcaagcctgtaatcccagcactttgggaggctgaggcgggcagatcacctgaggtcaggagttttgagatcagccttggcaacacggtgaaaccccatctctactaaaaatacaaaattagccaagcatgctggcacatgcctgtaatcccagctactcgggaggctgaggtacgagaatcgcttgaacctgggaggcagaggatgcagtgagccgagatcacgccattgcactccagcctgggggacaagagtgaatctgtgtctcaccaaaaaaaaaaagaaaaagaaagatgcttaacaaaggttaccataagccacaaattcataaccacttatccttccagtttcaagtagaatatattcataacctcaataaagttctccctgctcccaaa

SEQ ID NO: 14246 - DNA, 3902 bp, Homo sapiens
ggggcggggccgggagggtacttagggccggggctggcccaggctacggcggctgcagggctccggcaaccgctccggcaacgccaaccgctccgctgcgcgcaggctgggctgcaggctctcggctgcagcgctgggtgtcttcaggcctatggagagcagcttgcgtgggctgggcctgcagtacctggtttgcatagatgattggcaggtgggcagcacggggaaggacctgtgagtggccaacctggttcaggtggatctaggatccggcttccaacatgtggcagctctgggcctccctctgctgcctgctggtgttggccaatgcccggagcaggccctctttccatcccctgtcggatgagctggtcaactatgtcaacaaacggaataccacgtggcaggccgggcacaacttctacaacgtggacatgagctacttgaagaggctatgtggtaccttcctgggtgggcccaagccaccccagagagttatgtttaccgaggacctgaagctgcctgcaagcttcgatgcacgggaacaatggccacagtgtcccaccatcaaagagatcagagaccagggctcctgtggctcctgctgggccttcggggctgtggaagccatctctgaccggatctgcatccacaccaatgcgcacgtcagcgtggaggtgtcggcggaggacctgctcacatgctgtggcagcatgtgtggggacggctgtaatggtggctatcctgctgaagcttggaacttctggacaagaaaaggcctggtttctggtggcctctatgaatcccatgtagggtgcagaccgtactccatccctccctgtgagcaccacgtcaacggctcccggcccccatgcacgggggagggagatacccccaagtgtagcaagatctgtgagcctggctacagcccgacctacaaacaggacaagcactacggatacaattcctacagcgtctccaatagcgagaaggacatcatggccgagatctacaaaaacggccccgtggagggagctttctctgtgtattcggacttcctgctctacaagtcaggagtgtaccaacacgtcaccggagagatgatgggtggccatgccatccgcatcctgggctggggagtggagaatggcacaccctactggctggttgccaactcctggaacactgactggggtgacaatggcttctttaaaatactcagaggacaggatcactgtggaatcgaatcagaagtggtggctggaattccacgcaccgatcagtactgggaaaagatctaatctgccgtgggcctgtcgtgccagtcctgggggcgagatcggggtagaaatgcattttattctttaagttcacgtaagatacaagtttcagacagggtctgaaggactggattggccaaacatcagacctgtcttccaaggagaccaagtcctggctacatcccagcctgtggttacagtgcagacaggccatgtgagccaccgctgccagcacagagcgtccttccccctgtagactagtgccgtagggagtacctgctgccccagctgactgtggccccctccgtgatccatccatctccagggagcaagacagagacgcaggaatggaaagcggagttcctaacaggatgaaagttcccccatcagttcccccagtacctccaagcaagtagctttccacatttgtcacagaaatcagaggagagacggtgttgggagccctttggagaacgccagtctcccaggccccctgcatctatcgagtttgcaatgtcacaacctctctgatcttgtgctcagcatgattctttaatagaagttttattttttcgtgcactctgctaatcatgtgggtgagccagtggaacagcgggagacctgtgctagttttacagattgcctccttatgacgcggctcaaaaggaaaccaagtggtcaggagttgtttctgacccactgatctctactaccacaaggaaaatagtttaggagaaaccagcttttactgtttttgaaaaattacagcttcaccctgtcaagttaacaaggaatgcctgtgccaataaaagttttctccaacttgaagtctactctgatgggatctcagatcctttgtcactgcctatagacttgtagctgctgtctctctttgtccctgcagagaatcacgtcctggaactgcatgttcttgcgactcttgggacttcatcttaacttctcgctgccccagccatgttttcaaccatggcatccctcccccaattagttccctgtcatcctcgtcaaccttctctgtaagtgcctggtaagcttgcccttgcttaagaactcaaaacatagctgtgctctatttttttgttgttgttgtgactgacagagtgagattccgtctcccaggctggagtgcagtggcgccttctcagctcactgcaacctgcagcctcctagattcaagcgattctcctgcttcagccttccgagtagctgggatgacaggcactcaccaatatgcctgggtaatttttgtatttttaagtacatacaggatttcaccatgttggccaggctagtttcaaactcccggcctcaggtggtctgcctgcctcagcctcccaaagtgttgggattacaggcgtgagccactgggccctgcctgtattttttatcagccacaaatccagcaacaagctgaggattcagctcataaaacaggcttggtgtcttggtgatctcacataaccaagatgctaccccgtggggaaccacatccccctggatgccctccagccttggtttgggctggagtcagggcctgtatacagtattttgaatttgtatgccactggtttgcattgctggtcaggaactctagtgctttgcatagccctggtttagaaacatgttatagcagttcttggtatagagcaaactagaagaaccagcaatcattccactgtcctgccaaggtacacctcagtactccccttcccaactgaagtggtatgaggctagctctttccaaaagcattcaagtttggcttctgatgtgactcagaatttaggaaccagatgctagatcaaataagctctgaaaatctgaggaacattgtaggaaaggtttgttaagcatctcttaagtgccatgatgagcataacagccggccgtcgtggctcacgcctgtaatcccagcactttgggaggccaaggtgggaggatgacaaggtcaggagttcaagaccagcctggccaacatgctgaaacctcacctctactaaaaatacaaaaattagctgggcatggtggcacatgcctgtaatcccagctacttgggaggctgaggcaggagaatcgcttgaacccgggaggcggaggttgcagtgagccaagacagtgccagtgcactccagcctcggtgacagcgcaaggctccgtctcaataattaaaaaaaaaaaaaaaaaaaaaaaggccgggcgcagtggctcaagcctgtaatcccagcactttgggaggctgaggcgggcagatcacctgaggtcaggagttttgagatcagccttggcaacacggtgaaaccccatctctactaaaaatacaaaattagccaagcatgctggcacatgcctgtaatcccagctactcgggaggctgaggtacgagaatcgcttgaacctgggaggcagaggatgcagtgagccgagatcacgccattgcactccagcctgggggacaagagtgaatctgtgtctcaccaaaaaaaaaaagaaaaagaaagatgcttaacaaaggttaccataagccacaaattcataaccacttatccttccagtttcaagtagaatatattcataacctcaataaagttctccctgctcccaaa

SEQ ID NO: 14247 - DNA, 3871 bp, Homo sapiens
ggggcggggccgggagggtacttagggccggggctggcccaggctacggcggctgcagggctccggcaaccgctccggcaacgccaaccgctccgctgcgcgcaggctgggctgcaggctctcggctgcagcgctgggctggtgtgcagtggtgcgaccacggctcacggcagcctcagccacccagatgtaagcgatctggttcccacctcagcctcccgagtagtggatctaggatccggcttccaacatgtggcagctctgggcctccctctgctgcctgctggtgttggccaatgcccggagcaggccctctttccatcccctgtcggatgagctggtcaactatgtcaacaaacggaataccacgtggcaggccgggcacaacttctacaacgtggacatgagctacttgaagaggctatgtggtaccttcctgggtgggcccaagccaccccagagagttatgtttaccgaggacctgaagctgcctgcaagcttcgatgcacgggaacaatggccacagtgtcccaccatcaaagagatcagagaccagggctcctgtggctcctgctgggccttcggggctgtggaagccatctctgaccggatctgcatccacaccaatgcgcacgtcagcgtggaggtgtcggcggaggacctgctcacatgctgtggcagcatgtgtggggacggctgtaatggtggctatcctgctgaagcttggaacttctggacaagaaaaggcctggtttctggtggcctctatgaatcccatgtagggtgcagaccgtactccatccctccctgtgagcaccacgtcaacggctcccggcccccatgcacgggggagggagatacccccaagtgtagcaagatctgtgagcctggctacagcccgacctacaaacaggacaagcactacggatacaattcctacagcgtctccaatagcgagaaggacatcatggccgagatctacaaaaacggccccgtggagggagctttctctgtgtattcggacttcctgctctacaagtcaggagtgtaccaacacgtcaccggagagatgatgggtggccatgccatccgcatcctgggctggggagtggagaatggcacaccctactggctggttgccaactcctggaacactgactggggtgacaatggcttctttaaaatactcagaggacaggatcactgtggaatcgaatcagaagtggtggctggaattccacgcaccgatcagtactgggaaaagatctaatctgccgtgggcctgtcgtgccagtcctgggggcgagatcggggtagaaatgcattttattctttaagttcacgtaagatacaagtttcagacagggtctgaaggactggattggccaaacatcagacctgtcttccaaggagaccaagtcctggctacatcccagcctgtggttacagtgcagacaggccatgtgagccaccgctgccagcacagagcgtccttccccctgtagactagtgccgtagggagtacctgctgccccagctgactgtggccccctccgtgatccatccatctccagggagcaagacagagacgcaggaatggaaagcggagttcctaacaggatgaaagttcccccatcagttcccccagtacctccaagcaagtagctttccacatttgtcacagaaatcagaggagagacggtgttgggagccctttggagaacgccagtctcccaggccccctgcatctatcgagtttgcaatgtcacaacctctctgatcttgtgctcagcatgattctttaatagaagttttattttttcgtgcactctgctaatcatgtgggtgagccagtggaacagcgggagacctgtgctagttttacagattgcctccttatgacgcggctcaaaaggaaaccaagtggtcaggagttgtttctgacccactgatctctactaccacaaggaaaatagtttaggagaaaccagcttttactgtttttgaaaaattacagcttcaccctgtcaagttaacaaggaatgcctgtgccaataaaagttttctccaacttgaagtctactctgatgggatctcagatcctttgtcactgcctatagacttgtagctgctgtctctctttgtccctgcagagaatcacgtcctggaactgcatgttcttgcgactcttgggacttcatcttaacttctcgctgccccagccatgttttcaaccatggcatccctcccccaattagttccctgtcatcctcgtcaaccttctctgtaagtgcctggtaagcttgcccttgcttaagaactcaaaacatagctgtgctctatttttttgttgttgttgtgactgacagagtgagattccgtctcccaggctggagtgcagtggcgccttctcagctcactgcaacctgcagcctcctagattcaagcgattctcctgcttcagccttccgagtagctgggatgacaggcactcaccaatatgcctgggtaatttttgtatttttaagtacatacaggatttcaccatgttggccaggctagtttcaaactcccggcctcaggtggtctgcctgcctcagcctcccaaagtgttgggattacaggcgtgagccactgggccctgcctgtattttttatcagccacaaatccagcaacaagctgaggattcagctcataaaacaggcttggtgtcttggtgatctcacataaccaagatgctaccccgtggggaaccacatccccctggatgccctccagccttggtttgggctggagtcagggcctgtatacagtattttgaatttgtatgccactggtttgcattgctggtcaggaactctagtgctttgcatagccctggtttagaaacatgttatagcagttcttggtatagagcaaactagaagaaccagcaatcattccactgtcctgccaaggtacacctcagtactccccttcccaactgaagtggtatgaggctagctctttccaaaagcattcaagtttggcttctgatgtgactcagaatttaggaaccagatgctagatcaaataagctctgaaaatctgaggaacattgtaggaaaggtttgttaagcatctcttaagtgccatgatgagcataacagccggccgtcgtggctcacgcctgtaatcccagcactttgggaggccaaggtgggaggatgacaaggtcaggagttcaagaccagcctggccaacatgctgaaacctcacctctactaaaaatacaaaaattagctgggcatggtggcacatgcctgtaatcccagctacttgggaggctgaggcaggagaatcgcttgaacccgggaggcggaggttgcagtgagccaagacagtgccagtgcactccagcctcggtgacagcgcaaggctccgtctcaataattaaaaaaaaaaaaaaaaaaaaaaaggccgggcgcagtggctcaagcctgtaatcccagcactttgggaggctgaggcgggcagatcacctgaggtcaggagttttgagatcagccttggcaacacggtgaaaccccatctctactaaaaatacaaaattagccaagcatgctggcacatgcctgtaatcccagctactcgggaggctgaggtacgagaatcgcttgaacctgggaggcagaggatgcagtgagccgagatcacgccattgcactccagcctgggggacaagagtgaatctgtgtctcaccaaaaaaaaaaagaaaaagaaagatgcttaacaaaggttaccataagccacaaattcataaccacttatccttccagtttcaagtagaatatattcataacctcaataaagttctccctgctcccaaa

SEQ ID NO: 14248 - DNA, 3857 bp, Homo sapiens
ggggcggggccgggagggtacttagggccggggctggcccaggctacggcggctgcagggctccggcaaccgctccggcaacgccaaccgctccgctgcgcgcaggctgggctgcaggctctcggctgcagcgctgggtgtcttcaggcctatggagagcagcttgcgtgggctgggcctgcagtacctggtttgcatagatgattggcaggtggatctaggatccggcttccaacatgtggcagctctgggcctccctctgctgcctgctggtgttggccaatgcccggagcaggccctctttccatcccctgtcggatgagctggtcaactatgtcaacaaacggaataccacgtggcaggccgggcacaacttctacaacgtggacatgagctacttgaagaggctatgtggtaccttcctgggtgggcccaagccaccccagagagttatgtttaccgaggacctgaagctgcctgcaagcttcgatgcacgggaacaatggccacagtgtcccaccatcaaagagatcagagaccagggctcctgtggctcctgctgggccttcggggctgtggaagccatctctgaccggatctgcatccacaccaatgcgcacgtcagcgtggaggtgtcggcggaggacctgctcacatgctgtggcagcatgtgtggggacggctgtaatggtggctatcctgctgaagcttggaacttctggacaagaaaaggcctggtttctggtggcctctatgaatcccatgtagggtgcagaccgtactccatccctccctgtgagcaccacgtcaacggctcccggcccccatgcacgggggagggagatacccccaagtgtagcaagatctgtgagcctggctacagcccgacctacaaacaggacaagcactacggatacaattcctacagcgtctccaatagcgagaaggacatcatggccgagatctacaaaaacggccccgtggagggagctttctctgtgtattcggacttcctgctctacaagtcaggagtgtaccaacacgtcaccggagagatgatgggtggccatgccatccgcatcctgggctggggagtggagaatggcacaccctactggctggttgccaactcctggaacactgactggggtgacaatggcttctttaaaatactcagaggacaggatcactgtggaatcgaatcagaagtggtggctggaattccacgcaccgatcagtactgggaaaagatctaatctgccgtgggcctgtcgtgccagtcctgggggcgagatcggggtagaaatgcattttattctttaagttcacgtaagatacaagtttcagacagggtctgaaggactggattggccaaacatcagacctgtcttccaaggagaccaagtcctggctacatcccagcctgtggttacagtgcagacaggccatgtgagccaccgctgccagcacagagcgtccttccccctgtagactagtgccgtagggagtacctgctgccccagctgactgtggccccctccgtgatccatccatctccagggagcaagacagagacgcaggaatggaaagcggagttcctaacaggatgaaagttcccccatcagttcccccagtacctccaagcaagtagctttccacatttgtcacagaaatcagaggagagacggtgttgggagccctttggagaacgccagtctcccaggccccctgcatctatcgagtttgcaatgtcacaacctctctgatcttgtgctcagcatgattctttaatagaagttttattttttcgtgcactctgctaatcatgtgggtgagccagtggaacagcgggagacctgtgctagttttacagattgcctccttatgacgcggctcaaaaggaaaccaagtggtcaggagttgtttctgacccactgatctctactaccacaaggaaaatagtttaggagaaaccagcttttactgtttttgaaaaattacagcttcaccctgtcaagttaacaaggaatgcctgtgccaataaaagttttctccaacttgaagtctactctgatgggatctcagatcctttgtcactgcctatagacttgtagctgctgtctctctttgtccctgcagagaatcacgtcctggaactgcatgttcttgcgactcttgggacttcatcttaacttctcgctgccccagccatgttttcaaccatggcatccctcccccaattagttccctgtcatcctcgtcaaccttctctgtaagtgcctggtaagcttgcccttgcttaagaactcaaaacatagctgtgctctatttttttgttgttgttgtgactgacagagtgagattccgtctcccaggctggagtgcagtggcgccttctcagctcactgcaacctgcagcctcctagattcaagcgattctcctgcttcagccttccgagtagctgggatgacaggcactcaccaatatgcctgggtaatttttgtatttttaagtacatacaggatttcaccatgttggccaggctagtttcaaactcccggcctcaggtggtctgcctgcctcagcctcccaaagtgttgggattacaggcgtgagccactgggccctgcctgtattttttatcagccacaaatccagcaacaagctgaggattcagctcataaaacaggcttggtgtcttggtgatctcacataaccaagatgctaccccgtggggaaccacatccccctggatgccctccagccttggtttgggctggagtcagggcctgtatacagtattttgaatttgtatgccactggtttgcattgctggtcaggaactctagtgctttgcatagccctggtttagaaacatgttatagcagttcttggtatagagcaaactagaagaaccagcaatcattccactgtcctgccaaggtacacctcagtactccccttcccaactgaagtggtatgaggctagctctttccaaaagcattcaagtttggcttctgatgtgactcagaatttaggaaccagatgctagatcaaataagctctgaaaatctgaggaacattgtaggaaaggtttgttaagcatctcttaagtgccatgatgagcataacagccggccgtcgtggctcacgcctgtaatcccagcactttgggaggccaaggtgggaggatgacaaggtcaggagttcaagaccagcctggccaacatgctgaaacctcacctctactaaaaatacaaaaattagctgggcatggtggcacatgcctgtaatcccagctacttgggaggctgaggcaggagaatcgcttgaacccgggaggcggaggttgcagtgagccaagacagtgccagtgcactccagcctcggtgacagcgcaaggctccgtctcaataattaaaaaaaaaaaaaaaaaaaaaaaggccgggcgcagtggctcaagcctgtaatcccagcactttgggaggctgaggcgggcagatcacctgaggtcaggagttttgagatcagccttggcaacacggtgaaaccccatctctactaaaaatacaaaattagccaagcatgctggcacatgcctgtaatcccagctactcgggaggctgaggtacgagaatcgcttgaacctgggaggcagaggatgcagtgagccgagatcacgccattgcactccagcctgggggacaagagtgaatctgtgtctcaccaaaaaaaaaaagaaaaagaaagatgcttaacaaaggttaccataagccacaaattcataaccacttatccttccagtttcaagtagaatatattcataacctcaataaagttctccctgctcccaaa

SEQ ID NO: 14249 - DNA, 1236 bp, Homo sapiens
ctgcggcggcctcggagcgcggcggagccagacgctgaccacgttcctctcctcggtctcctccgcctccagctccgcgctgcccggcagccgggagccatgcgaccccagggccccgccgcctccccgcagcggctccgcggcctcctgctgctcctgctgctgcagctgcccgcgccgtcgagcgcctctgagatccccaaggggaagcaaaaggcgcagctccggcagagggaggtggtggacctgtataatggaatgtgcttacaagggccagcaggagtgcctggtcgagacgggagccctggggccaatggcattccgggtacacctgggatcccaggtcgggatggattcaaaggagaaaagggggaatgtctgagggaaagctttgaggagtcctggacacccaactacaagcagtgttcatggagttcattgaattatggcatagatcttgggaaaattgcggagtgtacatttacaaagatgcgttcaaatagtgctctaagagttttgttcagtggctcacttcggctaaaatgcagaaatgcatgctgtcagcgttggtatttcacattcaatggagctgaatgttcaggacctcttcccattgaagctataatttatttggaccaaggaagccctgaaatgaattcaacaattaatattcatcgcacttcttctgtggaaggactttgtgaaggaattggtgctggattagtggatgttgctatctgggttggcacttgttcagattacccaaaaggagatgcttctactggatggaattcagtttctcgcatcattattgaagaactaccaaaataaatgctttaattttcatttgctacctctttttttattatgccttggaatggttcacttaaatgacattttaaataagtttatgtatacatctgaatgaaaagcaaagctaaatatgtttacagaccaaagtgtgatttcacactgtttttaaatctagcattattcattttgcttcaatcaaaagtggtttcaatattttttttagttggttagaatactttcttcatagtcacattctctcaacctataatttggaatattgttgtggtcttttgttttttctcttagtatagcatttttaaaaaaatataaaagctaccaatctttgtacaatttgtaaatgttaagaattttttttatatctgttaaataaaaattatttccaacaaaaaaaaaaaaaaaaaa

SEQ ID NO: 14250 - DNA, 1484 bp, Homo sapiens
cccgtgaggaggaaaaggtgtgtccgctgccacccagtgtgagcgggtgacaccacccggttaggaaatcccagctcccaagagggtataaatccctgctttactgctgagctcctgctggaggtgaaagtctggcctggcagccttccccaggtgagcagcaacaaggccacgtgctgctgggtctcagtcctccacttcccgtgtcctctggaagttgtcaggagcaatgttgcgcttgtacgtgttggtaatgggagtttctgccttcacccttcagcctgcggcacacacaggggctgccagaagctgccggtttcgtgggaggcattacaagcgggagttcaggctggaaggggagcctgtagccctgaggtgcccccaggtgccctactggttgtgggcctctgtcagcccccgcatcaacctgacatggcataaaaatgactctgctaggacggtcccaggagaagaagagacacggatgtgggcccaggacggtgctctgtggcttctgccagccttgcaggaggactctggcacctacgtctgcactactagaaatgcttcttactgtgacaaaatgtccattgagctcagagtttttgagaatacagatgctttcctgccgttcatctcatacccgcaaattttaaccttgtcaacctctggggtattagtatgccctgacctgagtgaattcacccgtgacaaaactgacgtgaagattcaatggtacaaggattctcttcttttggataaagacaatgagaaatttctaagtgtgagggggaccactcacttactcgtacacgatgtggccctggaagatgctggctattaccgctgtgtcctgacatttgcccatgaaggccagcaatacaacatcactaggagtattgagctacgcatcaagaaaaaaaaagaagagaccattcctgtgatcatttcccccctcaagaccatatcagcttctctggggtcaagactgacaatcccgtgtaaggtgtttctgggaaccggcacacccttaaccaccatgctgtggtggacggccaatgacacccacatagagagcgcctacccgggaggccgcgtgaccgaggggccacgccaggaatattcagaaaataatgagaactacattgaagtgccattgatttttgatcctgtcacaagagaggatttgcacatggattttaaatgtgttgtccataataccctgagttttcagacactacgcaccacagtcaaggaagcctcctccacgttctcctggggcattgtgctggccccactttcactggccttcttggttttggggggaatatggatgcacagacggtgcaaacacagaactggaaaagcagatggtctgactgtgctatggcctcatcatcaagactttcaatcctatcccaagtgaaataaatggaatgaaataattcaaacacaaaaaaaaaaaaaaaaaaaaaaaaaaaaaa

SEQ ID NO: 14251 - DNA, 1436 bp, Homo sapiens
gggatgggagatactgttgtggtcacctctggaaaatacattctgctactcttaaaaactagtgacgctcatacaaatcaacagaaagagcttctgaaggaagactttaaagctgcttctgccacgtgctgctgggtctcagtcctccacttcccgtgtcctctggaagttgtcaggagcaatgttgcgcttgtacgtgttggtaatgggagtttctgccttcacccttcagcctgcggcacacacaggggctgccagaagctgccggtttcgtgggaggcattacaagcgggagttcaggctggaaggggagcctgtagccctgaggtgcccccaggtgccctactggttgtgggcctctgtcagcccccgcatcaacctgacatggcataaaaatgactctgctaggacggtcccaggagaagaagagacacggatgtgggcccaggacggtgctctgtggcttctgccagccttgcaggaggactctggcacctacgtctgcactactagaaatgcttcttactgtgacaaaatgtccattgagctcagagtttttgagaatacagatgctttcctgccgttcatctcatacccgcaaattttaaccttgtcaacctctggggtattagtatgccctgacctgagtgaattcacccgtgacaaaactgacgtgaagattcaatggtacaaggattctcttcttttggataaagacaatgagaaatttctaagtgtgagggggaccactcacttactcgtacacgatgtggccctggaagatgctggctattaccgctgtgtcctgacatttgcccatgaaggccagcaatacaacatcactaggagtattgagctacgcatcaagaaaaaaaaagaagagaccattcctgtgatcatttcccccctcaagaccatatcagcttctctggggtcaagactgacaatcccgtgtaaggtgtttctgggaaccggcacacccttaaccaccatgctgtggtggacggccaatgacacccacatagagagcgcctacccgggaggccgcgtgaccgaggggccacgccaggaatattcagaaaataatgagaactacattgaagtgccattgatttttgatcctgtcacaagagaggatttgcacatggattttaaatgtgttgtccataataccctgagttttcagacactacgcaccacagtcaaggaagcctcctccacgttctcctggggcattgtgctggccccactttcactggccttcttggttttggggggaatatggatgcacagacggtgcaaacacagaactggaaaagcagatggtctgactgtgctatggcctcatcatcaagactttcaatcctatcccaagtgaaataaatggaatgaaataattcaaacacaaaaaaaaaaaaaaaaaaaaaaaaaaaaaa

SEQ ID NO: 14252 - DNA, 2530 bp, Homo sapiens
ggaattccctgcagcatgggctggttaactaggattgtctgtcttttctggggagtattacttacagcaagagcaaactatcagaatgggaagaacaatgtgccaaggctgaaattatcctacaaagaaatgttggaatccaacaatgtgatcactttcaatggcttggccaacagctccagttatcataccttccttttggatgaggaacggagtaggctgtatgttggagcaaaggatcacatattttcattcgacctggttaatatcaaggattttcaaaagattgtgtggccagtatcttacaccagaagagatgaatgcaagtgggctggaaaagacatcctgaaagaatgtgctaatttcatcaaggtacttaaggcatataatcagactcacttgtacgcctgtggaacgggggcttttcatccaatttgcacctacattgaaattggacatcatcctgaggacaatatttttaagctggagaactcacattttgaaaacggccgtgggaagagtccatatgaccctaagctgctgacagcatcccttttaatagatggagaattatactctggaactgcagctgattttatggggcgagactttgctatcttccgaactcttgggcaccaccacccaatcaggacagagcagcatgattccaggtggctcaatgatccaaagttcattagtgcccacctcatctcagagagtgacaatcctgaagatgacaaagtatactttttcttccgtgaaaatgcaatagatggagaacactctggaaaagctactcacgctagaataggtcagatatgcaagaatgactttggagggcacagaagtctggtgaataaatggacaacattcctcaaagctcgtctgatttgctcagtgccaggtccaaatggcattgacactcattttgatgaactgcaggatgtattcctaatgaactttaaagatcctaaaaatccagttgtatatggagtgtttacgacttccagtaacattttcaagggatcagccgtgtgtatgtatagcatgagtgatgtgagaagggtgttccttggtccatatgcccacagggatggacccaactatcaatgggtgccttatcaaggaagagtcccctatccacggccaggaacttgtcccagcaaaacatttggtggttttgactctacaaaggaccttcctgatgatgttataacctttgcaagaagtcatccagccatgtacaatccagtgtttcctatgaacaatcgcccaatagtgatcaaaacggatgtaaattatcaatttacacaaattgtcgtagaccgagtggatgcagaagatggacagtatgatgttatgtttatcggaacagatgttgggaccgttcttaaagtagtttcaattcctaaggagacttggtatgatttagaagaggttctgctggaagaaatgacagtttttcgggaaccgactgctatttcagcaatggagctttccactaagcagcaacaactatatattggttcaacggctggggttgcccagctccctttacaccggtgtgatatttacgggaaagcgtgtgctgagtgttgcctcgcccgagacccttactgtgcttgggatggttctgcatgttctcgctattttcccactgcaaagagacgcacaagacgacaagatataagaaatggagacccactgactcactgttcagacttacaccatgataatcaccatggccacagccctgaagagagaatcatctatggtgtagagaatagtagcacatttttggaatgcagtccgaagtcgcagagagcgctggtctattggcaattccagaggcgaaatgaagagcgaaaagaagagatcagagtggatgatcatatcatcaggacagatcaaggccttctgctacgtagtctacaacagaaggattcaggcaattacctctgccatgcggtggaacatgggttcatacaaactcttcttaaggtaaccctggaagtcattgacacagagcatttggaagaacttcttcataaagatgatgatggagatggctctaagaccaaagaaatgtccaatagcatgacacctagccagaaggtctggtacagagacttcatgcagctcatcaaccaccccaatctcaacacgatggatgagttctgtgaacaagtttggaaaagggaccgaaaacaacgtcggcaaaggccaggacataccccagggaacagtaacaaatggaagcacttacaagaaaataagaaaggtagaaacaggaggacccacgaatttgagagggcacccaggagtgtctgagctgcattacctctagaaacctcaaacaagtagaaacttgcctagacaataactggaaaaacaaatgcaatatacatgaacttttttcatggcattatgtggatgtttacaatggtgggaaattcagctgagttccaccaattataaattaaatccatgagtaactttcctaataggcttttttttcctaataccaccg

SEQ ID NO: 14253 - DNA, 2488 bp, Homo sapiens
gacggagaaggccagtgcccaggttagtgagcagtgcccggcgcccgcttccctcacctccttttccagcctttgcacagcttgaaggttctgtcaccttttgcagtggtccaaatgagaaaaaagtggaaaatgggaggcatgaaatacatcttttcgttgttgttctttcttttgctagaaggaggcaaaacagagcaagtaaaacattcagagacatattgcatgtttcaagacaagaagtacagagtgggtgagagatggcatccttacctggaaccttatgggttggtttactgcgtgaactgcatctgctcagagaatgggaatgtgctttgcagccgagtcagatgtccaaatgttcattgcctttctcctgtgcatattcctcatctgtgctgccctcgctgcccagactccttacccccagtgaacaataaggtgaccagcaagtcttgcgagtacaatgggacaacttaccaacatggagagctgttcgtagctgaagggctctttcagaatcggcaacccaatcaatgcacccagtgcagctgttcggagggaaacgtgtattgtggtctcaagacttgccccaaattaacctgtgccttcccagtctctgttccagattcctgctgccgggtatgcagaggagatggagaactgtcatgggaacattctgatggtgatatcttccggcaacctgccaacagagaagcaagacattcttaccaccgctctcactatgatcctccaccaagccgacaggctggaggtctgtcccgctttcctggggccagaagtcaccggggagctcttatggattcccagcaagcatcaggaaccattgtgcaaattgtcatcaataacaaacacaagcatggacaagtgtgtgtttccaatggaaagacctattctcatggcgagtcctggcacccaaacctccgggcatttggcattgtggagtgtgtgctatgtacttgtaatgtcaccaagcaagagtgtaagaaaatccactgccccaatcgatacccctgcaagtatcctcaaaaaatagacggaaaatgctgcaaggtgtgtccaggtaaaaaagcaaaagaacttccaggccaaagctttgacaataaaggctacttctgcggggaagaaacgatgcctgtgtatgagtctgtattcatggaggatggggagacaaccagaaaaatagcactggagactgagagaccacctcaggtagaggtccacgtttggactattcgaaagggcattctccagcacttccatattgagaagatctccaagaggatgtttgaggagcttcctcacttcaagctggtgaccagaacaaccctgagccagtggaagatcttcaccgaaggagaagctcagatcagccagatgtgttcaagtcgtgtatgcagaacagagcttgaagatttagtcaaggttttgtacctggagagatctgaaaagggccactgttaggcaagacagacagtattggatagggtaaagcaagaaaactcaagctgcagctggactgcaggcttattttgcttaagtcaacagtgccctaaaactccaaactcaaatgcagtcaattattcacgccatgcacagcataatttgctcctttgtgtggagtggtgtgtcagcccttgaacatctcctccaaagagactagaagagtcttaaattatatgtgggaggaggagggatagaacatcacaacactgctctagtttcttggagaatcacatttctttacaggttaaagacaaacaagaccccagggtttttatctagaaagttattcaagtgaaagaaagagaagggaattgcttagtaggagttctgcagtatagaacaattacttgtatgaaattatacctttgaattttagaatgtcatgtgttcttttaaaaaaattagctccccatcctccctcctcactccctccctccctccttctctctctctctctctctccctccctctctcacagacacacacacacacacacacacacacacacacacgcacgtccacactcacattaaacgaaagctttatttgaagcaaagctagccaagattctacgttacttttcccttgactggatcccaagtagcttggaagtttttgtgcccaggagagtaaataactgtgaacaagaggctctgcccttaggtctttgtggctgtttaagtcaccaacaatagagtcagggtaaagaataaaaacactttcatagcctcattcattcacttagaagtggtaataatttttccctaatgataccacttttcttttccccctgtacctatgggacttccagaaagaagttaaattgagtaaaatcatcagaaactgaatccatgtaagaaaaaataattgttgaagaaagaagttgatagaattcaaaaaggccatctttttgctttcacatcaataaaatttaccaagtaataaaaaaaaaaaaaaaaaa

SEQ ID NO: 14254 - DNA, 3750 bp, Homo sapiens
gcgctgctcgccagcttgctcgcactcggctgtgcggcggggcaggcatgggagccgcgcgctctctcccggcgcccacacctgtctgagcggcgcagcgagccgcggcccgggcgggctgctcggcgcggaacagtgctcggcatggcagggattccagggctcctcttccttctcttctttctgctctgtgctgttgggcaagtgagcccttacagtgccccctggaaacccacttggcctgcataccgcctccctgtcgtcttgccccagtctaccctcaatttagccaagccagactttggagccgaagccaaattagaagtatcttcttcatgtggaccccagtgtcataagggaactccactgcccacttacgaagaggccaagcaatatctgtcttatgaaacgctctatgccaatggcagccgcacagagacgcaggtgggcatctacatcctcagcagtagtggagatggggcccaacaccgagactcagggtcttcaggaaagtctcgaaggaagcggcagatttatggctatgacagcaggttcagcatttttgggaaggacttcctgctcaactaccctttctcaacatcagtgaagttatccacgggctgcaccggcaccctggtggcagagaagcatgtcctcacagctgcccactgcatacacgatggaaaaacctatgtgaaaggaacccagaagcttcgagtgggcttcctaaagcccaagtttaaagatggtggtcgaggggccaacgactccacttcagccatgcccgagcagatgaaatttcagtggatccgggtgaaacgcacccatgtgcccaagggttggatcaagggcaatgccaatgacatcggcatggattatgattatgccctcctggaactcaaaaagccccacaagagaaaatttatgaagattggggtgagccctcctgctaagcagctgccagggggcagaattcacttctctggttatgacaatgaccgaccaggcaatttggtgtatcgcttctgtgacgtcaaagacgagacctatgacttgctctaccagcaatgcgatgcccagccaggggccagcgggtctggggtctatgtgaggatgtggaagagacagcagcagaagtgggagcgaaaaattattggcattttttcagggcaccagtgggtggacatgaatggttccccacaggatttcaacgtggctgtcagaatcactcctctcaaatatgcccagatttgctattggattaaaggaaactacctggattgtagggaggggtgacacagtgttccctcctggcagcaattaagggtcttcatgttcttattttaggagaggccaaattgttttttgtcattggcgtgcacacgtgtgtgtgtgtgtgtgtgtgtgtgtaaggtgtcttataatcttttacctatttcttacaattgcaagatgactggctttactatttgaaaactggtttgtgtatcatatcatatatcatttaagcagtttgaaggcatacttttgcatagaaataaaaaaaatactgatttggggcaatgaggaatatttgacaattaagttaatcttcacgtttttgcaaactttgatttttatttcatctgaacttgtttcaaagatttatattaaatatttggcatacaagagatatgaattcttatatgtgtgcatgtgtgttttcttctgagattcatcttggtggtgggtttttttgtttttttaattcagtgcctgatctttaatgcttccataaggcagtgttcccatttaggaactttgacagcatttgttaggcagaatattttggatttggaggcatttgcatggtagtctttgaacagtaaaatgatgtgttgactatactgatacacatattaaactataccttatagtaaaccagtatcccaagctgcttttagttccaaaaatagtttcttttccaaaggttgttgctctactttgtaggaagtctttgcatatggccctcccaactttaaagtcataccagagtggccaagagtgtttatcccaacccttccatttaacaggatttcactcacatttctggaactagctatttttcagaagacaataatcagggcttaattagaacaggctgtatttcctcccagcaaacagttgtggccacactaaaaacaatcatagcattttacccctggattatagcacatctcatgttttatcatttggatggagtaatttaaaatgaattaaattccagagaacaatggaagcattgcctggcagatgtcacaacagaataaccacttgtttggagcctggcacagtcctccagcctgatcaaaaattattctgcatagttttcagtgtgctttctgggagctatgtacttcttcaatttggaaacttttctctctcatttatagtgaaaatacttggaagttactttaagaaaaccagtgtggcctttttccctctagctttaaaagggccgcttttgctggaatgctctaggttatagataaacaattaggtataatagcaaaaatgaaaattggaagaatgcaaaatggatcagaatcatgccttccaataaaggcctttacacatgttttatcaatatgattatcaaatcacagcatatacagaaaagacttggacttattgtatgtttttattttatggctctcggcctaagcacttctttctaaatgtatcggagaaaaaatcaaatggactacaagcacgtgtttgctgtgcttgcaccccaggtaaacctgcattgtagcaatttgtaaggatattcagatggagcactgtcacttagacattctctgggggattttctgcttgtctttcttgagctttttggaaggataattctgataaggcactcaagaaacgtacaaccacagtgctttcttcaaatcatatgagaaatactatgcatagcaaggagatgcagagccgccaggaaaattctgagttccagcacaattttctttggaatctaacaggaatctagcctgaggaagaagggaggtctccatttctatgtctggtatttgggggttttgtttgtttttgctttagcttggtgaaaaaaagttcactgaacaccaagaccagaatggatttttttaaaaaaatagatgttccttttgtgaagcaccttgattccttgattttgattttttgcaaagttagacaatggcacaaagtcaaaatgaaatcaatgtttagttcacaagtagatgtaatttactaaagaatgatacacccatatgctatatacagcttaactcacagaactgtaaaagaaaattataaaataattcaacatgtccatctttttagtgataataaaagaaagcatggtattaaactatcatagaagtagacagaaaaagaaaaaaggactcatggcattattaatataattagtgctttacatgtgttagttatacatattagaagcatatttgcctagtaaggctagtagaaccacatttcccaaagtgtgctccttaaacactcatgccttatgattttctaccaaaagtaaaaagggttgtattaagtcagaggaagatgcctctccattttccctctctttatcagaggttcacatgcctgtctgcacattaaaagctctgggaagacctgttgtaaagggacaagttgaggttgtaaaatctgcatttaaataaacatctttgatcacaaaaaaaaaaaaaaaaaaaa

SEQ ID NO: 14255 - DNA, 3768 bp, Homo sapiens
ccccgtgcggctctcgaggcagctccagtcccggacgcaaccccggagccgtctcaggtccctggggggaacggtgggttagacggggacgggaagggacagcggccttcgaccgccccccgagtaattgacccaggactcattttcaggaaagcctgaaaatgagtaaaatagtgaaatgaggaatttgaacattttatctttggatggggatcttctgaggatgcaaagagtgattcatccaagccatgtggtaaaatcaggaatttgaagaaaatggaaatgtttacatttttgttgacgtgtatttttctacccctcctaagagggcacagtctcttcacctgtgaaccaattactgttcccagatgtatgaaaatggcctacaacatgacgtttttccctaatctgatgggtcattatgaccagagtattgccgcggtggaaatggagcattttcttcctctcgcaaatctggaatgttcaccaaacattgaaactttcctctgcaaagcatttgtaccaacctgcatagaacaaattcatgtggttccaccttgtcgtaaactttgtgagaaagtatattctgattgcaaaaaattaattgacacttttgggatccgatggcctgaggagcttgaatgtgacagattacaatactgtgatgagactgttcctgtaacttttgatccacacacagaatttcttggtcctcagaagaaaacagaacaagtccaaagagacattggattttggtgtccaaggcatcttaagacttctgggggacaaggatataagtttctgggaattgaccagtgtgcgcctccatgccccaacatgtattttaaaagtgatgagctagagtttgcaaaaagttttattggaacagtttcaatattttgtctttgtgcaactctgttcacattccttacttttttaattgatgttagaagattcagatacccagagagaccaattatatattactctgtctgttacagcattgtatctcttatgtacttcattggatttttgctaggcgatagcacagcctgcaataaggcagatgagaagctagaacttggtgacactgttgtcctaggctctcaaaataaggcttgcaccgttttgttcatgcttttgtattttttcacaatggctggcactgtgtggtgggtgattcttaccattacttggttcttagctgcaggaagaaaatggagttgtgaagccatcgagcaaaaagcagtgtggtttcatgctgttgcatggggaacaccaggtttcctgactgttatgcttcttgctatgaacaaagttgaaggagacaacattagtggagtttgctttgttggcctttatgacctggatgcttctcgctactttgtactcttgccactgtgcctttgtgtgtttgttgggctctctcttcttttagctggcattatttccttaaatcatgttcgacaagtcatacaacatgatggccggaaccaagaaaaactaaagaaatttatgattcgaattggagtcttcagcggcttgtatcttgtgccattagtgacacttctcggatgttacgtctatgagcaagtgaacaggattacctgggagataacttgggtctctgatcattgtcgtcagtaccatatcccatgtccttatcaggcaaaagcaaaagctcgaccagaattggctttatttatgataaaatacctgatgacattaattgttggcatctctgctgtcttctgggttggaagcaaaaagacatgcacagaatgggctgggttttttaaacgaaatcgcaagagagatccaatcagtgaaagtcgaagagtactacaggaatcatgtgagtttttcttaaagcacaattctaaagttaaacacaaaaagaagcactataaaccaagttcacacaagctgaaggtcatttccaaatccatgggaaccagcacaggagctacagcaaatcatggcacttctgcagtagcaattactagccatgattacctaggacaagaaactttgacagaaatccaaacctcaccagaaacatcaatgagagaggtgaaagcggacggagctagcacccccaggttaagagaacaggactgtggtgaacctgcctcgccagcagcatccatctccagactctctggggaacaggtcgacgggaagggccaggcaggcagtgtatctgaaagtgcgcggagtgaaggaaggattagtccaaagagtgatattactgacactggcctggcacagagcaacaatttgcaggtccccagttcttcagaaccaagcagcctcaaaggttccacatctctgcttgttcacccggtttcaggagtgagaaaagagcagggaggtggttgtcattcagatacttgaagaacattttctctcgttactcagaagcaaatttgtgttacactggaagtgacctatgcactgttttgtaagaatcactgttacgttcttcttttgcacttaaagttgcattgcctactgttatactggaaaaaatagagttcaagaataatatgactcatttcacacaaaggttaatgacaacaatatacctgaaaacagaaaatgtgcaggttaataatatttttttaatagtgtgggaggacagagttagaggaatcttccttttctatttatgaagattctactcttggtaagagtattttaagatgtactatgctattttacttttttgatataaaatcaagatatttctttgctgaagtatttaaatcttatccttgtatctttttatacatatttgaaaataagcttatatgtatttgaacttttttgaaatcctattcaagtatttttatcatgctattgtgatattttagcactttggtagcttttacactgaatttctaagaaaattgtaaaatagtcttcttttatactgtaaaaaaagatataccaaaaagtcttataataggaatttaactttaaaaacccacttattgataccttaccatctaaaatgtgtgatttttatagtctcgttttaggaatttcacagatctaaattatgtaactgaaataaggtgcttactcaaagagtgtccactattgattgtattatgctgctcactgatccttctgcatatttaaaataaaatgtcctaaagggttagtagacaaaatgttagtcttttgtatattaggccaagtgcaattgacttcccttttttaatgtttcatgaccacccattgattgtattataaccacttacagttgcttatattttttgttttaacttttgttttttaacatttagaatattacattttgtattatacagtacctttctcagacattttgtagaattcatttcggcagctcactaggattttgctgaacattaaaaagtgtgatagcgatattagtgccaatcaaatggaaaaaaggtagtcttaataaacaagacacaacgtttttatacaacatactttaaaatattaaggagttttcttaattttgtttcctattaagtattattctttgggcaagattttctgatgcttttgattttctctcaatttagcatttgcttttggtttttttctctatttagcattctgttaaggcacaaaaactatgtactgtatgggaaatgttgtaaatattaccttttccacattttaaacagacaactttgaatacaaaaactttgttttgtgtgatcttttcattaataaaattatctttgtataagaaaaaaaaaaaaaaaa

SEQ ID NO: 14256 - DNA, 1767 bp, Homo sapiens
gttgccagggagcggcgcgggagccctgaggggactgcggcggctgcgcggaggagcgaggcacttgctggggtcggggctgcgcgacggcgcaggggctgcggggagcgccgcgcaggccgtgcagttcctagcgaggaggcgccgccgccattgccgctctctcggtgagcgcagccccgctctccgggccgggccttcgcgggccaccggcgccatgggccagtgcggcatcacctcctccaagaccgtgctggtctttctcaacctcatcttctggggggcagctggcattttatgctatgtgggagcctatgtcttcatcacttatgatgactatgaccacttctttgaagatgtgtacacgctcatccctgctgtagtgatcatagctgtaggagccctgcttttcatcattgggctaattggctgctgtgccacaatccgggaaagtcgctgtggacttgccacggtggaaaatgaggttgatcgcagcattcagaaagtgtataagacctacaatggaaccaaccctgatgctgctagccgggctattgattatgtacagagacagctgcattgttgtggaattcacaactactcagactgggaaaatacagattggttcaaagaaaccaaaaaccagagtgtccctcttagctgctgcagagagactgccagcaattgtaatggcagcctggcccacccttccgacctctatgctgaggggtgtgaggctctagtagtgaagaagctacaagaaatcatgatgcatgtgatctgggccgcactggcatttgcagctattcagctgctgggcatgctgtgtgcttgcatcgtgttgtgcagaaggagtagagatcctgcttacgagctcctcatcactggcggaacctatgcatagttgacaactcaagcctgagctttttggtcttgttctgatttggaaggtgaattgagcaggtctgctgctgttggcctctggagttcatttagttaaagcacatgtacactggtgttggacagagcagcttggcttttcatgtgcccacctacttacctactacctgcgactttctttttccttgttctagctgactcttcatgcccctaagattttaagtacgatggtgaacgttctaatttcagaaccaattgcgagtcatgtagtgtggtagaattaaaggaggacacgagcctgcttctgttacctccaagtggtaacaggactgatgccgaaatgtcaccaggtcctttcagtcttcacagtggagaactcttggccaaaggtttttgcggggaggaggaggaaaccagctttctggttaaggttaacaccagatggtgcccctcattggtgtccttttaaaaaatatttactgtagtccaataagatagcagctgtacaaaatgactaaaatagattgtaggatcatatggcgtatatcttggttcatcttcaaaatcagagactgagctttgaaactagtggtttttaatcaaagttggctttataggaggagtataatgtatgcactactgttttaaaagaattagtgtgagtgtgtttttgtatgaatgagcccattcatggtaagtcttaagcttgttggaaataatgtacccatgtagactagcaaaatagtatgtagatgtgatctcagttgtaaatagaaaaatctaattcaataaactctgtatcagcccccaacatattatttttcattatttgggggatatttcagttccaaaaaaaaaaaaaaaaaa

SEQ ID NO: 14257 - DNA, 1842 bp, Homo sapiens
gttgccagggagcggcgcgggagccctgaggggactgcggcggctgcgcggaggagcgaggcacttgctggggtcggggctgcgcgacggcgcaggggctgcggggagcgccgcgcaggccgtgcagttcctagcgaggaggcgccgccgccattgccgctctctcggtgagcgcagccccgctctccgggccgggccttcgcgggccaccggcgccatgggccagtgcggcatcacctcctccaagaccgtgctggtctttctcaacctcatcttctggggggcagctggcattttatgctatgtgggagcctatgtcttcatcacttatgatgactatgaccacttctttgaagatgtgtacacgctcatccctgctgtagtgatcatagctgtaggagccctgcttttcatcattgggctaattggctgctgtgccacaatccgggaaagtcgctgtggacttgccacgtttgtcatcatcctgctcttggtttttgtcacagaagttgttgtagtggttttgggatatgtttacagagcaaaggtggaaaatgaggttgatcgcagcattcagaaagtgtataagacctacaatggaaccaaccctgatgctgctagccgggctattgattatgtacagagacagctgcattgttgtggaattcacaactactcagactgggaaaatacagattggttcaaagaaaccaaaaaccagagtgtccctcttagctgctgcagagagactgccagcaattgtaatggcagcctggcccacccttccgacctctatgctgaggggtgtgaggctctagtagtgaagaagctacaagaaatcatgatgcatgtgatctgggccgcactggcatttgcagctattcagctgctgggcatgctgtgtgcttgcatcgtgttgtgcagaaggagtagagatcctgcttacgagctcctcatcactggcggaacctatgcatagttgacaactcaagcctgagctttttggtcttgttctgatttggaaggtgaattgagcaggtctgctgctgttggcctctggagttcatttagttaaagcacatgtacactggtgttggacagagcagcttggcttttcatgtgcccacctacttacctactacctgcgactttctttttccttgttctagctgactcttcatgcccctaagattttaagtacgatggtgaacgttctaatttcagaaccaattgcgagtcatgtagtgtggtagaattaaaggaggacacgagcctgcttctgttacctccaagtggtaacaggactgatgccgaaatgtcaccaggtcctttcagtcttcacagtggagaactcttggccaaaggtttttgcggggaggaggaggaaaccagctttctggttaaggttaacaccagatggtgcccctcattggtgtccttttaaaaaatatttactgtagtccaataagatagcagctgtacaaaatgactaaaatagattgtaggatcatatggcgtatatcttggttcatcttcaaaatcagagactgagctttgaaactagtggtttttaatcaaagttggctttataggaggagtataatgtatgcactactgttttaaaagaattagtgtgagtgtgtttttgtatgaatgagcccattcatggtaagtcttaagcttgttggaaataatgtacccatgtagactagcaaaatagtatgtagatgtgatctcagttgtaaatagaaaaatctaattcaataaactctgtatcagcccccaacatattatttttcattatttgggggatatttcagttccaaaaaaaaaaaaaaaaaa

SEQ ID NO: 14258 - DNA, 916 bp, Homo sapiens
ccagagaggggcaggctggtcccctgacaggttgaagcaagtagacgcccaggagccccgggagggggctgcagtttccttccttccttctcggcagcgctccgcgcccccatcgcccctcctgcgctagcggaggtgatcgccgcggcgatgccggaggagggttcgggctgctcggtgcggcgcaggccctatgggtgcgtcctgcgggctgctttggtcccattggtcgcgggcttggtgatctgcctcgtggtgtgcatccagcgcttcgcacaggctcagcagcagctgccgctcgagtcacttgggtgggacgtagctgagctgcagctgaatcacacaggacctcagcaggaccccaggctatactggcaggggggcccagcactgggccgctccttcctgcatggaccagagctggacaaggggcagctacgtatccatcgtgatggcatctacatggtacacatccaggtgacgctggccatctgctcctccacgacggcctccaggcaccaccccaccaccctggccgtgggaatctgctctcccgcctcccgtagcatcagcctgctgcgtctcagcttccaccaaggttgtaccattgcctcccagcgcctgacgcccctggcccgaggggacacactctgcaccaacctcactgggacacttttgccttcccgaaacactgatgagaccttctttggagtgcagtgggtgcgcccctgaccactgctgctgattagggttttttaaattttattttattttatttaagttcaagagaaaaagtgtacacacaggggccacccggggttggggtgggagtgtggtggggggtagtggtggcaggacaagagaaggcattgagctttttctttcattttcctattaaaaaatacaaaaatcaaaa

SEQ ID NO: 14259 - DNA, 2208 bp, Homo sapiens
tctttggctttttttggcggagctggggcgccctccggaagcgtttccaactttccagaagtttctcgggacgggcaggagggggtggggactgccatatatagatcccgggagcaggggagcgggctaagagtagaatcgtgtcgcggctcgagagcgagagtcacgtcccggcgctagcccagcccgacccaggcccaccgtggtgcacgcaaaccacttcctggccatgcgctccctcctgcttctcagcgccttctgcctcctggaggcggccctggccgccgaggtgaagaaacctgcagccgcagcagctcctggcactgcggagaagttgagccccaaggcggccacgcttgccgagcgcagcgccggcctggccttcagcttgtaccaggccatggccaaggaccaggcagtggagaacatcctggtgtcacccgtggtggtggcctcgtcgctagggctcgtgtcgctgggcggcaaggcgaccacggcgtcgcaggccaaggcagtgctgagcgccgagcagctgcgcgacgaggaggtgcacgccggcctgggcgagctgctgcgctcactcagcaactccacggcgcgcaacgtgacctggaagctgggcagccgactgtacggacccagctcagtgagcttcgctgatgacttcgtgcgcagcagcaagcagcactacaactgcgagcactccaagatcaacttccgcgacaagcgcagcgcgctgcagtccatcaacgagtgggccgcgcagaccaccgacggcaagctgcccgaggtcaccaaggacgtggagcgcacggacggcgccctgctagtcaacgccatgttcttcaagccacactgggatgagaaattccaccacaagatggtggacaaccgtggcttcatggtgactcggtcctataccgtgggtgtcatgatgatgcaccggacaggcctctacaactactacgacgacgagaaggaaaagctgcaaatcgtggagatgcccctggcccacaagctctccagcctcatcatcctcatgccccatcacgtggagcctctcgagcgccttgaaaagctgctaaccaaagagcagctgaagatctggatggggaagatgcagaagaaggctgttgccatctccttgcccaagggtgtggtggaggtgacccatgacctgcagaaacacctggctgggctgggcctgactgaggccattgacaagaacaaggccgacttgtcacgcatgtcaggcaagaaggacctgtacctggccagcgtgttccacgccaccgcctttgagttggacacagatggcaacccctttgaccaggacatctacgggcgcgaggagctgcgcagccccaagctgttctacgccgaccaccccttcatcttcctagtgcgggacacccaaagcggctccctgctattcattgggcgcctggtccggcctaagggtgacaagatgcgagacgagttatagggcctcagggtgcacacaggatggcaggaggcatccaaaggctcctgagacacatgggtgctattggggttgggggggaggtgaggtaccagccttggatactccatggggtgggggtggaaaaacagaccggggttcccgtgtgcctgagcggaccttcccagctagaattcactccacttggacatgggccccagataccatgatgctgagcccggaaactccacatcctgtgggacctgggccatagtcattctgcctgccctgaaagtcccagatcaagcctgcctcaatcagtattcatatttatagccaggtaccttctcacctgtgagaccaaattgagctaggggggtcagccagccctcttctgacactaaaacacctcagctgcctccccagctctatcccaacctctcccaactataaaactaggtgctgcagcccctgggaccaggcacccccagaatgacctggccgcagtgaggcggattgagaaggagctcccaggaggggcttctgggcagactctggtcaagaagcatcgtgtctggcgttgtggggatgaactttttgttttgtttcttccttttttagttcttcaaagatagggagggaagggggaacatgagcctttgttgctatcaatccaagaacttatttgtacattttttttttcaataaaacttttccaatgacattttgttggagcgtggaaaaaa

SEQ ID NO: 14260 - DNA, 4293 bp, Homo sapiens
gtttctcatagttggcgtcttctaaaggaaaaacactaaaatgaggaactcagcggaccgggagcgacgcagcttgagggaagcatccctagctgttggcgcagaggggcgaggctgaagccgagtggcccgaggtgtctgaggggctggggcaaaggtgaaagagtttcagaacaagcttcctggaacccatgacccatgaagtcttgtcgacatttataccgtctgagggtagcagctcgaaagtagaagaagtggagtgttgccagggacggcagtatctctttgtgtgaccctggcggcttatgggacgttggcttcagacctttgtgatacaccatgctgcgtgggacgatgacggcgtggagaggaatgaggcctgaggtcacactggcttgcctcctcctagccacagcaggctgctttgctgacttgaacgaggtccctcaggtcaccgtccagcctgcgtccaccgtccagaagcccggaggcactgtgatcttgggctgcgtggtggaacctccaaggatgaatgtaacctggcgcctgaatggaaaggagctgaatggctcggatgatgctctgggtgtcctcatcacccacgggaccctcgtcatcactgcccttaacaaccacactgtgggacggtaccagtgtgtggcccggatgcctgcgggggctgtggccagcgtgccagccactgtgacactagccaatctccaggacttcaagttagatgtgcagcacgtgattgaagtggatgagggaaacacagcagtcattgcctgccacctgcctgagagccaccccaaagcccaggtccggtacagcgtcaaacaagagtggctggaggcctccagaggtaactacctgatcatgccctcagggaacctccagattgtgaatgccagccaggaggacgagggcatgtacaagtgtgcagcctacaacccagtgacccaggaagtgaaaacctccggctccagcgacaggctacgtgtgcgccgctccaccgctgaggctgcccgcatcatctaccccccagaggcccaaaccatcatcgtcaccaaaggccagagtctcattctggagtgtgtggccagtggaatcccacccccacgggtcacctgggccaaggatgggtccagtgtcaccggctacaacaagacgcgcttcctgctgagcaacctcctcatcgacaccaccagcgaggaggactcaggcacctaccgctgcatggccgacaatggggttgggcagcccggggcagcggtcatcctctacaatgtccaggtgtttgaaccccctgaggtcaccatggagctatcccagctggtcatcccctggggccagagtgccaagcttacctgtgaggtgcgtgggaaccccccgccctccgtgctgtggctgaggaatgctgtgcccctcatctccagccagcgcctccggctctcccgcagggccctgcgcgtgctcagcatggggcctgaggacgaaggcgtctaccagtgcatggccgagaacgaggttgggagcgcccatgccgtagtccagctgcggacctccaggccaagcataaccccaaggctatggcaggatgctgagctggctactggcacacctcctgtatcaccctccaaactcggcaaccctgagcagatgctgagggggcaaccggcgctccccagacccccaacgtcagtggggcctgcttccccgcagtgtccaggagagaaggggcagggggctcccgccgaggctcccatcatcctcagctcgccccgcacctccaagacagactcatatgaactggtgtggcggcctcggcatgagggcagtggccgggcgccaatcctctactatgtggtgaaacaccgcaaggtcacaaattcctctgacgattggaccatctctggcattccagccaaccagcaccgcctgaccctcaccagacttgaccccgggagcttgtatgaagtggagatggcagcttacaactgtgcgggagagggccagacagccatggtcaccttccgaactggacggcggcccaaacccgagatcatggccagcaaagagcagcagatccagagagacgaccctggagccagtccccagagcagcagccagccagaccacggccgcctctcccccccagaagctcccgacaggcccaccatctccacggcctccgagacctcagtgtacgtgacctggattccccgtgggaatggtgggttcccaatccagtccttccgtgtggagtacaagaagctaaagaaagtgggagactggattctggccaccagcgccatccccccatcgcggctgtccgtggagatcacgggcctagagaaaggcacctcctacaagtttcgagtccgggctctgaacatgctgggggagagcgagcccagcgccccctctcggccctacgtggtgtcgggctacagcggtcgcgtgtacgagaggcccgtggcaggtccttatatcaccttcacggatgcggtcaatgagaccaccatcatgctcaagtggatgtacatcccagcaagtaacaacaacaccccaatccatggcttttatatctattatcgacccacagacagtgacaatgatagtgactacaagaaggatatggtggaaggggacaagtactggcactccatcagccacctgcagccagagacctcctacgacattaagatgcagtgcttcaatgaaggaggggagagcgagttcagcaacgtgatgatctgtgagaccaaagctcggaagtcttctggccagcctggtcgactgccacccccaactctggccccaccacagccgccccttcctgaaaccatagagcggccggtgggcactggggccatggtggctcgctccagcgacctgccctatctgattgtcggggtcgtcctgggctccatcgttctcatcatcgtcaccttcatccccttctgcttgtggagggcctggtctaagcaaaaacatacaacagacctgggttttcctcgaagtgcccttccaccctcctgcccgtatactatggtgccattgggaggactcccaggccaccaggccagtggacagccctacctcagtggcatcagtggacgggcctgtgctaatgggatccacatgaataggggctgcccctcggctgcagtgggctacccgggcatgaagccccagcagcactgcccaggcgagcttcagcagcagagtgacaccagcagcctgctgaggcagacccatcttggcaatggatatgacccccaaagtcaccagatcacgaggggtcccaagtctagcccggacgagggctctttcttatacacactgcccgacgactccactcaccagctgctgcagccccatcacgactgctgccaacgccaggagcagcctgctgctgtgggccagtcaggggtgaggagagcccccgacagtcctgtcctggaagcagtgtgggaccctccatttcactcagggcccccatgctgcttgggccttgtgccagttgaagaggtggacagtcctgactcctgccaagtgagtggaggagactggtgtccccagcaccccgtaggggcctacgtaggacaggaacctggaatgcagctctccccggggccactggtgcgtgtgtcttttgaaacaccacctctcacaatttaggcagaagctgatatcccagaaagactatatattgttttttttttaaaaaaaaaaagaagaaaaaagagacagagaaaattggtatttatttttctattatagccatatttatatatttatgcacttgtaaataaatgtatatgttttataattctggagagacataaggagtcctacccgttgaggttggagagggaaaataaagaagctgccacctaacaggagtcacccaggaaagcaccgcacaggctggcgcgggacagactcctaacctggggcctctgcagtggcaggcgaggctgcaggaggcccacagataagctggcaagaggaaggatcccaggcacatggttcatcacgagcatgagggaacagcaaggggcacggtatcacagcctggagacacccacacagatggctggatccggtgctacgggaaacattttcctaagatgcccatgagaacagaccaagatgtgtacagcactatgagcattaaaaaaccttccagaatcaataatccgtggcaacatatctctgtaaaaacaaacactgtaacttctaaataaatgtttagtcttccctgtaaccttcaaaaaaaaaaaaaaa

SEQ ID NO: 14261 - DNA, 2244 bp, Homo sapiens
tatcgccgcctcagacagctttcagtctgtccctcctacaactcccacaaggcccctcggccccgggccgcggcccggcccggagtgggggcgggcggaggcgcgggagttatggagggggcgggctctgcagggaagtgcgtcagaggaggcgcggggagagtagggtgctgtggtctgagctagagggtgaagctggcggagcaggaggatgggcgtatgcaggtgatagactagagaacaagacctctgtctccgtagcatcctggagcagtctgaatgccagaatggataaccgttttgctacagcatttgtaattgcttgtgtgcttagcctcatttccaccatctacatggcagcctccattggcacagacttctggtatgaatatcgaagtccagttcaagaaaattccagtgatttgaataaaagcatctgggatgaattcattagtgatgaggcagatgaaaagacttataatgatgcactttttcgatacaatggcacagtgggattgtggagacggtgtatcaccatacccaaaaacatgcattggtatagcccaccagaaaggacagagtcatttgatgtggtcacaaaatgtgtgagtttcacactaactgagcagttcatggagaaatttgttgatcccggaaaccacaatagcgggattgatctccttaggacctatctttggcgttgccagttccttttaccttttgtgagtttaggtttgatgtgctttggggctttgatcggactttgtgcttgcatttgccgaagcttatatcccaccattgccacgggcattctccatctccttgcaggtctgtgtacactgggctcagtaagttgttatgttgctggaattgaactactccaccagaaactagagctccctgacaatgtatccggtgaatttggatggtccttctgcctggcttgtgtctctgctcccttacagttcatggcttctgctctcttcatctgggctgctcacaccaaccggaaagagtacaccttaatgaaggcatatcgtgtggcatgagcaagaaactgcctgctttacaattgccatttttatttttttaaaataatactgatattttccccacctctcaattgtttttaatttttatttgtggatataccattttattatgaaaatctattttatttatacacattcaccactaaatacacacttaataccactaaaatttatgtggtttactttaagcgatgccatctttcaaataaactaatctaggtctagacagaaagaaatggatagagacttgacacaaatttatgaaagaaaattgggagtaggaatgtgaccgaaaacaagttgtgctaatgtctgttagacttttcagtaaaactaaagtaactgtatctgttcaactaaaaactctatattagtttctttgggaaacctctcatcgtcaaaactttatgttcactttgctgttgtagatagccagtcaaccagcagtattagtgctgttttcaaagatttaagctctataaaattgggaaattatctaagatcattttccctaagcattgacacatagcttcatctgaggtgagatatggcagctgtttgtatctgcactgtgtctgtctacaaaaagtgaaaaatacagtgtttacttgaaattttaactttgtaactgcaagaattccagttcagccgggcgaggattagtattatttttaactctccgtaagattttcagtaccaccaaattgttttggattttttttctttcctcttcacataccagggttattaaaagtgtgctttctttttacattatattacagttacaaggtaaaattcctcaactgctatttatttattccagcccagtactataaagaacgtttcaccataatgaccctccagagctgggaaacctaccacaagatctaaagttctggctgtccattaacctccaactatggtctttatttcttgtggtaatatgatgtgcctttccttgcctaaatcccttcctggtgtgtatcaacattatttaatgtcttctaattcagtcatttttttataagtatgtctataaacattgaactttaaaaaacttatttatttattccactactgtagcaattgacagattaaaaaaatgtaacttcataatttcttaccataacctcaatgtcttttttaaaaaataaaattaaaaatgaaaagagactcaattgtaaaaaaaaaa

SEQ ID NO: 14262 - DNA, 2360 bp, Homo sapiens
acagtgcggagaccgcagccccggagcccgggccagggtccacctgtccccgcagcgccggctcgcgccctcctgccgcagccaccgagccgccgtctagcgccccgacctcgccaccatgagagccctgctggcgcgcctgcttctctgcgtcctggtcgtgagcgactccaaaggcagcaatgaacttcatcaagttccatcgaactgtgactgtctaaatggaggaacatgtgtgtccaacaagtacttctccaacattcactggtgcaactgcccaaagaaattcggagggcagcactgtgaaatagataagtcaaaaacctgctatgaggggaatggtcacttttaccgaggaaaggccagcactgacaccatgggccggccctgcctgccctggaactctgccactgtccttcagcaaacgtaccatgcccacagatctgatgctcttcagctgggcctggggaaacataattactgcaggaacccagacaaccggaggcgaccctggtgctatgtgcaggtgggcctaaagccgcttgtccaagagtgcatggtgcatgactgcgcagatggaaaaaagccctcctctcctccagaagaattaaaatttcagtgtggccaaaagactctgaggccccgctttaagattattgggggagaattcaccaccatcgagaaccagccctggtttgcggccatctacaggaggcaccgggggggctctgtcacctacgtgtgtggaggcagcctcatcagcccttgctgggtgatcagcgccacacactgcttcattgattacccaaagaaggaggactacatcgtctacctgggtcgctcaaggcttaactccaacacgcaaggggagatgaagtttgaggtggaaaacctcatcctacacaaggactacagcgctgacacgcttgctcaccacaacgacattgccttgctgaagatccgttccaaggagggcaggtgtgcgcagccatcccggactatacagaccatctgcctgccctcgatgtataacgatccccagtttggcacaagctgtgagatcactggctttggaaaagagaattctaccgactatctctatccggagcagctgaaaatgactgttgtgaagctgatttcccaccgggagtgtcagcagccccactactacggctctgaagtcaccaccaaaatgctgtgtgctgctgacccacagtggaaaacagattcctgccagggagactcagggggacccctcgtctgttccctccaaggccgcatgactttgactggaattgtgagctggggccgtggatgtgccctgaaggacaagccaggcgtctacacgagagtctcacacttcttaccctggatccgcagtcacaccaaggaagagaatggcctggccctctgagggtccccagggaggaaacgggcaccacccgctttcttgctggttgtcatttttgcagtagagtcatctccatcagctgtaagaagagactgggaagataggctctgcacagatggatttgcctgtgccacccaccagggcgaacgacaatagctttaccctcaggcataggcctgggtgctggctgcccagacccctctggccaggatggaggggtggtcctgactcaacatgttactgaccagcaacttgtctttttctggactgaagcctgcaggagttaaaaagggcagggcatctcctgtgcatgggtgaagggagagccagctcccccgacggtgggcatttgtgaggcccatggttgagaaatgaataatttcccaattaggaagtgtaacagctgaggtctcttgagggagcttagccaatgtgggagcagcggtttggggagcagagacactaacgacttcagggcagggctctgatattccatgaatgtatcaggaaatatatatgtgtgtgtatgtttgcacacttgtgtgtgggctgtgagtgtaagtgtgagtaagagctggtgtctgattgttaagtctaaatatttccttaaactgtgtggactgtgatgccacacagagtggtctttctggagaggttataggtcactcctggggcctcttgggtcccccacgtgacagtgcctgggaatgtattattctgcagcatgacctgtgaccagcactgtctcagtttcactttcacatagatgtccctttcttggccagttatcccttccttttagcctagttcatccaatcctcactgggtggggtgaggaccactcctgtacactgaatatttatatttcactatttttatttatatttttgtaattttaaataaaagtgatcaataaaatgtgatttttctgatgaaaaaaaaaaaaaaa

SEQ ID NO: 14263 - DNA, 1878 bp, Homo sapiens
gggcgcagcggggcccgtctgcagcaagtgaccgacggccgggacggccgcctgccccctctgccacctggggcggtgcgggcccggagcccggagcccgggtagcgcgtagagccggcgcgatgcacgtgcgctcactgcgagctgcggcgccgcacagcttcgtggcgctctgggcacccctgttcctgctgcgctccgccctggccgacttcagcctggacaacgaggtgcactcgagcttcatccaccggcgcctccgcagccaggagcggcgggagatgcagcgcgagatcctctccattttgggcttgccccaccgcccgcgcccgcacctccagggcaagcacaactcggcacccatgttcatgctggacctgtacaacgccatggcggtggaggagggcggcgggcccggcggccagggcttctcctacccctacaaggccgtcttcagtacccagggcccccctctggccagcctgcaagatagccatttcctcaccgacgccgacatggtcatgagcttcgtcaacctcgtggaacatgacaaggaattcttccacccacgctaccaccatcgagagttccggtttgatctttccaagatcccagaaggggaagctgtcacggcagccgaattccggatctacaaggactacatccgggaacgcttcgacaatgagacgttccggatcagcgtttatcaggtgctccaggagcacttgggcagggaatcggatctcttcctgctcgacagccgtaccctctgggcctcggaggagggctggctggtgtttgacatcacagccaccagcaaccactgggtggtcaatccgcggcacaacctgggcctgcagctctcggtggagacgctggatgggcagagcatcaaccccaagttggcgggcctgattgggcggcacgggccccagaacaagcagcccttcatggtggctttcttcaaggccacggaggtccacttccgcagcatccggtccacggggagcaaacagcgcagccagaaccgctccaagacgcccaagaaccaggaagccctgcggatggccaacgtggcagagaacagcagcagcgaccagaggcaggcctgtaagaagcacgagctgtatgtcagcttccgagacctgggctggcaggactggatcatcgcgcctgaaggctacgccgcctactactgtgagggggagtgtgccttccctctgaactcctacatgaacgccaccaaccacgccatcgtgcagacgctggtccacttcatcaacccggaaacggtgcccaagccctgctgtgcgcccacgcagctcaatgccatctccgtcctctacttcgatgacagctccaacgtcatcctgaagaaatacagaaacatggtggtccgggcctgtggctgccactagctcctccgagaattcagaccctttggggccaagtttttctggatcctccattgctcgccttggccaggaaccagcagaccaactgccttttgtgagaccttcccctccctatccccaactttaaaggtgtgagagtattaggaaacatgagcagcatatggcttttgatcagtttttcagtggcagcatccaatgaacaagatcctacaagctgtgcaggcaaaacctagcaggaaaaaaaaacaacgcataaagaaaaatggccgggccaggtcattggctgggaagtctcagccatgcacggactcgtttccagaggtaattatgagcgcctaccagccaggccacccagccgtgggaggaagggggcgtggcaaggggtgggcacattggtgtctgtgcgaaaggaaaattgacccggaagttcctgtaataaatgtcacaataaaacgaatgaatg

SEQ ID NO: 14264 - DNA, 7248 bp, Homo sapiens
gcggccgcgggctcccgctaaccgcagcctccactcctctccccgcgcgccgcgcccccgccccgccccgcccggtctcgccggccgagcgtccgttggtccttgagcgcgtccgacagtctgtctgttcgcgatcctgccggagccccgccgccgccggcttggattctgaaaccttccttgtatccctcctgagacatctttgctgcaagatcgaggctgtcctctggtgagaaggtggtgaggcttcccgtcatattccagctctgaacagcaacatggggtgcaaagtcctgctcaacattgggcagcagatgctgcggcggaaggtggtggactgtagccgggaggagacgcggctgtctcgctgcctgaacacttttgatctggtggccctcggggtgggcagcacactgggtgctggtgtctacgtcctggctggagctgtggcccgtgagaatgcaggccctgccattgtcatctccttcctgatcgctgcgctggcctcagtgctggctggcctgtgctatggcgagtttggtgctcgggtccccaagacgggctcagcttacctctacagctatgtcaccgttggagagctctgggccttcatcaccggctggaacttaatcctctcctacatcatcggtacttcaagcgtagcgagggcctggagcgccaccttcgacgagctgataggcagacccatcggggagttctcacggacacacatgactctgaacgcccccggcgtgctggctgaaaaccccgacatattcgcagtgatcataattctcatcttgacaggacttttaactcttggtgtgaaagagtcggccatggtcaacaaaatattcacttgtattaacgtcctggtcctgggcttcataatggtgtcaggatttgtgaaaggatcggttaaaaactggcagctcacggaggaggattttgggaacacatcaggccgtctctgtttgaacaatgacacaaaagaagggaagcccggtgttggtggattcatgcccttcgggttctctggtgtcctgtcgggggcagcgacttgcttctatgccttcgtgggctttgactgcatcgccaccacaggtgaagaggtgaagaacccacagaaggccatccccgtggggatcgtggcgtccctcttgatctgcttcatcgcctactttggggtgtcggctgccctcacgctcatgatgccctacttctgcctggacaataacagccccctgcccgacgcctttaagcacgtgggctgggaaggtgccaagtacgcagtggccgtgggctccctctgcgctctttccgccagtcttctaggttccatgtttcccatgcctcgggttatctatgccatggctgaggatggactgctatttaaattcttagccaacgtcaatgataggaccaaaacaccaataatcgccacattagcctcgggtgccgttgctgctgtgatggccttcctctttgacctgaaggacttggtggacctcatgtccattggcactctcctggcttactcgttggtggctgcctgtgtgttggtcttacggtaccagccagagcagcctaacctggtataccagatggccagtacttccgacgagttagatccagcagaccaaaatgaattggcaagcaccaatgattcccagctggggtttttaccagaggcagagatgttctctttgaaaaccatactctcacccaaaaacatggagccttccaaaatctctgggctaattgtgaacatttcaaccagccttatagctgttctcatcatcaccttctgcattgtgaccgtgcttggaagggaggctctcaccaaaggggcgctgtgggcagtctttctgctcgcagggtctgccctcctctgtgccgtggtcacgggcgtcatctggaggcagcccgagagcaagaccaagctctcatttaaggttcccttcctgccagtgctccccatcctgagcatcttcgtgaacgtctatctcatgatgcagctggaccagggcacctgggtccggtttgctgtgtggatgctgataggcttcatcatctactttggctatggcctgtggcacagcgaggaggcgtccctggatgccgaccaagcaaggactcctgacggcaacttggaccagtgcaagtgacgcacagccccgccccccggaggtggcagcagccccgagggacgcccccagaggaccgggaggcaccccaccctccccaccagtgcaacagaaaccacctgcgtccacaccctcactgcagccaaaggtgcaattacttgacctgcagccccagcccaccctcggctctgcagccggttctccgggccctggtcacctccagacagctgcctggccggggccactaggctgcggctggccactgtgtctcctcacttctctgaacaaagcagttcctcccctaccagctcagccccgagctgccgcagcctcaggcagaacggaggtcaccttctctccttatcttgggaaccaggccttcctcccggggactgttctgggattgaaattgtgcatactccaaactttcgcagccatcttcccgctcagccccagacacccagcaatcaagccagatgagtaccacaaaacagtgtgtccccagcagctccccaccccagagccaaatgacagtagtgcacttaaaaaggaaaatcaggcctgttgtccttctccggttgcattcagatgggtcattagggccggaccctgcctgccccttggcttctcagggctttgctctgacaccatgacagctgcccggggctgagggcagctggctccactcaaatgaggaagaagggatcactcccattagggcctgctttgcttatgcatgtgtgtgcacatgcatgtaaaccagggaccttcagctcacggcctccaggcctgggccagttcttgctgctcctgccgtctcccccgactggctgtgtcctgagtaactggaacatgagacagtatctgcaggactggccccatggtggccgagtcagaagtctgtttcctgtgagtcgccaccgttcactcagtcttgccctcccatgctttggagccagtctggtggctcctgtaaggttctcaaggctggtggcagctcagtctggggtcaggacatgtcggggtcatgcgtttctggccctgacataagctgtctggcctctctgtgacatgatgaaattgaaatcaatccacagtccatgaaattgtgacactccaccagattaagttagggcataacattaacttggaaatggccatgtcatcacccctgcggctgtcctatagctgagatgcgtgggtcgcaggggaggtgatttctaggcatattgctgtcccttttgtgtatctgtcatccggatgcttcggaccccacgcctctgcaagtgggagagacccgagcatcctccccacccccatagctccagtgcacgccacccccgtcttgcctgggtcggggcctgcggccagcaccatttcacacacactccttgtagatgggagccagaggaaacctgaacgtgggtggagcgttccactgagtctacttcaggagacagaaggcccatgctgatgggggaggaggagggacgtgggcattttggacaccaggggaaatggaaatgctgctttcaaaacttagtttcctttccatttcttcctagtctggcctttgacacaaatctggtagaaagaagcctgataaattgagggcacttgtaccctccctgtgcccccagaaggttcttggagagaagtgcaagaatttgtgaacacggcggtggagggcgggtggatggccatgggctgggcctccgtatcaggcctgctcaccttgctgggagctttattctgatctcattttgaatgttccagagggagcatcataagagcccagagctccgatttccaaagagtgatattgacatttatggagattggtgttgtaacatattttgataaatactaacttattttgttggggttttggttgtctcttgtcttaggacctggtagttatttgcttgatttttttttccgttattttctacataggcaaagagaattcgagggatagacagtctccaagaaaagtgaagtggtgggagagaattgcttttttcttttttttcttttctctagtttttctttctggctgagatttccgtgcaagacagcacccaatagactatttagagttgacatttgacattttaatgggcgccatggctcattttgtagattgagaaggtgcgtctcccctgctccaagtctcatcatgacagcgtgctgacagctgggagtctgtggccttcctcacgcagaggccttaaagctggacacagaagcacgcctaggctgggcagggatgggacccatgccccctccttagaggacgggcttcctggttaggaaaggacacgtgggggtgccttgcataatagttcactggtcaccgtgcttttatgagtagtgtttttgtgcacttgccaggggttttctctctgtgtgagaggggagtgatttaagcaatggtgtctggagtaagccttacaattttaatagactttttcttatcatatccctcatttctttccctgaaataaaaatacacacaagcaaaaaaaaaatgatagtttcacatctcttagttcccttgcccaaacaagaatattcttagttccactggccaggattttcctacatagtcagaacttacacattactagaggcacacccaccaaggagtattgtgtctacttttatctgtgcaccagccacaaatacccacattggaaagacccatttgtgatgggtaaacatcccttcctgtctcccacaacccctgtgactgccctgcatgtgttcatgacctccgaaggcccaaattcatgaagcagcaaacccagcagatctccacccccctgcctcaggacctctgctgaagagggggatgaagtgggtctccagggaggcagtgggggccttgttggcagctggctcgggagccggcttacaggagggcagctctgcagttgggaggggcaccgtccggaggagaccaggcctctacacaccccccactctacttatcatccctgctcacacacccttgtccaaggctttatgcatcggatttatttttccaaatcaagaggacagtgatagatgcattttccccaggctgtctcagaaaggtcgctaaatgtatactgttgtcagaattgctgagatctccccccacttttggtttttgcagcagtaaaaactctttccactgtgacttattttctctctcaggcagccagccacctggtcccttgtgctgactctagcacagtggccaggatccaatacgagtccaggggtgaccgcaggatggtgggggcagcgggcttctccacctaccccagccaccaaggccctgacgcactgcctcctgcaccttcagcacatccctgtgcacagctggaagggtgcatggcccgctcacctttgttcagatgggtggaaacgctgatgataccagctcctccctgccgtgcccctgccacggagcaggcattgtgaactggctggtgtttgcagtcccacgtggcatggcctccagcccaacccacagtggagactggagacagggcaatgagtctggtcgggggcacgtggacatgccccataggggccccacccagacttaacaggcaaggtcctgggcattgcgcgacgcaggactcaatgctaaagcaagcctgcctggctctgtgccagggcccctcttctgatttacacatcccatttttacacagacccttccttcttaataaaggctgacagttctgttggcagccaagaacccacaccatgaagacagggagtgaggggcctttgtgcccaactccagcacagctgcgttctggggtgtgtgagaggcatgttcgtgtctgtgcgctggtggtctcgtgagacagttccgaggacggggaaattgcagggtggtgggggcgtgaggcttatatgtggaactgatgcagagttcgcctgcagacggatctggatatacactatgtataattgttacgtgtaatttaaaatatatctgtttgccatcgtcatgagaagattatatgtaaggctctgaagggagagggagatgtacattctgccaggctcctggggaccttatccgagtcatgaaattgatgactgttgatccagtggtgcaagaagctacactccatgtgtcatcacgcttatgactcctaatgtatttttaaggcaaaaaatgtcagccgactccatcttcacccctcgattcctcgagtccagcctttctgtgccagtgcttcactgagccacaacgctctcgccatcgggacccggctgggcctggagtctcggggcacagttgccatggagccctcctgggtcattctacaaatgtgctgagtgccagctgaaaaccccacaggagatggagtaccttggccaagcttaaagagaagattttctcagggtatttattagtgtgtccagcagggtcaggaagcaggatggaaagatgcattcagactgttaatttattaacaaggcaaatgattttgtgtttcttgatgacagactattaagtttgggacttattttcccatttgagaagttataatatatatttaagatgataagtttcctgcttaagttgtgcctttcagcttcaatgagtttaaggagcactaagggtaatgataccaatgagggttggtttattatcaaacctgaatagctgtggtttctccagtaaatattttcttctactgaacatggagccattattaagagttgtgtgttttttattatgtacatttgtatatttttttgcttgtttgatgttctatttttctaatagttttcttttagtttcttaaagttgtgatactagatttagattctgatgctaactgcaaatcaggttggtctctgctgggtctctcctgcttttattttactttaaggacaagtgtagttgtcgtccaccacctttcaaaaaatgtgaaactgccctgcctcccctttttgctgacaacactgtgtacattgaccacttcctaccatactttatgttgtaaaatcaaactcttttgtggtacattatctcatgcttctgcaaattcgaataaattctatggcttccaaaaaaaaaaaaaaa

SEQ ID NO: 14265 - DNA, 3517 bp, Homo sapiens
attcgctccctcccaccccactgctcccgctccattgtctgggaattgcagccgcggggcgggcggcggcggcggcggcggcggccgggacccagcgggccaggtggggacggcgcggagcgggtgcgggagatgccgtgcgggactggggccacctgagccgcccgcctcgtccccgccttctgtgggaaggatgtgcgcgcggatggccggtcgcacaacagcggcccctcgggggccctacggcccctggctctgcctcctggtggccctcgccctggacgtcgtgagagtggactgtggccaggctcccctggaccctgtctacctgccggcagccctggagctcctagacgcccctgaacacttccgtgtgcagcaggtgggccactacccacctgccaactcctctctgagctcccgatctgagacctttctgctcctacagccctggcccagggcccagccacttctccgggcctcctacccaccttttgccactcagcaggtggtcccccctcgagtcactgagccccaccaacggccagtcccatgggacgtgcgggccgtttcagtggaagcggctgtgactccagcagagccctacgcccgggttctcttccacctcaaagggcaggattggccaccagggtctggcagcctgccctgtgcccggctccatgccacacaccctgccggcactgctcaccaagcctgccgcttccagccatccctgggcgcctgcgtggtggagctggagcttccctcgcactggttctcacaggcctccaccacacgggccgagctggcctacacgcttgagcctgcagctgagggccctgggggctgtggctccggcgaggagaacgaccctggggagcaggccctcccagtggggggtgtggagctgcgcccagcagaccccccgcagtaccaggaggtacctctggacgaggctgtgactctgcgggtgcctgacatgccagtgcggcccggccagctctttagtgctaccctcctgcttcggcacaacttcacagccagcctcctgaccctgcggatcaaggtgaagaaggggctgcatgtgacagccgcccgcccagcccagcccacactctggactgccaagctggaccgcttcaagggctccaggcaccacaccaccctcatcacctgccaccgtgctgggctcacagagccagattccagtccccttgaactgtctgagttcctatgggtggactttgtggtggagaatagcactggtgggggcgtagcggtcactcgccccgtcacgtggcagctggagtacccaggccaggcccctgaagcagagaaggacaaaatggtgtgggaaatcctggtgtctgagcgggacatcagagcccttatcccactggccaaggctgaggagctggtgaatacagcaccactgactggagtgccccagcatgtccccgtgcgccttgtcactgtggacggcgggggggccttggtggaggtgacagagcatgtcggctgcgagtctgccaacacacaggtcctgcaggtgtctgaggcctgtgatgccgtgttcgtggctggcaaggagagccggggcgcccggggggtgcgagtggacttctggtggcgccggctccgcgcctcgctgcggctgaccgtgtgggcccccctgctaccgctgcgtatcgagctcaccgacaccaccctcgagcaggtccgcggctggagggtacctggccctgctgaagggcctgcggaacccgctgcagaggcgtcggatgaggccgagcggcgcgcccgtggctgccacctgcagtaccagcgggccggtgtgcgcttcctcgcccccttcgcggcccacccgctggacggcggccgccgcctcacgcacctgcttggccccgactggctgctagacgtgtcccacctcgtggcgccacacgcccgcgtgctggactcgcgtgtagcctctctggagggtggccgtgtcgtggtgggccgggagcccggtgtcacctccattgaggtgcgttccccactgtctgactccatcctgggggagcaggcgctggctgtgacggacgacaaggtctcagtgctggagctgagggtgcagccagtgatgggcatctcgctgaccttgagccggggcactgcccaccccggggaggtcacagctacgtgctgggcacagtcagcccttcccgccccaaagcaggaggtggccctctccctatggctgtccttctctgatcacactgtggccccagctgagctctacgaccgccgtgacctgggactgtccgtctcagccgaggagcctggtgccatcctgccagctgaggagcagggtgcccagctcggggtggtggtgagtggggcaggcgccgaggggctgccgctgcatgtggctctgcacccgcccgagccctgccgccggggccgccaccgtgtgcctctggcctctggcaccgcctggctggggctgccccctgcctccactccagcccctgctctcccatccagccctgcttggagcccaccagccacagaagccaccatgggtggtaaacggcaggtggcaggcagtgtcgggggcaacacaggtgtgaggggcaagtttgagcgggcagaggaggaggccaggaaggaggagaccgaagccagggaggaggaggaggaagaggaggaggagatggtccctgcccctcagcatgtcactgagctagagctgggcatgtacgccctgctgggagtcttctgcgtggccatcttcatcttcttggtcaatggtgtggtcttcgtcctgcgctatcagcgcaaagaacctcccgacagtgccactgaccccacctccccccagccccacaactgggtctggctgggcactgaccaggaggaactgagccgccagctggaccggcagtcccctggcccgcccaagggggaggggagctgcccctgtgagagtgggggaggaggggaggcccctaccctggcccctggccctcctgggggcaccaccagctcctcaagcaccctggcccgaaaggaggctggggggcggcggaagcgagtagagtttgtgacatttgcgccagcccctccagcccagtcacctgaggagcctgtaggggcccctgctgtgcagtccatccttgtggcaggcgaggaggacatccgctgggtgtgtgaggacatggggctgaaggaccctgaggagcttcgcaactacatggagaggatccggggcagctcctgaccctccacagccacctggtcagccaccagctggggcaacgagggtggaggtcccactgagcctctcgcctgcccccgccactcgtctggtgcttgttgatccaagtcccctgcctggtcccccacaaggactcccatccaggccccctctgccctgccccttgtcatggaccatggtcgtgaggaagggctcatgccccttatttatgggaaccatttcattctaacagaataaaccgagaaggaaaccaga

SEQ ID NO: 14266 - DNA, 3520 bp, Homo sapiens
attcgctccctcccaccccactgctcccgctccattgtctgggaattgcagccgcggggcgggcggcggcggcggcggcggcggccgggacccagcgggccaggtggggacggcgcggagcgggtgcgggagatgccgtgcgggactggggccacctgagccgcccgcctcgtccccgccttctgtgggaaggatgtgcgcgcggatggccggtcgcacaacagcggcccctcgggggccctacggcccctggctctgcctcctggtggccctcgccctggacgtcgtgagagtggactgtggccaggctcccctggaccctgtctacctgccggcagccctggagctcctagacgcccctgaacacttccgtgtgcagcaggtgggccactacccacctgccaactcctctctgagctcccgatctgagacctttctgctcctacagccctggcccagggcccagccacttctccgggcctcctacccaccttttgccactcagcaggtggtcccccctcgagtcactgagccccaccaacggccagtcccatgggacgtgcgggccgtttcagtggaagcggctgtgactccagcagagccctacgcccgggttctcttccacctcaaagggcaggattggccaccagggtctggcagcctgccctgtgcccggctccatgccacacaccctgccggcactgctcaccaagcctgccgcttccagccatccctgggcgcctgcgtggtggagctggagcttccctcgcactggttctcacaggcctccaccacacgggccgagctggcctacacgcttgagcctgcagctgagggccctgggggctgtggctccggcgaggagaacgaccctggggagcaggccctcccagtggggggtgtggagctgcgcccagcagaccccccgcagtaccaggaggtacctctggacgaggctgtgactctgcgggtgcctgacatgccagtgcggcccggccagctctttagtgctaccctcctgcttcggcacaacttcacagccagcctcctgaccctgcggatcaaggtgaagaaggggctgcatgtgacagccgcccgcccagcccagcccacactctggactgccaagctggaccgcttcaagggctccaggcaccacaccaccctcatcacctgccaccgtgctgggctcacagagccagattccagcagtccccttgaactgtctgagttcctatgggtggactttgtggtggagaatagcactggtgggggcgtagcggtcactcgccccgtcacgtggcagctggagtacccaggccaggcccctgaagcagagaaggacaaaatggtgtgggaaatcctggtgtctgagcgggacatcagagcccttatcccactggccaaggctgaggagctggtgaatacagcaccactgactggagtgccccagcatgtccccgtgcgccttgtcactgtggacggcgggggggccttggtggaggtgacagagcatgtcggctgcgagtctgccaacacacaggtcctgcaggtgtctgaggcctgtgatgccgtgttcgtggctggcaaggagagccggggcgcccggggggtgcgagtggacttctggtggcgccggctccgcgcctcgctgcggctgaccgtgtgggcccccctgctaccgctgcgtatcgagctcaccgacaccaccctcgagcaggtccgcggctggagggtacctggccctgctgaagggcctgcggaacccgctgcagaggcgtcggatgaggccgagcggcgcgcccgtggctgccacctgcagtaccagcgggccggtgtgcgcttcctcgcccccttcgcggcccacccgctggacggcggccgccgcctcacgcacctgcttggccccgactggctgctagacgtgtcccacctcgtggcgccacacgcccgcgtgctggactcgcgtgtagcctctctggagggtggccgtgtcgtggtgggccgggagcccggtgtcacctccattgaggtgcgttccccactgtctgactccatcctgggggagcaggcgctggctgtgacggacgacaaggtctcagtgctggagctgagggtgcagccagtgatgggcatctcgctgaccttgagccggggcactgcccaccccggggaggtcacagctacgtgctgggcacagtcagcccttcccgccccaaagcaggaggtggccctctccctatggctgtccttctctgatcacactgtggccccagctgagctctacgaccgccgtgacctgggactgtccgtctcagccgaggagcctggtgccatcctgccagctgaggagcagggtgcccagctcggggtggtggtgagtggggcaggcgccgaggggctgccgctgcatgtggctctgcacccgcccgagccctgccgccggggccgccaccgtgtgcctctggcctctggcaccgcctggctggggctgccccctgcctccactccagcccctgctctcccatccagccctgcttggagcccaccagccacagaagccaccatgggtggtaaacggcaggtggcaggcagtgtcgggggcaacacaggtgtgaggggcaagtttgagcgggcagaggaggaggccaggaaggaggagaccgaagccagggaggaggaggaggaagaggaggaggagatggtccctgcccctcagcatgtcactgagctagagctgggcatgtacgccctgctgggagtcttctgcgtggccatcttcatcttcttggtcaatggtgtggtcttcgtcctgcgctatcagcgcaaagaacctcccgacagtgccactgaccccacctccccccagccccacaactgggtctggctgggcactgaccaggaggaactgagccgccagctggaccggcagtcccctggcccgcccaagggggaggggagctgcccctgtgagagtgggggaggaggggaggcccctaccctggcccctggccctcctgggggcaccaccagctcctcaagcaccctggcccgaaaggaggctggggggcggcggaagcgagtagagtttgtgacatttgcgccagcccctccagcccagtcacctgaggagcctgtaggggcccctgctgtgcagtccatccttgtggcaggcgaggaggacatccgctgggtgtgtgaggacatggggctgaaggaccctgaggagcttcgcaactacatggagaggatccggggcagctcctgaccctccacagccacctggtcagccaccagctggggcaacgagggtggaggtcccactgagcctctcgcctgcccccgccactcgtctggtgcttgttgatccaagtcccctgcctggtcccccacaaggactcccatccaggccccctctgccctgccccttgtcatggaccatggtcgtgaggaagggctcatgccccttatttatgggaaccatttcattctaacagaataaaccgagaaggaaaccaga

SEQ ID NO: 14267 - DNA, 1811 bp, Homo sapiens
gagtcaccaaggaaggcagcggcagctccactcagccagtacccagatacgctgggaaccttccccagccatggcttccctggggcagatcctcttctggagcataattagcatcatcattattctggctggagcaattgcactcatcattggctttggtatttcagggagacactccatcacagtcactactgtcgcctcagctgggaacattggggaggatggaatccagagctgcacttttgaacctgacatcaaactttctgatatcgtgatacaatggctgaaggaaggtgttttaggcttggtccatgagttcaaagaaggcaaagatgagctgtcggagcaggatgaaatgttcagaggccggacagcagtgtttgctgatcaagtgatagttggcaatgcctctttgcggctgaaaaacgtgcaactcacagatgctggcacctacaaatgttatatcatcacttctaaaggcaaggggaatgctaaccttgagtataaaactggagccttcagcatgccggaagtgaatgtggactataatgccagctcagagaccttgcggtgtgaggctccccgatggttcccccagcccacagtggtctgggcatcccaagttgaccagggagccaacttctcggaagtctccaataccagctttgagctgaactctgagaatgtgaccatgaaggttgtgtctgtgctctacaatgttacgatcaacaacacatactcctgtatgattgaaaatgacattgccaaagcaacaggggatatcaaagtgacagaatcggagatcaaaaggcggagtcacctacagctgctaaactcaaaggcttctctgtgtgtctcttctttctttgccatcagctgggcacttctgcctctcagcccttacctgatgctaaaataatgtgcctcggccacaaaaaagcatgcaaagtcattgttacaacagggatctacagaactatttcaccaccagatatgacctagttttatatttctgggaggaaatgaattcatatctagaagtctggagtgagcaaacaagagcaagaaacaaaaagaagccaaaagcagaaggctccaatatgaacaagataaatctatcttcaaagacatattagaagttgggaaaataattcatgtgaactagagtcaactgtgtcagggctaagaaaccctggttttgagtagaaaagggcctggaaagaggggagccaacaaatctgtctgcttcctcacattagtcattggcaaataagcattctgtctctttggctgctgcctcagcacagagagccagaactctatcgggcaccaggataacatctctcagtgaacagagttgacaaggcctatgggaaatgcctgatgggattatcttcagcttgttgagcttctaagtttctttcccttcattctaccctgcaagccaagttctgtaagagaaatgcctgagttctagctcaggttttcttactctgaatttagatctccagaccctgcctggccacaattcaaattaaggcaacaaacatataccttccatgaagcacacacagacttttgaaagcaaggacaatgactgcttgaattgaggccttgaggaatgaagctttgaaggaaaagaatactttgtttccagcccccttcccacactcttcatgtgttaaccactgccttcctggaccttggagccacggtgactgtattacatgttgttatagaaaactgattttagagttctgatcgttcaagagaatgattaaatatacatttcctaaaaaaaaaaaaaaaaa

SEQ ID NO: 14268 - DNA, 3843 bp, Homo sapiens
atttccggggacgccgcgccggactgaggctgtgcgcccgagactccgggtccccaggggctgcgccgggccggcctggcaagggggacgagtcagtggacactccaggaagagcggccccgcggggggcgatgaccgtgcgctgaccctgactcactccaggtccggaggcgggggcccccggggcgactcgggggcggaccgcggggcggagctgccgcccgtgagtccggccgagccacctgagcccgagccgcgggacaccgtcgctcctgctctccgaatgctgcgcaccgcgatgggcctgaggagctggctcgccgccccatggggcgcgctgccgcctcggccaccgctgctgctgctcctgctgctgctgctcctgctgcagccgccgcctccgacctgggcgctcagcccccggatcagcctgcctctgggctctgaagagcggccattcctcagattcgaagctgaacacatctccaactacacagcccttctgctgagcagggatggcaggaccctgtacgtgggtgctcgagaggccctctttgcactcagtagcaacctcagcttcctgccaggcggggagtaccaggagctgctttggggtgcagacgcagagaagaaacagcagtgcagcttcaagggcaaggacccacagcgcgactgtcaaaactacatcaagatcctcctgccgctcagcggcagtcacctgttcacctgtggcacagcagccttcagccccatgtgtacctacatcaacatggagaacttcaccctggcaagggacgagaaggggaatgtcctcctggaagatggcaagggccgttgtcccttcgacccgaatttcaagtccactgccctggtggttgatggcgagctctacactggaacagtcagcagcttccaagggaatgacccggccatctcgcggagccaaagccttcgccccaccaagaccgagagctccctcaactggctgcaagacccagcttttgtggcctcagcctacattcctgagagcctgggcagcttgcaaggcgatgatgacaagatctactttttcttcagcgagactggccaggaatttgagttctttgagaacaccattgtgtcccgcattgcccgcatctgcaagggcgatgagggtggagagcgggtgctacagcagcgctggacctccttcctcaaggcccagctgctgtgctcacggcccgacgatggcttccccttcaacgtgctgcaggatgtcttcacgctgagccccagcccccaggactggcgtgacacccttttctatggggtcttcacttcccagtggcacaggggaactacagaaggctctgccgtctgtgtcttcacaatgaaggatgtgcagagagtcttcagcggcctctacaaggaggtgaaccgtgagacacagcagtggtacaccgtgacccacccggtgcccacaccccggcctggagcgtgcatcaccaacagtgcccgggaaaggaagatcaactcatccctgcagctcccagaccgcgtgctgaacttcctcaaggaccacttcctgatggacgggcaggtccgaagccgcatgctgctgctgcagccccaggctcgctaccagcgcgtggctgtacaccgcgtccctggcctgcaccacacctacgatgtcctcttcctgggcactggtgacggccggctccacaaggcagtgagcgtgggcccccgggtgcacatcattgaggagctgcagatcttctcatcgggacagcccgtgcagaatctgctcctggacacccacagggggctgctgtatgcggcctcacactcgggcgtagtccaggtgcccatggccaactgcagcctgtacaggagctgtggggactgcctcctcgcccgggacccctactgtgcttggagcggctccagctgcaagcacgtcagcctctaccagcctcagctggccaccaggccgtggatccaggacatcgagggagccagcgccaaggacctttgcagcgcgtcttcggttgtgtccccgtcttttgtaccaacaggggagaagccatgtgagcaagtccagttccagcccaacacagtgaacactttggcctgcccgctcctctccaacctggcgacccgactctggctacgcaacggggcccccgtcaatgcctcggcctcctgccacgtgctacccactggggacctgctgctggtgggcacccaacagctgggggagttccagtgctggtcactagaggagggcttccagcagctggtagccagctactgcccagaggtggtggaggacggggtggcagaccaaacagatgagggtggcagtgtacccgtcattatcagcacatcgcgtgtgagtgcaccagctggtggcaaggccagctggggtgcagacaggtcctactggaaggagttcctggtgatgtgcacgctctttgtgctggccgtgctgctcccagttttattcttgctctaccggcaccggaacagcatgaaagtcttcctgaagcagggggaatgtgccagcgtgcaccccaagacctgccctgtggtgctgccccctgagacccgcccactcaacggcctagggccccctagcaccccgctcgatcaccgagggtaccagtccctgtcagacagccccccggggtcccgagtcttcactgagtcagagaagaggccactcagcatccaagacagcttcgtggaggtatccccagtgtgcccccggccccgggtccgccttggctcggagatccgtgactctgtggtgtgagagctgacttccagaggacgctgccctggcttcaggggctgtgaatgctcggagagggtcaactggacctcccctccgctctgctcttcgtggaacacgaccgtggtgcccggcccttgggagccttggggccagctggcctgctgctctccagtcaagtagcgaagctcctaccacccagacacccaaacagccgtggccccagaggtcctggccaaatatgggggcctgcctaggttggtggaacagtgctccttatgtaaactgagccctttgtttaaaaaacaattccaaatgtgaaactagaatgagagggaagagatagcatggcatgcagcacacacggctgctccagttcatggcctcccaggggtgctggggatgcatccaaagtggttgtctgagacagagttggaaaccctcaccaactggcctcttcaccttccacattatcccgctgccaccggctgccctgtctcactgcagattcaggaccagcttgggctgcgtgcgttctgccttgccagtcagccgaggatgtagttgttgctgccgtcgtcccaccacctcagggaccagagggctaggttggcactgcggccctcaccaggtcctgggctcggacccaactcctggacctttccagcctgtatcaggctgtggccacacgagaggacagcgcgagctcaggagagatttcgtgacaatgtacgcctttccctcagaattcagggaagagactgtcgcctgccttcctccgttgttgcgtgagaacccgtgtgccccttcccaccatatccaccctcgctccatctttgaactcaaacacgaggaactaactgcaccctggtcctctccccagtccccagttcaccctccatccctcaccttcctccactctaagggatatcaacactgcccagcacaggggccctgaatttatgtggtttttatacattttttaataagatgcactttatgtcattttttaataaagtctgaagaattactgtttaaaaaaaaaaaaaaaaaaaaaaaaaaaaaaa

SEQ ID NO: 14269 - DNA, 3809 bp, Homo sapiens
gcttgcgggtgagctctgcccaagccgaggctgcggggccggcgccggcgggaggactgcggtgccccgcggaggggctgagtttgccagggcccacttgaccctgtttcccacctcccgccccccaggtccggaggcgggggcccccggggcgactcgggggcggaccgcggggcggagctgccgcccgtgagtccggccgagccacctgagcccgagccgcgggacaccgtcgctcctgctctccgaatgctgcgcaccgcgatgggcctgaggagctggctcgccgccccatggggcgcgctgccgcctcggccaccgctgctgctgctcctgctgctgctgctcctgctgcagccgccgcctccgacctgggcgctcagcccccggatcagcctgcctctgggctctgaagagcggccattcctcagattcgaagctgaacacatctccaactacacagcccttctgctgagcagggatggcaggaccctgtacgtgggtgctcgagaggccctctttgcactcagtagcaacctcagcttcctgccaggcggggagtaccaggagctgctttggggtgcagacgcagagaagaaacagcagtgcagcttcaagggcaaggacccacagcgcgactgtcaaaactacatcaagatcctcctgccgctcagcggcagtcacctgttcacctgtggcacagcagccttcagccccatgtgtacctacatcaacatggagaacttcaccctggcaagggacgagaaggggaatgtcctcctggaagatggcaagggccgttgtcccttcgacccgaatttcaagtccactgccctggtggttgatggcgagctctacactggaacagtcagcagcttccaagggaatgacccggccatctcgcggagccaaagccttcgccccaccaagaccgagagctccctcaactggctgcaagacccagcttttgtggcctcagcctacattcctgagagcctgggcagcttgcaaggcgatgatgacaagatctactttttcttcagcgagactggccaggaatttgagttctttgagaacaccattgtgtcccgcattgcccgcatctgcaagggcgatgagggtggagagcgggtgctacagcagcgctggacctccttcctcaaggcccagctgctgtgctcacggcccgacgatggcttccccttcaacgtgctgcaggatgtcttcacgctgagccccagcccccaggactggcgtgacacccttttctatggggtcttcacttcccagtggcacaggggaactacagaaggctctgccgtctgtgtcttcacaatgaaggatgtgcagagagtcttcagcggcctctacaaggaggtgaaccgtgagacacagcagtggtacaccgtgacccacccggtgcccacaccccggcctggagcgtgcatcaccaacagtgcccgggaaaggaagatcaactcatccctgcagctcccagaccgcgtgctgaacttcctcaaggaccacttcctgatggacgggcaggtccgaagccgcatgctgctgctgcagccccaggctcgctaccagcgcgtggctgtacaccgcgtccctggcctgcaccacacctacgatgtcctcttcctgggcactggtgacggccggctccacaaggcagtgagcgtgggcccccgggtgcacatcattgaggagctgcagatcttctcatcgggacagcccgtgcagaatctgctcctggacacccacagggggctgctgtatgcggcctcacactcgggcgtagtccaggtgcccatggccaactgcagcctgtacaggagctgtggggactgcctcctcgcccgggacccctactgtgcttggagcggctccagctgcaagcacgtcagcctctaccagcctcagctggccaccaggccgtggatccaggacatcgagggagccagcgccaaggacctttgcagcgcgtcttcggttgtgtccccgtcttttgtaccaacaggggagaagccatgtgagcaagtccagttccagcccaacacagtgaacactttggcctgcccgctcctctccaacctggcgacccgactctggctacgcaacggggcccccgtcaatgcctcggcctcctgccacgtgctacccactggggacctgctgctggtgggcacccaacagctgggggagttccagtgctggtcactagaggagggcttccagcagctggtagccagctactgcccagaggtggtggaggacggggtggcagaccaaacagatgagggtggcagtgtacccgtcattatcagcacatcgcgtgtgagtgcaccagctggtggcaaggccagctggggtgcagacaggtcctactggaaggagttcctggtgatgtgcacgctctttgtgctggccgtgctgctcccagttttattcttgctctaccggcaccggaacagcatgaaagtcttcctgaagcagggggaatgtgccagcgtgcaccccaagacctgccctgtggtgctgccccctgagacccgcccactcaacggcctagggccccctagcaccccgctcgatcaccgagggtaccagtccctgtcagacagccccccggggtcccgagtcttcactgagtcagagaagaggccactcagcatccaagacagcttcgtggaggtatccccagtgtgcccccggccccgggtccgccttggctcggagatccgtgactctgtggtgtgagagctgacttccagaggacgctgccctggcttcaggggctgtgaatgctcggagagggtcaactggacctcccctccgctctgctcttcgtggaacacgaccgtggtgcccggcccttgggagccttggggccagctggcctgctgctctccagtcaagtagcgaagctcctaccacccagacacccaaacagccgtggccccagaggtcctggccaaatatgggggcctgcctaggttggtggaacagtgctccttatgtaaactgagccctttgtttaaaaaacaattccaaatgtgaaactagaatgagagggaagagatagcatggcatgcagcacacacggctgctccagttcatggcctcccaggggtgctggggatgcatccaaagtggttgtctgagacagagttggaaaccctcaccaactggcctcttcaccttccacattatcccgctgccaccggctgccctgtctcactgcagattcaggaccagcttgggctgcgtgcgttctgccttgccagtcagccgaggatgtagttgttgctgccgtcgtcccaccacctcagggaccagagggctaggttggcactgcggccctcaccaggtcctgggctcggacccaactcctggacctttccagcctgtatcaggctgtggccacacgagaggacagcgcgagctcaggagagatttcgtgacaatgtacgcctttccctcagaattcagggaagagactgtcgcctgccttcctccgttgttgcgtgagaacccgtgtgccccttcccaccatatccaccctcgctccatctttgaactcaaacacgaggaactaactgcaccctggtcctctccccagtccccagttcaccctccatccctcaccttcctccactctaagggatatcaacactgcccagcacaggggccctgaatttatgtggtttttatacattttttaataagatgcactttatgtcattttttaataaagtctgaagaattactgtttaaaaaaaaaaaaaaaaaaaaaaaaaaaaaaa

SEQ ID NO: 14270 - DNA, 5493 bp, Homo sapiens
gggccagtcggcgccgcgcggagctggccgctggattggctgcaacactcgcgtgtcaggcggttgctaggctccggccgcgcgccccgcccttgcgctcagcgccctctcaccgcccggtacgtgctcgcgcgaaggctgcggcgcggcgctcgcgcctcttaggcttggcggtggcggcggcggcagcttcgcgccgaatccccggggagcggcggtggcggcgtcctggggccaggaggagcgaacacctgccgcggtcctcccgccggcgctgggctctgtgtgctccgggatggagcaggtgtgcagagggtgagaacccagctctgggaccaagtcacttgcttccttacttagcaagactatcgacttgagcaaacttggacctgggatgaggatgtctgtgggcctctcgctgctgctgcccctctgggggaggacctttctcctcctgctctctgtggttatggctcagtcccactggcccagtgaaccctcagaggctgtcagggactgggaaaaccagcttgaggcatccatgcactcagtgctctcagacctccacgaggctgttcccacagtggttggcattcctgatggcacggctgtcgtcgggcgctcatttcgagtgaccattccaacagatttgattgcctccagtggagatatcatcaaggtatcagcggcagggaaggaggctttgccatcttggctgcactgggactcacagagccacaccctggagggcctcccccttgacactgataagggtgtgcattacatttcagtgagcgctacacggctgggggccaacgggagccacatcccccagacctccagtgtgttctccatcgaggtctaccctgaagaccacagtgatctgcagtcggtgaggacagcctccccagaccctggtgaggtggtatcatctgcctgtgctgcggatgaacctgtgactgttttgacggtgattttggatgccgacctcaccaagatgaccccaaagcaaaggattgacctcctgcacaggatgcggagcttctcagaagtagagcttcacaacatgaaattagtgccggtggtgaataacagactatttgacatgtcggccttcatggctggcccgggaaatccaaaaaaggtggtggagaatggggcccttctctcctggaagctgggctgctccctgaaccagaacagtgtgcctgacattcatggtgtagaggcccctgccagggagggcgcaatgtctgctcagcttggctaccctgtggtgggttggcacatcgccaataagaagccccctcttcccaaacgcgtccggaggcagatccatgctacacccacacctgtcactgccattgggcccccaaccacggctatccaggagcccccatccaggatcgtgccaacccccacatctccagccattgctcctccaacagagaccatggctcctccagtcagggatcctgttcctgggaaacccacggtcaccatccggactcgaggcgccattattcaaaccccaaccctaggccccatccagcctactcgggtgtcagaagctggcaccacagttcctggccagattcgcccaacgatgaccattcctggctatgtggagcctactgcagttgctacccctcccacaaccaccaccaagaagccacgagtatccacaccaaaaccagcaacgccttcaactgactccaccaccaccacgactcgcaggccaaccaagaaaccacggacaccccggccagtgccccgggtcaccaccaaagtttccatcaccagattggaaactgcctcaccgcctactcgtattcgcaccaccaccagtggagtgccccgtggcggagaacccaaccagcgcccagagctcaagaaccatattgacagggtagatgcctgggttggcacctactttgaggtgaagatcccgtcagacactttctatgaccatgaggacaccaccactgacaagctgaagctgaccctgaaactgcgggagcagcagctggtgggcgagaagtcctgggtacagttcaacagcaacagccagctcatgtatggccttcccgacagcagccacgtgggcaaacacgagtatttcatgcatgccacagacaaggggggcctgtcggctgtggatgccttcgagatccacgtccacaggcgcccccaaggggatagggctcctgcaaggttcaaggccaagtttgtgggtgacccggcactggtgttgaatgacatccacaagaagattgccttggtaaagaaactggccttcgcctttggagaccgaaactgtagcaccatcaccctgcagaatatcacccggggctccatcgtggtggaatggaccaacaacacactgcccttggagccctgccccaaggagcagatcgctgggctgagccgccggatcgctgaggatgatggaaaacctcggcctgccttctccaacgccctagagcctgactttaaggccacaagcatcactgtgacgggctctggcagttgtcggcacctacagtttatccctgtggtaccacccaggagagtgccctcagaggcgccgcccacagaagtgcctgacagggaccctgagaagagcagtgaggatgatgtctacctgcacacagtcattccggccgtggtggtcgcagccatcctgctcattgctggcatcattgccatgatctgctaccgcaagaagcggaagggcaagcttacccttgaggaccaggccaccttcatcaagaagggggtgcctatcatctttgcagacgaactggacgactccaagcccccaccctcctccagcatgccactcattctgcaggaggagaaggctcccctaccccctcctgagtaccccaaccagagtgtgcccgagaccactcctctgaaccaggacaccatgggagagtacacgcccctgcgggatgaggatcccaatgcgcctccctaccagcccccaccgcccttcacagtacccatggagggcaagggctcccgtcccaagaacatgaccccataccggtcacctcctccctatgtcccaccttaacccgcaagcgcctgggtggaggcagggtagggcagggccctggagacgacatggtgttgtctgtggagaccggtggcctgcagaccattgcccaccgggagccgacacctgacctagcacacactgacacaggggcctggacaagcccgccctctctggtcctcccaaaccccaaagcagctggagagactttggggacttttttatttttattttttgcctaacagcttttggtttgttcatagagaactcttcgcttcatttttgatggctggctctgaaagcaccatgtggagtggaggtggagggaccgaggaaccatgaatgaactcgcaggcagtgccgggcggccccctggctctctgcgttttgcctttaacactaactgtactgttttttctattcacgtgtgtctagctgcaggatgtaacatggaaaacagtaactaaagattaaattcaaaggactttcagaagttaaggttaagtttttacgtttaatctgctgtttacctaaacttgtatgtataatttttgggtgggtatggggaattgctttgctaaaaataagctcccagggtgtttcaaacttagagaagaccaagggacagtattttttatcaaaggaatactattttttcacactacgtcaacttggttgctctgataccccagagcctgattgggggcctcccggccctggctcacgccaagtccctggtgctgggtttgctctcccgctgttgccaggggctggaagctggaggggtctcttgggccatggacatccccacttccagcccatgtacactagtggcccacgaccaaggggtcttcatttccatgaaaaagggactccaagaggcagtggtggctgtggcccccaactttggtgctccagggtgggccaactgcttgtgggggcacctgggaggtcaaaggtctccaccacatcaacctattttgttttaccctttttctgtgcattgtttttttttttcctcctaaaaggaatatcacggttttttgaaacactcagtgggggacattttggtgaagatgcaatatttttatgtcatgtgatgctctttcctcacttgaccttggccgctttgtcctaacagtccacagtcctgccccgacccaccccatcccttttctctggcactccagtccagcttgggcctgaactactggaaaaggtctggcggctggggaggagtgccagcaatagttcataataaaaatctgttagctctcaaagctaattttttactaaagtttttatacagcctcaaattgttttattaaaaaaaagatttaaaatggtgatgcttacagcagtttgtacgagctcttaagtgttgattccatggaactgacggctttgcttgttttgattcttttccccctacttttcctaatggtttaaattctggaattacactggggttcttttgccttttttagcagaacatccgtccgtccatctgcatctctgtcccatgactcaggggcgcccactctgcttcgattctcctcctgtggaagaaaccattttgagcatgacttttcttgatgtctgaagcgttattttgggtactttttagggaggaatgcctttcgcaataatgtatccattcccctgattgagggtgggtgggtggacccaggctccctttgcacacagagcagctacttctaagccatatcgactgttttgcagaggatttgtgtgtcctccctcaggaggggaggcctggtaggagggggggagagttctctgtcctactgctctcaagagggcatttccccttgcgccttctcccacagggcccagcccctctcccctgcccaagtccccagggggtactctggagtgagcagtccccctgtgggggagcctgtaaatgcgggctcagtggaccactggtgactgggctcatgcctccaagtcagagtttcccctggtgccccagagacaggagcacaagtgggatctgacctggtgagattatttctgatgacctcatcaaaaaataaacaattcccaatgttccaggtgagggctttgaaaggccttccaaacagctccgtcgcccctagcaactccaccattgggcactgccatgcagagacgtggctggcccagaatggcctgttgccatagcaactggaggcgatggggcagtgaacagaataacaacagcaacaatgcctttgcaggcagcctgctcccctgagcgctgggctggtgatggccgttggactctgtgagatggagagccaatctcacattcaagtgttcaccaaccactgatgtgtttttatttccttctatatgattttaagatgtgttttctgcattctgtaaagaaacatatcaaactaaataaaagcagtgtctttatt

SEQ ID NO: 14271 - DNA, 6930 bp, Homo sapiens
gaccgttgcttggcagacactggatggttatgagcctgaacaagctgaaaaggggcaggaaaagaagtggaggcagcattcttcctatttaaagctgcatcgcttgaaaaaagttttcgcagactgtgctggagctggtgctgaaaaagggggtttgcagaggctgccctggggctggtgctgaaagaagagcccacagctgacttcatggtgctacaataacctcagaatctacttttcactctcaggagaacccacatgtctaatatttagacatgatggcaaactgggcggaagcaagacctctcctcattcttattgttttattagggcaatttgtctcaataaaagcccaggaagaagacgaggatgaaggatatggtgaagaaatagcctgcactcagaatggccagatgtacttaaacagggacatttggaaacctgccccttgtcagatctgtgtctgtgacaatggagccattctctgtgacaagatagaatgccaggatgtgctggactgtgccgaccctgtaacgccccctggggaatgctgtcctgtctgttcacaaacacctggaggtggcaatacaaattttggtagaggaagaaagggacaaaagggagaaccaggattagtgcctgttgtaacaggcatacgtggtcgtccaggaccggcaggacctccaggatcacagggaccaagaggagagcgagggccaaaaggaagacctggccctcgtggacctcagggaattgatggagaaccaggtgttcctggtcaacctggtgctccaggacctcctggacatccgtcccacccaggacccgatggcttgagcaggccgttttcagctcaaatggctgggttggatgaaaaatctggacttgggagtcaagtaggactaatgcctggctctgtgggtcctgttggcccaaggggaccacagggtttacaaggacagcaaggtggtgcaggacctacaggacctcctggtgaacctggtgatcctggaccaatgggtccgattggttcacgtggaccagagggccctcctggtaaacctggggaagatggtgaacctggcagaaatggaaatcctggtgaagtgggatttgcaggatctccgggagctcgtggatttcctggggctcctggtcttccaggtctgaagggtcaccgaggacacaaaggtcttgaaggccctaaaggtgaagttggagcacctggttccaagggtgaagctggccccactggtccaatgggtgccatgggtcctctgggtccgaggggaatgccaggagagagagggagacttgggccacagggtgctcctggacaacgaggtgcacatggtatgcctggaaaacctggaccaatgggtcctcttgggataccaggctcttctggttttccaggaaatcctggaatgaagggagaagcaggtcctacaggggcgcgaggccctgaaggtcctcaggggcagagaggtgaaactgggcccccaggtccagttggctctccaggtcttcctggtgcaataggaactgatggtactcctggtgccaaaggcccaacgggctctccgggtacctctggtcctcctggctcagcagggcctcctggatctccaggacctcagggtagcactggtcctcagggaattcgaggccaaccgggtgatccaggagttccaggtttcaaaggagaagctggcccaaaaggggaaccagggccacatggtattcagggtccgataggcccacccggtgaagaaggcaaaagaggtcccagaggtgacccaggaacagttggtcctccagggccagtgggagaaaggggtgctcctggcaatcgtggttttccaggctctgatggtttacctgggccaaagggtgctcaaggagaacggggtcctgtaggttcttcaggacccaaaggaagccagggggatccaggacgtccaggggaacctgggcttccaggtgctcggggtttgacaggaaatcctggtgttcaaggtcctgaaggaaaacttggacctttgggtgcgccaggggaagatggccgtccaggtcctccaggctccataggaatcagagggcagcccgggagcatgggccttccaggccccaaaggtagcagtggtgaccctgggaaacctggagaagcaggaaatgctggagttcctgggcagaggggagctcctggaaaagatggtgaagttggtccttctggtcctgtgggcccgccgggtctagctggtgaaagaggagaacaaggacctccaggccccacaggttttcaggggcttcctggtcctccagggcctcctggagaaggtggaaaaccaggtgatcaaggtgttcctggagatcccggagcagttggcccgttaggacctagaggagaacgaggaaatcctggggaaagaggagaacctgggataactggactccctggtgagaagggaatggctggaggacatggtcctgatggcccaaaaggcagtccaggtccatctgggacccctggagatacaggcccaccaggtcttcaaggtatgccgggagaaagaggaattgcaggaactcctggccccaagggtgacagaggtggcataggagaaaaaggtgctgaaggcacagctggaaatgatggtgcaagaggtcttccaggtcctttgggccctccaggtccggcaggtcctactggagaaaagggtgaacctggtcctcgaggtttagttggccctcctggctcccggggcaatcctggttctcgaggtgaaaatgggccaactggagctgttggttttgccggaccccagggtcctgacggacagcctggagtaaaaggtgaacctggagagccaggacagaagggagatgctggttctcctggaccacaaggtttagcaggatcccctggccctcatggtcctaatggtgttcctggactaaaaggtggtcgaggaacccaaggtccgcctggtgctacaggatttcctggttctgcgggcagagttggacctccaggccctgctggagctccaggacctgcgggacccctaggggaacccgggaaggagggacctccaggtcttcgtggggaccctggctctcatgggcgtgtgggagatcgaggaccagctggcccccctggtggcccaggagacaaaggggacccaggagaagatgggcaacctggtccagatggcccccctggtccagctggaacgaccgggcagagaggaattgttggcatgcctgggcaacgtggagagagaggcatgcccggcctaccaggcccagcgggaacaccaggaaaagtaggaccaactggtgcaacaggagataaaggtccacctggacctgtggggcccccaggctccaatggtcctgtaggggaacctggaccagaaggtccagctggcaatgatggtaccccaggacgggatggtgctgttggagaacgtggtgatcgtggagaccctgggcctgcaggtctgccaggctctcagggtgcccctggaactcctggccctgtgggtgctccaggagatgcaggacaaagaggagatccgggttctcggggtcctataggaccacctggtcgagctgggaaacgtggattacctggaccccaaggacctcgtggtgacaaaggtgatcatggagaccgaggcgacagaggtcagaagggccacagaggctttactggtcttcagggtcttcctggccctcctggtccaaatggtgaacaaggaagtgctggaatccctggaccatttggcccaagaggtcctccaggcccagttggtccttcaggtaaagaaggaaaccctgggccacttgggccaattggacctccaggtgtacgaggcagtgtaggagaagcaggacctgagggccctcctggtgagcctggcccacctggccctccgggtccccctggccaccttacagctgctcttggggatatcatggggcactatgatgaaagcatgccagatccacttcctgagtttactgaagatcaggcggctcctgatgacaaaaacaaaacggacccaggggttcatgctaccctgaagtcactcagtagtcagattgaaaccatgcgcagccccgatggctcgaaaaagcacccagcccgcacgtgtgatgacctaaagctttgccattccgcaaagcagagtggtgaatactggattgatcctaaccaaggatctgttgaagatgcaatcaaagtttactgcaacatggaaacaggagaaacatgtatttcagcaaacccatccagtgtaccacgtaaaacctggtgggccagtaaatctcctgacaataaacctgtttggtatggtcttgatatgaacagagggtctcagttcgcttatggagaccaccaatcacctaatacagccattactcagatgacttttttgcgccttttatcaaaagaagcctcccagaacatcacttacatctgtaaaaacagtgtaggatacatggacgatcaagctaagaacctcaaaaaagctgtggttctcaaaggggcaaatgacttagatatcaaagcagagggaaatattagattccggtatatcgttcttcaagacacttgctctaagcggaatggaaatgtgggcaagactgtctttgaatatagaacacagaatgtggcacgcttgcccatcatagatcttgctcctgtggatgttggcggcacagaccaggaattcggcgttgaaattgggccagtttgttttgtgtaaagtaagccaagacacatcgacaatgagcaccaccatcaatgaccaccgccattcacaagaactttgactgtttgaagttgatcctgagactcttgaagtaatggctgatcctgcatcagcattgtatatatggtcttaagtgcctggcctccttatccttcagaatatttattttacttacaatcctcaagttttaattgattttaaatatttttcaatacaacagtttaggtttaagatgaccaatgacaatgaccacctttgcagaaagtaaactgattgaataaataaatctccgttttcttcaatttatttcagtgtaatgaaaaagttgcttagtatttatgaggaaattcttcttcctggcaggtagcttaaagagtggggtatatagagccacaacacatgtttattttgcttggctgcagttgaaaaatagaaattagtgcccttttgtgacctctcattccaagattgtcaattaaaaatgagtttaaaatgtttaacttgtgatcgagacctacatgcatgtcttgatattgtgtaactataatagagactctttaaggagaatcttaaaaaaaaaaaaacgtttctcactgtcttaaatagaatttttaaatagtatatattcagtggcattttggagaacaaagtgaatttacttcgacttcttaaatttttgtaaaagactataagtttagacatctttctcattcaaatttaaagatatctttctcctcttgatcaatctatcaatattgatagaagtcacactagtatataccatttaatacatttacactttcttatttaagaagatattgaatgcaaaataattgacatatagaactttacaaacatatgtccaaggactctaaattgagactcttccacatgtacaatctcatcatcctgaagcctataatgaagaaaaagatctagaaactgagttgtggagctgactctaatcaaatgtgatgattggaattagaccatttggcctttgaactttcataggaaaaatgacccaacatttcttagcatgagctacctcatctctagaagctgggatggacttactattcttgtttatattttagatactgaaaggtgctatgcttctgttattattccaagactggagataggcagggctaaaaaggtattattatttttcctttaatgatggtgctaaaattcttcctataaaattccttaaaaataaagatggtttaatcactaccattgtgaaaacataactgttagacttcccgtttctgaaagaaagagcatcgttccaatgcttgttcactgttcctctgtcatactgtatctggaatgctttgtaatacttgcatgcttcttagaccagaacatgtaggtccccttgtgtctcaatactttttttttcttaattgcatttgttggctctattttaatttttttcttttaaaataaacagctgggaccatcccaaaagacaagccatgcatacaactttggtcatgtatctctgcaaagcatcaaattaaatgcacgcttttgtcatgtcagtggtttttgttttgtgaaattcctttgaccatattagatctatttcatttccaatagtgaaaaggagatgtggtggtatactttgtttgccatttgtttaaaagatacaacggataccttctatcatgtatgtactggcttataaatgaaaatctatctacaacattacccacaaaggcaacatgacaccaattatcactgcctctgcccttaaaaatgtcagagtagtattattgataaaaagggcaagcaatagatttttcatgactgaataaactgtaataataaaacatatgtctcaaagtgtatcacatatgaatttagcctaattgttttcagtttcattctcaatatttagtttacaacatcattttcccctaaactggttatattttgacctgtatatcttaaatttgagtatttatatgcctaaatacatgtgtgagttttgtttgacttccaagtccaaactataagattatataagttcatatagatgaatcagaaatatgtggtaatactattaagtcacaaacactaacaatttccaactatagaaataacagttcttatttggattttgggaatgctaccaata

SEQ ID NO: 14272 - DNA, 1946 bp, Homo sapiens
agacactgcccgctctccgggactccgcgccgctccccgttgccttccaggactgagaaaggggaaagggaagggtgccacgtccgagcagccgccttgactggggaagggtctgaatcccacccttggcattgcttggtggagactgagatacccgtgctccgctcgcctccttggttgaagatttctccttccctcacgtgatttgagccccgtttttattttctgtgagccacgtcctcctcgagcggggtcaatctggcaaaaggagtgatgcgcttcgcctggaccgtgctcctgctcgggcctttgcagctctgcgcgctagtgcactgcgcccctcccgccgccggccaacagcagcccccgcgcgagccgccggcggctccgggcgcctggcgccagcagatccaatgggagaacaacgggcaggtgttcagcttgctgagcctgggctcacagtaccagcctcagcgccgccgggacccgggcgccgccgtccctggtgcagccaacgcctccgcccagcagccccgcactccgatcctgctgatccgcgacaaccgcaccgccgcggcgcgaacgcggacggccggctcatctggagtcaccgctggccgccccaggcccaccgcccgtcactggttccaagctggctactcgacatctagagcccgcgaagctggcgcctcgcgcgcggagaaccagacagcgccgggagaagttcctgcgctcagtaacctgcggccgcccagccgcgtggacggcatggtgggcgacgacccttacaacccctacaagtactctgacgacaacccttattacaactactacgatacttatgaaaggcccagacctgggggcaggtaccggcccggatacggcactggctacttccagtacggtctcccagacctggtggccgacccctactacatccaggcgtccacgtacgtgcagaagatgtccatgtacaacctgagatgcgcggcggaggaaaactgtctggccagtacagcatacagggcagatgtcagagattatgatcacagggtgctgctcagatttccccaaagagtgaaaaaccaagggacatcagatttcttacccagccgaccaagatattcctgggaatggcacagttgtcatcaacattaccacagtatggatgagtttagccactatgacctgcttgatgccaacacccagaggagagtggctgaaggccacaaagcaagtttctgtcttgaagacacatcctgtgactatggctaccacaggcgatttgcatgtactgcacacacacagggattgagtcctggctgttatgatacctatggtgcagacatagactgccagtggattgatattacagatgtaaaacctggaaactatatcctaaaggtcagtgtaaaccccagctacctggttcctgaatctgactataccaacaatgttgtgcgctgtgacattcgctacacaggacatcatgcgtatgcctcaggctgcacaatttcaccgtattagaaggcaaagcaaaactcccaatggataaatcagtgcctggtgttctgaagtgggaaaaaatagactaacttcagtaggatttatgtattttgaaaaagagaacagaaaacaacaaaagaatttttgtttggactgttttcaataacaaagcacataactggattttgaacgcttaagtcatcattacttgggaaatttttaatgtttattatttacatcactttgtgaattaacacagtgtttcaattctgtaattacatatttgactctttcaaagaaatccaaatttctcatgttccttttgaaattgtagtgcaaaatggtcagtattatctaaatgaatgagccaaaatgactttgaactgaaacttttctaaagtgctggaactttagtgaaacataataataatgggtttata

SEQ ID NO: 14273 - DNA, 2048 bp, Homo sapiens
gcacagtggcccttaagcgaggagcggcggcgcccgcagcaatcacagcagtgccgacgtcgtgggtgtttggtgtgaggctgcgagccgccgcgagttctcacggtcccgccggcgccaccaccgcggtcactcaccgccgccgccgccaccactgccaccacggtcgcctgccacaggtgtctgcaattgaactccaaggtgcagaatggtttggaaagtagctgtattcctcagtgtggccctgggcattggtgccgttcctatagatgatcctgaagatggaggcaagcactgggtggtgatcgtggcaggttcaaatggctggtataattataggcaccaggcagacgcgtgccatgcctaccagatcattcaccgcaatgggattcctgacgaacagatcgttgtgatgatgtacgatgacattgcttactctgaagacaatcccactccaggaattgtgatcaacaggcccaatggcacagatgtctatcagggagtcccgaaggactacactggagaggatgttaccccacaaaatttccttgctgtgttgagaggcgatgcagaagcagtgaagggcataggatccggcaaagtcctgaagagtggcccccaggatcacgtgttcatttacttcactgaccatggatctactggaatactggtttttcccaatgaagatcttcatgtaaaggacctgaatgagaccatccattacatgtacaaacacaaaatgtaccgaaagatggtgttctacattgaagcctgtgagtctgggtccatgatgaaccacctgccggataacatcaatgtttatgcaactactgctgccaaccccagagagtcgtcctacgcctgttactatgatgagaagaggtccacgtacctgggggactggtacagcgtcaactggatggaagattcggacgtggaagatctgactaaagagaccctgcacaagcagtaccacctggtaaaatcgcacaccaacaccagccacgtcatgcagtatggaaacaaaacaatctccaccatgaaagtgatgcagtttcagggtatgaaacgcaaagccagttctcccgtccccctacctccagtcacacaccttgacctcacccccagccctgatgtgcctctcaccatcatgaaaaggaaactgatgaacaccaatgatctggaggagtccaggcagctcacggaggagatccagcggcatctggatgccaggcacctcattgagaagtcagtgcgtaagatcgtctccttgctggcagcgtccgaggctgaggtggagcagctcctgtccgagagagccccgctcacggggcacagctgctacccagaggccctgctgcacttccggacccactgcttcaactggcactcccccacgtacgagtatgcgttgagacatttgtacgtgctggtcaacctttgtgagaagccgtatccgcttcacaggataaaattgtccatggaccacgtgtgccttggtcactactgaagagctgcctcctggaagcttttccaagtgtgagcgccccaccgactgtgtgctgatcagagactggagaggtggagtgagaagtctccgctgctcgggccctcctggggagcccccgctccagggctcgctccaggaccttcttcacaagatgacttgctcgctgttacctgcttccccagtcttttctgaaaaactacaaattagggtgggaaaagctctgtattgagaagggtcatatttgctttctaggaggtttgttgttttgcctgttagttttgaggagcaggaagctcatgggggcttctgtagcccctctcaaaaggagtctttattctgagaatttgaagctgaaacctctttaaatcttcagaatgattttattgaagagggccgcaagccccaaatggaaaactgtttttagaaaatatgatgatttttgattgcttttgtatttaattctgcaggtgttcaagtcttaaaaaataaagatttataacagaacccaaaaaaaaaaaaaaaaaaaaaaaaaaaaaaa

SEQ ID NO: 14274 - DNA, 2372 bp, Homo sapiens
aacggctgctcagtggcgggagggcgggctaccgcgcccgggccctacccgccctggcgcactgctcttcccggtcatggaggcgccagccgccggcttgtttctgctcctgttgcttgggacttgggccccggcgccgggcagcgcctcctccgaggcaccgccgctgatcaatgaggacgtgaagcgcacagtggacctaagcagccacctggctaaggtgacggccgaggtggtcctggcgcacctgggcggcggctccacgtcccgagctacctctttcctgctggctttggagcctgagctcgaggcccggctggcgcacctgggcgtgcaggtaaagggagaagatgaggaagagaacaatttggaagtacgtgaaaccaaaattaagggtaaaagtgggagattcttcacagtcaagctcccagttgctcttgatcctggggccaagatttcagtcattgtggaaacagtctacacccatgtgcttcatccgtatccaacccagatcacccagtcagagaaacagtttgtggtgtttgaggggaaccattatttctactctccctatccaacgaagacacaaaccatgcgtgtgaagcttgcctctcgaaatgtggagagctacaccaagctggggaaccccacgcgctctgaggacctactggattatgggcctttcagagatgtgcctgcctatagtcaggatacttttaaagtacattatgagaacaacagccctttcctgaccatcaccagcatgacccgagtcattgaagtctctcactggggtaatattgctgtggaagaaaatgtggacttaaagcacacaggagctgtgcttaaggggcctttctcacgctatgattaccagagacagccagatagtggaatatcctccatccgttcttttaagaccatccttcctgctgctgcccaggatgtttattaccgggatgagattggcaatgtttctaccagccacctccttattttggatgactctgtagagatggaaatccggcctcgcttccctctctttggcgggtggaagacccattacatcgttggctacaacctcccaagctatgagtacctctataatttgggtgaccagtatgcactgaagatgaggtttgtggaccatgtgtttgatgaacaagtgatagattctctgactgtgaagatcatcctgcctgaaggagccaagaacattgaaattgatagtccctatgaaatcagccgtgccccagatgagctgcactacacctatctggacacatttggccgccctgtgattgttgcctacaagaaaaatctggtagaacagcacattcaggacattgtggtccactacacgttcaacaaggtgctcatgctgcaggagcccctgctggtggtggcggccttctacatcctgttcttcaccgttatcatctatgttcggctggacttctccatcaccaaggatccagccgcagaagccaggatgaaggtagcctgcatcacagagcaggtcttgaccctggtcaacaagagaataggcctttaccgtcactttgacgagaccgtcaataggtacaagcaatcccgggacatctccaccctcaacagtggcaagaagagcctggagactgaacacaaggccttgaccagtgagattgcactgctgcagtccaggctgaagacagagggctctgatctgtgcgacagagtgagcgaaatgcagaagctggatgcacaggtcaaggagctggtgctgaagtcggcggtggaggctgagcgcctggtggctggcaagctcaagaaagacacgtacattgagaatgagaagctcatctcaggaaagcgccaggagctggtcaccaagatcgaccacatcctggatgccctgtagcccctgcccgcatcctccagggggcccagggtgcctgcactttgctgtggcaggcagattgggtggtagtgggaggttgtgcatggaggccagtgaaagctgacatctgtaaaaggccttcaaggaagagaaaccaggccctgcgtcaggcagtgtgagtttgccgtttgtccttaactttctttttttttttttttaaaaaaagaaaactttaaaaaaactcccattaaaaacaaaacatctttgtgttttgaacaaaggaattttcaatatttgattggtattctgttctgaagtctaagatatttttcagcctataaagccccctgttttatgcccttctaattctgatgtttgggtattgtgtgagtgcatgtgtttttttttttttttttaaagcgtgtgtgaacaaatggaaataaagcagggactgtgaacattaaaaaaaaaaaaaaaaaaaaaaaaaaaaaaa

SEQ ID NO: 14275 - DNA, 4436 bp, Homo sapiens
aggcgaaggcttggacccccagctgaggagtcctgctcaagacacggtcactggatctgagaaacttcccaggggaccgcattccagagtcagtgactctgtgaagcacccacatctacctcttgccacgttcccacgggcttgggggaaagatggtggggaccaaggcctgggtgttctccttcctggtcctggaagtcacatctgtgttggggagacagacgatgctcacccagtcagtaagaagagtccagcctgggaagaagaaccccagcatctttgccaagcctgccgacaccctggagagccctggtgagtggacaacatggttcaacatcgactacccaggcgggaagggcgactatgagcggctggacgccattcgcttctactatggggaccgtgtatgtgcccgtcccctgcggctagaggctcggaccactgactggacacctgcgggcagcactggccaggtggtccatggtagtccccgtgagggtttctggtgcctcaacagggagcagcggcctggccagaactgctctaattacaccgtacgcttcctctgcccaccaggatccctgcgccgagacacagagcgcatctggagcccatggtctccctggagcaagtgctcagctgcctgtggtcagactggggtccagactcgcacacgcatttgcttggcagagatggtgtcgctgtgcagtgaggccagcgaagagggtcagcactgcatgggccaggactgtacagcctgtgacctgacctgcccaatgggccaggtgaatgctgactgtgatgcctgcatgtgccaggacttcatgcttcatggggctgtctcccttcccggaggtgccccagcctcaggggctgctatctacctcctgaccaagacgccgaagctgctgacccagacagacagtgatgggagattccgaatccctggcttgtgccctgatggcaaaagcatcctgaagatcacaaaggtcaagtttgcccccattgtactcacaatgcccaagactagcctgaaggcagccaccatcaaggcagagtttgtgagggcagagactccatacatggtgatgaaccctgagacaaaagcacggagagctgggcagagcgtgtctctgtgctgtaaggccacagggaagcccaggccagacaagtatttttggtatcataatgacacattgctggatccttccctctacaagcatgagagcaagctggtgctgaggaaactgcagcagcaccaggctggggagtacttttgcaaggcccagagtgatgctggggctgtgaagtccaaggttgcccagctgattgtcatagcatctgatgagactccttgcaacccagttcctgagagctatcttatccggctgccccatgattgctttcagaatgccaccaactccttctactatgacgtgggacgctgccctgttaagacttgtgcagggcagcaggataatgggatcaggtgccgtgatgctgtgcagaactgctgtggcatctccaagacagaggaaagggagatccagtgcagtggctacacgctacccaccaaggtggccaaggagtgcagctgccagcggtgtacggaaactcggagcatcgtgcggggccgtgtcagtgctgctgacaatggggagcccatgcgctttggccatgtgtacatggggaacagccgtgtaagcatgactggctacaagggcactttcaccctccatgtcccccaggacactgagaggctggtgctcacatttgtggacaggctgcagaagtttgtcaacaccaccaaagtgctacctttcaacaagaaggggagtgccgtgttccatgaaatcaagatgcttcgtcggaaagagcccatcactttggaagccatggagaccaacatcatccccctgggggaagtggttggtgaagaccccatggctgaactggagattccatccaggagtttctacaggcagaatggggagccctacataggaaaagtgaaggccagtgtgaccttcctggatccccggaatatttccacagccacagctgcccagactgacctgaacttcatcaatgacgaaggagacactttcccccttcggacgtatggcatgttctctgtggacttcagagatgaggtcacctcagagccacttaatgctggcaaagtgaaggtccaccttgactcgacccaggtcaagatgccagagcacatatccacagtgaaactctggtcactcaatccagacacagggctgtgggaggaggaaggtgatttcaaatttgaaaatcaaaggaggaacaaaagagaagacagaaccttcctggtgggcaacctggagattcgtgagaggaggctctttaacctggatgttcctgaaagcaggcggtgctttgttaaggtgagggcctaccggagtgagaggttcttgcctagtgagcagatccagggggttgtgatctccgtgattaacctggagcctagaactggcttcttgtccaaccctagggcctggggccgctttgacagtgtcatcacaggccccaacggggcctgtgtgcctgccttctgtgatgaccagtcccctgatgcctactctgcctatgtcttggcaagcctggctggggaggaactgcaagcagtggagtcttctcctaaattcaacccaaatgcaattggcgtccctcagccctatctcaacaagctcaactaccgtcggacggaccatgaggatccacgggttaaaaagacagctttccagattagcatggccaagccaaggcccaactcagctgaggagagcaatgggcccatctatgcctttgagaacctccgggcatgtgaagaggcaccacccagtgcagcccacttccggttctaccagattgagggggatcgatatgactacaacacagtccccttcaacgaagatgaccctatgagctggactgaagactatctggcatggtggccaaagccgatggaattcagggcctgctatatcaaggtgaagattgtggggccactggaagtgaatgtgcgatcccgcaacatggggggcactcatcggcggacagtggggaagctgtatggaatccgagatgtgaggagcactcgggacagggaccagcccaatgtctcagctgcctgtctggagttcaagtgcagtgggatgctctatgatcaggaccgtgtggaccgcaccctggtgaaggtcatcccccagggcagctgccgtcgagccagtgtgaaccccatgctgcatgagtacctggtcaaccacttgccacttgcagtcaacaacgacaccagtgagtacaccatgctggcacccttggacccactgggccacaactatggcatctacactgtcactgaccaggaccctcgcacggccaaggagatcgcgctcggccggtgctttgatggcacatccgatggctcctccagaatcatgaagagcaatgtgggagtagccctcaccttcaactgtgtagagaggcaagtaggccgccagagtgccttccagtacctccaaagcaccccagcccagtcccctgctgcaggcactgtccaaggaagagtgccctcgaggaggcagcagcgagcgagcaggggtggccagcgccagggtggagtggtggcctctctgagatttcctagagttgctcaacagcccctgatcaactaagttttgtggtacttcaccctcttctgccctcatttcatgtgacagccattgtgagactgatgcacaaactgtcacttggttaatttaagcacttctgttttcgtgaatttgcttgtttgtttcttcatgcctttacttactttgtcccatgctactgattggcacgtggcccccacaatggcacaataaagcccctttgtgaaactgttctttaaatgaaacacaagaaattggccactggtaaaactctgcagcttcaactgtacttcatttaatgccattaatgcaaatatacttcctcttctttttgcatggttttgcccacctctgcaatagtgataatctgatgctgaagatcaaataaccaatataaagcatatttcttggccttgctccacaggacataggcaagccttgatcatagttcatacatataaatggtggtgaaataaagaaataaaacacaatacttttacttgaatgtaaataacttatttatttctttgctaaatttggaattctagtgcacattcaaagttaagctattaaatatagggtgatcatagttcctctaccaagtctggaaagaacatctcctggtatccacaattacaccaggttgctaactgtatttgtacatttccctttgcattcgcttttgttcttgctagaaacccagtgtagcccagggcagatgtcaataaatgcatactctgtatttcgaaaaaa

SEQ ID NO: 14276 - DNA, 2956 bp, Homo sapiens
aggtcgggtgagtgtagtgtgcagggaagagacgcgtcagcgccagggccaggcccgcccgggggcagcccggcagccgaatcttgggctactctgtcccaacagccggagcagatcagaccgaccggccctgcccgctcggtcccgcgccctccagaccctacggtctccgtttctaggggcacatggttagcggcaggcgcccacagccaatccactttgccagcctgccccttcctctgccaagagcagcttcttcagccgcgctccagttccgcagacgcctgccccaccctgctcttcccttccagggaagacggatcacgcggccaagaacgagactcgcaaactgggcatttctccgagccgggctagagcaagtagcgagactccgcgtgagagtgggaaagagccttaacaggcaaccatgttgcccagtgggttttctgtgcctttgggtgcggaccaatgaggcgcgtggggcgggacttccgcttcgcctaggtgttgtcgtccctgctagtactccgggctgtgggggtcggtgcggatattcagtcatgaaatcagggtagggacttctcccgcagcgacgcggctggcaagactgtttgtgttgcgggggccggacttcaagagagaaagagagagtgggcagacatcgaagccaaacagcagtatcccggaagcactcatgcaactttggtggcggccactcagttttctctgccagtgtctggtgattttacaacgagatgctgctctccatagggatgctcatgctgtcagccacacaagtctacaccatcttgactgtccagctctttgcattcttaaacctactgcctgtagaagcagacattttagcatataactttgaaaatgcatctcagacatttgatgacctccctgcaagatttggttatagacttccagctgaaggtttaaagggttttttgattaactcaaaaccagagaatgcctgtgaacccatagtgcctccaccagtaaaagacaattcatctggcactttcatcgtgttaattagaagacttgattgtaattttgatataaaggttttaaatgcacagagagcaggatacaaggcagccatagttcacaatgttgattctgatgacctcattagcatgggatccaacgacattgaggtactaaagaaaattgacattccatctgtctttattggtgaatcatcagctaattctctgaaagatgaattcacatatgaaaaagggggccaccttatcttagttccagaatttagtcttcctttggaatactacctaattcccttccttatcatagtgggcatctgtctcatcttgatagtcattttcatgatcacaaaatttgtccaggatagacatagagctagaagaaacagacttcgtaaagatcaacttaagaaacttcctgtacataaattcaagaaaggagatgagtatgatgtatgtgccatttgtttggatgagtatgaagatggagacaaactcagaatccttccctgttcccatgcttatcattgcaagtgtgtagacccttggctaactaaaaccaaaaaaacctgtccagtgtgcaagcaaaaagttgttccttctcaaggcgattcagactctgacacagacagtagtcaagaagaaaatgaagtgacagaacatacccctttactgagacctttagcttctgtcagtgcccagtcatttggggctttatcggaatcccgctcacatcagaacatgacagaatcttcagactatgaggaagacgacaatgaagatactgacagtagtgatgcagaaaatgaaattaatgaacatgatgtcgtggtccagttgcagcctaatggtgaacgggattacaacatagcaaatactgtttgactttcagaagatgattggtttatttccctttaaaatgattaggtatatactgtaatttgattttttgctcccttcaaagatttctgtagaaataacttattttttagtattctacagtttaatcaaattactgaaacaggacttttgatctggtatttatctgccaagaatatacttcattcactaataatagactggtgctgtaactcaagcatcaattcagctcttcttttggaatgaaagtatagccaaaacataaaaaaaaaaaaatcctcagtatagcttgcaattaagacctagatcacagtatttaagtgttttgcgttttatacatgaggtcagtgctacagccacctagcatgaactaacccagcttccacctccataaagttacctagagttgttgagttggaatatgttctggcatttacctgacctgccaatcattagggagaggcaacaaggtaattcagcctttcctcctatcagcacaaagaaactcaaagctgttttttccctttctgttccaaagcagtcttatcctgacaggagcggtctatactagtgcagatttcaacacttttttttaacgttttaattactatagtgttatgtagagatttgattgagcagctaatgtttctgaactttacttactaattttcagtgtccttaagggttctgtagtgttatcaaagcaaaaagaaaatgctgcataaaaataccaaacttcagcaactgttaatactcagatcatatacctcttaataaatagcatcttatgctaattagccctgctaaactatgtacagaggaaactgttcaagtattggatttgaaagtaagtgacttatgtttaacagaactaatgatgtattgaaacactgtattatgaaaagctaaattatacatcattgtaactatgtagaaagtgtagactaatgtataatcaaaatgctaaggatttttatatggccttgtatgaggggagtttgaatgttaataaacatgttttccactttaagatccagtaaaaaaaaaaaaaaaaaaaaaaa

SEQ ID NO: 14277 - DNA, 2854 bp, Homo sapiens
aggtcgggtgagtgtagtgtgcagggaagagacgcgtcagcgccagggccaggcccgcccgggggcagcccggcagccgaatcttgggctactctgtcccaacagccggagcagatcagaccgaccggccctgcccgctcggtcccgcgccctccagaccctacggtctccgtttctaggggcacatggttagcggcaggcgcccacagccaatccactttgccagcctgccccttcctctgccaagagcagcttcttcagccgcgctccagttccgcagacgcctgccccaccctgctcttcccttccagggaagacggatcacgcggccaagaacgagactcgcaaactgggcatttctccgagccgggctagagcaagtagcgagactccgcgtgagagtgggaaagagccttaacaggcaaccatgttgcccagtgggttttctgtgcctttgggtgcggaccaatgaggcgcgtggggcgggacttccgcttcgcctaggtgttgtcgtccctgctagtactccgggctgtgggggtcggtgcggatattcagtcatgaaatcagggtagggacttctcccgcagcgacgcggctggcaagactgtttgtgttgcgggggccggacttcaaggtgattttacaacgagatgctgctctccatagggatgctcatgctgtcagccacacaagtctacaccatcttgactgtccagctctttgcattcttaaacctactgcctgtagaagcagacattttagcatataactttgaaaatgcatctcagacatttgatgacctccctgcaagatttggttatagacttccagctgaaggtttaaagggttttttgattaactcaaaaccagagaatgcctgtgaacccatagtgcctccaccagtaaaagacaattcatctggcactttcatcgtgttaattagaagacttgattgtaattttgatataaaggttttaaatgcacagagagcaggatacaaggcagccatagttcacaatgttgattctgatgacctcattagcatgggatccaacgacattgaggtactaaagaaaattgacattccatctgtctttattggtgaatcatcagctaattctctgaaagatgaattcacatatgaaaaagggggccaccttatcttagttccagaatttagtcttcctttggaatactacctaattcccttccttatcatagtgggcatctgtctcatcttgatagtcattttcatgatcacaaaatttgtccaggatagacatagagctagaagaaacagacttcgtaaagatcaacttaagaaacttcctgtacataaattcaagaaaggagatgagtatgatgtatgtgccatttgtttggatgagtatgaagatggagacaaactcagaatccttccctgttcccatgcttatcattgcaagtgtgtagacccttggctaactaaaaccaaaaaaacctgtccagtgtgcaagcaaaaagttgttccttctcaaggcgattcagactctgacacagacagtagtcaagaagaaaatgaagtgacagaacatacccctttactgagacctttagcttctgtcagtgcccagtcatttggggctttatcggaatcccgctcacatcagaacatgacagaatcttcagactatgaggaagacgacaatgaagatactgacagtagtgatgcagaaaatgaaattaatgaacatgatgtcgtggtccagttgcagcctaatggtgaacgggattacaacatagcaaatactgtttgactttcagaagatgattggtttatttccctttaaaatgattaggtatatactgtaatttgattttttgctcccttcaaagatttctgtagaaataacttattttttagtattctacagtttaatcaaattactgaaacaggacttttgatctggtatttatctgccaagaatatacttcattcactaataatagactggtgctgtaactcaagcatcaattcagctcttcttttggaatgaaagtatagccaaaacataaaaaaaaaaaaatcctcagtatagcttgcaattaagacctagatcacagtatttaagtgttttgcgttttatacatgaggtcagtgctacagccacctagcatgaactaacccagcttccacctccataaagttacctagagttgttgagttggaatatgttctggcatttacctgacctgccaatcattagggagaggcaacaaggtaattcagcctttcctcctatcagcacaaagaaactcaaagctgttttttccctttctgttccaaagcagtcttatcctgacaggagcggtctatactagtgcagatttcaacacttttttttaacgttttaattactatagtgttatgtagagatttgattgagcagctaatgtttctgaactttacttactaattttcagtgtccttaagggttctgtagtgttatcaaagcaaaaagaaaatgctgcataaaaataccaaacttcagcaactgttaatactcagatcatatacctcttaataaatagcatcttatgctaattagccctgctaaactatgtacagaggaaactgttcaagtattggatttgaaagtaagtgacttatgtttaacagaactaatgatgtattgaaacactgtattatgaaaagctaaattatacatcattgtaactatgtagaaagtgtagactaatgtataatcaaaatgctaaggatttttatatggccttgtatgaggggagtttgaatgttaataaacatgttttccactttaagatccagtaaaaaaaaaaaaaaaaaaaaaaa

SEQ ID NO: 14278 - DNA, 2864 bp, Homo sapiens
aggtcgggtgagtgtagtgtgcagggaagagacgcgtcagcgccagggccaggcccgcccgggggcagcccggcagccgaatcttgggctactctgtcccaacagccggagcagatcagaccgaccggccctgcccgctcggtcccgcgccctccagaccctacggtctccgtttctaggggcacatggttagcggcaggcgcccacagccaatccactttgccagcctgccccttcctctgccaagagcagcttcttcagccgcgctccagttccgcagacgcctgccccaccctgctcttcccttccagggaagacggatcacgcggccaagaacgagactcgcaaactgggcatttctccgagccgggctagagcaagtagcgagactccgcgtgagagtgggaaagagccttaacaggcaaccatgttgcccagtgggttttctgtgcctttgggtgcggaccaatgaggcgcgtggggcgggacttccgcttcgcctaggtgttgtcgtccctgctagtactccgggctgtgggggtcggtgcggatattcagtcatgaaatcagggtagggacttctcccgcagcgacgcggctggcaagactgtttgtgttgcgggggccggacttcaaggtgattttacaacgagatgctgctctccatagggatgctcatgctgtcagccacacaagtctacaccatcttgactgtccagctctttgcattcttaaacctactgcctgtagaagcagacattttagcatataactttgaaaatgcatctcagacatttgatgacctccctgcaagatttggttatagacttccagctgaaggtttaaagggttttttgattaactcaaaaccagagaatgcctgtgaacccatagtgcctccaccagtaaaagacaattcatctggcactttcatcgtgttaattagaagacttgattgtaattttgatataaaggttttaaatgcacagagagcaggatacaaggcagccatagttcacaatgttgattctgatgacctcattagcatgggatccaacgacagtaagtacagttgaggtactaaagaaaattgacattccatctgtctttattggtgaatcatcagctaattctctgaaagatgaattcacatatgaaaaagggggccaccttatcttagttccagaatttagtcttcctttggaatactacctaattcccttccttatcatagtgggcatctgtctcatcttgatagtcattttcatgatcacaaaatttgtccaggatagacatagagctagaagaaacagacttcgtaaagatcaacttaagaaacttcctgtacataaattcaagaaaggagatgagtatgatgtatgtgccatttgtttggatgagtatgaagatggagacaaactcagaatccttccctgttcccatgcttatcattgcaagtgtgtagacccttggctaactaaaaccaaaaaaacctgtccagtgtgcaagcaaaaagttgttccttctcaaggcgattcagactctgacacagacagtagtcaagaagaaaatgaagtgacagaacatacccctttactgagacctttagcttctgtcagtgcccagtcatttggggctttatcggaatcccgctcacatcagaacatgacagaatcttcagactatgaggaagacgacaatgaagatactgacagtagtgatgcagaaaatgaaattaatgaacatgatgtcgtggtccagttgcagcctaatggtgaacgggattacaacatagcaaatactgtttgactttcagaagatgattggtttatttccctttaaaatgattaggtatatactgtaatttgattttttgctcccttcaaagatttctgtagaaataacttattttttagtattctacagtttaatcaaattactgaaacaggacttttgatctggtatttatctgccaagaatatacttcattcactaataatagactggtgctgtaactcaagcatcaattcagctcttcttttggaatgaaagtatagccaaaacataaaaaaaaaaaaatcctcagtatagcttgcaattaagacctagatcacagtatttaagtgttttgcgttttatacatgaggtcagtgctacagccacctagcatgaactaacccagcttccacctccataaagttacctagagttgttgagttggaatatgttctggcatttacctgacctgccaatcattagggagaggcaacaaggtaattcagcctttcctcctatcagcacaaagaaactcaaagctgttttttccctttctgttccaaagcagtcttatcctgacaggagcggtctatactagtgcagatttcaacacttttttttaacgttttaattactatagtgttatgtagagatttgattgagcagctaatgtttctgaactttacttactaattttcagtgtccttaagggttctgtagtgttatcaaagcaaaaagaaaatgctgcataaaaataccaaacttcagcaactgttaatactcagatcatatacctcttaataaatagcatcttatgctaattagccctgctaaactatgtacagaggaaactgttcaagtattggatttgaaagtaagtgacttatgtttaacagaactaatgatgtattgaaacactgtattatgaaaagctaaattatacatcattgtaactatgtagaaagtgtagactaatgtataatcaaaatgctaaggatttttatatggccttgtatgaggggagtttgaatgttaataaacatgttttccactttaagatccagtaaaaaaaaaaaaaaaaaaaaaaa

SEQ ID NO: 14279 - DNA, 2745 bp, Homo sapiens
gtgtttttcaaagtactgagaggttgatgggactgttcgattagctcctctgagaagaagagaaaaggttcttggacctctccctgtttcttccttagaataatttggatgggatttgtgatgcaggaaagcctaagggaaaaagaatattcattctgtgtggtgaaaattttttgaaaaaaaaattgccttcttcaaacaagggtgtcattctgatatttatgaggactgttgttctcactatgaaggcatctgttattgaaatgttccttgttttgctggtgactggagtacattcaaacaaagaaacggcaaagaagattaaaaggcccaagttcactgtgcctcagatcaactgcgatgtcaaagccggaaagatcatcgatcctgagttcattgtgaaatgtccagcaggatgccaagaccccaaataccatgtttatggcactgacgtgtatgcatcctactccagtgtgtgtggcgctgccgtacacagtggtgtgcttgataattcaggagggaaaatacttgttcggaaggttgctggacagtctggttacaaagggagttattccaacggtgtccaatcgttatccctaccacgatggagagaatcctttatcgtcttagaaagtaaacccaaaaagggtgtaacctacccatcagctcttacatactcatcatcgaaaagtccagctgcccaagcaggtgagaccacaaaagcctatcagaggccacctattccagggacaactgcacagccggtcactctgatgcagcttctggctgtcactgtagctgtggccacccccaccaccttgccaaggccatccccttctgctgcttctaccaccagcatccccagaccacaatcagtgggccacaggagccaggagatggatctctggtccactgccacctacacaagcagccaaaacaggcccagagctgatccaggtatccaaaggcaagatccttcaggagctgccttccagaaacctgttggagcggatgtcagcctgggagagatggactcatggaaacctggatcggtccttttagatgaaggacttgttccaaaagaagaattgagcacacagtctttggagccagtatccctgggagatccaaactgcaaaattgacttgtcgtttttaattgatgggagcaccagcattggcaaacggcgattccgaatccagaagcagctcctggctgatgttgcccaagctcttgacattggccctgccggtccactgatgggtgttgtccagtatggagacaaccctgctactcactttaacctcaagacacacacgaattctcgagatctgaagacagccatagagaaaattactcagagaggaggactttctaatgtaggtcgggccatctcctttgtgaccaagaacttcttttccaaagccaatggaaacagaagcggggctcccaatgtggtggtggtgatggtggatggctggcccacggacaaagtggaggaggcttcaagacttgcgagagagtcaggaatcaacattttcttcatcaccattgaaggtgctgctgaaaatgagaagcagtatgtggtggagcccaactttgcaaacaaggccgtgtgcagaacaaacggcttctactcgctccacgtgcagagctggtttggcctccacaagaccctgcagcctctggtgaagcgggtctgcgacactgaccgcctggcctgcagcaagacctgcttgaactcggctgacattggcttcgtcatcgacggctccagcagtgtggggacgggcaacttccgcaccgtcctccagtttgtgaccaacctcaccaaagagtttgagatttccgacacggacacgcgcatcggggccgtgcagtacacctacgaacagcggctggagtttgggttcgacaagtacagcagcaagcctgacatcctcaacgccatcaagagggtgggctactggagtggtggcaccagcacgggggctgccatcaacttcgccctggagcagctcttcaagaagtccaagcccaacaagaggaagttaatgatcctcatcaccgacgggaggtcctacgacgacgtccggatcccagccatggctgcccatctgaagggagtgatcacctatgcgataggcgttgcctgggctgcccaagaggagctagaagtcattgccactcaccccgccagagaccactccttctttgtggacgagtttgacaacctccatcagtatgtccccaggatcatccagaacatttgtacagagttcaactcacagcctcggaactgaattcagagcaggcagagcaccagcaagtgctgctttactaactgacgtgttggaccaccccaccgcttaatggggcacgcacggtgcatcaagtcttgggcagggcatggagaaacaaatgtcttgttattattctttgccatcatgctttttcatattccaaaacttggagttacaaagatgatcacaaacgtatagaatgagccaaaaggctacatcatgttgagggtgctggagattttacattttgacaattgttttcaaaataaatgttcggaatacagtgcagcccttacgacaggcttacgtagagcttttgtgagatttttaagttgttatttctgattagaactctgtaaccctcagcaagtttcatttttgtcatgacaatgtaggaattgctgaattaaatgtttagaaggatgaaaaaaaaaaaaaaaag

SEQ ID NO: 14280 - DNA, 1812 bp, Homo sapiens
tagctaggcaggaagtcggcgcgggcggcgcggacagtatctgtgggtacccggagcacggagatctcgccggctttacgttcacctcggtgtctgcagcaccctccgcttcctctcctaggcgacgagacccagtggctagaagttcaccatgtctattctcaagatccatgccagggagatctttgactctcgcgggaatcccactgttgaggttgatctcttcacctcaaaaggtctcttcagagctgctgtgcccagtggtgcttcaactggtatctatgaggccctagagctccgggacaatgataagactcgctatatggggaagggtgtctcaaaggctgttgagcacatcaataaaactattgcgcctgccctggttagcaagaaactgaacgtcacagaacaagagaagattgacaaactgatgatcgagatggatggaacagaaaataaatctaagtttggtgcgaacgccattctgggggtgtcccttgccgtctgcaaagctggtgccgttgagaagggggtccccctgtaccgccacatcgctgacttggctggcaactctgaagtcatcctgccagtcccggcgttcaatgtcatcaatggcggttctcatgctggcaacaagctggccatgcaggagttcatgatcctcccagtcggtgcagcaaacttcagggaagccatgcgcattggagcagaggtttaccacaacctgaagaatgtcatcaaggagaaatatgggaaagatgccaccaatgtgggggatgaaggcgggtttgctcccaacatcctggagaataaagaaggcctggagctgctgaagactgctattgggaaagctggctacactgataaggtggtcatcggcatggacgtagcggcctccgagttcttcaggtctgggaagtatgacctggacttcaagtctcccgatgaccccagcaggtacatctcgcctgaccagctggctgacctgtacaagtccttcatcaaggactacccagtggtgtctatcgaagatccctttgaccaggatgactggggagcttggcagaagttcacagccagtgcaggaatccaggtagtgggggatgatctcacagtgaccaacccaaagaggatcgccaaggccgtgaacgagaagtcctgcaactgcctcctgctcaaagtcaaccagattggctccgtgaccgagtctcttcaggcgtgcaagctggcccaggccaatggttggggcgtcatggtgtctcatcgttcgggggagactgaagataccttcatcgctgacctggttgtggggctgtgcactgggcagatcaagactggtgccccttgccgatctgagcgcttggccaagtacaaccagctcctcagaattgaagaggagctgggcagcaaggctaagtttgccggcaggaacttcagaaaccccttggccaagtaagctgtgggcaggcaagcccttcggtcacctgttggctacacagacccctcccctcgtgtcagctcaggcagctcgaggcccccgaccaacacttgcaggggtccctgctagttagcgccccaccgccgtggagttcgtaccgcttccttagaacttctacagaagccaagctccctggagccctgttggcagctctagctttgcagtcgtgtaattggcccaagtcattgtttttctcgcctcactttccaccaagtgtctagagtcatgtgagcctcgtgtcatctccggggtggccacaggctagatccccggtggttttgtgctcaaaataaaaagcctcagtgacccatgag

SEQ ID NO: 14281 - DNA, 4737 bp, Homo sapiens
gccccgggaagcgcagccatggctctgcggaggctgggggccgcgctgctgctgctgccgctgctcgccgccgtggaagaaacgctaatggactccactacagcgactgctgagctgggctggatggtgcatcctccatcagggtgggaagaggtgagtggctacgatgagaacatgaacacgatccgcacgtaccaggtgtgcaacgtgtttgagtcaagccagaacaactggctacggaccaagtttatccggcgccgtggcgcccaccgcatccacgtggagatgaagttttcggtgcgtgactgcagcagcatccccagcgtgcctggctcctgcaaggagaccttcaacctctattactatgaggctgactttgactcggccaccaagaccttccccaactggatggagaatccatgggtgaaggtggataccattgcagccgacgagagcttctcccaggtggacctgggtggccgcgtcatgaaaatcaacaccgaggtgcggagcttcggacctgtgtcccgcagcggcttctacctggccttccaggactatggcggctgcatgtccctcatcgccgtgcgtgtcttctaccgcaagtgcccccgcatcatccagaatggcgccatcttccaggaaaccctgtcgggggctgagagcacatcgctggtggctgcccggggcagctgcatcgccaatgcggaagaggtggatgtacccatcaagctctactgtaacggggacggcgagtggctggtgcccatcgggcgctgcatgtgcaaagcaggcttcgaggccgttgagaatggcaccgtctgccgaggttgtccatctgggactttcaaggccaaccaaggggatgaggcctgtacccactgtcccatcaacagccggaccacttctgaaggggccaccaactgtgtctgccgcaatggctactacagagcagacctggaccccctggacatgccctgcacaaccatcccctccgcgccccaggctgtgatttccagtgtcaatgagacctccctcatgctggagtggacccctccccgcgactccggaggccgagaggacctcgtctacaacatcatctgcaagagctgtggctcgggccggggtgcctgcacccgctgcggggacaatgtacagtacgcaccacgccagctaggcctgaccgagccacgcatttacatcagtgacctgctggcccacacccagtacaccttcgagatccaggctgtgaacggcgttactgaccagagccccttctcgcctcagttcgcctctgtgaacatcaccaccaaccaggcagctccatcggcagtgtccatcatgcatcaggtgagccgcaccgtggacagcattaccctgtcgtggtcccagccggaccagcccaatggcgtgatcctggactatgagctgcagtactatgagaaggagctcagtgagtacaacgccacagccataaaaagccccaccaacacggtcaccgtgcagggcctcaaagccggcgccatctatgtcttccaggtgcgggcacgcaccgtggcaggctacgggcgctacagcggcaagatgtacttccagaccatgacagaagccgagtaccagacaagcatccaggagaagttgccactcatcatcggctcctcggccgctggcctggtcttcctcattgctgtggttgtcatcgccatcgtgtgtaacagaagacgggggtttgagcgtgctgactcggagtacacggacaagctgcaacactacaccagtggccacatgaccccaggcatgaagatctacatcgatcctttcacctacgaggaccccaacgaggcagtgcgggagtttgccaaggaaattgacatctcctgtgtcaaaattgagcaggtgatcggagcaggggagtttggcgaggtctgcagtggccacctgaagctgccaggcaagagagagatctttgtggccatcaagacgctcaagtcgggctacacggagaagcagcgccgggacttcctgagcgaagcctccatcatgggccagttcgaccatcccaacgtcatccacctggagggtgtcgtgaccaagagcacacctgtgatgatcatcaccgagttcatggagaatggctccctggactcctttctccggcaaaacgatgggcagttcacagtcatccagctggtgggcatgcttcggggcatcgcagctggcatgaagtacctggcagacatgaactatgttcaccgtgacctggctgcccgcaacatcctcgtcaacagcaacctggtctgcaaggtgtcggactttgggctctcacgctttctagaggacgatacctcagaccccacctacaccagtgccctgggcggaaagatccccatccgctggacagccccggaagccatccagtaccggaagttcacctcggccagtgatgtgtggagctacggcattgtcatgtgggaggtgatgtcctatggggagcggccctactgggacatgaccaaccaggatgtaatcaatgccattgagcaggactatcggctgccaccgcccatggactgcccgagcgccctgcaccaactcatgctggactgttggcagaaggaccgcaaccaccggcccaagttcggccaaattgtcaacacgctagacaagatgatccgcaatcccaacagcctcaaagccatggcgcccctctcctctggcatcaacctgccgctgctggaccgcacgatccccgactacaccagctttaacacggtggacgagtggctggaggccatcaagatggggcagtacaaggagagcttcgccaatgccggcttcacctcctttgacgtcgtgtctcagatgatgatggaggacattctccgggttggggtcactttggctggccaccagaaaaaaatcctgaacagtatccaggtgatgcgggcgcagatgaaccagattcagtctgtggaggtttgacattcacctgcctcggctcacctcttcctccaagccccgccccctctgccccacgtgccggccctcctggtgctctatccactgcagggccagccactcgccaggaggccacgggccacgggaagaaccaagcggtgccagccacgagacgtcaccaagaaaacatgcaactcaaacgacggaaaaaaaaagggaatgggaaaaaagaaaacagatcctgggagggggcgggaaatacaaggaatattttttaaagaggattctcataaggaaagcaatgactgttcttgcgggggataaaaaagggcttgggagattcatgcgatgtgtccaatcggagacaaaagcagtttctctccaactccctctgggaaggtgacctggccagagccaagaaacactttcagaaaaacaaatgtgaaggggagagacaggggccgcccttggctcctgtccctgctgctcctctaggcctcactcaacaaccaagcgcctggaggacgggacagatggacagacagccaccctgagaacccctctgggaaaatctattcctgccaccactgggcaaacagaagaatttttctgtctttggagagtattttagaaactccaatgaaagacactgtttctcctgttggctcacagggctgaaaggggcttttgtcctcctgggtcagggagaacgcggggaccccagaaaggtcagccttcctgaggatgggcaacccccaggtctgcagctccaggtacatatcacgcgcacagcctggcagcctggccctcctggtgcccactcccgccagcccctgcctcgaggactgatactgcagtgactgccgtcagctccgactgccgctgagaagggttgatcctgcatctgggtttgtttacagcaattcctggactcgggggtattttggtcacagggtggttttggtttagggggtttgtttgttgggttgttttttgttttttggttttttttaatgacaatgaagtgacactttgacatttcctaccttttgaggacttgatccttctccaggaagaaggtgctttctgcttactgacttaggcaatacaccaagggcgagattttatatgcacatttctggatttttttatacggttttcattgacactcttccctcctcccacctgccaccaggcctcaccaaagcccactgccatggggccatctgggccattcagagactggagtgagatttgggtgtggagggggaggcgccaaggtggaggagcttcccactccaggactgttgatgaaagggacagattgaggaggaagtgggctctgaggctgcagggctggaagtccttgcccacttcccactctcctgccccaatctatctagtacttcccaggcaaataggcccctttgaggctcctgagtgccctcagatggtcaaaacccagttttccctctgggagcctaaaccaggctgcatcggaggccaggacccggatcattcactgtgataccctgccctccagagggtgcgctcagagacacgggcaagcatgcctcttcccttccctggagagaaagtgtgtgatttctctcccacctccttccccccaccagacctttgctgggcctaaaggtcttggccatggggacgccctcagtctagggatctggccacagactccctcctgtgaaccaacacagacacccaagcagagcaatcagttagtgaattgaatggaaataaacgctttagttataa

SEQ ID NO: 14282 - DNA, 4641 bp, Homo sapiens
gccccgggaagcgcagccatggctctgcggaggctgggggccgcgctgctgctgctgccgctgctcgccgccgtggaagaaacgctaatggactccactacagcgactgctgagctgggctggatggtgcatcctccatcagggtgggaagaggtgagtggctacgatgagaacatgaacacgatccgcacgtaccaggtgtgcaacgtgtttgagtcaagccagaacaactggctacggaccaagtttatccggcgccgtggcgcccaccgcatccacgtggagatgaagttttcggtgcgtgactgcagcagcatccccagcgtgcctggctcctgcaaggagaccttcaacctctattactatgaggctgactttgactcggccaccaagaccttccccaactggatggagaatccatgggtgaaggtggataccattgcagccgacgagagcttctcccaggtggacctgggtggccgcgtcatgaaaatcaacaccgaggtgcggagcttcggacctgtgtcccgcagcggcttctacctggccttccaggactatggcggctgcatgtccctcatcgccgtgcgtgtcttctaccgcaagtgcccccgcatcatccagaatggcgccatcttccaggaaaccctgtcgggggctgagagcacatcgctggtggctgcccggggcagctgcatcgccaatgcggaagaggtggatgtacccatcaagctctactgtaacggggacggcgagtggctggtgcccatcgggcgctgcatgtgcaaagcaggcttcgaggccgttgagaatggcaccgtctgccgaggttgtccatctgggactttcaaggccaaccaaggggatgaggcctgtacccactgtcccatcaacagccggaccacttctgaaggggccaccaactgtgtctgccgcaatggctactacagagcagacctggaccccctggacatgccctgcacaaccatcccctccgcgccccaggctgtgatttccagtgtcaatgagacctccctcatgctggagtggacccctccccgcgactccggaggccgagaggacctcgtctacaacatcatctgcaagagctgtggctcgggccggggtgcctgcacccgctgcggggacaatgtacagtacgcaccacgccagctaggcctgaccgagccacgcatttacatcagtgacctgctggcccacacccagtacaccttcgagatccaggctgtgaacggcgttactgaccagagccccttctcgcctcagttcgcctctgtgaacatcaccaccaaccaggcagctccatcggcagtgtccatcatgcatcaggtgagccgcaccgtggacagcattaccctgtcgtggtcccagccggaccagcccaatggcgtgatcctggactatgagctgcagtactatgagaaggagctcagtgagtacaacgccacagccataaaaagccccaccaacacggtcaccgtgcagggcctcaaagccggcgccatctatgtcttccaggtgcgggcacgcaccgtggcaggctacgggcgctacagcggcaagatgtacttccagaccatgacagaagccgagtaccagacaagcatccaggagaagttgccactcatcatcggctcctcggccgctggcctggtcttcctcattgctgtggttgtcatcgccatcgtgtgtaacagacgggggtttgagcgtgctgactcggagtacacggacaagctgcaacactacaccagtggccacatgaccccaggcatgaagatctacatcgatcctttcacctacgaggaccccaacgaggcagtgcgggagtttgccaaggaaattgacatctcctgtgtcaaaattgagcaggtgatcggagcaggggagtttggcgaggtctgcagtggccacctgaagctgccaggcaagagagagatctttgtggccatcaagacgctcaagtcgggctacacggagaagcagcgccgggacttcctgagcgaagcctccatcatgggccagttcgaccatcccaacgtcatccacctggagggtgtcgtgaccaagagcacacctgtgatgatcatcaccgagttcatggagaatggctccctggactcctttctccggcaaaacgatgggcagttcacagtcatccagctggtgggcatgcttcggggcatcgcagctggcatgaagtacctggcagacatgaactatgttcaccgtgacctggctgcccgcaacatcctcgtcaacagcaacctggtctgcaaggtgtcggactttgggctctcacgctttctagaggacgatacctcagaccccacctacaccagtgccctgggcggaaagatccccatccgctggacagccccggaagccatccagtaccggaagttcacctcggccagtgatgtgtggagctacggcattgtcatgtgggaggtgatgtcctatggggagcggccctactgggacatgaccaaccaggatgtaatcaatgccattgagcaggactatcggctgccaccgcccatggactgcccgagcgccctgcaccaactcatgctggactgttggcagaaggaccgcaaccaccggcccaagttcggccaaattgtcaacacgctagacaagatgatccgcaatcccaacagcctcaaagccatggcgcccctctcctctggcatcaacctgccgctgctggaccgcacgatccccgactacaccagctttaacacggtggacgagtggctggaggccatcaagatggggcagtacaaggagagcttcgccaatgccggcttcacctcctttgacgtcgtgtctcagatgatgatggaggacattctccgggttggggtcactttggctggccaccagaaaaaaatcctgaacagtatccaggtgatgcgggcgcagatgaaccagattcagtctgtggagggccagccactcgccaggaggccacgggccacgggaagaaccaagcggtgccagccacgagacgtcaccaagaaaacatgcaactcaaacgacggaaaaaaaaagggaatgggaaaaaagaaaacagatcctgggagggggcgggaaatacaaggaatattttttaaagaggattctcataaggaaagcaatgactgttcttgcgggggataaaaaagggcttgggagattcatgcgatgtgtccaatcggagacaaaagcagtttctctccaactccctctgggaaggtgacctggccagagccaagaaacactttcagaaaaacaaatgtgaaggggagagacaggggccgcccttggctcctgtccctgctgctcctctaggcctcactcaacaaccaagcgcctggaggacgggacagatggacagacagccaccctgagaacccctctgggaaaatctattcctgccaccactgggcaaacagaagaatttttctgtctttggagagtattttagaaactccaatgaaagacactgtttctcctgttggctcacagggctgaaaggggcttttgtcctcctgggtcagggagaacgcggggaccccagaaaggtcagccttcctgaggatgggcaacccccaggtctgcagctccaggtacatatcacgcgcacagcctggcagcctggccctcctggtgcccactcccgccagcccctgcctcgaggactgatactgcagtgactgccgtcagctccgactgccgctgagaagggttgatcctgcatctgggtttgtttacagcaattcctggactcgggggtattttggtcacagggtggttttggtttagggggtttgtttgttgggttgttttttgttttttggttttttttaatgacaatgaagtgacactttgacatttcctaccttttgaggacttgatccttctccaggaagaaggtgctttctgcttactgacttaggcaatacaccaagggcgagattttatatgcacatttctggatttttttatacggttttcattgacactcttccctcctcccacctgccaccaggcctcaccaaagcccactgccatggggccatctgggccattcagagactggagtgagatttgggtgtggagggggaggcgccaaggtggaggagcttcccactccaggactgttgatgaaagggacagattgaggaggaagtgggctctgaggctgcagggctggaagtccttgcccacttcccactctcctgccccaatctatctagtacttcccaggcaaataggcccctttgaggctcctgagtgccctcagatggtcaaaacccagttttccctctgggagcctaaaccaggctgcatcggaggccaggacccggatcattcactgtgataccctgccctccagagggtgcgctcagagacacgggcaagcatgcctcttcccttccctggagagaaagtgtgtgatttctctcccacctccttccccccaccagacctttgctgggcctaaaggtcttggccatggggacgccctcagtctagggatctggccacagactccctcctgtgaaccaacacagacacccaagcagagcaatcagttagtgaattgaatggaaataaacgctttagttataa

SEQ ID NO: 14283 - DNA, 2378 bp, Homo sapiens
gtgtgtgtgtgtgtgcgcgcgcatctgagagagagagagagagagagagactgactgagcaggaatggtgagatgtttatcatgggcctcggggaccccattcccgaggagctttatgagatgctgagtgaccactcgatccgctcctttgatgatctccaacgcctgctgcacggagaccccggagaggaagatggggccgagttggacctgaacatgacccgctcccactctggaggcgagctggagagcttggctcgtggaagaaggagcctgggttccctgaccattgctgagccggccatgatcgccgagtgcaagacgcgcaccgaggtgttcgagatctcccggcgcctcatagaccgcaccaacgccaacttcctggtgtggccgccctgtgtggaggtgcagcgctgctccggctgctgcaacaaccgcaacgtgcagtgccgccccacccaggtgcagctgcgacctgtccaggtgagaaagatcgagattgtgcggaagaagccaatctttaagaaggccacggtgacgctggaagaccacctggcatgcaagtgtgagacagtggcagctgcacggcctgtgacccgaagcccggggggttcccaggagcagcgagccaaaacgccccaaactcgggtgaccattcggacggtgcgagtccgccggccccccaagggcaagcaccggaaattcaagcacacgcatgacaagacggcactgaaggagacccttggagcctaggggcatcggcaggagagtgtgtgggcagggttatttaatatggtatttgctgtattgcccccatggggtccttggagtgataatattgtttccctcgtccgtctgtctcgatgcctgattcggacggccaatggtgcttcccccacccctccacgtgtccgtccacccttccatcagcgggtctcctcccagcggcctccggtcttgcccagcagctcaaagaagaaaaagaaggactgaactccatcgccatcttcttcccttaactccaagaacttgggataagagtgtgagagagactgatggggtcgctctttgggggaaacgggttccttcccctgcacctggcctgggccacacctgagcgctgtggactgtcctgaggagccctgaggacctctcagcatagcctgcctgatccctgaacccctggccagctctgaggggaggcacctccaggcaggccaggctgcctcggactccatggctaagaccacagacgggcacacagactggagaaaacccctcccacggtgcccaaacaccagtcacctcgtctccctggtgcctctgtgcacagtggcttcttttcgttttcgttttgaagacgtggactcctcttggtgggtgtggccagcacaccaagtggctgggtgccctctcaggtgggttagagatggagtttgctgttgaggtggtgtagatggtgacctgggtatcccctgcctcctgccaccccttcctccccatactccactctgattcacctcttcctctggttcctttcatctctctacctccaccctgcattttcctcttgtcctggcccttcagtctgctccaccaaggggctcttgaaccccttattaaggccccagatgaccccagtcactcctctctagggcagaagactagaggccagggcagcaagggacctgctcatcatattccaacccagccacgactgccatgtaaggttgtgcagggtgtgtactgcacaaggacattgtatgcagggagcactgttcacatcatagataaagctgatttgtatatttattatgacaatttctggcagatgtaggtaaagaggaaaaggatccttttcctaattcacacaaagactccttgtggactggctgtgcccctgatgcagcctgtggctggagtggccaaataggagggagactgtggtaggggcagggaggcaacactgctgtccacatgacctccatttcccaaagtcctctgctccagcaactgcccttccaggtgggtgtgggacacctgggagaaggtctccaagggagggtgcagccctcttgcccgcacccctccctgcttgcacacttccccatctttgatccttctgagctccacctctggtggctcctcctaggaaaccagctcgtgggctgggaatgggggagagaagggaaaagatccccaagaccccctggggtgggatctgagctcccacctcccttcccacctactgcactttcccccttcccgccttccaaaacctgcttccttcagtttgtaaagtcggtgattatatttttgggggctttccttttattttttaaatgtaaaatttatttatattccgtatttaaagttgt

SEQ ID NO: 14284 - DNA, 3373 bp, Homo sapiens
ggtggcaacttctcctcctgcggccgggagcggcctgcctgcctccctgcgcacccgcagcctcccccgctgcctccctagggctcccctccggccgccagcgcccatttttcattccctagatagagatactttgcgcgcacacacatacatacgcgcgcaaaaaggaaaaaaaaaaaaaaaagcccaccctccagcctcgctgcaaagagaaaaccggagcagccgcagctcgcagctcgcagctcgcagcccgcagcccgcagaggacgcccagagcggcgagcaggcgggcagacggaccgacggactcgcgccgcgtccacctgtcggccgggcccagccgagcgcgcagcgggcacgccgcgcgcgcggagcagccgtgcccgccgcccgggcccgccgccagggcgcacacgctcccgcccccctacccggcccgggcgggagtttgcacctctccctgcccgggtgctcgagctgccgttgcaaagccaactttggaaaaagttttttgggggagacttgggccttgaggtgcccagctccgcgctttccgattttgggggcctttccagaaaatgttgcaaaaaagctaagccggcgggcagaggaaaacgcctgtagccggcgagtgaagacgaaccatcgactgccgtgttccttttcctcttggaggttggagtcccctgggcgcccccacacggctagacgcctcggctggttcgcgacgcagccccccggccgtggatgctgcactcgggctcgggatccgcccaggtagccggcctcggacccaggtcctgcgcccaggtcctcccctgccccccagcgacggagccggggccgggggcggcggcgccgggggcatgcgggtgagccgcggctgcagaggcctgagcgcctgatcgccgcggacctgagccgagcccacccccctccccagccccccaccctggccgcgggggcggcgcgctcgatctacgcgtccggggccccgcggggccgggcccggagtcggcatgaatcgctgctgggcgctcttcctgtctctctgctgctacctgcgtctggtcagcgccgagggggaccccattcccgaggagctttatgagatgctgagtgaccactcgatccgctcctttgatgatctccaacgcctgctgcacggagaccccggagaggaagatggggccgagttggacctgaacatgacccgctcccactctggaggcgagctggagagcttggctcgtggaagaaggagcctgggttccctgaccattgctgagccggccatgatcgccgagtgcaagacgcgcaccgaggtgttcgagatctcccggcgcctcatagaccgcaccaacgccaacttcctggtgtggccgccctgtgtggaggtgcagcgctgctccggctgctgcaacaaccgcaacgtgcagtgccgccccacccaggtgcagctgcgacctgtccaggtgagaaagatcgagattgtgcggaagaagccaatctttaagaaggccacggtgacgctggaagaccacctggcatgcaagtgtgagacagtggcagctgcacggcctgtgacccgaagcccggggggttcccaggagcagcgagccaaaacgccccaaactcgggtgaccattcggacggtgcgagtccgccggccccccaagggcaagcaccggaaattcaagcacacgcatgacaagacggcactgaaggagacccttggagcctaggggcatcggcaggagagtgtgtgggcagggttatttaatatggtatttgctgtattgcccccatggggtccttggagtgataatattgtttccctcgtccgtctgtctcgatgcctgattcggacggccaatggtgcttcccccacccctccacgtgtccgtccacccttccatcagcgggtctcctcccagcggcctccggtcttgcccagcagctcaaagaagaaaaagaaggactgaactccatcgccatcttcttcccttaactccaagaacttgggataagagtgtgagagagactgatggggtcgctctttgggggaaacgggttccttcccctgcacctggcctgggccacacctgagcgctgtggactgtcctgaggagccctgaggacctctcagcatagcctgcctgatccctgaacccctggccagctctgaggggaggcacctccaggcaggccaggctgcctcggactccatggctaagaccacagacgggcacacagactggagaaaacccctcccacggtgcccaaacaccagtcacctcgtctccctggtgcctctgtgcacagtggcttcttttcgttttcgttttgaagacgtggactcctcttggtgggtgtggccagcacaccaagtggctgggtgccctctcaggtgggttagagatggagtttgctgttgaggtggtgtagatggtgacctgggtatcccctgcctcctgccaccccttcctccccatactccactctgattcacctcttcctctggttcctttcatctctctacctccaccctgcattttcctcttgtcctggcccttcagtctgctccaccaaggggctcttgaaccccttattaaggccccagatgaccccagtcactcctctctagggcagaagactagaggccagggcagcaagggacctgctcatcatattccaacccagccacgactgccatgtaaggttgtgcagggtgtgtactgcacaaggacattgtatgcagggagcactgttcacatcatagataaagctgatttgtatatttattatgacaatttctggcagatgtaggtaaagaggaaaaggatccttttcctaattcacacaaagactccttgtggactggctgtgcccctgatgcagcctgtggctggagtggccaaataggagggagactgtggtaggggcagggaggcaacactgctgtccacatgacctccatttcccaaagtcctctgctccagcaactgcccttccaggtgggtgtgggacacctgggagaaggtctccaagggagggtgcagccctcttgcccgcacccctccctgcttgcacacttccccatctttgatccttctgagctccacctctggtggctcctcctaggaaaccagctcgtgggctgggaatgggggagagaagggaaaagatccccaagaccccctggggtgggatctgagctcccacctcccttcccacctactgcactttcccccttcccgccttccaaaacctgcttccttcagtttgtaaagtcggtgattatatttttgggggctttccttttattttttaaatgtaaaatttatttatattccgtatttaaagttgt

SEQ ID NO: 14285 - DNA, 5316 bp, Homo sapiens
cggacgcgtgggaacgaagccacccattacggtatgatgatgtcaaacgtgatgctgatgctacagttacagcccctgctggcgcagcctctctgattctctctccctctccgcgtccagtgctgggctttttcagacaagtgcatctcctaaccaggtcacatttcagccgcgacccactctccgccagtcaccggaggcagaccgcgggaggagagctgaggacagccgcgtgcgcttcgccagcagcggggtgggaggaaggacattaaaatactgcagaagtcaagaccccccaggtcgaacccagaccacgatgcgcgccccgggctgcgggcggctggtgctgccgctgctgctcctggccgcggcagccctggccgaaggcgacgccaaggggctcaaggagggcgagacccccggcaatttcatggaggacgagcaatggctgtcgtccatctcgcagtacagcggcaagatcaagcactggaaccgcttccgagacgaagtggaggatgactatatcaagagctgggaggacaatcagcaaggagatgaagccctggataccaccaaggacccctgccagaaggtgaagtgcagccgccacaaggtgtgcattgcccagggctaccagcgggccatgtgcatcagtcgcaagaagctggagcacaggatcaagcagccgaccgtgaaactccatggaaacaaagactccatctgcaagccctgccacatggcccagcttgcctctgtctgcggctcagatggccacacttacagctctgtgtgtaagctggagcaacaggcgtgcctgagcagcaagcagctggcggtgcgatgcgagggcccctgcccctgccccacggagcaggctgccacctccaccgccgatggcaaaccagagacttgcaccggtcaggacctggctgacctgggagatcggctgcgggactggttccagctccttcatgagaactccaagcagaatggctcagccagcagtgtagccggcccggccagcgggctggacaagagcctgggggccagctgcaaggactccattggctggatgttctccaagctggacaccagtgctgacctcttcctggaccagacggagctggccgccatcaacctggacaagtacgaggtctgcatccgtcccttcttcaactcctgtgacacctacaaggatggccgggtctctactgctgagtggtgcttctgcttctggagggagaagcccccctgcctggcagagctggagcgcatccagatccaggaggccgccaagaagaagccaggcatcttcatcccgagctgcgacgaggatggctactaccggaagatgcagtgtgaccagagcagcggtgactgctggtgtgtggaccagctgggcctggagctgactggcacgcgcacgcatgggagccccgactgcgatgacatcgtgggcttctcgggggactttggaagcggtgtcggctgggaggatgaggaggagaaggagacggaggaagcaggcgaggaggccgaggaggaggagggcgaggcaggcgaggctgacgacgggggctacatctggtagacgccctcagaagccggctgccgggggggactcaacagcagagctctgagcagcagcaggcaacttcgagaacggatccagaaatgcagtcagaaggaccctgctccacctggggggactgggagtgtgagtgtgcatggcatgtgtgtggcacagatggctgggacgggtgacagtgtgagtgcatgtgtgcatgcatgtgtgtatgtgtgtgtgtgtgtggcatgcgctgacaaatgtgtccttgatccacactgctcctggcagagtgagtaacccaaaggccccttcggcctccttgtagctgttttctttccttttgttgttggttttaaaatacattcacacacaaatacaaattgacaggtcaaaatccatgaaatgagatcccccagccgtgtcctccagcccagccctgaccccttggtttctaccctggctccccttggtttctaccctggctcaaccgacccctgtctgcccttctccctcctgcttctgaggtcaagctctggcctgcgagcctgtccccattgcaaaggggagggaggggcagggagctgtctaccagctgaggtcctcccaaaactgggccgatgtggtgtgacatccccaccagcctcagatgagacgggccaggacgcccagccacagcaagccctgtccctttgccggatccccaaacactagagaagctctcctaacccaaggcggagaatgaaggtggtggcggcagaggaggagggcagcagctgagaggccagggacagggtgcctcgccaagctgtctgaggtctgtcccaggtggcccaggtggtgcaggtagaacagggtgaggagagggggtcggctcaacaggaggaggctgtggctgcagagcctggaggagcttttaggtgttgagatggggcagctctgaatcctagaccctggaatagcctgtcccttttctctgggtctcgtggtggagccatgatctgggctgctctcttggggacactgggtggtggttacacagttgacctctgcctggctcccccttggtgcaactcctgcctccatcccccttgctggggtcccctcatccacttgagggcgcctgagggccaggagcagcaggcaaggagcctgggtctaggctaagggggtgtgtgcccacctcctccctgacccttaacactcctgtcctgcccagaccaacagagagagctgtccctgagaccccggagagaagcagctgccgaaagctgcagcctttccgcactctgagaccatgatcttcctcctgccaggggagagccacccacaggccatgtccagccccacttccctcagcccccagggcttccttctggcccctctgaggattccctagggctgccccgcagaggggcttccccaagctctgttttgaagcctgcaatgtggaaaagtgagaagtcagagggaacaggacaggtgcagccgggctctgaggccacacctcacacctcgctgttccccaacatcccctgagcagtgtgagctcatctcaccagatgagaagaggccctgtgcatttcttttgtttgtttgttgctgttttcccccacccatccagttctcctcagcaaagcaaattccttaacacctttggtggagaatttcttacccagacttggggctgtgatgcccttcagtgcgtggtgagtgcagcgtgtgtgcgtgtgcctgtgtgtgaacctgggggccatcctggtggcctgggagcgtgaggagaggccccctgtgtgctgggtgagtggtgggtgtggggtcaatgcagtgaggctctctgggtgaggctcccaacctggcagtccccagcctcccagcatctgtgagcgtctgttggactttacagaagagcctcatcccgtctgcccctcactctgccctggaatcaacatcttccgagtccttcttgggggaaatagcagagccccacttaactccataaactgcttcccattccgcagcccagttctgattgttgaggtgtcgcgtcgttccaggtcccccagtcccctctttctcctgtcctctctctgtccttcacctccccactccagccccggctcagttcagggaaatgctgttccatatcagccctctgctctctgaggcagccgcgcctctgactcggagctacttgaaacttctgctcttgctaggattggagtctacctatctcttccatttgtcccagctggagttctggaactttcctcctcggggtgggggtgggggttgttaaggatgctggggggcctggggaaggaaggagttcagaggaagggtgtcccctgtcctcttgatgtcaccctccgctcctgggacacgtgctctctctgtctctgggtcttctggctgtgcacgtttgtgtgtccttgtaaatatgttttaggaagaaagcaaaagggactgaactagcctctggtaggattgcaggggtccagccttgcctgtttccgaagcccccacactgcctttcgccccactgagactggtcccctcaaaaggtagacaaaacagcagctccctgtggagctgaagggcggcctcaaagtggctttttgttagacaaggttaaggtttcctcatgagcaaggttgcagatcggtccttcctcagctccttgatttgtgaccttgaccaaggggcctgccacccagcccctccagtgccctctcctcgatgcctcgctccttcctgcccccactcccctggcttaggcaggtaggggaattagggccatgctggaagaagcttaaccatgtgttcaaagaacggtttcttgcttgcttggtcctggaactccccttggctgccccaggcctccttggcccatgggtgctgggggaggtggatgtcagatctggtaggttgcagcagagaaaataaatgtgccttgagagaccactcagagagggtccaagggtgatggagaaggaagcatggcctgggagcttggaagggaggggtggtgggtggcggcatcttgactgccccctgttgtcccacacgtggggggtggtcaccccccttcactccagcccgcctgccttcagccttccatgagcttcacctgcttccaacttcactttggagggggtggggtccgttggcatcaacacggggaccctctgcttcaccaaagcccgagccctcagcccctggggagaacaaatggctgagctttgatacctggggtcgtcgagaggctgcgggctggcggcagtcccaggggagagacaccacagaaggagacccagacatcccgaggaagttcccagcagagcaaactgctttccagcctgaagcctgcttaaactgtgtgatgtgcaataactgagcttagagttaggaattgtgttcaagtgcttggatttccgtctgtagatttaactgctgaaattgtatctctcagtaattttagatgtcttttaaaaaattgaaaaacaaagtgttagactgtgtgcgtgtgcgttgatgggcactcaagagtcccgtgagtcatccagccctgcctttcccctgcgcccccatcctctcacgtcccgccctgcctccacttggggaccctgcctcgtgtcgtctttatctgcctattactcagcctaaggaaacaagtacactccacacatgcataaaggaaatcaaatgttatttttaagaaaatggaaaataaaaactttataaacacc

SEQ ID NO: 14286 - DNA, 5611 bp, Homo sapiens
gcgcgaccgtcccgggggtggggccgggcgcagcggcgagaggaggcgaaggtggctgcggtagcagcagcgcggcagcctcggacccagcccggagcgcagggcggccgctgcaggtccccgctcccctccccgtgcgtccgcccatggccgccgccgggcagctgtgcttgctctacctgtcggcggggctcctgtcccggctcggcgcagccttcaacttggacactcgggaggacaacgtgatccggaaatatggagaccccgggagcctcttcggcttctcgctggccatgcactggcaactgcagcccgaggacaagcggctgttgctcgtgggggccccgcgcggagaagcgcttccactgcagagagccaacagaacgggagggctgtacagctgcgacatcaccgcccgggggccatgcacgcggatcgagtttgataacgatgctgaccccacgtcagaaagcaaggaagatcagtggatgggggtcaccgtccagagccaaggtccagggggcaaggtcgtgacatgtgctcaccgatatgaaaaaaggcagcatgttaatacgaagcaggaatcccgagacatctttgggcggtgttatgtcctgagtcagaatctcaggattgaagacgatatggatgggggagattggagcttttgtgatgggcgattgagaggccatgagaaatttggctcttgccagcaaggtgtagcagctacttttactaaagactttcattacattgtatttggagccccgggtacttataactggaaagggattgttcgtgtagagcaaaagaataacactttttttgacatgaacatctttgaagatgggccttatgaagttggtggagagactgagcatgatgaaagtctcgttcctgttcctgctaacagttacttaggtttttctttggactcagggaaaggtattgtttctaaagatgagatcacttttgtatctggtgctcccagagccaatcacagtggagccgtggttttgctgaagagagacatgaagtctgcacatctcctccctgagcacatattcgatggagaaggtctggcctcttcatttggctatgatgtggcggtggtggacctcaacaaggatgggtggcaagatatagttattggagccccacagtattttgatagagatggagaagttggaggtgcagtgtatgtctacatgaaccagcaaggcagatggaataatgtgaagccaattcgtcttaatggaaccaaagattctatgtttggcattgcagtaaaaaatattggagatattaatcaagatggctacccagatattgcagttggagctccgtatgatgacttgggaaaggtttttatctatcatggatctgcaaatggaataaataccaaaccaacacaggttctcaagggtatatcaccttattttggatattcaattgctggaaacatggaccttgatcgaaattcctaccctgatgttgctgttggttccctctcagattcagtaactattttcagatcccggcctgtgattaatattcagaaaaccatcacagtaactcctaacagaattgacctccgccagaaaacagcgtgtggggcgcctagtgggatatgcctccaggttaaatcctgttttgaatatactgctaaccccgctggttataatccttcaatatcaattgtgggcacacttgaagctgaaaaagaaagaagaaaatctgggctatcctcaagagttcagtttcgaaaccaaggttctgagcccaaatatactcaagaactaactctgaagaggcagaaacagaaagtgtgcatggaggaaaccctgtggctacaggataatatcagagataaactgcgtcccattcccataactgcctcagtggagatccaagagccaagctctcgtaggcgagtgaattcacttccagaagttcttccaattctgaattcagatgaacccaagacagctcatattgatgttcacttcttaaaagagggatgtggagacgacaatgtatgtaacagcaaccttaaactagaatataaattttgcacccgagaaggaaatcaagacaaattttcttatttaccaattcaaaaaggtgtaccagaactagttctaaaagatcagaaggatattgctttagaaataacagtgacaaacagcccttccaacccaaggaatcccacaaaagatggcgatgacgcccatgaggctaaactgattgcaacgtttccagacactttaacctattctgcatatagagaactgagggctttccctgagaaacagttgagttgtgttgccaaccagaatggctcgcaagctgactgtgagctcggaaatccttttaaaagaaattcaaatgtcactttttatttggttttaagtacaactgaagtcacctttgacaccccatatctggatattaatctgaagttagaaacaacaagcaatcaagataatttggctccaattacagctaaagcaaaagtggttattgaactgcttttatcggtctcgggagttgctaaaccttcccaggtgtattttggaggtacagttgttggcgagcaagctatgaaatctgaagatgaagtgggaagtttaatagagtatgaattcagggtaataaacttaggtaaacctcttacaaacctcggcacagcaaccttgaacattcagtggccaaaagaaattagcaatgggaaatggttgctttatttggtgaaagtagaatccaaaggattggaaaaggtaacttgtgagccacaaaaggagataaactccctgaacctaacggagtctcacaactcaagaaagaaacgggaaattactgaaaaacagatagatgataacagaaaattttctttatttgctgaaagaaaataccagactcttaactgtagcgtgaacgtgaactgtgtgaacatcagatgcccgctgcgggggctggacagcaaggcgtctcttattttgcgctcgaggttatggaacagcacatttctagaggaatattccaaactgaactacttggacattctcatgcgagccttcattgatgtgactgctgctgccgaaaatatcaggctgccaaatgcaggcactcaggttcgagtgactgtgtttccctcaaagactgtagctcagtattcgggagtaccttggtggatcatcctagtggctattctcgctgggatcttgatgcttgctttattagtgtttatactatggaagtgtggtttcttcaagagaaataagaaagatcattatgatgccacatatcacaaggctgagatccatgctcagccatctgataaagagaggcttacttctgatgcatagtattgatctacttctgtaattgtgtggattctttaaacgctctaggtacgatgacagtgttccccgataccatgctgtaaggatccggaaagaagagcgagagatcaaagatgaaaagtatattgataaccttgaaaaaaaacagtggatcacaaagtggaacagaaatgaaagctactcatagcgggggcctaaaaaaaaaaaagcttcacagtacccaaactgctttttccaactcagaaattcaatttggatttaaaagcctgctcaatccctgaggactgatttcagagtgactacacacagtacgaacctacagttttaactgtggatattgttacgtagcctaaggctcctgttttgcacagccaaatttaaaactgttggaatggatttttctttaactgccgtaatttaactttctgggttgcctttgtttttggcgtggctgacttacatcatgtgttggggaagggcctgcccagttgcactcaggtgacatcctccagatagtgtagctgaggaggcacctacactcacctgcactaacagagtggccgtcctaacctcgggcctgctgcgcagacgtccatcacgttagctgtcccacatcacaagactatgccattggggtagttgtgtttcaacggaaagtgctgtcttaaactaaatgtgcaatagaaggtgatgttgccatcctaccgtcttttcctgtttcctagctgtgtgaatacctgctcacgtcaaatgcatacaagtttcattctccctttcactaaaaacacacaggtgcaacagacttgaatgctagttatacttatttgtatatggtatttattttttcttttctttacaaaccattttgttattgactaacaggccaaagagtctccagtttacccttcaggttggtttaatcaatcagaattagaattagagcatgggagggtcatcactatgacctaaattatttactgcaaaaagaaaatctttataaatgtaccagagagagttgttttaataacttatctataaactataacctctccttcatgacagcctccaccccacaacccaaaaggtttaagaaatagaattataactgtaaagatgtttatttcaggcattggatattttttactttagaagcctgcataatgtttctggatttacatactgtaacattcaggaattcttggagaagatgggtttattcactgaactctagtgcggtttactcactgctgcaaatactgtatattcaggacttgaaagaaatggtgaatgcctatggaactagtggatccaaactgatccagtataagactactgaatctgctaccaaaacagttaatcagtgagtcgagtgttctattttttgttttgtttcctcccctatctgtattcccaaaaattactttggggctaatttaacaagaactttaaattgtgttttaattgtaaaaatggcagggggtggaattattactctatacattcaacagagactgaatagatatgaaagctgattttttttaattaccatgcttcacaatgttaagttatatggggagcaacagcaaacaggtgctaatttgttttggatatagtataagcagtgtctgtgttttgaaagaatagaacacagtttgtagtgccactgttgttttggggggggctttttttctttttccggaaaatccttaaaccttaagatactaaggacgttgttttggttgtacttggaattcttagtcacaaaatatattttgtttacaaaaatttctgtaaaacaggttataacagtgtttaaagtctcagtttcttgcttggggaacttgtgtccctaatgtgttagattgctagattgctaaggagctgatacttgacagttttttagacctgtgttactaaaaaaaagatgaatgtcggaaaagggtgttgggagggtggtcaacaaagaaacaaagatgttatggtgtttagacttatggttgttaaaaatgtcatctcaagtcaagtcactggtctgtttgcatttgatacatttttgtactaactagcattgtaaaattatttcatgattagaaattacctgtggatatttgtataaaagtgtgaaataaattttttataaaagtgttcattgtttcgtaacacagcattgtatatgtgaagcaaactctaaaattataaatgacaacctgaattatctatttcatcaaaaaaaaaaaaaaaaaaaa

SEQ ID NO: 14287 - DNA, 1528 bp, Homo sapiens
gcaagttgggaattttagactgtcactgcacatggacctctgggaagacgtctggcgagagctaggcccactggccctacagacggatcttgctggctcacctgtccctgtggaggttcccctgggaaggcaagatgcccaacaacagcactgctctgtcattggccaatgttacctacatcaccatggaaattttcattggactctgcgccatagtgggcaacgtgctggtcatctgcgtggtcaagctgaaccccagcctgcagaccaccaccttctatttcattgtctctctagccctggctgacattgctgttggggtgctggtcatgcctttggccattgttgtcagcctgggcatcacaatccacttctacagctgcctttttatgacttgcctactgcttatctttacccacgcctccatcatgtccttgctggccatcgctgtggaccgatacttgcgggtcaagcttaccgtcagattcagaattcctgggctccctgggtgcattctatcattccagttgaaagtttgcttccttccagtcatgtggctcttcattctactctccttggctctcatttcagatgccatggtcatggatgaaaaggtcaagagaagctttgtgctggacacggcttctgccatctgcaactacaatgcccactacaagaatcaccccaaatactggtgccgaggctatttccgtgactactgcaacatcatcgccttctcccctaacagcaccaatcatgtggccctgagggacacagggaaccagctcattgtcactatgtcctgcctgaccaaagaggacacgggctggtactggtgtggcatccagcgggactttgccagggatgacatggattttacagagctgattgtaactgacgacaaaggaaccctggccaatgacttttggtctgggaaagacctatcaggcaacaaaaccagaagctgcaaggctcccaaagttgtccgcaaggctgaccgctccaggacgtccattctcatcatttgcatactgatcacgggtttgggaatcatctctgtaatcagtcatttgaccaaaaggaggagaagtcaaaggaatagaagggtaggcaacactttgaagcccttctcgcgtgtcctgactccaaaggaaatggctcctactgaacagatgtgactgaagatttttttaatttagttcataaagtgatgctacaacagaataatcaccatgacaactggcccacacctcagagactgattctgatctcccaggaattctgaaggaccctctatccttgacaacaatcatttgcagccaggtagcaacggcggtagtcagaggagctatgatagaccacacccaagcaaggctgccctcaaataacatctcaagatcttagttcttatgcattccatcagtcagaagtgaagaagaggtggagaatctggattggggaccaggaaatcacttgtattttgttagccaataaattcctagccagtgttgaatgaaaaaaaaaaaaa

SEQ ID NO: 14288 - DNA, 10244 bp, Homo sapiens
gcagccatgagcggcagcagcggcggagccgccgcccccgccgcgtcctccggccccgccgcggcggccagcgcggctggctcgggctgcgggggcggtgccggcgagggggcagaggaggcggccaaggacctggccgacatcgcggccttcttccgatccgggtttcgaaaaaacgatgaaatgaaagctatggatgttttaccaattttgaaggaaaaagttgcatacctttcaggtgggagagataaacgtggaggtcccattttaacgtttccggcccgcagcaatcatgacagaatacgacaggaggatctcaggagactcatttcctatctagcctgtattcccagcgaggaggtctgcaagcgtggcttcacggtgatcgtggacatgcgtgggtccaagtgggactccatcaagccccttctgaagatcctgcaggagtccttcccctgctgcatccatgtggccctgatcatcaagccagacaacttctggcagaaacagaggactaattttggcagttctaaatttgaatttgagacaaatatggtctctttagaaggccttaccaaagtagttgatccttctcagctaactcctgagtttgatggctgcctggaatacaaccacgaagaatggattgaaatcagagttgcttttgaagactacattagcaatgccacccacatgctgtctcggctggaggaacttcaggacatcctagctaagaaggagctgcctcaggatttagagggggctcggaatatgatcgaggaacattctcagctgaagaagaaggtgattaaggcccccatcgaggacctggatttggagggacagaagctgcttcagaggatacagagcagtgaaagctttcccaaaaagaactcaggctcaggcaatgcggacctgcagaacctcttgcccaaggtgtccaccatgctggaccggctgcactcgacacggcagcatctgcaccagatgtggcatgtgaggaagctgaagctggaccagtgcttccagctgaggctgtttgaacaggatgctgagaagatgtttgactggatcacacacaacaaaggcctgtttctaaacagctacacagagattgggaccagccaccctcatgccatggagcttcagacgcagcacaatcactttgccatgaactgtatgaacgtgtatgtaaatataaaccgcatcatgtcggtggccaatcgtctggtggagtctggccactatgcctcgcagcagatcaggcagatcgcgagtcagctggagcaggagtggaaggcgtttgcggcagccctggatgagcggagcaccttgctggacatgtcctccattttccaccagaaggccgaaaagtatatgagcaacgtggattcatggtgtaaagcttgcggtgaggtagaccttccctcagagctgcaggacctagaagatgccattcatcaccaccagggaatatatgaacatatcactcttgcttattctgaggtcagccaagatgggaagtcgctccttgacaagctccagcggcccttgactcccggcagctccgattccctgacagcctctgccaactactccaaggccgtgcaccatgtcctggatgtcatccacgaggtgctgcaccaccagcggcagctggagaacatctggcaacaccgcaaggtccggctgcatcagaggctgcagctgtgtgttttccagcaggacgttcagcaggtgctagactggatcgagaaccacggagaagcatttctgagcaaacatacaggtgtggggaaatctcttcatcgggccagagcattgcagaaacgtcatgaagattttgaagaagtggcacagaacacatacaccaatgcggataaattactggaagcagcagaacagctggctcagactggggaatgtgaccccgaagagatttatcaggctgcccatcagctggaagaccggattcaagatttcgttcggcgtgttgagcagcgaaagatcctactggacatgtcagtgtcctttcacacccatgtgaaagagctgtggacgtggctggaggagctgcagaaggagctgctggacgacgtgtatgccgagtcggtggaggccgtgcaggacctcatcaagcgctttggccagcagcagcagaccaccctgcaggtgactgtcaacgtgatcaaggaaggggaggacctcatccagcagctcagggactctgccatctccagtaacaagaccccccacaacagctccatcaaccacattgagacggtgctgcagcagctggacgaggcgcagtcgcagatggaggagctcttccaggagcgcaagatcaagctggagctcttcctgcagctgcgcatcttcgagagggacgccatcgacattatctcagacctcgagtcttggaatgatgagctttctcagcaaatgaatgacttcgacacagaagatctcacgattgcagagcagcgcctccagcaccatgcagacaaagccttgaccatgaacaacttgacttttgacgtcatccaccaagggcaagatcttctgcagtatgtcaatgaggtccaggcctctggtgtggagctgctgtgtgatagagatgtagacatggcaactcgggtccaggacctgctggagtttcttcatgaaaaacagcaggaattggatttagccgcagagcagcatcggaaacacctggagcagtgcgtgcagctgcgccacctgcaggcagaagtgaaacaggtgctgggttggatccgcaacggagagtccatgttaaatgccggacttatcacagccagctcgttacaagaggcagagcagctccagcgagagcacgagcagttccagcatgccattgagaaaacacatcagagcgcgctgcaggtgcagcagaaggcagaagccatgctacaggccaaccactacgacatggacatgatccgggactgcgccgagaaggtggcgtctcactggcaacagctcatgctcaagatggaagatcgcctcaagctcgtcaacgcctctgtcgctttctacaaaacctcagagcaggtctgcagcgtcctcgagagcctggaacaggagtacaagagagaagaagactggtgtggcggggcggataagctgggcccaaactctgagacggaccacgtgacgcccatgatcagcaagcacctggagcagaaggaggcattcctgaaggcttgcacccttgctcggaggaatgcagacgtcttcctgaaatacctgcacaggaacagcgtgaacatgccaggaatggtgacgcacatcaaagctcctgaacagcaagtgaaaaatatcttgaatgaactcttccaacgggagaacagggtattgcattactggaccatgaggaagagacggctggaccagtgtcagcagtacgtggtctttgagaggagtgccaagcaggctttggaatggatccatgacaatggcgagttctacctttccacacacacctccacgggctccagtatacagcacacccaggagctcctgaaagagcacgaggagttccagataactgcaaagcaaaccaaagagagagtgaagctattgatacagctggctgatggcttttgtgaaaaagggcatgcccatgcggcagagataaaaaaatgtgttactgctgtggataagaggtacagagatttctctctgcggatggagaagtacaggacctctttggaaaaagccctggggatttcttcagattccaacaaatcgagtaaaagtctccagctagatatcattccagccagtatccctggctcagaggtgaaacttcgagatgctgctcatgaacttaatgaagagaagcggaaatctgcccgcaggaaagagttcataatggctgagctcattcaaactgaaaaggcttatgtaagagacctccgggaatgtatggatacgtacctgtgggaaatgaccagtggcgtggaagagattccacctggcattgtaaacaaagaactcatcatcttcggaaacatgcaagaaatctacgaatttcataataacatattcctaaaggagctggaaaaatatgaacagttgccagaggatgttggacattgttttgttacttgggcagacaagtttcagatgtatgtcacatattgcaaaaataagcctgattctactcagctgatattggaacatgcagggtcctattttgacgagatacagcagcgacatggattagccaattccatttcttcctaccttattaaaccagttcagcgaataacgaagtatcagctccttttaaaagagctgctgacgtgctgtgaggaaggaaagggagagattaaagatggcctggaggtgatgctcagcgtgccgaagcgagccaatgatgccatgcacctcagcatgctggaagggtttgatgaaaacattgagtctcagggagaactcatcctacaggaatccttccaagtgtgggacccaaaaaccttaattcgaaagggtcgagaacggcatctcttcctttttgaaatgtccttagtatttagtaaagaagtgaaagattccagtgggagaagcaagtacctttataaaagcaaattgtttacctcagagttgggtgtcacagaacatgttgaaggagacccttgcaaatttgcactgtgggtggggagaacaccaacttcagataataaaattgtccttaaggcttccagcatagagaacaagcaggactggataaagcatatccgcgaagtcatccaggagcggacgatccacctgaagggagccctgaaggagcccattcacatccctaagaccgctcccgccacaagacagaagggaaggagggatggagaggatctggacagccaaggagacggcagcagccagcctgatacgatttccatcgcctcacggacgtctcagaacacgctggacagcgataagctctctggtggctgtgagctgacagtggtgatccatgacttcaccgcttgcaacagcaacgagctgaccatccgacggggccagaccgtggaagttctggagcggccgcatgacaagcctgactggtgtctggtgcggacaactgaccgctccccagcggcagaaggcctggtcccctgtggttcactgtgcatcgcccactccagaagtagcatggaaatggagggcatcttcaaccacaaagactcgctctccgtctccagcaatgacgccagtccacccgcatccgtggcttccctccagccccacatgatcggggcccagagctcgccgggccccaagcggccgggcaacaccctgcgcaagtggctcaccagccccgtgcggcggctcagcagcggcaaggccgacgggcacgtgaagaagctggcgcacaagcacaagaagagccgcgaggtccgcaagagcgccgacgccggctcgcagaaggactccgacgacagtgcggccaccccgcaggacgagacggtcgaggagagaggccggaacgagggcctgagcagcggtactctctccaaatcctcctcctcggggatgcagagctgtggagaagaggaaggcgaggagggggccgacgccgtgcccctgccgccacccatggccatccagcagcacagcctcctccagccagactcacaggatgacaaggcctcttctcggttattagtccgccccaccagctccgaaacaccgagtgcagccgagctcgtcagtgcaattgaggaactcgtgaaaagcaagatggcactggaggatcgccccagctcactccttgttgaccagggagatagtagcagcccttccttcaacccttcggataattcccttctctcttcctcctcgcccattgatgagatggaagaaaggaaatccagctctttaaagagaagacactacgttttgcaagaactagtggagacagagcgtgactatgtgcgggaccttggctatgtggttgagggctacatggcacttatgaaagaagatggtgttcctgatgacatgaaaggaaaagacaaaattgtgttcggcaacatccatcagatttacgactggcacagagacttttttttaggagagttagagaagtgccttgaagatccagaaaaactaggatccctttttgttaaacacgagagaaggttgcacatgtacatagcttattgtcaaaataaaccaaagtctgagcacattgtctcagaatacattgataccttttttgaggacttaaagcagcgtcttggccacaggttacagctcacagatctgttgatcaaaccagtgcagagaatcatgaagtatcagctgttactgaaggacttcctcaagtattccaaaaaggccagcctggatacatcagaattagagagagctgtggaagtcatgtgcatagtacccaggcggtgcaacgacatgatgaacgtggggcggctgcaaggattcgacgggaaaatcgttgcccagggtaaactgctcttgcaggacacattcttggtcacagaccaagatgcaggacttctgcctcgctgcagagagaggcgcatcttcctctttgagcagatcgtcatattcagcgaaccacttgataaaaagaagggcttctccatgccgggattcctgtttaagaacagtatcaaggtgagttgcctttgcctggaggaaaatgtggaaaatgatccctgtaaatttgctctgacatcgaggacgggtgacgtggtagagaccttcattttgcattcatctagtccaagtgtccggcaaacttggatccatgaaatcaaccaaattttagaaaaccagcgcaattttttaaatgccttgacatcgccaatcgagtaccagaggaaccacagcgggggcggcggcggcggcggcagcgggggcagcggcgggggtgggggcagcggcggcggcggggcccccagtggcggcagcggccacagtggcggccccagcagctgcggcggcgcccccagcacgagcaggagccggccctcccggatcccccagcctgtccgacaccacccccccgtgctggtctcctctgcagcctcgagccaggcagaggcagacaagatgtcaggtacgtccacccccgggccctccctgcctccccctggcgcggcccccgaggccggccccagcgcgcccagcaggcggccccccggcgcggacgccgaggggtccgagcgagaagcggagccgatccccaagatgaaggtgctggagagccccaggaaaggcgccgcgaacgcctcggggtcgagcccagacgcccccgccaaggacgcgcgcgctagcctgggcaccctgccgcttgggaagccccgggccggggccgcttcgccgctgaactcgccgctctccagcgcggtcccttctctcggcaaggagcccttcccccccagcagccccctgcagaaggggggctccttctggagctccatccccgcctcccccgccagccgacccggctccttcaccttcccgggggacagcgactccctccagcggcagacaccccgccacgcggcccctggcaaggatactgaccgcatgagcacgtgctcctcggccagcgagcagtccgtgcagtccacccagagcaacgggagtgaaagcagcagcagtagcaacatctccaccatgttggtgacacacgattacacggcagtgaaggaggatgagatcaacgtctaccaaggagaggtcgttcaaattctggccagcaaccagcagaacatgtttctggtgttccgagccgccactgaccagtgccccgcagctgagggctggattccaggctttgtcctgggccacaccagtgcagtcatcgtggagaacccggacgggactctcaagaagtcaacatcttggcacacagcactccgtttaaggaaaaaatctgagaaaaaagataaagacggcaaaagggaaggcaagttagagaacggttatcggaagtcacgggaaggactcagcaacaaggtatctgtgaagcttctcaatcccaactacatttatgacgttcccccagaattcgtcattccattgagtgaggtcacgtgtgagacaggggagaccgttgttcttagatgtcgagtctgtggccgccccaaagcctcaattacctggaagggccctgaacacaacaccttgaacaacgatggtcactacagcatctcctacagtgacctgggagaggccacgctgaagattgtgggcgtgaccacggaagatgacggcatctacacgtgcatcgctgtcaatgacatgggttcagcctcatcgtcggccagcctgagggtcctaggtccagggatggatgggatcatggtgacctggaaagacaactttgactccttctacagtgaagtggctgagcttggcaggggcagattctctgtcgttaagaaatgtgatcagaaaggaaccaagcgagcagtggccactaagtttgtgaacaagaagttgatgaagcgcgaccaggtcacccatgagcttggcatcctgcagagcctccagcaccccctgcttgtcggcctcctcgacacctttgagacccccaccagctacatcctggtcttagaaatggctgaccagggtcgcctcctggactgcgtggtgcgatggggaagcctcactgaagggaagatcagggcgcacctgggggaggttctggaagctgtccggtacctgcacaactgcaggatagcacacctggacctaaagcctgagaatatcctggtggatgagagtttagccaagccaaccatcaaactggctgactttggagatgctgttcagctcaacacgacctactacatccaccagttactggggaaccctgaattcgcagcccctgaaatcatcctcgggaaccctgtctccctgacctcggatacgtggagtgttggagtgctcacatacgtacttcttagtggcgtgtcccccttcctggatgacagtgtggaagagacctgcctgaacatttgccgcttagactttagcttcccagatgactactttaaaggagtgagccagaaggccaaggagttcgtgtgcttcctcctgcaggaggaccccgccaagcgtccctcggctgcgctggccctccaggagcagtggctgcaggccggcaacggcagaagcacgggcgtcctcgacacgtccagactgacttccttcattgagcggcgcaaacaccagaatgatgttcgacctatccgtagcattaaaaactttctgcagagcaggcttctgcctagagtttgacctatccagaagttctttctcattctctttcacctgccaatcagctgttaatctgaattttcaagagaaaacaagcaaacataactgatcagctgccggtatgttcatcgtgtgaaattgcattccaagtgagctgtgctcagcagtgcttggacacagagctgcaagctgcgctggggtggaggaccgtcacttacactctgcccaaggcagaggtcgcattgctgtatcacagtattttattcaggtttctgcaaaaaaataaaaagataacttttttaaacaaacatgaatagaattttgcaaatttaacgttttcaagatttattcaaggaaacaaaatgcctatgttcaaccactggtgttaatgaacaaagatactgtgcgtctctggggaagacgcacctaggtggcggccactcccatggccttgtctaggactcagagaccactcggctctgagcttccaggcgcctcgtctgtgtgcatctcacgcccgacgtggcttctgaaacgtgcattcaacctcaaacttttgcataaaatagaatgaatcgttttgctctgatgaaatgtaggccttacttgtatataagactgttcctgccttcggtctgtcattttcccacctgcctcccctacccaccccccacccaccacctggggcttcctctgggggtccgagggtcttcccatcacatgaagacatcaggttgggtcctgccccactgcccctccccctgttcctgccccaagccgtcaatcagattgtggagcagtacacagtcagatgaaaatactgtaaatgcactcattgggggttttttggttttacttcatatcatgtgcaatgttgtggctttaacattttatgcaactatttatgaagacctctgttgtacctgtaataaatatatagaaaaagcaaaaaaaaaaaaaaaaaa

SEQ ID NO: 14289 - DNA, 3004 bp, Homo sapiens
agtgcgtggcagcgggacctgcggccccgtcgcgaagtttccagccctgcgagcgccgccgggtcggccgatcgtcccccatacctcggccatgcggcccctgctgctactggccctgctgggctggctgctgctggccgaagcgaagggcgacgccaagccggaggacaaccttttagtcctcacggtggccactaaggagaccgagggattccgtcgcttcaagcgctcagctcagttcttcaactacaagatccaggcgcttggcctaggggaggactggaatgtggagaaggggacgtcggcaggtggagggcagaaggtccggctgctgaagaaagctctggagaagcacgcagacaaggaggatctggtcattctcttcgcagacagctatgacgtgctgtttgcatcggggccccgggagctcctgaagaagttccggcaggccaggagccaggtggtcttctctgctgaggagctcatctacccagaccgcaggctggagaccaagtatccggtggtgtccgatggcaagaggttcctgggctctggaggcttcatcggttatgcccccaacctcagcaaactggtggccgagtgggagggccaggacagcgacagcgatcagctgttttacaccaagatcttcttggacccggagaagagggagcagatcaatatcaccctggaccaccgctgccgtatcttccagaacctggatggagccttggatgaggtcgtgctcaagtttgaaatgggccatgtgagagcgaggaacctggcctatgacaccctcccggtcctgatccatggcaacgggccaaccaagctgcagttgaactacctgggcaactacatcccgcgcttctggaccttcgaaacaggctgcaccgtgtgtgacgaaggcttgcgcagcctcaagggcattggggatgaagctctgcccacggtcctggtcggcgtgttcatcgaacagcccacgccgtttgtgtccctgttcttccagcggctcctgcggctccactacccccagaaacacatgcgacttttcatccacaaccacgagcagcaccacaaggctcaggtggaagagttcctggcacagcatggcagcgagtaccagtctgtgaagctggtgggccctgaggtgcggatggcgaatgcagatgccaggaacatgggcgcagacctgtgccggcaggaccgcagctgcacctactacttcagcgtggatgctgacgtggccctgaccgagcccaacagcctgcggctgctgatccaacagaacaagaacgtcattgccccgctgatgacccggcatgggaggctgtggtcgaacttctggggggctctcagtgcagatggctactatgcccgttccgaggactacgtggacattgtgcaggggcggcgtgttggtgtctggaatgtgccctatatttcaaacatctacttgatcaagggcagtgccctgcggggtgagctgcagtcctcagatctcttccaccacagcaagctggaccccgacatggccttctgtgccaacatccggcagcaggatgtgttcatgttcctgaccaaccggcacacccttggccatctgctctccctagacagctaccgcaccacccacctgcacaacgacctctgggaggtgttcagcaaccccgaggactggaaggagaagtacatccaccagaactacaccaaagccctggcagggaagctggtggagacgccctgcccggatgtctattggttccccatcttcacggaggtggcctgtgatgagctggtggaggagatggagcactttggccagtggtctctgggcaacaacaaggacaaccgcatccagggtggctacgagaacgtgccgactattgacatccacatgaaccagatcggctttgagcgggagtggcacaaattcctgctggagtacattgcgcccatgacggagaagctctaccccggctactacaccagggcccagtttgacctggcctttgtcgtccgctacaagcctgatgagcagccctcactgatgccacaccatgatgcctccaccttcaccatcaacatcgccctgaaccgagtcggggtggattacgagggcgggggctgtcggttcctgcgctacaactgttccatccgagccccaaggaagggctggaccctcatgcaccctggacgactcacgcattaccatgaggggctccccaccaccaggggcacccgctacatcgcagtctccttcgtcgatccctaattggccaggcctgaccctcttggacctttcttctttgccgacaaccactgcccagcagcctctgggacctcggggtcccagggaacccagtccagcctcctggctgttgacttcccattgctcttggagccaccaatcaaagagattcaaagagattcctgcaggccagaggcggaacacacctttatggctggggctctccgtggtgttctggacccagcccctggagacaccattcacttttactgctttgtagtgactcgtgctctccaacctgtcttcctgaaaaaccaaggcccccttcccccacctcttccatggggtgagacttgagcagaacaggggcttccccaagttgcccagaaagactgtctgggtgagaagccatggccagagcttctcccaggcacaggtgttgcaccagggacttctgcttcaagttttggggtaaagacacctggatcagactccaagggctgccctgagtctgggacttctgcctccatggctggtcatgagagcaaaccgtagtcccctggagacagcgactccagagaacctcttgggagacagaagaggcatctgtgcacagctcgatcttctacttgcctgtggggaggggagtgacaggtccacacaccacactgggtcaccctgtcctggatgcctctgaagagagggacagaccgtcagaaactggagagtttctattaaaggtcatttaaacca

SEQ ID NO: 14290 - DNA, 2764 bp, Homo sapiens
aagcgcgtcgccaccgcccccgcctaggcgagagcccagagagctgaacctgcatcccggacctgcggcgaccgtcgtacaccatgggcctccacctccgcccctaccgtgtggggctgctcccggatggcctcctgttcctcttgctgctgctaatgctgctcgcggacccagcgctcccggccggacgtcaccccccagtggtgctggtccctggtgatttgggtaaccaactggaagccaagctggacaagccgacagtggtgcactacctctgctccaagaagaccgaaagctacttcacaatctggctgaacctggaactgctgctgcctgtcatcattgactgctggattgacaatatcaggctggtttacaacaaaacatccagggccacccagtttcctgatggtgtggatgtacgtgtccctggctttgggaagaccttctcactggagttcctggaccccagcaaaagcagcgtgggttcctatttccacaccatggtggagagccttgtgggctggggctacacacggggtgaggatgtccgaggggctccctatgactggcgccgagccccaaatgaaaacgggccctacttcctggccctccgcgagatgatcgaggagatgtaccagctgtatgggggccccgtggtgctggttgcccacagtatgggcaacatgtacacgctctactttctgcagcggcagccgcaggcctggaaggacaagtatatccgggccttcgtgtcactgggtgcgccctgggggggcgtggccaagaccctgcgcgtcctggcttcaggagacaacaaccggatcccagtcatcgggcccctgaagatccgggagcagcagcggtcagctgtctccaccagctggctgctgccctacaactacacatggtcacctgagaaggtgttcgtgcagacacccacaatcaactacacactgcgggactaccgcaagttcttccaggacatcggctttgaagatggctggctcatgcggcaggacacagaagggctggtggaagccacgatgccacctggcgtgcagctgcactgcctctatggtactggcgtccccacaccagactccttctactatgagagcttccctgaccgtgaccctaaaatctgctttggtgacggcgatggtactgtgaacttgaagagtgccctgcagtgccaggcctggcagagccgccaggagcaccaagtgttgctgcaggagctgccaggcagcgagcacatcgagatgctggccaacgccaccaccctggcctatctgaaacgtgtgctccttgggccctgactcctgtgccacaggactcctgtggctcggccgtggacctgctgttggcctctggggctgtcatggcccacgcgttttgcaaagtttgtgactcaccattcaaggccccgagtcttggactgtgaagcatctgccatggggaagtgctgtttgttatcctttctctgtggcagtgaagaaggaagaaatgagagtctagactcaagggacactggatggcaagaatgctgctgatggtggaactgctgtgaccttaggactggctccacagggtggactggctgggccctggtcccagtccctgcctggggccatgtgtcccccctattcctgtgggcttttcatacttgcctactgggccctggccccgcagccttcctatgagggatgttactgggctgtggtcctgtacccagaggtcccagggatcggctcctggcccctcgggtgacccttcccacacaccagccacagataggcctgccactggtcatgggtagctagagctgctggcttccctgtggcttagctggtggccagcctgactggcttcctgggcgagcctagtagctcctgcaggcaggggcagtttgttgcgttcttcgtggttcccaggccctgggacatctcactccactcctacctcccttaccaccaggagcattcaagctctggattgggcagcagatgtgcccccagtcccgcaggctgtgttccaggggccctgatttcctcggatgtgctattggccccaggactgaagctgcctcccttcaccctgggactgtggttccaaggatgagagcaggggttggagccatggccttctgggaacctatggagaaagggaatccaaggaagcagccaaggctgctcgcagcttccctgagctgcacctcttgctaaccccaccatcacactgccaccctgccctagggtctcactagtaccaagtgggtcagcacagggctgaggatggggctcctatccaccctggccagcacccagcttagtgctgggactagcccagaaacttgaatgggaccctgagagagccaggggtcccctgaggcccccctaggggctttctgtctgccccagggtgctccatggatctccctgtggcagcaggcatggagagtcagggctgccttcatggcagtaggctctaagtgggtgactggccacaggccgagaaaagggtacagcctctaggtggggttcccaaagacgccttcacgctggactgagctgctctcccacagggtttctgtgcagctggattttctctgttgcatacatgcctggcatctgtctccccttgttcctgagtggccccacatggggctctgagcaggctgtatctggattctggcaataaaagtactctggatgctgtaaaaaaaaaaaaaaaaaaaaaaaaaaaaaaaaaaaaaaaaaaa

SEQ ID NO: 14291 - DNA, 1276 bp, Homo sapiens
cttccctcttcactttgtacctttctctcctcgactgtgaagcgggccgggacctgccaggccagaccaaaccggacctcgggggcgatgcggctgctgcccctgctgcggactgtcctctgggccgcgttcctcggctcccctctgcgcgggggctccagcctccgccacgtagtctactggaactccagtaaccccaggttgcttcgaggagacgccgtggtggagctgggcctcaacgattacctagacattgtctgcccccactacgaaggcccagggccccctgagggccccgagacgtttgctttgtacatggtggactggccaggctatgagtcctgccaggcagagggcccccgggcctacaagcgctgggtgtgctccctgccctttggccatgttcaattctcagagaagattcagcgcttcacacccttctccctcggctttgagttcttacctggagagacttactactacatctcggtgcccactccagagagttctggccagtgcttgaggctccaggtgtctgtctgctgcaaggagaggaagtctgagtcagcccatcctgttgggagccctggagagagtggcacatcagggtggcgagggggggacactcccagccccctctgtctcttgctattactgctgcttctgattcttcgtcttctgcgaattctgtgagccaagcagaccttccctctcatcccaaggagccagagtcctcccaagatcccctggaggaggagggatccctgctgcctgcactgggggtgccaattcagaccgacaagatggagcattgatgggggagatcagagggtctgaggtgactcttgcaggagcctgtcccctcatcacaggctaaagaagagcagtagacagccctggacactctgaagcagaggcaagacaaacacaggcgctttgcaggctgctctgagggtctcagcccatcccccaggaggactgggatttggtatgatcaaatcctcaagccagctgggggcccaggctgaagacctggggacaggtcgattgctggaccagggcaaagaagaagccctgccatctgtgccctgtgggccttttccctggggcagcaccttgccctccccaggggatcactcacttgtcttctatgaagacggactcttcatgaggttgaatttcatgccagtttgtatttttataagtatctagaccaaaccttcaataaaccactcatctttttgttgccctccccaaaaaaaaaaaaaaaaaaaaa

SEQ ID NO: 14292 - DNA, 1131 bp, Homo sapiens
cttccctcttcactttgtacctttctctcctcgactgtgaagcgggccgggacctgccaggccagaccaaaccggacctcgggggcgatgcggctgctgcccctgctgcggactgtcctctgggccgcgttcctcggctcccctctgcgcgggggctccagcctccgccacgtagtctactggaactccagtaaccccaggttgcttcgaggagacgccgtggtggagctgggcctcaacgattacctagacattgtctgcccccactacgaaggcccagggccccctgagggccccgagacgtttgctttgtacatggtggactggccaggctatgagtcctgccaggcagagggcccccgggcctacaagcgctgggtgtgctccctgccctttggccatgttcaattctcagagaagattcagcgcttcacacccttctccctcggctttgagttcttacctggagagacttactactacatctcggtgcccactccagagagttctggccagtgcttgaggctccaggtgtctgtctgctgcaaggagaggagaccttccctctcatcccaaggagccagagtcctcccaagatcccctggaggaggagggatccctgctgcctgcactgggggtgccaattcagaccgacaagatggagcattgatgggggagatcagagggtctgaggtgactcttgcaggagcctgtcccctcatcacaggctaaagaagagcagtagacagccctggacactctgaagcagaggcaagacaaacacaggcgctttgcaggctgctctgagggtctcagcccatcccccaggaggactgggatttggtatgatcaaatcctcaagccagctgggggcccaggctgaagacctggggacaggtcgattgctggaccagggcaaagaagaagccctgccatctgtgccctgtgggccttttccctggggcagcaccttgccctccccaggggatcactcacttgtcttctatgaagacggactcttcatgaggttgaatttcatgccagtttgtatttttataagtatctagaccaaaccttcaataaaccactcatctttttgttgccctccccaaaaaaaaaaaaaaaaaaaaa

SEQ ID NO: 14293 - DNA, 1110 bp, Homo sapiens
cttccctcttcactttgtacctttctctcctcgactgtgaagcgggccgggacctgccaggccagaccaaaccggacctcgggggcgatgcggctgctgcccctgctgcggactgtcctctgggccgcgttcctcggctcccctctgcgcgggggctccagcctccgccacgtagtctactggaactccagtaaccccaggttgcttcgaggagacgccgtggtggagctgggcctcaacgattacctagacattgtctgcccccactacgaaggcccagggccccctgagggccccgagacgtttgctttgtacatggtggactggccaggctatgagtcctgccaggcagagggcccccgggcctacaagcgctgggtgtgctccctgccctttggccatgttcaattctcagagaagattcagcgcttcacacccttctccctcggctttgagttcttacctggagagacttactactacatctcggtgcccactccagagagttctggccagtgcttgaggctccaggtgtctgtctgctgcaaggagaggagagccagagtcctcccaagatcccctggaggaggagggatccctgctgcctgcactgggggtgccaattcagaccgacaagatggagcattgatgggggagatcagagggtctgaggtgactcttgcaggagcctgtcccctcatcacaggctaaagaagagcagtagacagccctggacactctgaagcagaggcaagacaaacacaggcgctttgcaggctgctctgagggtctcagcccatcccccaggaggactgggatttggtatgatcaaatcctcaagccagctgggggcccaggctgaagacctggggacaggtcgattgctggaccagggcaaagaagaagccctgccatctgtgccctgtgggccttttccctggggcagcaccttgccctccccaggggatcactcacttgtcttctatgaagacggactcttcatgaggttgaatttcatgccagtttgtatttttataagtatctagaccaaaccttcaataaaccactcatctttttgttgccctccccaaaaaaaaaaaaaaaaaaaaa

SEQ ID NO: 14294 - DNA, 5692 bp, Homo sapiens
gtttccggccgccgtcgctgtccagggaggctgaggcgagaggtagctgtccgggtggggagcccgcactaccttcttcctcttcctcctcctcctccgggtgaggggagcgaaggttgggggtccccgagcccatggaccaggaggaggcggaggccgccgagagccggggccccgctatgtggccctgagccccgtgtactggttctgcctgtctggagggccatggagaagaggctgggagtcaagccaaatcctgcttcctggattttatcaggatattattggcagacatctgcgaagtggttgagaagcctgtacctgttttatacttgcttttgcttcagcgttctgtggttgtcaacagatgccagtgagagcaggtgccagcaggggaagacacaatttggagttggcctgagatctgggggagaaaatcacctctggcttcttgaaggaaccccctctctccagtcatgttgggctgcctgctgccaggactctgcctgccatgtcttttggtggctagaagggatgtgcattcaggcagactgcagcaggccccagagctgccgggcttttaggacacactcctccaattccatgctggtgtttttaaaaaaattccaaactgcagatgatttgggctttctacctgaagatgatgtaccacatcttctggggctaggttggaactgggcatcttggaggcagagcccacccagagctgcactcagacctgctgtatcttccagtgaccagcagagcttaatcaggaagcttcagaagagaggtagtcccagtgacgtagttacacctatagtgacacagcattctaaagtgaatgactccaacgaattaggtggtctgactaccagtggctctgcagaggtccacaaggcgattacaatttccagtcccctaaccacagacctgactgcagagctgtctggtgggccaaagaatgtatcagtgcaacctgaaatatcagagggtcttgctactacgcccagcactcaacaagtaaaaagttctgagaaaacccagattgctgtcccccagccagtggctccctcctacagttatgctacccctaccccccaggcctctttccagagcacctcagcaccatacccagttataaaggaactggtggtatctgctggagagagtgtccagataaccctgcctaagaatgaagttcaattaaatgcatatgttctccaagaaccacctaaaggagaaacctacacctacgactggcagctgattactcatcctagagactacagtggagaaatggaagggaaacattcccagatcctcaaactatcgaagctcactccaggcctgtatgaattcaaagtgattgtagagggtcaaaatgcccatggggaaggctatgtgaacgtgacagtcaagccagagccccgtaagaatcggccccccattgctattgtgtcacctcagttccaggagatctctttgccaaccacttctacagtcattgatggcagtcaaagcactgatgatgataaaatcgttcagtaccattgggaagaacttaaggggcctctaagagaagagaagatttctgaagatacagccatattaaaactaagtaaactcgtccctgggaactacactttcagcttgactgtagtagactctgatggagctaccaactctactactgcaaacctgacagtgaacaaagctgtggattacccccctgtggccaacgcaggccccaaccaagtgatcaccctgccccaaaactccatcaccctctttgggaaccagagcactgatgatcatggcatcaccagctatgagtggtcactcagcccaagcagcaaagggaaagtggtggagatgcagggtgttagaacaccaaccttacagctctctgcgatgcaagaaggagactacacttaccagctcacagtgactgacacaataggacagcaggccactgctcaagtgactgttattgtgcaacctgaaaacaataagcctcctcaggcagatgcaggcccagataaagagctgacccttcctgtggatagcacaaccctggatggcagcaagagctcagatgatcagaaaattatctcatatctctgggaaaaaacacagggacctgatggggtgcagctcgagaatgctaacagcagtgttgctactgtgactgggctgcaagtggggacctatgtgttcaccttgactgtcaaagatgagaggaacctgcaaagccagagctctgtgaatgtcattgtcaaagaagaaataaacaaaccacctatagccaagataactgggaatgtggtgattaccctacccacgagcacagcagagctggatggctctaagtcctcagatgacaagggaatagtcagctacctctggactcgagatgaggggagcccagcagcaggggaggtgttaaatcactctgaccatcaccctatcctttttctttcaaacctggttgagggaacctacacttttcacctgaaagtgaccgatgcaaagggtgagagtgacacagaccggaccactgtggaggtgaaacctgatcccaggaaaaacaacctggtggagatcatcttggatatcaacgtcagtcagctaactgagaggctgaaggggatgttcatccgccagattggggtcctcctgggggtgctggattccgacatcattgtgcaaaagattcagccgtacacggagcagagcaccaaaatggtattttttgttcaaaacgagcctccccaccagatcttcaaaggccatgaggtggcagcgatgctcaagagtgagctgcggaagcaaaaggcagactttttgatattcagagccttggaagtcaacactgtcacatgtcagctgaactgttccgaccatggccactgtgactcgttcaccaaacgctgtatctgtgaccctttttggatggagaatttcatcaaggtgcagctgagggatggagacagcaactgtgagtggagcgtgttatatgttatcattgctacctttgtcattgttgttgccttgggaatcctgtcttggactgtgatctgttgttgtaagaggcaaaaaggaaaacccaagaggaaaagcaagtacaagatcctggatgccacggatcaggaaagcctggagctgaagccaacctcccgagcaggtaggggccctgggtgccagagcttctaggtctgtgcactctctctgtggaaggctgctgtcactagcccctcctgagtgtgtcactaacagcccactgtgcttgcaaagcattttgttcccttttgcctgatgaagactgagggtcagatttgccctgagctgcactggacaaaatgcctccaggacccacttcgcgtgctacttccgcttggcgggggtgctgggcctgttgttttcctttgcctgggcattctcctcatgtttcccacctggagttccgcttttccaactgccccaggtagtcagggtcagggaccttggacttgtctcttactgctgaccagtctgtgctttatgggcagagatgagacccaggcccgtgtctgccagctgaccacctttcagccagccttgttctcctgtcttcctatctttatcatttggcaagtcctcagcttctgtcagtgtcttagggcagataggagggcatttccttgcacaaacagtaagatgactttgagtgatggcactgggagatcagggcaggtagtaggccttccttcctccgctgggctgggtcacctggcgagggtttcactcatcatggatgccatgggacaggtatcattggtttatgagagctagactctataaagcgattcctaaacactctgcaagtagaactatttttatataaagcatttattaaacacttttcatgcttaaagctttgtgttagggagaggctatgggggtatagggagtcatcagacacaggctgtgctctcagtctagtgagggagaaaagacacacagtagcagaagagaacaggctcacagcagtctggactctgcaccaagcagctcgatccaccaacactgtcaaggtggagactggaggtggtggggcttgaaatgagcccaggaaaccagagcagtgagggcgggcggggcatttcacccaggaatattgagaatgagggcctggaggtgaaatgtgcaaaacccacccctcacactgcagccaaggtttttatcatgttactctgatcatgtttttcaccccctgacattcttcaatgacttactatttctagcacaaaaagctagaacttttggtctggtagatgtggcctttgtgagcttacatcagtttgcttttctggaatctttctctttgctgatctccctcttttctaaacaagttcttctggttcatccagtaatctctttcttttttaaaaatgtggcgacaaggtcttgctctgtcacccaggctggagtgcagtggtatagtcatagctcactgcaacctccagctcctgagctcaagtggtcctcctgcttcagcctcccaaagcagctgggactacaggcatgcaccaccatacccagccctagaaagctctttcttatccctcccttaacctcctcaagttgtgctcacctttctctcacatgcctgggtcggcatttctctcgctgtctcatgattagttatgtttgcctgtctccccacccatcagtgaaatccctgagggcaggggctgtctcattcatctgtggatatggagcgggaccactatgtgccaggccctgtgccagacactgcttatattgtggtgaatcaaacggacagacttcactcttgtgtagcttatgtcagacagacattaagcaaactcacaaatacataaaatatgctcataaaaggcctttatgaagaaaaacacttaagctgagacctggataagtgggagctagccagataaagctgcaggaaatagcattccaggcaaaggaacaaaactggtgcagacccagctgctagaaggagcagagagcatttgaggaggtagaagaaggtgacatgatggacaggttcaccttcccacagagtaaggggtgagtgacccaaggctcaatggatgagcagggtccctgctgaggacttctcttgagtacaatggggagccactgatagctttttaaggggatgaatggtgggatttggtttacatttattattatttgagacagagtctcactcttatcacccaggcaggagtgcagtggtgcgatcaaggcccactgcagtcttgacctcctgggctcaggtgatccttccacctcagcttcctaagtagctgggaccacaggcatgcgccaccatccccaggtttttttgttgttgttgttgttgttttgtatttttggtagagacggggtttcatcatgttgcctaggctgttcttgaactcctgggcttaagtgatctgcctgccttggtctcctaaagtgctgggattataggtgtgagccatggcacccggtcttggtttatattttaaaaagacaactgtgtagctgggcgtggtggtgggtgcctgtaatcccagctactcgagaggccaaggcaggagaattgctagaacctgggggtgtgaaggtttcagtgaactgagatcactccaacctgggcaataaagccagactctgtctc

SEQ ID NO: 14295 - DNA, 4804 bp, Homo sapiens
gtttccggccgccgtcgctgtccagggaggctgaggcgagaggtagctgtccgggtggggagcccgcactaccttcttcctcttcctcctcctcctccgggtgaggggagcgaaggttgggggtccccgagcccatggaccaggaggaggcggaggccgccgagagccggggccccgctatgtggccctgagccccgtgtactggttctgcctgtctggagggccatggagaagaggctgggagtcaagccaaatcctgcttcctggattttatcaggatattattggcagacatctgcgaagtggttgagaagcctgtacctgttttatacttgcttttgcttcagcgttctgtggttgtcaacagatgccagtgagagcaggtgccagcaggggaagacacaatttggagttggcctgagatctgggggagaaaatcacctctggcttcttgaaggaaccccctctctccagtcatgttgggctgcctgctgccaggactctgcctgccatgtcttttggtggctagaagggatgtgcattcaggcagactgcagcaggccccagagctgccgggcttttaggacacactcctccaattccatgctggtgtttttaaaaaaattccaaactgcagatgatttgggctttctacctgaagatgatgtaccacatcttctggggctaggttggaactgggcatcttggaggcagagcccacccagagctgcactcagacctgctgtatcttccagtgaccagcagagcttaatcaggaagcttcagaagagaggtagtcccagtgacgtagttacacctatagtgacacagcattctaaagtgaatgactccaacgaattaggtggtctgactaccagtggctctgcagaggtccacaaggcgattacaatttccagtcccctaaccacagacctgactgcagagctgtctggtgggccaaagaatgtatcagtgcaacctgaaatatcagagggtcttgctactacgcccagcactcaacaagtaaaaagttctgagaaaacccagattgctgtcccccagccagtggctccctcctacagttatgctacccctaccccccaggcctctttccagagcacctcagcaccatacccagttataaaggaactggtggtatctgctggagagagtgtccagataaccctgcctaagaatgaagttcaattaaatgcatatgttctccaagaaccacctaaaggagaaacctacacctacgactggcagctgattactcatcctagagactacagtggagaaatggaagggaaacattcccagatcctcaaactatcgaagctcactccaggcctgtatgaattcaaagtgattgtagagggtcaaaatgcccatggggaaggctatgtgaacgtgacagtcaagccagagccccgtaagaatcggccccccattgctattgtgtcacctcagttccaggagatctctttgccaaccacttctacagtcattgatggcagtcaaagcactgatgatgataaaatcgttcagtaccattgggaagaacttaaggggcctctaagagaagagaagatttctgaagatacagccatattaaaactaagtaaactcgtccctgggaactacactttcagcttgactgtagtagactctgatggagctaccaactctactactgcaaacctgacagtgaacaaagctgtggattacccccctgtggccaacgcaggccccaaccaagtgatcaccctgccccaaaactccatcaccctctttgggaaccagagcactgatgatcatggcatcaccagctatgagtggtcactcagcccaagcagcaaagggaaagtggtggagatgcagggtgttagaacaccaaccttacagctctctgcgatgcaagaaggagactacacttaccagctcacagtgactgacacaataggacagcaggccactgctcaagtgactgttattgtgcaacctgaaaacaataagcctcctcaggcagatgcaggcccagataaagagctgacccttcctgtggatagcacaaccctggatggcagcaagagctcagatgatcagaaaattatctcatatctctgggaaaaaacacagggacctgatggggtgcagctcgagaatgctaacagcagtgttgctactgtgactgggctgcaagtggggacctatgtgttcaccttgactgtcaaagatgagaggaacctgcaaagccagagctctgtgaatgtcattgtcaaagaagaaataaacaaaccacctatagccaagataactgggaatgtggtgattaccctacccacgagcacagcagagctggatggctctaagtcctcagatgacaagggaatagtcagctacctctggactcgagatgaggggagcccagcagcaggggaggtgttaaatcactctgaccatcaccctatcctttttctttcaaacctggttgagggaacctacacttttcacctgaaagtgaccgatgcaaagggtgagagtgacacagaccggaccactgtggaggtgaaacctgatcccaggaaaaacaacctggtggagatcatcttggatatcaacgtcagtcagctaactgagaggctgaaggggatgttcatccgccagattggggtcctcctgggggtgctggattccgacatcattgtgcaaaagattcagccgtacacggagcagagcaccaaaatggtattttttgttcaaaacgagcctccccaccagatcttcaaaggccatgaggtggcagcgatgctcaagagtgagctgcggaagcaaaaggcagactttttgatattcagagccttggaagtcaacactgtcacatgtcagctgaactgttccgaccatggccactgtgactcgttcaccaaacgctgtatctgtgaccctttttggatggagaatttcatcaaggtgcagctgagggatggagacagcaactgtgagtggagcgtgttatatgttatcattgctacctttgtcattgttgttgccttgggaatcctgtcttggactgtgatctgttgttgtaagaggcaaaaaggaaaacccaagaggaaaagcaagtacaagatcctggatgccacggatcaggaaagcctggagctgaagccaacctcccgagcaggcatcaaacagaaaggccttttgctaagtagcagcctgatgcactccgagtcagagctggacagcgatgatgccatctttacatggccagaccgagagaagggcaaactcctgcatggtcagaatggctctgtacccaacgggcagacccctctgaaggccaggagcccgcgggaggagatcctgtagccacctggtctgtctcctcagggcagggcccagcacactgcccggccagtcctcctacctcccgagtctgcgggcagctgctgtcccagcatctgctggtcatttcgccctgacagtcccaaccagaacccctgggacttgaatccagagacgtcctccaggaacccctcaacgaagctgtgaatgaagaggtttcctctttaaacctgtctggtgggcccccagatatcctcacctcagggcctcctttttttgcaaactcctcccctcccccgagggcagacccagccagctgctaagctctgcagctccccagtggacagtgtcattgtgcccagagtgctgcaaggtgaggcctgctgtgctgcccgcacacctgagtgcaaaaccaagcactgtgggcatggtgtttccctctctggggtagagtacgccctctcgctgggcaaagaggaagtggcacccctcccctcaccacagatgctgagatggtagcatagaaatgatggccgggcgcggtggctcacgcctgtaatcccagcactttgggaggccgaggcgggcggatcatgaggtcaggagatcaagaccaccctggctaacacggtgaaaccccatctctactaaaaataaaaaaaaaaattagccgggtttggtggcgtatgcctgtaatcccagctactcgggaggctgaggcaggagaattgcttaaacctgggaggtggaggctgcagtgagccaagatcgtgccactgcactccagcctgagtgacagagcaagactccgtcaaaaaaaaaaaaaaaaaaaaagaaatgatatctggcccccccttaacactggagccccactcccttctcccatccggcccgagattagggaggattgactgtgtcagggatggcgggtggcctctctcgctgccagggcccttgtcagagcagccaggctggacagacggcctccctcctctccatctgaccggcacctgctgcttcggggcttaggccaccgctccctgtccccagaggagatagccccagatggactggaatgttgtggcatgagagcgcatgtgtgcgatggccccgctgtggtcccctctctgtccctccatctgtatgtgttctgtgtcccttgcatgtgtgcgtgttagagtgagcgcgtatgcatcaactcattgggctcttggctgctcacaaggcaaatttgacttggaaagactttcatctccttggaaccaagacttcctgagtccccctcaccctggccctgttccaccatggttatctgggtattggggaatggaaactttgggggagtgactttttaaagagacacttataatttctactactgcactactgtccattgtgggatgattaaacatggtatttaactgtgcaaaaaaaaaaaaaaaaaaaaaaaaaa

SEQ ID NO: 14296 - DNA, 2807 bp, Homo sapiens
caggttgggttctgggacaggtgacccggcggcggggcgaggcagctggcggcgtcgcatggagggctctgggggcggtgcgggcgagcgggcgccgctgctgggcgcgcggcgggcggcggcggccgcggcggcggctggggcgttcgcgggccggcgcgcggcgtgcggggccgtgctgctgacggagctgctggagcgcgccgctttctacggcatcacgtccaacctggtgctattcctgaacggggcgccgttctgctgggagggcgcgcaggccagcgaggcgctgctgctcttcatgggcctcacctacctgggctcgccgttcggaggctggctggccgacgcgcggctgggccgggcgcgcgccatcctgctgagcctggcgctctacctgctgggcatgctggccttcccgctgctggccgcgcccgccacgcgagccgcgctctgcggttccgcgcgcctgctcaactgcacggcgcctggtcccgacgccgccgcccgctgctgctcaccggccaccttcgcggggctggtgctggtgggcctgggcgtggccaccgtcaaggccaacatcacgcccttcggcgccgaccaggttaaagatcgaggtccggaagccactaggagattttttaattggttttattggagcattaacctgggagcgatcctgtcgttaggtggcattgcctatattcagcagaacgtcagctttgtcactggttatgcgatccccactgtctgcgtcggccttgcttttgtggtcttcctctgtggccagagcgttttcatcaccaagcctcctgatggcagtgccttcaccgacatgttcaagatactgacgtattcctgctgttcccagaagcgaagtggagagcgccagagtaatggtgaaggcattggagtctttcagcaatcttctaaacaaagtctgtttgattcatgtaagatgtctcatggtgggccatttacagaagagaaagtggaagatgtgaaagctctggtcaagattgtccctgttttcttggctttgataccttactggacagtgtatttccaaatgcagacaacatatgttttacagagtcttcatttgaggattccagaaatttcaaatattacaaccactcctcacacgctccctgcagcctggctgaccatgtttgatgctgtgctcatcctcctgctcatccctctgaaggacaaactggtcgatcccattttgagaagacatggcctgctcccatcctccctgaagaggatcgccgtgggcatgttctttgtcatgtgctcggcctttgctgcaggaattttggagagtaaaaggctgaaccttgttaaagagaaaaccattaatcagaccatcggcaacgtcgtctaccatgctgccgatctgtcgctgtggtggcaggtgccgcagtacttgctgattgggatcagcgagatctttgcaagtatcgcaggcctggaatttgcatactcagctgcccccaagtccatgcagagtgccataatgggcttgttctttttcttctctggcgtcgggtcgttcgtgggttctggactgctggcactggtgtctatcaaagccatcggatggatgagcagtcacacagactttggtaatattaacggctgctatttgaactattacttttttcttctggctgctattcaaggagctaccctcctgcttttcctcattatttctgtgaaatatgaccatcatcgagaccatcagcgatcaagagccaatggcgtgcccaccagcaggagggcctgaccttcctgaggccatgtgcggtttctgaggctgacatgtcagtaactgactggggtgcactgagaacaggcaagactttaaattcccataaaatgtctgacttcactgaaacttgcatgttgcctggattgatttcttctttccctctatccaaaggagcttggtaagtgccttactgcagcgtgtctcctggcacgctgggccctccgggaggagagctgcagatttcgagtatgtcgcttgtcattcaaggtctctgtgaatcctctagctgggttcccttttttacagaaactcacaaatggagattgcaaagtcttggggaactccacgtgttagttggcatcccagtttcttaaacaaatagtatcacctgcttcccatagccatatctcactgtaaaaaaaaaaaattaataaactgttacttatatttaagaaagtgaggattttttttttttaaagataaaagcatggtcagatgctgcaaggattttacataaatgccatatttatggtttccttcctgagaacagtcttgctcttgccatgttctttgatttaggctggtagtaaacacatttcatctgctgcttcaaaaagtacttactttttaaaccatcaacattacttttctttcttaaggcaaggcatgcataagagtcatttgagaccatgtgtcccatctcaagccacagagcaactcacagggtacttcacaccttacctagtcagagtgcttatatatagctttattttggtacgattgagactaaagactgatcatggttgtatgtaaggaaaacattcttttgaacagaaatagtgtaattaaaaataattgaaagtgttaaatgtgaacttgagctgtttgaccagccacatttttgtattgttactgtacgtgtatctggggcttctccgtttgttaatactttttctgtatttgttgctgtatttttggcataactttattataaaaaaaaaaaaaaaaaaaaaaaaaaaaaaaaaaaaaa

SEQ ID NO: 14297 - DNA, 1912 bp, Homo sapiens
aggggctgggcggggctcgggctcctgctccggctcagctgcggcggccgcaggttccaaagcgggtccgagccgccgccgcgcgcgcgccgcgcactgcagccccaggccccggccccccacccacgtctgcgttgctgccccgcctgggccaggccccaaaggcaaggacaaagcagctgtcagggaacctccgccggagtcgaatttacgtgcagctgccggcaaccacaggttccaagatggtttgcgggggcttcgcgtgttccaagaactgcctgtgcgccctcaacctgctttacaccttggttagtctgctgctaattggaattgctgcgtggggcattggcttcgggctgatttccagtctccgagtggtcggcgtggtcattgcagtgggcatcttcttgttcctgattgctttagtgggtctgattggagctgtaaaacatcatcaggtgttgctatttttttatatgattattctgttacttgtatttattgttcagttttctgtatcttgcgcttgtttagccctgaaccaggagcaacagggtcagcttctggaggttggttggaacaatacggcaagtgctcgaaatgacatccagagaaatctaaactgctgtgggttccgaagtgttaacccaaatgacacctgtctggctagctgtgttaaaagtgaccactcgtgctcgccatgtgctccaatcataggagaatatgctggagaggttttgagatttgttggtggcattggcctgttcttcagttttacagagatcctgggtgtttggctgacctacagatacaggaaccagaaagacccccgcgcgaatcctagtgcattcctttgatgagaaaacaaggaagatttcctttcgtattatgatcttgttcactttctgtaattttctgttaagctccatttgccagtttaaggaaggaaacactatctggaaaagtaccttattgatagtggaattatatatttttactctatgtttctctacatgtttttttctttccgttgctgaaaaatatttgaaacttgtggtctctgaagctcggtggcacctggaatttactgtattcattgtcgggcactgtccactgtggcctttcttagcatttttacctgcagaaaaactttgtatggtaccactgtgttggttatatggtgaatctgaacgtacatctcactggtataattatatgtagcactgtgctgtgtagatagttcctactggaaaaagagtggaaatttattaaaatcagaaagtatgagatcctgttatgttaagggaaatccaaattcccaattttttttggtctttttaggaaagattgttgtggtaaaaagtgttagtataaaaatgataatttacttgtagtcttttatgattacaccaatgtattctagaaatagttatgtcttaggaaattgtggtttaatttttgacttttacaggtaagtgcaaaggagaagtggtttcatgaaatgttctaatgtataataacatttaccttcagcctccatcagaatggaacgagttttgagtaatcaggaagtatatctatatgatcttgatattgttttataataatttgaagtctaaaagactgcatttttaaacaagttagtattaatgcgttggcccacgtagcaaaaagatatttgattatcttaaaaattgttaaataccgttttcatgaaatttctcagtattgtaacagcaacttgtcaaacctaagcatatttgaatatgatctcccataatttgaaattgaaatcgtattgtgtggctctgtatattctgttaaaaaattaaaggacagaaacctttctttgtgtatgcatgtttgaattaaaagaaagtaatggaagaattgatcgatgaaaaaaaaaaaa

SEQ ID NO: 14298 - DNA, 2744 bp, Homo sapiens
ctcgtgccgaattcggcacgagaccgcgtgttcgcgcctggtagagatttctcgaagacaccagtgggcccgtgtggaaccaaacctgcgcgcgtggccgggccgtgggacaacgaggccgcggagacgaaggcgcaatggcgaggaagttatctgtaatcttgatcctgacctttgccctctctgtcacaaatccccttcatgaactaaaagcagctgctttcccccagaccactgagaaaattagtccgaattgggaatctggcattaatgttgacttggcaatttccacacggcaatatcatctacaacagcttttctaccgctatggagaaaataattctttgtcagttgaagggttcagaaaattacttcaaaatataggcatagataagattaaaagaatccatatacaccatgaccacgaccatcactcagaccacgagcatcactcagaccatgagcgtcactcagaccatgagcatcactcagaccacgagcatcactctgaccataatcatgctgcttctggtaaaaataagcgaaaagctctttgcccagaccatgactcagatagttcaggtaaagatcctagaaacagccaggggaaaggagctcaccgaccagaacatgccagtggtagaaggaatgtcaaggacagtgttagtgctagtgaagtgacctcaactgtgtacaacactgtctctgaaggaactcactttctagagacaatagagactccaagacctggaaaactcttccccaaagatgtaagcagctccactccacccagtgtcacatcaaagagccgggtgagccggctggctggtaggaaaacaaatgaatctgtgagtgagccccgaaaaggctttatgtattccagaaacacaaatgaaaatcctcaggagtgtttcaatgcatcaaagctactgacatctcatggcatgggcatccaggttccgctgaatgcaacagagttcaactatctctgtccagccatcatcaaccaaattgatgctagatcttgtctgattcatacaagtgaaaagaaggctgaaatccctccaaagacctattcattacaaatagcctgggttggtggttttatagccatttccatcatcagtttcctgtctctgctgggggttatcttagtgcctctcatgaatcgggtgtttttcaaatttctcctgagtttccttgtggcactggccgttgggactttgagtggtgatgcttttttacaccttcttccacattctcatgcaagtcaccaccatagtcatagccatgaagaaccagcaatggaaatgaaaagaggaccacttttcagtcatctgtcttctcaaaacatagaagaaagtgcctattttgattccacgtggaagggtctaacagctctaggaggcctgtatttcatgtttcttgttgaacatgtcctcacattgatcaaacaatttaaagataagaagaaaaagaatcagaagaaacctgaaaatgatgatgatgtggagattaagaagcagttgtccaagtatgaatctcaactttcaacaaatgaggagaaagtagatacagatgatcgaactgaaggctatttacgagcagactcacaagagccctcccactttgattctcagcagcctgcagtcttggaagaagaagaggtcatgatagctcatgctcatccacaggaagtctacaatgaatatgtacccagagggtgcaagaataaatgccattcacatttccacgatacactcggccagtcagacgatctcattcaccaccatcatgactaccatcatattctccatcatcaccaccaccaaaaccaccatcctcacagtcacagccagcgctactctcgggaggagctgaaagatgccggcgtcgccactttggcctggatggtgataatgggtgatggcctgcacaatttcagcgatggcctagcaattggtgctgcttttactgaaggcttatcaagtggtttaagtacttctgttgctgtgttctgtcatgagttgcctcatgaattaggtgactttgctgttctactaaaggctggcatgaccgttaagcaggctgtcctttataatgcattgtcagccatgctggcgtatcttggaatggcaacaggaattttcattggtcattatgctgaaaatgtttctatgtggatatttgcacttactgctggcttattcatgtatgttgctctggttgatatggtacctgaaatgctgcacaatgatgctagtgaccatggatgtagccgctgggggtatttctttttacagaatgctgggatgcttttgggttttggaattatgttacttatttccatatttgaacataaaatcgtgtttcgtataaatttctagttaaggtttaaatgctagagtagcttaaaaagttgtcatagtttcagtaggtcatagggagatgagtttgtatgctgtactatgcagcgtttaaagttagtgggttttgtgatttttgtattgaatattgctgtctgttacaaagtcagttaaaggtacgttttaatatttaagttattctatcttggagataaaatctgtatgtgcaattcaccggtattaccagtttattatgtaaacaagagatttggcatgacatgttctgtatgtttcagggaaaaatgtctttaatgctttttcaagaactaacacagttattcctatactggattttaggtctctgaagaactgctggtg

SEQ ID NO: 14299 - DNA, 1517 bp, Homo sapiens
attttttgaggaagtagacaaacctaaatatgtgtctgaactccaaggaatatgaacaagatgcctgctggtgaacaagaatgtgaatataacaaagaagggaagtactactctaaaggagttaaactggtgagaaaaaagaaaaaaattcctggttaccgttggggggacattaagataaacatcataggtgaaaaggatgatttaccaattcatttctgtgacaaatgtgatttgcctattaaaatctatgggcgaataattccgtgcaagcatgctttttgctatcactgtgctaatttatatgacaaagtcggatataaagtatgtccgcgctgtcgttatcctgtgctgagaattgaggcgcataaacgaggttctgtcttcatgtgtagtattgttcagcagtgcaagagaacatacttgtctcagaaaagcttacaggctcatatcaaacgccgccataagagagctcgaaaacaagttaccagcgcttcgcttgaaaaagttcgtcctcatattgctccgccacaaactgaaatctctgacatccctaaaagactgcaagacagggaccatctaagctatattccaccagaacagcacaccatggtgtcactaccgtctgtgcaacatatgctacaagagcaacataatcagccacataaggatatccaggctcctcccccagaactatctctaagtctgccttttcccatccagtgggaaaccgttagtatttttacgagaaaacatggcaatttaacagttgatcatattcagaataactcagattctggtgctaagaagccaacacctcccgactattatcctgagtgtcaaagtcaaccagcggtatcgtcccctcatcatattatacctcagaaacagcattatgcgccacctccatctccatcatcaccagtaaaccatcaaatgccatatcctcctcaggatgtagttactcctaactcggttcgtagccaagtgccagctctaaccacgacctacgatccatcatctggatatattattgtaaaggtgccacctgatatgaattctcctccactacgtgctccccagtctcaaaatggtaatccatctgcaagtgaatttgcttctcaccattataaccttaacattttacctcagttcaccgaaaatcaagaaaccttgagccctcagtttacacaaacagatgcaatggatcatagaaggtggcctgcatggaaacgactgtcaccttgtccaccaacgcggagtccacctccttcaaccctacatggtcgatcacatcattcacaccagagaagacatagacggtattaaggatgataacagtatttggaactgaagacctgatgggaaaaaaaccttcaagttctatactgtactgtggataagcggctcagttcagcagagctggagttgaacaactttgttcctctggtgtggtaaattgacctaaaggtgacctctgacgatttcctgaaataaatatgcaatgttacattttc

SEQ ID NO: 14300 - DNA, 3105 bp, Homo sapiens
ccccaggtccggacaggccgagatgacgccgagccccctgttgctgctcctgctgccgccgctgctgctgggggccttcccgccggccgccgccgcccgaggccccccaaagatggcggacaaggtggtcccacggcaggtggcccggctgggccgcactgtgcggctgcagtgcccagtggagggggacccgccgccgctgaccatgtggaccaaggatggccgcaccatccacagcggctggagccgcttccgcgtgctgccgcaggggctgaaggtgaagcaggtggagcgggaggatgccggcgtgtacgtgtgcaaggccaccaacggcttcggcagcctgagcgtcaactacaccctcgtcgtgctggatgacattagcccagggaaggagagcctggggcccgacagctcctctgggggtcaagaggaccccgccagccagcagtgggcacgaccgcgcttcacacagccctccaagatgaggcgccgggtgatcgcacggcccgtgggtagctccgtgcggctcaagtgcgtggccagcgggcaccctcggcccgacatcacgtggatgaaggacgaccaggccttgacgcgcccagaggccgctgagcccaggaagaagaagtggacactgagcctgaagaacctgcggccggaggacagcggcaaatacacctgccgcgtgtcgaaccgcgcgggcgccatcaacgccacctacaaggtggatgtgatccagcggacccgttccaagcccgtgctcacaggcacgcaccccgtgaacacgacggtggacttcggggggaccacgtccttccagtgcaaggtgcgcagcgacgtgaagccggtgatccagtggctgaagcgcgtggagtacggcgccgagggccgccacaactccaccatcgatgtgggcggccagaagtttgtggtgctgcccacgggtgacgtgtggtcgcggcccgacggctcctacctcaataagctgctcatcacccgtgcccgccaggacgatgcgggcatgtacatctgccttggcgccaacaccatgggctacagcttccgcagcgccttcctcaccgtgctgccagacccaaaaccgccagggccacctgtggcctcctcgtcctcggccactagcctgccgtggcccgtggtcatcggcatcccagccggcgctgtcttcatcctgggcaccctgctcctgtggctttgccaggcccagaagaagccgtgcacccccgcgcctgcccctcccctgcctgggcaccgcccgccggggacggcccgcgaccgcagcggagacaaggaccttccctcgttggccgccctcagcgctggccctggtgtggggctgtgtgaggagcatgggtctccggcagccccccagcacttactgggcccaggcccagttgctggccctaagttgtaccccaaactctacacagacatccacacacacacacacacacactctcacacacactcacacgtggagggcaaggtccaccagcacatccactatcagtgctagacggcaccgtatctgcagtgggcacgggggggccggccagacaggcagactgggaggatggaggacggagctgcagacgaaggcaggggacccatggcgaggaggaatggccagcaccccaggcagtctgtgtgtgaggcatagcccctggacacacacacacagacacacacactgcctggatgcatgtatgcacacacatgcgcgcacacgtgctccctgaaggcacacgtacgcacacacgcacatgcacagatatgccgcctgggcacacagataagctgcccaaatgcacgcacacgcacagagacatgccagaacatacaaggacatgctgcctgaacatacacacgcacacccatgcgcagatgtgctgcctggacacacacacacacacggatatgctgtctggacgcacacacgtgcagatatggtatccggacacacacgtgcacagatatgctgcctggacacacagataatgctgccttgacacacacatgcacggatattgcctggacacacacacacacacgtgtgcacagatatgctgtctggacacgcacacacatgcagatatgctgcctggacacacacttccagacacacgtgcacaggcgcagatatgctgcctggacacacgcagatatgctgtctagtcacacacacacgcagacatgctgtccggacacacacacgcatgcacagatatgctgtccggacacacacacgcacgcagatatgctgcctggacacacacacagataatgctgcctcaacactcacacacgtgcagatattgcctggacacacacatgtgcacagatatgctgtctggacatgcacacacgtgcagatatgctgtccggatacacacgcacgcacacatgcagatatgctgcctgggcacacacttccggacacacatgcacacacaggtgcagatatgctgcctggacacacgcagactgacgtgcttttgggagggtgtgccgtgaagcctgcagtacgtgtgccgtgaggctcatagttgatgagggactttccctgctccaccgtcactcccccaactctgcccgcctctgtccccgcctcagtccccgcctccatccccgcctctgtcccctggccttggcggctatttttgccacctgccttgggtgcccaggagtcccctactgctgtgggctggggttgggggcacagcagccccaagcctgagaggctggagcccatggctagtggctcatccccactgcattctccccctgacacagagaaggggccttggtatttatatttaagaaatgaagataatattaataatgatggaaggaagactgggttgcagggactgtggtctctcctggggcccgggacccgcctggtctttcagccatgctgatgaccacaccccgtccaggccagacaccaccccccaccccactgtcgtggtggccccagatctctgtaattttatgtagagtttgagctgaagccccgtatatttaatttattttgttaaacatgaaagtgcatcctttccctccaaaaaaaaaaaaaaaaaa

SEQ ID NO: 14301 - DNA, 2109 bp, Homo sapiens
gggggcaacggtcacctgatctgcggctgtcgaggccgctgaggcagtggaggctgaggctatgatggcggccatggcgacggctcgagtgcggatggggccgcgatgcgcccaggcgctctggcgcatgccgtggctgccggtgtttttgtcgttggcggcggcggcggcggcggcagcggcggagcagcaggtcccgctggtgctgtggtcgagtgaccgggacttgtgggctcctgcggccgacactcatgaaggccacatcaccagcgacttgcagctctctacctacttagatcccgccctggagctgggtcccaggaatgtgctgctgttcctgcaggacaagctgagcattgaggatttcacagcatatggcggtgtgtttggaaacaagcaggacagcgccttttctaacctagagaatgccctggacctggccccctcctcactggtgcttcctgccgtcgactggtatgcagtcagcactctgaccacttacctgcaggagaagctcggggccagccccttgcatgtggacctggccaccctgcgggagctgaagctcaatgccagcctccctgctctgctgctcattcgcctgccctacacagccagctctggtctgatggcacccagggaagtcctcacaggcaacgatgaggtcatcgggcaggtcctgagcacactcaagtccgaagatgtcccatacacagcggccctcacagcggtccgcccttccagggtggcccgtgatgtagccgtggtggccggagggctaggtcgccagctgctacaaaaacagccagtatcacctgtgatccatcctcctgtgagttacaatgacaccgctccccggatcctgttctgggcccaaaacttctctgtggcgtacaaggaccagtgggaggacctgactcccctcacctttggggtgcaggaactcaacctgactggctccttctggaatgactcctttgccaggctctcactgacctatgaacgactctttggtaccacagtgacattcaagttcattctggccaaccgcctctacccagtgtctgcccggcactggtttaccatggagcgcctcgaagtccacagcaatggctccgtcgcctacttcaatgcttcccaggtcacagggcccagcatctactccttccactgcgagtatgtcagcagcctgagcaagaagggtagtctcctcgtggcccgcacgcagccctctccctggcagatgatgcttcaggacttccagatccaggctttcaacgtaatgggggagcagttctcctacgccagcgactgtgccagcttcttctcccccggcatctggatggggctgctcacctccctgttcatgctcttcatcttcacctatggcctgcacatgatcctcagcctcaagaccatggatcgctttgatgaccacaagggccccactatttctttgacccagattgtgtgaccctgtgccagtgggggggttgagggtgggacggtgtccgtgttgttgctttcccaccctgcagcgcactggactgaagagcttccctcttcctactgcagcatgaactgcaagctcccctcagcccatcttgctccctcttcagcccgctgaggagctttcttgggctgcccccatctctcccaacaaggtgtacatattctgcgtagatgctagaccaaccagcttcccagggttcgtcgctgtgaggcgtaagggacatgaattctagggtctcctttctccttatttattcttgtggctacatcatccctggctgtggatagtgcttttgtgtagcaaatgctccctccttaaggttatagggctccctgagtttgggagtgtggaagtactacttaactgtctgtcctgcttggctgtcgttatcgttttctggtgatgttgtgctaacaataagaagtacacgggtttatttctgtggcctgagaaggaagggacctccacgacaggtgggctgggtgcgatcgccggctgtttggcatgttcccaccgggagtgccgggcaggagcatggggtgcttggttgtttccttcctaataaaataaacgcgggtcgccatgcaaaaaaaaaa

SEQ ID NO: 14302 - DNA, 1522 bp, Homo sapiens
ggttgcggcgggcggaacggtgtctccttcacttcgccctccagctgctgcagctgcagcccgaccgcgagcgtgccaagcggcttcagcagctagcggagcggtggcggcggcccccctcaggacaccaccagattcccctcttcccgcggcctcgccatggcgacccacggacagacttgcgcgcgtccaatgtgtattcctccatcatatgctgaccttggcaaagctgccagagatattttcaacaaaggatttggttttgggttggtgaaactggatgtgaaaacaaagtcttgcagtggcgtggaattttcaacgtccggttcatctaatacagacactggtaaagttactgggaccttggagaccaaatacaagtggtgtgagtatggtctgactttcacagaaaagtggaacactgataacactctgggaacagaaatcgcaattgaagaccagatttgtcaaggtttgaaactgacatttgatactaccttctcaccaaacacaggaaagaaaagtggtaaaatcaagtcttcttacaagagggagtgtataaaccttggttgtgatgttgactttgattttgctggacctgcaatccatggttcagctgtctttggttatgagggctggcttgctggctaccagatgacctttgacagtgccaaatcaaagctgacaaggaataactttgcagtgggctacaggactggggacttccagctacacactaatgtcaacgatgggacagaatttggaggatcaatttatcagaaagtttgtgaagatcttgacacttcagtaaaccttgcttggacatcaggtaccaactgcactcgttttggcattgcagctaaatatcagttggatcccactgcttccatttctgcaaaagtcaacaactctagcttaattggagtaggctatactcagactctgaggcctggtgtgaagcttacactctctgctctggtagatgggaagagcattaatgctggaggccacaaggttgggctcgccctggagttggaggcttaatccagctgaaagaaacctttgggaatggatatcagaagatttggccttaatatatttccattgtgaccagcagcaggcttttttcccccaagaagatgatcaaaacaaaggatgatctcaacaagagctgtattttaagtatttagacagttctttgttagctggtttctagttggttatctagttaccaatgctgcagtcctgcagtcacctatacattatttaaatgtatttaactgttaaatgcgctacccaccaataatgaaatagacctttatgaaaactgtgcaattgtgtgcatgtttgtttttatgttcctttagaaaacattgactgttaccattgaatgagatggatcagtggatattaagatgaggttacaaattttgttaagttcagccattattacttttggtatcccagaacatgacaaattatgaataaaacaagtatacataaaaaaaaaaaaaaaaaaaaa

SEQ ID NO: 14303 - DNA, 4080 bp, Homo sapiens
tttttttttttttttacagctgttcctgctgattgctttttaagctaggctcaagtgtggggccacggaatccttcaggtgcccttcaaatcagacattacatttcagctctcagggctagaatgcttccccctcttatcttgggcaggtctttgaagaagccagtttagccttggtaattttgaatttggccatagtatacggaggagagctaggtagctatcaaaacgcttagacaaacgtatggtaaaatgcagcccagcctgaacctccgcaaaacccccaaacctggagcagcaagtgggcaaaggagtgtgtgtttggggcagggtactgagtcccatatgtaatcaagagacctggagggcccaaggaagtcagtgacacccccacaagctacatatcctccaatggattgtggtggtcatctccggctaccgaagccaccttgcttattcccataggcttacaaacattatgatgcttcacacgagttgtgggtgaagtgaaggaattggaaagtcccggtctaaggccctgcaaaactgctgtctggtaaaaacaagtgactatggcaaggccctgaatgtactacgtatagacttaagtcagtatttgtgcctaacagcaaagcatgccacaagaggctcctcaaaagccgggtaattgatgccattgttttcttgacctagttgaagagtcaaagaagagaaggtgatgcagaaacttctttccagtgaagtgacagatccaagcaaggaacacctgcctgtgaggggagcggtaggggagggggtagattcggcagcactcgggtagtggcagggaccacatattgtcggtgttaaccactgttatcactggcccaggtcgagtgaggacgagtcatttccccactaagcacttggggagtggcagggaccacatattgtcagtgttaaccactgttatgactggcccaggtcgggtgacgacgagccatttccgcactattgtcccttcttcctcactgcacccccagccctgcaccctcagctccaaatacacattctcgttcactcaacgtttgttgacacctagcgtgggccctgtgggatggggtaaaagttcggtgttgggaggagccccggtgacagatttttggttttggtggtggcttttgggcaaggacaggtcagttcataaaagatgacgccccaggtctggatcgaattctcctgggagccagaccaaagcaccttcctggactgcaaagtgtggaagccgccgcgggccgggcgcggggaggtgtcatgcgccggaacctgcgcttggggccaagctctggagctgacgcgcaggggcaaggcgccccgcgtcccggactggcggctccgcgcatgctcctcccaccggcgtcgcaggcctcgagaggctccggaagtactgggtgcagcctgatggcgcaggaggtagacacggcacagggcgccgagatgcggcggggcgcgggcgcggctcggggacgcgcttcctggtgctgggccctggcgctgctttggctcgcggtggttccgggctggtcccgggtctcgggcatcccctcccggcgccactggccggtgccctacaagcgctttgacttccgtccaaaacctgatccttattgtcaagctaagtatactttctgtccaactggctcacctatcccagttatggagggtgatgatgacattgaagtttttcgattacaagccccagtatgggaatttaaatatggagacctcctgggacacttgaaaattatgcatgatgccattggattcagaagtacattaactggcaagaactacacaatggaatggtatgaacttttccaacttggcaactgtacatttccccatctccgacctgaaatggatgcccctttctggtgtaatcaaggcgctgcctgcttttttgagggaattgatgatgttcactggaaggaaaatgggacattagttcaagtagcaactatatcaggaaacatgttcaaccaaatggcaaagtgggtgaaacaggacaatgaaacaggaatttattatgagacatggaatgtaaaagccagcccagaaaagggggcagagacatggtttgattcctacgactgttccaaatttgtgttaaggacctttaacaagttggctgaatttggagcagagttcaagaacatagaaaccaactatacaagaatatttctttacagtggagaacctacttatctgggaaatgaaacatctgtttttgggccaacaggaaacaagactcttggtttagccataaaaagattttattaccccttcaaaccacatttgccaactaaagaatttctgttgagtctcttgcaaatttttgatgcagtgattgtgcacaaacagttctatttgttttataattttgaatattggtttttacctatgaaattcccttttattaaaataacatatgaagaaatccctttacctatcagaaacaaaacactctctggtttataaaacaccttaattctactgctcttttttctccaatcaccagcatctgtttttcagggggtgattttacttttgtgaattccttagcctttcttccttggtgcataaagttaaaatgcacatcagcagaattgctgcatattaacatctcaggactcttctcttgtaaagaagctgaaattcgtactatattggccaaagtgagcgagttaggtgatcttggtttcaatttccgagcctttgttaatatggagaattatggttcatatcagttatgtaggacctttggacccagggtcctacagatagatatggtgtgcccagattttaaaaataccttcaaaaataaaaaatacattcagtgacattttcatggtgggagctcttctttctgatatggcagttacactttttcacttaagtgctttagtttagactaactttacaacttctataacttttggaaccaagtttagtatagtctgattacattccattcacctaactttagacattcgtttagacaccataactggagtgattgtgcttctagatgtggcaaatccagtgttaacacatatttctggctgagattttggaactagctagtaactggcttgtgttctttaagcatactaacatcactaaatcttaggatttaggattgctgtaaagatgtaagttgtgtatgtttggcaggtcacattgaatggcagtgataatgattaatcaaagaacaaatgtcatccttgatcttgcctaatgtagtttatgtgccaaactttccagggttttgtagtcacctagattttaagctgatagcatagtgcttcagcggttcttctaaccggggtatgcaggaacatggctgcagacacgtttgggtaaacaggcaccttctgacttcttcattgtttcctgtagttctccctcttcccacaaagctgtcagcgcagtggaagaggttgcacttctccgagagaggacaggtttctgttaagatcaccaagtagctgtgctttaattagagccagacaagctttcaaggtcctttaagtatttgatgatcaactgaacacgtttctattcaaggagaaaacaccattcagtaagaagatggagtagatatcagataaaacaattcacgtttaatatgtaaatgtaccaattatgtgattcagtttcaactttcaagtacttcctgagaggttagtacattattattgagctctcacagaaagcttaatcatagatataattaacctgatccaaatgagtaaagtggaccttagaaaggctaagtgatctttctctggctatccagctagtagtaatgaagtcaggtcttgaaccccggttctgctgactgaattggatgcactatagtacaggcttttagcaccgaagtgtggtcctcagaccagtgcctgccaaccagatgttactggtctgtgaggaaataagtacagatactgacaggaagcttttataaacaatttattggagtgtttttgtttctgttgggtctaattaaaaaaattggagcttgtaaaaaaaaaaaaaaaaa

SEQ ID NO: 14304 - DNA, 2935 bp, Homo sapiens
gtgagggggcgcggtcaccgcccagggttcccacgaacgccaaggcggccacgtcctgctccccctggtgaagaagctgccctgggcttgtcgtcctagggtctccagacatgtctgaggtgaagagccggaagaagtcggggcccaagggagcccctgctgcggagcccgggaagcggagcgagggcgggaagacccccgtggcccggagcagcggaggcgggggctgggcagacccccgaacgtgcctgagcctgctgtcgctggggacgtgcctgggcctggcctggtttgtatttcagcagtcagaaaaatttgcaaaggtggaaaaccaataccagttactgaaactagaaaccaatgaattccaacaacttcaaagtaaaatcagtttaatttcagaaaagcttgagtctactgaaagcatcctgcaggaagctacatcatccatgtctttgatgacccagtttgagcaggaagtatccaacctccaagatatcatgcatgacattcaaaataatgaagaggtgctcactcaaaggatgcaaagccttaatgagaaatttcagaatattacggatttctggaagagaagcctagaagaaatgaacattaatacagacattttcaaatcagaagcaaaacatatacattctcaagtaactgtccaaattaactcagctgagcaggaaataaaattgctcactgaacggctaaaagatttggaagatagcacactaagaaatattagaacagtaaaaagacaagaagaagaagatctcctgcgagtagaggagcagctaggctctgatacaaaggcaattgaaaagttagaagaggaacagcatgccctctttgccagagatgaagatctgactaataaactttccgactacgaacccaaagttgaagaatgcaagacacatttgccaacaattgaaagtgctattcactctgttctcagagtctctcaggatctgatagaaacagaaaagaaaatggaagacttgactatgcagatgtttaatatggaagatgatatgctgaaagcagtgtctgaaataatggagatgcagaaaacccttgaaggaattcagtatgataatagcatattaaagatgcaaaatgaactggatattctaaaagaaaaagttcatgattttatagcatactcaagtacaggagaaaagggaactttaaaagaatataatatagaaaataaaggaattggtggtgatttttaaattcatgacatttattctgatgaaccatatcattatacataaattgattagtccattgattttgagttactttgatacgcctcatcttatcctacattattggaaaataaatgagatgtccacacaaatggattatccacataatcaaagcttatctttttaagcactaaaacttacttcattgtaactatttgaaatagaaatagttctttaaaaatatttctctacttttaaaacaggatacttaatatttttaatgttttttaaagcattaatggacatcatcattaatttcacctattatattgtacccacatatattgatgtctccaggggctaataaagagtatttaccacttcactaaatgaccccaatttgccattttcaaacctatgtctcataccttttctgtcacctgaacttactgtcaggttggttggtaatgtgcctgcctcagccagttcactttcttaggtaattcactgcaggttaagaatccacacaaccaagttcatgggaattttgtgtaaaataaaagataacatgcctgagggagagcctggtgcctttgctatgaattaatatgcactttctgaaaactctaaagcctgggaaacattttagtttttgttaaggttctaaactgtgttacagatacttgtaagacttttaaaatcagagtaagtatgttcttacataaggcctttcttaggaattatgtgtatataaatctttgaaatatctttatatacctgagttttaggttccaactgtgttagacatgagtttgctagatccatggtctctagatggtttacttaaataggccaggcgcagtggctcacacctgtaatcctagcactttgggaggccgaggtgggcagatcacgaagtcaggagatcaagaccatctggctaacagggtgaaaccctgtctctactaaaaaatacaaaaaattagccaggcgtggtggtgggtgcctgtagtcccagctactcaggaggctgaggcaggagaatggtgtgaacccgggaggcagagcttgcagtgagccgagatcgcgccactgcactccagcctgagtggcaaagtgagactctgtctcaataaataaataaataaataaaaataagcctgtggcctgttttgagggaaaagtaacataactctgataattaattatgataataactatgatagttaaaaatacgtcattttaaagatttcccaaaccacaccactaaatttgttttatgaattgattttattttatttgaaattatataatgtagtcaactgcaatatggaagtttgttcttgtttctttgtcaataaccttaccagttttataatgcagtttttgatggaattaaacacaaagaacttgaaagcagtcagttacaaaaaggtagttgtggtcaagtagttttaatatgtaaatttgcaagtttttggagaacccccaaactccttctccactggagttaggagggcctgtggtagacagcgtgaatcatgaaaataagcctggagagttctgttattaaggggcatagcattaatttttgcagtcttaaaattacacttcttgacttctgaatgtctcttatttgcgtgcactgacaaaattctatttgtttacttttatattaatggtaataaaatagattataaagaaaaaaaaaaaaa

SEQ ID NO: 14305 - DNA, 2500 bp, Homo sapiens
gttcgccatgcgtcccggggcgccagggccactctggcctctgccctggggggccctggcttgggccgtgggcttcgtgagctccatgggctcggggaaccccgcgcccggtggtgtttgctggctccagcagggccaggaggccacctgcagcctggtgctccagactgatgtcacccgggccgagtgctgtgcctccggcaacattgacaccgcctggtccaacctcacccacccggggaacaagatcaacctcctcggcttcttgggccttgtccactgccttccctgcaaagattcgtgcgacggcgtggagtgcggcccgggcaaggcgtgccgcatgctggggggccgcccgcgctgcgagtgcgcgcccgactgctcggggctcccggcgcggctgcaggtctgcggctcagacggcgccacctaccgcgacgagtgcgagctgcgcgccgcgcgctgccgcggccacccggacctgagcgtcatgtaccggggccgctgccgcaagtcctgtgagcacgtggtgtgcccgcggccacagtcgtgcgtcgtggaccagacgggcagcgcccactgcgtggtgtgtcgagcggcgccctgccctgtgccctccagccccggccaggagctttgcggcaacaacaacgtcacctacatctcctcgtgccacatgcgccaggccacctgcttcctgggccgctccatcggcgtgcgccacgcgggcagctgcgcaggcacccctgaggagccgccaggtggtgagtctgcagaagaggaagagaacttcgtgtgagcctgcaggacaggcctgggcctggtgcccgaggccccccatcatcccctgttatttattgccacagcagagtctaatttatatgccacggacactccttagagcccggattcggaccacttggggatcccagaacctccctgacgatatcctggaaggactgaggaagggaggcctgggggccggctggtgggtgggatagacctgcgttccggacactgagcgcctgatttagggcccttctctaggatgccccagcccctaccctaagacctattgccggggaggattccacacttccgctcctttggggataaacctattaattattgctactatcaagagggctgggcattctctgctggtaattcctgaagaggcatgactgcttttctcagccccaagcctctagtctgggtgtgtacggagggtctagcctgggtgtgtacggagggtctagcctgggtgagtacggagggtctagcctgggtgagtacggagggtctagcctgggtgagtacggagagtctagcctgggtgtgtatggaggatctagcctgggtgagtatggagggtctagcctgggtgagtatggagggtctagcctgggtgtgtatggagggtctagcctgggtgagtatggagggtctagcctgggtgtgtatggagggtctagcctgggtgagtatggagggtctagcctgggtgtgtacggagggtctagtctgagtgcgtgtggggacctcagaacactgtgaccttagcccagcaagccaggcccttcatgaaggccaagaaggctgccaccattccctgccagcccaagaactccagcttccccactgcctctgtgtgcccctttgcgtcctgtgaaggccattgagaaatgcccagtgtgccccctgggaaagggcacggcctgtgctcctgacacgggctgtgcttggccacagaaccacccagcgtctcccctgctgctgtccacgtcagttcatgaggcaacgtcgcgtggtctcagacgtggagcagccagcggcagctcagagcagggcactgtgtccggcggagccaagtccactctgggggagctctggcggggaccacgggccactgctcacccactggccccgaggggggtgtagacgccaagactcacgcatgtgtgacatccggagtcctggagccgggtgtcccagtggcaccactaggtgcctgctgcctccacagtggggttcacacccagggctccttggtcccccacaacctgccccggccaggcctgcagacccagactccagccagacctgcctcacccaccaatgcagccggggctggcgacaccagccaggtgctggtcttgggccagttctcccacgacggctcaccctcccctccatctgcgttgatgctcagaatcgcctacctgtgcctgcgtgtaaaccacagcctcagaccagctatggggagaggacaacacggaggatatccagcttccccggtctggggtgaggagtgtggggagcttgggcatcctcctccagcctcctccagcccccaggcagtgccttacctgtggtgcccagaaaagtgcccctaggttggtgggtctacaggagcctcagccaggcagcccaccccaccctggggccctgcctcaccaaggaaataaagactcaaagaagccttttttttttttttttt

SEQ ID NO: 14306 - DNA, 2269 bp, Homo sapiens
ccagttccggcacgaggaccatgggccggctgctgcgggccgcccggctgccgccgctgctttcgccgctgctgcttctgctggttgggggagcgttcctgggtgcctgtgtggctgggtctgatgagcctggcccagagggcctcacctccacctccctgctagacctcctgctgcccactggcttggagccactggactcagaggagcctagtgagaccatgggcctgggagctgggctgggagcccctggctcaggcttccccagcgaagagaatgaagagtctcggattctgcagccaccacagtacttctgggaagaggaggaagagctgaatgactcaagtctggacctgggacccactgcagattatgtttttcctgacttaactgagaaggcaggttccattgaagacactagccaggctcaagagctgccaaacctcccctctcccttgcccaagatgaatctggttgagcctccctggcatatgcctcccagagaggaggaagaagaggaagaggaagaggaggagagggagaaggaagaggtagagaaacaagaggaggaggaagaggaggagctgctccctgtgaatggatcccaagaagaagccaagcctcaggtccgtgacttttctctcaccagcagcagccagaccccaggggccaccaaaagcaggcatgaagactccggggaccaggcctcatcaggtgtggaggtggagagcagcatggggcccagcttgctgctgccttcagtcaccccaactacagtgactccgggggaccaggactccaccagccaagaggcagaggccacagtgctgccagctgcagggcttggggtagagttcgaggctcctcaggaagcaagcgaggaagccactgcaggagcagctggtttgtctggccagcacgaggaggtgccggccttgccttcattccctcaaaccacagctcccagtggggccgagcacccagatgaagatccccttggctctagaacctcagcctcttccccactggcccctggagacatggaactgacaccttcctctgctaccttgggacaagaagatctcaaccagcagctcctagaagggcaggcagctgaagctcaatccaggataccctgggattctacgcaggtgatctgcaaggactggagcaatctggctgggaaaaactacatcattctgaacatgacagagaacatagactgtgaggtgttccggcagcaccgggggccacagctcctggccctggtggaagaggtgctgccccgccatggcagtggccaccatggggcctggcacatctctctgagcaagcccagcgagaaggagcagcaccttctcatgacactggtgggcgagcagggggtggtgcccactcaagatgtcctttccatgctgggtgacatccgcaggagcctggaggagattggcatccagaactattccacaaccagcagctgccaggcgcgggccagccaggtgcgcagcgactacggcacgctcttcgtggtgctggtggtcattggggccatctgcatcatcatcattgcgcttggcctgctctacaactgctggcagcgccggctgcccaagctcaagcacgtgtcgcacggcgaggagctgcgcttcgtggagaacggctgccacgacaaccccacgctggacgtggccagcgacagccagtcggagatgcaggagaagcaccccagcctgaacggcggcggggccctcaacggcccggggagctggggggcgctcatggggggcaagcgggaccccgaggactcggacgtgttcgaggaggacacgcacctgtgagcgcagcgaggcgcaggccgagtgggccgccaggaccaagcgaggtggaccccgaaacggacggcccggagcccgcaccagccccgcgcctacccggccgcccccgcgcctggccctcggcgcgggctccttcccgcttcccccgacttcacacggcggcttcggaccaactccctcactcccgcccgaggggcaggcctcaaagcccgccttggccccgctttcccgcccctgaaccccggccccgcgggcggcgggcgcgcttcctgcgccccgggactcaattaaacccgcccggagaccacgcgggcccagcgaaaaaaaaaaaaaaaaaaaaaaaaaaaaaaaaaaaaaaaaaaaaaaaaaaaaaaaaaaaaaaaaaaaaaaaaaaaaaaaaaaaaaaaaaaaaaaaaaaaaaaaaaaaaaaaaaa

SEQ ID NO: 14307 - DNA, 2176 bp, Homo sapiens
tgcaggtgccgggccgggagcgagcggcggcggcggcggcggcggcaccatgggccgggcccggcgcttccagtggccgctgctgctgctgtgggcggccgcggcggggccaggggcaggacaggaagtacagacagagaacgtgacagtggctgagggtggggtggctgagatcacctgccgtctgcaccagtatgatgggtccatagttgtcatccagaacccagcccggcagaccctcttcttcaatggcacccgtgccttgaaggatgagcgtttccagcttgaggagttctccccacgccgggtgcggatccggctctcagatgcccgcctggaggacgaggggggctatttctgccagctctacacagaagacacccaccaccagattgccacgctcacggtactagtggccccagagaatcctgtggtggaggtccgggagcaggcggtagagggcggcgaggtggagctcagctgcctcgttccgcggtcccgtccggctgccaccctgcgctggtaccgggaccgcaaggagctgaaaggagtgagcagcagccaggaaaatggcaaggtctggagcgtggcaagcacagtacggtttcgtgtggaccgtaaggacgacggtggtatcatcatctgtgaggcgcagaaccaggcgctgccctccggacacagcaagcagacgcagtacgtgctggatgtgcagtactcccccacggcccggattcatgcctcccaagctgtggtgagggagggagacacgctggtgttgacgtgtgctgtcacggggaaccccaggccaaaccagatccgctggaaccgcgggaatgagtctttgccggagagggcggaggccgtgggagagacgctcacgctgccgggtctggtatccgcggataacggcacctacacttgcgaggcgtccaataagcacggccatgcgagggcgctctacgtacttgtggtctacgaccctggtgcggtggtagaggctcagacgtcggttccctatgccattgtgggcggcatcctggcgctgctggtgtttctgatcatatgtgtgctagtgggcatggtctggtgctcggtacggcagaagggttcctatctgacccacgaagccagtggcttggatgaacagggagaagcaagagaagccttcctcaatggcagcgacggacacaagaggaaagaggaattcttcatctgaccctatccccaccccaggcctaggcctgggcctgggctggggtcccccccactgccagctgcaaggaaccagcaaagacatttaccagagtctgggatggtgggcttctccccccaccactaacacctcagacgcttgggcagggatgggggtgttggatgcctggatctctgtaagggccagaagtgagggcccagaggtctgggtcccccagggggcaggggccaaaggtccagaccccccaagtccagtgagggcagtagggattgggttgggggaagataactgggggaaggccagggcccctaggctacaaaaccaggtcttgtggggagggggtcagtttctgggaagggtggggggggcagggaaggggaacacagatttctttgggggtcctagaccccatgccagccattgtaagagttccacagagctctgggcacttctttgcaaagccatgtttgcacggtggggggatgggtggggggagggcgtggaaatagggattctgtgtctttgtgtcataactttgatgggggcagtgagggagacagccccaacccttttctccaatcccccttccccaggttcctgggctccccttctctctaccttctcccccaacgtctgtcccatccatatttgtctctctgtccacccactcctgggggggccttccccatctctcctccaggccccccggggagggggaaaggagtttggggaggattcgtggtcttcatggttttatatataatatattaaaaaatcaaaagtctgtatgaaaatatcagattgcacccccctctccccattcctggcttttgccccctttttcttgttaaaaaacaaaaaacaaaaaacaaaaaaccacacacacattttgtacggggtggggaggggaatggggagggggtttggcaatctcactaaccaccattaaactgaggagagaac

SEQ ID NO: 14308 - DNA, 6017 bp, Homo sapiens
gggcggggctcgggccggtccgcccgcgcgcaggtgagtgagccagggcggagcgcagctgcgccgggcttgggcgcctggggccgccgctccccaccgtcgttttccccaccgaggccgaggcgtcccggagtcatggccggcctgaactgcggggtctctatcgcactgctaggggttctgctgctgggtgcggcgcgcctgccgcgcggggcagaagcttttgagattgctctgccacgagaaagcaacattacagttctcataaagctggggaccccgactctgctggcaaaaccctgttacatcgtcatttctaaaagacatataaccatgttgtccatcaagtctggagaaagaatagtctttacctttagctgccagagtcctgagaatcactttgtcatagagatccagaaaaatattgactgtatgtcaggcccatgtccttttggggaggttcagcttcagccctcgacatcgttgttgcctaccctcaacagaactttcatctgggatgtcaaagctcataagagcatcggtttagagctgcagttttccatccctcgcctgaggcagatcggtccgggtgagagctgcccagacggagtcactcactccatcagcggccgaatcgatgccaccgtggtcaggatcggaaccttctgcagcaatggcactgtgtcccggatcaagatgcaagaaggagtgaaaatggccttacacctcccatggttccaccccagaaatgtctccggcttcagcattgcaaaccgctcatctataaaacgtctgtgcatcatcgagtctgtgtttgagggtgaaggctcagcaaccctgatgtctgccaactacccagaaggcttccctgaggatgagctcatgacgtggcagtttgtcgttcctgcacacctgcgggccagcgtctccttcctcaacttcaacctctccaactgtgagaggaaggaggagcgggttgaatactacatcccgggctccaccaccaaccccgaggtgttcaagctggaggacaagcagcctgggaacatggcggggaacttcaacctctctctgcaaggctgtgaccaagatgcccaaagtccagggatcctccggctgcagttccaagttttggtccaacatccacaaaatgaaagcaataaaatctacgtggttgacttgagtaatgagcgagccatgtcactcaccatcgagccacggcccgtcaaacagagccgcaagtttgtccctggctgtttcgtgtgtctagaatctcggacctgcagtagcaacctcaccctgacatctggctccaaacacaaaatctccttcctttgtgatgatctgacacgtctgtggatgaatgtggaaaaaaccataagctgcacagaccaccggtactgccaaaggaaatcctactcactccaggtgcccagtgacatcctccacctgcctgtggagctgcatgacttctcctggaagctgctggtgcccaaggacaggctcagcctggtgctggtgccagcccagaagctgcagcagcatacacacgagaagccctgcaacaccagcttcagctacctcgtggccagtgccatacccagccaggacctgtacttcggctccttctgcccgggaggctctatcaagcagatccaggtgaagcagaacatctcggtgacccttcgcacctttgcccccagcttccaacaagaggcctccaggcagggtctgacggtgtcctttataccttatttcaaagaggaaggcgttttcacggtgacccctgacacaaaaagcaaggtctacctgaggacccccaactgggaccggggcctgccatccctcacctctgtgtcctggaacatcagcgtgcccagagaccaggtggcctgcctgactttctttaaggagcggagcggcgtggtctgccagacagggcgcgcattcatgatcatccaggagcagcggacccgggctgaggagatcttcagcctggacgaggatgtgctccccaagccaagcttccaccatcacagcttctgggtcaacatctctaactgcagccccacgagcggcaagcagctagacctgctcttctcggtgacacttaccccaaggactgtggacttgactgtcatcctcatcgcagcggtgggaggtggagtcttactgctgtctgccctcgggctcatcatttgctgtgtgaaaaagaagaaaaagaagacaaacaagggccccgctgtgggtatctacaatgacaacatcaatactgagatgccgaggcagccaaaaaagtttcagaaagggcgaaaggacaatgactcccatgtgtatgcagtcatcgaggacaccatggtatatgggcatctgctacaggattccagcggctccttcctgcagccagaggtggacacctaccggccgttccagggcaccatgggggtctgtcctccctccccacccaccatatgctccagggccccaactgcaaagttggccactgaggagccacctcctcgctcccctcctgagtctgagagtgaaccgtacaccttctcccatcccaacaatggggatgtaagcagcaaggacacagacattcccttactgaacactcaggagcccatggagccagcagaataacttgatccattccagacgctttgctgagtttcataaagcagggcactgagacacccgtccgtgttcctaaccagaaatcctaaagaagaggaattatacagaaggaacagcaggaggttttcctggacaccgccaacttcacattgctcagtggactcattctaagggcaagacattgaaaatgatgaattccaatctggatacagtcatgacagctcatgtgctcctcaacttaggctgtgcggttagccagcctgtaatgagaggagagaggcctgagtcacctagcatagggttgcagcaagccctggattcagagtgttaaacagaggcttgccctcttcaggacaacagttccaattccaaggagcctacctgaggtccctactctcactggggtccccaggatgaaaacgacaatgtgcctttttattattatttatttggtggtcctgtgttatttaagagatcaaatgtataaccacctagctcttttcacctgacttagtaataactcatactaactggtttggatgcctgggttgtgacttctactgaccgctagataaacgtgtgcctgtcccccaggtggtgggaataatttacaatctgtccaaccagaaaagaatgtgtgtgtttgagcagcattgacacatatctgctttgataagagacttcctgattctctaggtcggttcgtggttatcccattgtggaaattcatcttgaatcccattgtcctatagtcctagcaataagagaaatttcctcaagtttccatgtgcggttctcctagctgcagcaatactttgacatttaaagagaaatttagagaatattctcatcctctaaaaatgtttaaatatataccaaacagtggccccctgcattagttttctgttgccactgcaacctattacttggtagcttaaaaacaacacattagcttatagtcctggggatcagaattccaaaatggatgtccctgaatgaaaatcaaggtgtcagcagagctgtgctccttctgaaggctctagggagaagccggttccttgccatttcaagcttctagaggctggctgcattcccaggctccagtggctggtcaagcttttctcacatggcatcactgtgacactggccctcccacttccctctttgacttacaaagcccaccaggaagatccaggataatctctccatctaaagttccttcatcatcctggaagagccttttgccatgcaagacaacatagccacaggtggggattaggaccagaacatctttggggtgctgttattctgcctaccacaccttcctgccactgactcccacaggagaggctacaaaatgatctggcgcacagggatgttttgtttagcttgcggactctaacacttaaaaaaaaacccagatcagaagatctggccatgctggggctcacattctcacctagcaacaactggctggagctgggcaccagctctgcctttagaaggggtgtccacttcaccaggtcaccacagcccacactacgccctatcacttcccacaatgaggctgagtgtttgtttctactgatcaatgcccctgcaggttgcatttattgtaatgaaaaagaaagactgggattaatctctaatcaggtgagtagaccatgagaccaatgtgtgctcacattaccctttttcttttttttctttttctttttctttttttttttaatgtgagacaggatctcattctgttgcctaggctggagtgcagtggcgcaatctcggctcactgcaacctctgcctcctgggctcaagcaattctcccacctcagcctcccaaatagctgggatcactggcacaaaccaccatgcccagctaattttgtattttttgtagagacagggtttcaccatgttgcccaggctggtctcaacctcctgggctcaagcaatcctcctgcctcggcctcccaaagtgctgggattacagatgtgagccaccgcatccagccccacaccctcatttataccaattacctgcccagtaactgtggacttttgcttcctcacccctgctctgatctggaaggagagggattatgttatagcttgtcagcacagtcccaagttcaatatttctgcggcaaaaacttccttcaaaaaataaatgtacttcattgtattcaatgaattcaccttggaaatgcaccgcctcaacttgttcacatggcataaatgaaaggaattttatagtctcctaaatggcgtgtactgcaagacctcttgaacactttccagaggataggatatttaagtcatgcccttggcgttgcctatggcacctttcccttctgaaagtctggttcctgcccagtgacccttggccttgtgagccgagatgctgaccctgcataaagggccaaaggagggctgcggcttccttccctcactgaagagcccttatttgaattcactgtgtggagccctagccctccattctcgacattccccaacctcccagccccttccaagcaggactaggtgccctgcattccacccaaggtgggattggccttccttaggctggctacttgtcaccatcaccgacatcactgttgcctgcaaggacaccacgtggccattttccttcaactgagggctcaaaactcctggacaagttgctggctcctgagaccagtatttcctggagctgtgcctcagtgaaggggcccagcctgaggaaccctggctcttttctttaaagcccaggccccacttacgtaaaacatttcagggtcactggaaacagtgaagtgccatttgttgaagcctactgcatgccagcccactgctcatccacgtggtctgccatgcctacgaggaaggccagcgcatgcaggactggtctctaatgctgtggtcattgcacagaagggaaaggtctcaaggaagagtcaactggaacaagcacaagcccaccggacatggccttggtaaaggttagcagactggtgtgtgtggatctgcagtgcttcactggaaataatttattcattgcagatactttttaggtggcattttattcatttcctgtgctttaaataaacaaatgtaccaaaaaacaagtatcaagctgtttaagtgcttcggctacttgtcccctggttcagtagaggccccggtttcccagttgttgactgtgacaggctcagcatgggctcagcagatgctgtcttaatttgtggatgatacagaaagccaggctttgggatacaagttctttcctcttcatttgatgccgtgcactgtgtgaagcagatgtttttgtccggaaataaaaataatagtcttggagtctcgccaaaaaaaaaaa

SEQ ID NO: 14309 - DNA, 1410 bp, Homo sapiens
gggcggggctcgggccggtccgcccgcgcgcaggtgagtgagccagggcggagcgcagctgcgccgggcttgggcgcctggggccgccgctccccaccgtcgttttccccaccgaggccgaggcgtcccggagtcatggccggcctgaactgcggggtctctatcgcactgctaggggttctgctgctgggtgcggcgcgcctgccgcgcggggcagaagcttttgagattgctctgccacgagaaagcaacattacagttctcataaagctggggaccccgactctgctggcaaaaccctgttacatcgtcatttctaaaagacatataaccatgttgtccatcaagtctggagaaagaatagtctttacctttagctgccagagtcctgagaatcactttgtcatagagatccagaaaaatattgactgtatgtcaggcccatgtccttttggggaggttcagcttcagccctcgacatcgttgttgcctaccctcaacagaactttcatctgggatgtcaaagctcataagagcatcggtttagagctgcagttttccatccctcgcctgaggcagatcggtccgggtgagagctgcccagacggagtcactcactccatcagcggccgaatcgatgccaccgtggtcaggatcggaaccttctgcagcaatggcactgtgtcccggatcaagatgcaagaaggagtgaaaatggccttacacctcccatggttccaccccagaaatgtctccggcttcagcattgcaaaccgctcatctataaaacgtctgtgcatcatcgagtctgtgtttgagggtgaaggctcagcaaccctgatgtctgccaactacccagaaggcttccctgaggatgagctcatgacgtggcagtttgtcgttcctgcacacctgcgggccagcgtctccttcctcaacttcaacctctccaactgtgagaggaaggaggagcgggttgaatactacatcccgggctccaccaccaaccccgaggtgttcaagctggaggacaagcagcctgggaacatggcggggaacttcaacctctctctgcaaggctgtgaccaagatgcccaaagtccagggatcctccggctgcagttccaagttttggtccaacatccacaaaatgaaagcagtgagtgagccccactttcctttttcttcctcctccagcaccttcgttgtttcctgggtagtctgcctgggtgaggctcccttcctgtttctcatctgtggcttctgaaacacttagactctggacccagcaagagtttcaggaagtgggttgctaggcagttagacaggcttgttggtgaacacccggtatgtagttccatttcagcacaataaaaagaaatcttgcattcaaaaaaaaaaaaaaaaaaa

SEQ ID NO: 14310 - DNA, 1386 bp, Homo sapiens
gctcctcgccccgcgcctgcccccaggatggtccgcgcgaggcaccagccgggtgggctttgcctcctgctgctgctgctctgccagttcatggaggaccgcagtgcccaggctgggaactgctggctccgtcaagcgaagaacggccgctgccaggtcctgtacaagaccgaactgagcaaggaggagtgctgcagcaccggccggctgagcacctcgtggaccgaggaggacgtgaatgacaacacactcttcaagtggatgattttcaacgggggcgcccccaactgcatcccctgtaaagaaacgtgtgagaacgtggactgtggacctgggaaaaaatgccgaatgaacaagaagaacaaaccccgctgcgtctgcgccccggattgttccaacatcacctggaagggtccagtctgcgggctggatgggaaaacctaccgcaatgaatgtgcactcctaaaggcaagatgtaaagagcagccagaactggaagtccagtaccaaggcagatgtaaaaagacttgtcgggatgttttctgtccaggcagctccacatgtgtggtggaccagaccaataatgcctactgtgtgacctgtaatcggatttgcccagagcctgcttcctctgagcaatatctctgtgggaatgatggagtcacctactccagtgcctgccacctgagaaaggctacctgcctgctgggcagatctattggattagcctatgagggaaagtgtatcaaagcaaagtcctgtgaagatatccagtgcactggtgggaaaaaatgtttatgggatttcaaggttgggagaggccggtgttccctctgtgatgagctgtgccctgacagtaagtcggatgagcctgtctgtgccagtgacaatgccacttatgccagcgagtgtgccatgaaggaagctgcctgctcctcaggtgtgctactggaagtaaagcactccggatcttgcaactgaatctgcccgtaaaacctgagccattgattcttcagaactttctgcagtttttgacttcatagattatgctttaaaaaattttttttaacttattgcataacagcagatgccaaaaacaaaaaaagcatctcactgcaagtcacataaaaatgcaacgctgtaatatggctgtatcagagggctttgaaaacatacactgagctgcttctgcgctgttgttgtccgtatttaaacaacagctcccctgtattcccccatctagccatttcggaagacaccgaggaagaggaggaagatgaagaccaggactacagctttcctatatcttctattctagagtggtaaactctctataagtgttcagtgttcacatagcctttgtgcaaaaaaaaaaaaaaaaaaaaa

SEQ ID NO: 14311 - DNA, 1122 bp, Homo sapiens
gctcctcgccccgcgcctgcccccaggatggtccgcgcgaggcaccagccgggtgggctttgcctcctgctgctgctgctctgccagttcatggaggaccgcagtgcccaggctgggaactgctggctccgtcaagcgaagaacggccgctgccaggtcctgtacaagaccgaactgagcaaggaggagtgctgcagcaccggccggctgagcacctcgtggaccgaggaggacgtgaatgacaacacactcttcaagtggatgattttcaacgggggcgcccccaactgcatcccctgtaaagaaacgtgtgagaacgtggactgtggacctgggaaaaaatgccgaatgaacaagaagaacaaaccccgctgcgtctgcgccccggattgttccaacatcacctggaagggtccagtctgcgggctggatgggaaaacctaccgcaatgaatgtgcactcctaaaggcaagatgtaaagagcagccagaactggaagtccagtaccaaggcagatgtaaaaagacttgtcgggatgttttctgtccaggcagctccacatgtgtggtggaccagaccaataatgcctactgtgtgacctgtaatcggatttgcccagagcctgcttcctctgagcaatatctctgtgggaatgatggagtcacctactccagtgcctgccacctgagaaaggctacctgcctgctgggcagatctattggattagcctatgagggaaagtgtatcaaagcaaagtcctgtgaagatatccagtgcactggtgggaaaaaatgtttatgggatttcaaggttgggagaggccggtgttccctctgtgatgagctgtgccctgacagtaagtcggatgagcctgtctgtgccagtgacaatgccacttatgccagcgagtgtgccatgaaggaagctgcctgctcctcaggtgtgctactggaagtaaagcactccggatcttgcaactccatttcggaagacaccgaggaagaggaggaagatgaagaccaggactacagctttcctatatcttctattctagagtggtaaactctctataagtgttcagtgttcacatagcctttgtgcaaaaaaaaaaaaaaaaaaaaa

SEQ ID NO: 14312 - DNA, 945 bp, Homo sapiens
atggaatttacagatagaaactacacgttggtcactgagtttattctattaggttttccaactcgccctgaactgcagattgtcctgttcctcatgtttctgacattgtatgctataattctgatagggaacattggattgatgctgttgatcaggattgatcctcaccttcaaacccccatgtattttttccttagcaacctatcatttgtagacctttgctatttctcagacattgttcccaaaatgctggtcaatttcctctcggagaacaaatctatttcctattatgggtgtgccctgcagttttattttttctgtacttttgcagatacagaatccttcatcctggccgccatggcctatgatcgctatgtcgccatctgtaaccctttattgtacacagttgtgatgtctaggggcatctgtatgcggttgattgtcttgtcataccttggaggcaacatgagttccctggttcacacatcctttgcctttattctgaaatattgtgacaaaaatgttattaatcattttttctgtgacctccctcccctgcttaaactatcctgcactgacacaacaattaatgagtggctcctctccacatacggcagctcagtggaaatcatttgttttatcatcatcatcatctcctactttttcattcttctctcagtcttaaagatccgctctttcagtgggaggaagaagaccttttctacatgcgcctctcacctgacttcagtgacgatctaccaagggactctcctctttatttactcacggcccagctacctgtattctccaaacactgataaaattatctcagtgttctacaccattttcattccagtgctgaatccgttgatttatagtttgagaaataaagatgtaaaggatgcagctgagaaagttctaagatcaaaggtagattcttcatga

SEQ ID NO: 14313 - DNA, 3187 bp, Homo sapiens
ctgcagtagcggggttggggtgggagtgagagagtgaggacgctgggctgggggaaacgggaagccgctgcaagtccaccgcctcagctacccagattgggatctgcccaggcccgctttatggactagtgtgggcggcaggctcctttccgtccctgccctgctgtaccccgctccttggagaccccctgtatccctcccgcaaggtggaatccgcaggctggaggctcccaggggaggcaaacgcctggccctgccctgccccacgccgcaccatgaccctcctgctgctgccccttctgctggcctctctgctcgcgtcctgctcctgtaacaaagccaacaagcacaagccatggattgaggcagagtaccagggcatcgtcatggagaatgacaacacggtcctactgaatccaccactctttgccttggacaaggatgccccgctgcgctatgcaggtgagatctgcggcttccggctccatgggtctggggtgccctttgaggctgtgatccttgacaaggcgacaggagaggggctgatccgggccaaggagcctgtggactgcgaggcccagaaggaacacaccttcaccatccaggcctatgactgtggcgagggccccgacggggccaacaccaagaagtcccacaaggccactgtgcatgtgcgggtcaacgatgtgaacgagtttgccccagtgtttgtggaacggctgtatcgtgcggctgtgacagaggggaagctgtacgatcgcatcctgcgggtggaagccattgacggtgactgctccccccagtacagccagatctgctactatgagattctcacacccaacacccctttcctcattgacaatgacgggaacattgagaacacagagaagctgcagtacagtggtgagaggctctataagtttacagtgacagcttatgactgtgggaagaagcgggcagcagatgatgctgaggtggagattcaggtgaagcccacctgtaaacccagctggcaaggctggaacaaaaggatcgaatatgcaccaggtgctgggagcttggctttgttccctggtatccgcctggagacctgtgatgaaccactctggaacattcaggccaccatagagctgcagaccagccatgtggccaagggctgtgaccgtgacaactactcagagcgggcgctgcggaaactctgtggtgctgccactggggaggtggatctgttgcccatgcctggccccaatgccaactggacagcaggactctcggtgcactacagccaggacagcagcctgatctactggttcaatggcacccaggctgtgcaggtgcccctgggtggccccagtgggctgggctctgggccccaggacagcctcagtgaccacttcaccctgtccttctggatgaagcatggcgtaactcccaacaagggcaagaaggaagaggaaaccatcgtatgtaacactgtccagaatgaggacggcttctctcactactcgctgactgtccacggctgtaggattgccttcctctactggcccctgcttgagagtgcccgcccagtcaagttcctctggaagctggagcaggtctgtgatgatgagtggcaccactacgctctgaacctcgagttccccacagtcacactctataccgacggcatctccttcgaccctgccctcatccatgacaatggcctcatccacccaccccgaagggagcctgctctcatgattggggcctgctggactgaggagaagaacaaagagaaggaaaagggagacaacagtacagacaccacccaaggagaccctttgtcgatccaccactacttccatggctacctggctggtttcagcgtgcgctcaggtcgcctggagagccgcgaggtcatcgagtgcctctatgcatgtcgggaggggctggactatagggatttcgagagcctgggcaaaggcatgaaggtccacgtgaacccctcacagtccctgctcaccctggagggggatgatgtggagaccttcaaccatgccctgcagcatgtggcttacatgaacactctgcgctttgccacgcccggcgtcaggcccctgcgcctcaccactgctgtcaagtgcttcagcgaagagtcctgcgtctccatccctgaagtggagggctacgtggtcgtccttcagcctgacgccccccagatcctgctgagtggcactgctcattttgcccgcccagctgtggactttgagggaaccaacggcgtccctttgttccctgatcttcaaatcacctgctccatttctcaccaggtggaggccaaaaaggatgagagttggcagggcacagtgacagacacacgcatgtcggatgagattgtgcacaacctggatggctgtgaaatttctctggtgggggatgacctggatcccgagcgggaaagcctgctcctggacacaacctctctgcagcagcgggggctggagctcaccaacacatctgcctacctcactattgctggggtggagagcatcactgtgtatgaagagatcctgaggcaggctcgttatcggctgcgacacggagctgccctctacaccaggaagttccggctttcctgctcggaaatgaatggccgttactccagcaatgaattcatcgtggaggtcaatgtcctgcacagcatgaaccgggttgcccaccccagccacgtgctcagctcccagcagttcctgcaccgtggtcaccagcccccgcctgagatggctggacacagcctagccagctcccacagaaactccatgatacccagcgccgcaaccctcatcattgtggtgtgcgtgggcttcctggtgctcatggtcgtcctgggcctggtgcgcatccattcccttcaccgccgcgtctcaggggccggcgggcctccaggggcctccagtgaccccaaggacccagacctcttctgggatgactcagctctcaccatcattgtgaaccccatggagtcctaccagaatcggcagtcctgtgtgacgggggctgttgggggccagcaggaggatgaggacagcagtgactcggaggtggccgattcccccagcagcgacgagagacgcatcatcgagacccccccacaccgctactaaggcctacacctctccccacgcagagggggaattctgccctg

SEQ ID NO: 14314 - DNA, 1045 bp, Homo sapiens
actatccggcgccgagccggaggggggaaacggcgcccgccgcccgcccggagcccgcgagcaaccccagtcccccccacccgcgcgtggcggcgccggctccctagccaccgcggccccaccctcttccggcctcagctgtccgggctgctttcgcctccgcctgtggatgctgcgcctctccgaacgcaacatgaaggtgctccttgccgccgccctcatcgcggggtccgtcttcttcctgctgctgccgggaccttctgcggccgatgagaagaagaaggggcccaaagtcaccgtcaaggtgtattttgacctacgaattggagatgaagatgtaggccgggtgatctttggtctcttcggaaagactgttccaaaaacagtggataattttgtggccttagctacaggagagaaaggatttggctacaaaaacagcaaattccatcgtgtaatcaaggacttcatgatccagggcggagacttcaccaggggagatggcacaggaggaaagagcatctacggtgagcgcttccccgatgagaacttcaaactgaagcactacgggcctggctgggtgagcatggccaacgcaggcaaagacaccaacggctcccagttcttcatcacgacagtcaagacagcctggctagatggcaagcatgtggtgtttggcaaagttctagagggcatggaggtggtgcggaaggtggagagcaccaagacagacagccgggataaacccctgaaggatgtgatcatcgcagactgcggcaagatcgaggtggagaagccctttgccatcgccaaggagtagggcacagggacatctttctttgagtgaccgtctgtgcaggccctgtagtccgccacagggctctgagctgcactggccccggtgctggcatctggtggagcggacccactcccctcacattccacaggcccatggactcacttttgtaacaaactcctaccaacactgaccaataaaaaaaaatgtgggtttttttttttttaatataaaaaaaaaaaaaaaaaa

SEQ ID NO: 14315 - DNA, 2350 bp, Homo sapiens
ggccacccagaggctgatgctcaccatggggcgcctgcaactggttgtgttgggcctcacctgctgctgggcagtggcgagtgccgcgaagctgggcgccgtgtacacagaaggtgggttcgtggaaggcgtcaataagaagctcggcctcctgggtgactctgtggacatcttcaagggcatccccttcgcagctcccaccaaggccctggaaaatcctcagccacatcctggctggcaagggaccctgaaggccaagaacttcaagaagagatgcctgcaggccaccatcacccaggacagcacctacggggatgaagactgcctgtacctcaacatttgggtgccccagggcaggaagcaagtctcccgggacctgcccgttatgatctggatctatggaggcgccttcctcatggggtccggccatggggccaacttcctcaacaactacctgtatgacggcgaggagatcgccacacgcggaaacgtcatcgtggtcaccttcaactaccgtgtcggcccccttgggttcctcagcactggggacgccaatctgccaggtaactatggccttcgggatcagcacatggccattgcttgggtgaagaggaatatcgcggccttcgggggggaccccaacaacatcacgctcttcggggagtctgctggaggtgccagcgtctctctgcagaccctctccccctacaacaagggcctcatccggcgagccatcagccagagcggcgtggccctgagtccctgggtcatccagaaaaacccactcttctgggccaaaaaggtggctgagaaggtgggttgccctgtgggtgatgccgccaggatggcccagtgtctgaaggttactgatccccgagccctgacgctggcctataaggtgccgctggcaggcctggagtaccccatgctgcactatgtgggcttcgtccctgtcattgatggagacttcatccccgctgacccgatcaacctgtacgccaacgccgccgacatcgactatatagcaggcaccaacaacatggacggccacatcttcgccagcatcgacatgcctgccatcaacaagggcaacaagaaagtcacggaggaggacttctacaagctggtcagtgagttcacaatcaccaaggggctcagaggcgccaagacgacctttgatgtctacaccgagtcctgggcccaggacccatcccaggagaataagaagaagactgtggtggactttgagaccgatgtcctcttcctggtgcccaccgagattgccctagcccagcacagagccaatgccaagagtgccaagacctacgcctacctgttttcccatccctctcggatgcccgtctaccccaaatgggtgggggccgaccatgcagatgacattcagtacgttttcgggaagcccttcgccacccccacgggctaccggccccaagacaggacagtctctaaggccatgatcgcctactggaccaactttgccaaaacaggggaccccaacatgggcgactcggctgtgcccacacactgggaaccctacactacggaaaacagcggctacctggagatcaccaagaagatgggcagcagctccatgaagcggagcctgagaaccaacttcctgcgctactggaccctcacctatctggcgctgcccacagtgaccgaccaggaggccacccctgtgccccccacaggggactccgaggccactcccgtgccccccacgggtgactccgagaccgcccccgtgccgcccacgggtgactccggggccccccccgtgccgcccacgggtgactccggggccccccccgtgccgcccacgggtgactccggggccccccccgtgccgcccacgggtgactccggggccccccccgtgccgcccacgggtgactccggggccccccccgtgccgcccacgggtgactccggggccccccccgtgccgcccacgggtgactccggcgccccccccgtgccgcccacgggtgacgccgggcccccccccgtgccgcccacgggtgactccggcgccccccccgtgccgcccacgggtgactccggggccccccccgtgacccccacgggtgactccgagaccgcccccgtgccgcccacgggtgactccggggccccccctgtgccccccacgggtgactctgaggctgcccctgtgccccccacagatgactccaaggaagctcagatgcctgcagtcattaggttttagcgtcccatgagccttggtatcaagaggccacaagagtgggaccccaggggctcccctcccatcttgagctcttcctgaataaagcctcatacccct

SEQ ID NO: 14316 - DNA, 3473 bp, Homo sapiens
accttcctccgtcccggccgttagcccagccaagcccagccaagcccagccaagccccgccgatcgcgggcaccggagccagccccgcagcggagggaccacagagcaccagcctgcatggaacttccttcctcactcagcttcccacgttgccagctgggacaggggagatggagtaattttgctgtggaaagacttcacgtcttgccgaatgaaagtaagcaaagatactgctagagtcgggaatctagagtcgggaattcattaagccaagggagtaagaatggccacagagtagtgaaatactgtttcttctggaaaagtcagcctccagcgcctgcagcttccggaactaagatgtgactgggcttgcggaggcgctgactcctctcctccctccctggctgtgcaggtcccgcctgtctgtcacgctgatgcccgtgcagctgtctgagcacccggaatggaatgagtctatgcactccctccggatcagtgtggggggccttcctgtgctggcgtccatgaccaaggccgcggacccccgcttccgcccccgctggaaggtgatcctgacgttctttgtgggtgctgccatcctctggctgctctgctcccaccgcccggcccccggcaggccccccacccacaatgcacacaactggaggctcggccaggcgcccgccaactggtacaatgacacctaccccctgtctcccccacaaaggacaccggctgggattcggtatcgaatcgcagttatcgcagacctggacacagagtcaagggcccaagaggaaaacacctggttcagttacctgaaaaagggctacctgaccctgtcagacagtggggacaaggtggccgtggaatgggacaaagaccatggggtcctggagtcccacctggcggagaaggggagaggcatggagctatccgacctgattgttttcaatgggaaactctactccgtggatgaccggacgggggtcgtctaccagatcgaaggcagcaaagccgtgccctgggtgattctgtccgacggcgacggcaccgtggagaaaggcttcaaggccgaatggctggcagtgaaggacgagcgtctgtacgtgggcggcctgggcaaggagtggacgaccactacgggtgatgtggtgaacgagaacccggagtgggtgaaggtggtgggctacaagggcagcgtggaccacgagaactgggtgtccaactacaacgccctgcgggctgctgccggcatccagccgccaggctacctcatccatgagtctgcctgctggagtgacacgctgcagcgctggttcttcctgccgcgccgcgccagccaggagcgctacagcgagaaggacgacgagcgcaagggcgccaacctgctgctgagcgcctcccctgacttcggcgacatcgctgtgagccacgtcggggcggtggtccccactcacggcttctcgtccttcaagttcatccccaacaccgacgaccagatcattgtggccctcaaatccgaggaggacagcggcagagtcgcctcctacatcatggccttcacgctggacgggcgcttcctgttgccggagaccaagatcggaagcgtgaaatacgaaggcatcgagttcatttgactcaaaacggaaacactgagcaaggccatcaggactcagcttttataaaaacaagaggagtgcacttttgttttgttttgttctttttggaactgtgcctgggttggaggtctggacagggagcccagtcccgggccccatagtggtgcgggcactggacccccgggccccacggaggccgcggtctgaactgctttccatgctgccatctggtggtgatttcggtcacttcaggcattgactcaaggcctgcctaactggctgggtcgtttcttccatccgacctcgtttcttttctttcctatgttcttttgttcagtgaatatccctagagctcctaccatatgtcaggccctatgcctcaccctgagaacgcagtgagcatgaggtggacctgtttgctgggaaccccaggtcacccccttttcttcctactctgtgcctggagcatcatgtccacccctgcagatccttggaaaagaaaatgtttatgttgcagggtattgcatggtcacgagtgagggcaggcccctggggacacatctgcccacagctgcacaggccagggcgcaggcacatctgttggttctcaggcctcagataaaaccatctccgcatcatatggccagtgaccgctttctcccttcaagaaaattctgtggctgtgcagtactttgaagttttaattattaacctgctttaattaaagcagtttcctttcttataaagtggaatcaccaaatcttatcacacagagcacagtcctgtagttacccagcccgctccagcagtgcgggagattgtaaggaagcggtggcggctggtgaagcaagtctcacatgtcggcgttcttggccaatggatacaaagataaagaaaatgttgcctttttctaggaactgtcagaaatcctcatgcctttcaagacttctgtgaatgacttgaattttttattccctgcctagggtctgtgaacgaggcctgtctcttccctggggtttctttccatggcctttatttctcctcttccagtgggagttttgcaggctcttctctgtggaaacttcacgagcgttggctgggcctcggcttcgctggagtgtactccagggtgaaggcagagtgggatttgagacccaggttaggcacgacccaggctgagaagggacgtttccatcattcacagtgccctccccacagcactacctcaccccgacccccaccctcactcctaccccaccccgcgatcgtcaggggtgccacggtgggccggagggtgccggctctggctgtccctgtgccggtccctcacaaacctctccccctttgaaactcaagcacagctgcgaggagggcagcgaggagggacccctctctcatggttgtctctttcccccgctatgtcataggtagtggaggaagcgaaggaagtgaacgctgaatgtgacgcatttctgaagagctcagctgtcaccgggcatagcctggaagccccaagtctgttctgactttgcctggctgtctccttgacccgcctcctagatcattgtccttgatgtccaggctgggtcatttaaaatagagatgcaatcaggaaggttgggggacttgggactgtggctgaattgagaccttgctgatgtattcatgtcagcacctgagtcacagcccaggtgcccggaagcagcctcttcgcataggcagtgatttgcgattactttaaagctcaccttttttcttcccttctctgttcgctgctgtcagcataatgattgtgttccttccctatgggatccatctgttttgtaaacaataaagcgtctgagggagtgt

SEQ ID NO: 14317 - DNA, 6385 bp, Homo sapiens
tgtctctggcactgtggcggactgaccacggcccgggcatgggctgcaagggagacgcgagcggtgcgtgtgccgcgggtgcgctgccggtgacaggagtttgctataaaatgggagttctggttgtactcactgttctgtggctgttctcctcagtaaaggccgactcaaaagccattacaacctctcttacaacaaaatggttttccactccattgttgttagaagccagtgagtttttagcagaagacagtcaagagaaattttggaattttgtagaagccagtcaaaatattggatcatcagatcatgacggtaccgattattcctactatcatgcaatattggaggctgcatttcagtttctgtcacccctccagcagaatttgtttaaattttgtctgtcccttcgttcttactcagctacaatccaagccttccagcagatagcagctgatgaacctccaccagaaggatgtaattcgtttttttcagtgcatggaaagaagacttgtgaatctgatacccttgaggctcttctactgacagcctctgaaagacccaaacctttattgttcaaaggagatcacagatatccctcgtctaatcctgaaagccctgtggtgattttctactctgagattggctctgaggaattttccaattttcaccgccagcttatatcaaaaagcaatgcaggcaaaatcaattatgtattcagacattatatatttaatcccaggaaggagcctgtttacctctctggctatggcgtggaattggccattaagagcactgagtacaaggccaaggatgatactcaggtgaaaggaactgaggtaaacaccacagtgattggtgaaaatgatcctattgatgaggttcaggggttcctctttggaaaattaagagatctgcaccccgacctggagggacagttgaaagaactcagaaagcatcttgtagagagcaccaatgaaatggcacctttaaaggtttggcagttgcaagatctcagtttccagactgctgctcgaatcttggcttctcctgttgagttggctttggttgtcatgaaggatcttagtcagaattttcctaccaaagccagagcaataacaaaaacagctgtgagctcagaacttagaaccgaagtggaagagaatcagaagtatttcaagggaactttaggattacaacctggagattcagccctcttcatcaatggacttcacatggatttagatacacaggatatattcagtctgtttgatgtgttgaggaatgaagctcgggtaatggagggtctgcatagattgggaatagaaggcctttctctgcataatgttttgaagctgaacatccagccctctgaggcagactatgccgtagacatccggagtcctgctatttcatgggtcaacaacctggaggttgatagcagatataattcgtggccttctagtttacaagagttgcttcgacccacctttcctggtgttattcggcagatcaggaaaaacttacataatatggttttcatagttgatcctgcacatgagaccacagcagagttgatgaacacagctgagatgttccttagtaatcatataccactaagaattggttttatctttgtggttaatgactctgaagatgttgatgggatgcaagatgctggagtggctgttcttagagcatataattatgttgcccaagaagtggatgattatcatgccttccagactctgacacatatctataacaaggtgaggactggagaaaaagtgaaagttgaacatgtggtcagtgtcctggagaagaaatatccgtatgtagaagtgaatagcattttggggattgattctgcttatgatcggaatcggaaggaagcaagaggctactatgagcagactggagttggacctctgcccgttgtgctgttcaatggaatgccctttgaaagggaacagctagaccctgatgagttagaaaccatcacaatgcataaaatcctggagaccaccaccttcttccaaagagcggtgtacttgggtgaactgccccatgatcaagatgtggtagagtatatcatgaatcagccaaatgttgttccacgaatcaattctaggattttgacagctgaacgagactacctggatttaacagcgagtaataacttctttgtggatgattatgctagatttactatcttggattcccaaggcaagactgctgctgtagccaatagtatgaactatctgacaaagaaaggaatgtcctccaaggaaatctatgatgattcttttattaggccagtaactttttggattgttggggattttgatagcccttctggacggcagttactgtatgatgccatcaaacatcagaaatccagtaacaatgttagaataagcatgatcaataatcctgccaaagagataagctatgagaacactcagatctccagagcaatctgggcagctctccaaactcagacttccaacgctgctaagaacttcatcaccaaaatggccaaggagggggctgcagaggccctggctgcaggagctgacattgcggagttctctgttgggggaatggatttcagtctttttaaagaggtctttgagtcttccaaaatggatttcattttgtctcatgccgtgtactgcagggatgttctgaagctgaagaagggacagagggcagtgatcagcaatggaaggatcattgggccactggaggatagtgagctctttaatcaagacgatttccacctcctcgaaaatatcatcttaaaaacctcaggacagaaaataaaatctcatattcaacagcttcgggtagaagaagatgtggcaagcgacttggtaatgaaggtggatgctcttctgtcagcgcaaccaaaaggagatccaagaatcgagtaccagttttttgaagacagacacagtgcaatcaaactgaggccgaaggaaggggagacatactttgatgttgtggctgtcgttgaccctgtcaccagagaagcacagagacttgctcctttgctcttggttttggctcagctgataaacatgaatctgagagtatttatgaactgccaatccaaactttctgacatgcctttaaaaagcttttaccgttatgtcttagaaccagagatttctttcacttcagacaatagttttgctaagggtccaatcgcaaaatttttggatatgcctcagtctccactgttcactctgaatttgaacacacctgagagctggatggtagaatctgtcagaacaccatatgatcttgataatatttatttagaagaggtggacagtgtagtggctgctgagtatgagctggaatacctgttactggaaggtcattgctacgacatcaccacaggccagcctccacggggactacagtttaccttaggaacttcagccaacccggtcattgtggacaccattgttatggccaatctgggctactttcagctgaaagccaacccaggagcttggatcctcagacttaggaagggacgctctgaagatatttatagaatttacagccacgatggcactgattctccccctgatgctgatgaggtggttatcgtcctcaacaacttcaaaagcaaaattattaaagtgaaggttcagaagaaggcagatatggtgaacgaagacttgctgagtgatggaacgagtgagaatgaatctggattttgggattccttcaaatggggctttacaggacagaagactgaggaagtgaagcaagataaagatgacataattaatattttctccgttgcatctggtcatctctacgaaagatttcttcgcataatgatgctatccgtgctgaagaataccaagactcctgtgaaattctggttcttgaagaattacttgtcccccacatttaaggagtttataccttacatggcaaatgaatacaatttccagtatgagcttgttcagtacaaatggccccggtggcttcatcaacaaactgaaaaacagcgtatcatctggggttacaagatcctcttcctggatgtacttttcccactagttgttgacaagttcctgtttgtggatgctgatcagattgtacgaacagatctgaaagagttaagagatttcaatttggatggtgctccttatggttacactcctttctgtgacagccgaagagaaatggacggctacaggttctggaagtcagggtactgggccagtcatttagccgggcgaaagtatcatatcagtgcactatatgttgtggatctgaagaagtttaggaaaatagctgctggtgacagactcaggggacagtaccaaggtctgagtcaggaccctaacagcctttcaaatcttgatcaagatctgcccaataacatgattcatcaggtgccaattaaatccctccctcaagaatggctttggtgtgaaacgtggtgtgatgacgcctctaagaaaagggcaaaaaccattgatttgtgtaataatccgatgaccaaagagccgaaactggaagcagctgtgcggattgtcccggagtggcaggactacgaccaagagatcaaacagctacagatccgctttcagaaggagaaagaaacgggagcactgtacaaagagaagacaaaagaaccaagccgagaaggtcctcagaaacgtgaagaattatgatctctggagaaggacaggaaatcaccccatttgaaaaacagtttttataataaatgctagttttttctgatctgtctatacaactgctgataagccggctgggcaggagtgccacaccttttgattctgagcatttgattctgacttctgtactctggtggccactggatctttgggattaaagctctgttggatttgtacctcagaggaagaccaagtggctgatcctttggactctgtaaagagcattcttctagtcagagggtggaatggcagcagcaactggaagaaaatgagttttttggtgcccacacccaagagcacacacatgctgcactgtctcggaaagcagggccagctagagccaccatgttcttccttacctcagtttacctgcggcctgcgctgcactgcagatgcccaccctgccctgggtctggccggcggaagctctgtccaaggtccacacacctccaggtttacgccaacatccttgtgccctccccaccttctcttccaacgcattaggtgcattgtttaattgaaatccaaccaacaattgtgtgtcaaggctggtttggtgcagtggctgggcaaattaattttgggccaggatgggggtgggttgcagtgagggtagggaaaatgtcaggagtaggaaggttcgggggttaagggaagggaaggaagaccagaactggccatcctcttttataatccattagtagcaccatggctcatttgaaatgaaaatattacacttattccccacccaaccgcagtgaactttctaggtaattgttttgaaaacaatttttgtatctgtgaaagtctttgctttttctttccaccttctagaaaagtctgctaccagtttccttactgaatacagccatactcagcccctctcgcatccagcccgtcagggtcagggtcagggtcaggctccctcaagacgagcaccgcattgtctgccctcttttgcgtaggatttttctctcagacccaggggacattgccttggacttttctctacaaatgccctcagatgtaagaccagaaatgattctgcttgtggaactcgtggctttctgtcctattttccttttatgtgagccctgcaggttgcctttggcgcccacaccagttctgtcttcatgtcgctgcatcgtgaagccccatttgcctttagtccctgctttgtgtgtcttcacttccacagccagtgttgcccctcagggcatactttgctggtgaacgggctgtagagtcttgagtatgttattggcctaagtgggcatgaggccccagcatccgactccatctgccaggctgcagggcacagcagcactggcatagacaggcacgctctgtcttccaacgtgcaccagccttttcttacatattttgcctgtttttaaaaaatacgaggagagggtgcagatggatactgtgccctcaccctcctaagccaggtaatatattgatgtgcagacttttaagaaatcttagtcttatcacaaatatcaagtaatttattttttccattttcaaatgcaaaagttagcctaggaagcctcccagtcatcctgaaggaccttttgactttgcttttataattctgttaaaaattgaggaggggattaatgagtacaatgaaaacaaaacaaaacaaaaaa

SEQ ID NO: 14318 - DNA, 3528 bp, Homo sapiens
ctttttcgcaacgggtttgccgccagaacacaggtgtcgtgaaaactacccctaaaagccaaaatgggaaaggaaaagactcatatcaacattgtcgtcattggacacgtagattcgggcaagtccaccactactggccatctgatctataaatgcggtggcatcgacaaaagaaccattgaaaaatttgagaaggaggctgctgagatgggaaagggctccttcaagtatgcctgggtcttggataaactgaaagctgagcgtgaacgtggtatcaccattgatatctccttgtggaaatttgagaccagcaagtactatgtgactatcattgatgccccaggacacagagactttatcaaaaacatgattacagggacatctcaggctgactgtgctgtcctgattgttgctgctggtgttggtgaatttgaagctggtatctccaagaatgggcagacccgagagcatgcccttctggcttacacactgggtgtgaaacaactaattgtcggtgttaacaaaatggattccactgagccaccctacagccagaagagatatgaggaaattgttaaggaagtcagcacttacattaagaaaattggctacaaccccgacacagtagcatttgtgccaatttctggttggaatggtgacaacatgctggagccaagtgctaacatgccttggttcaagggatggaaagtcacccgtaaggatggcaatgccagtggaaccacgctgcttgaggctctggactgcatcctaccaccaactcgtccaactgacaagcccttgcgcctgcctctccaggatgtctacaaaattggtggtattggtactgttcctgttggccgagtggagactggtgttctcaaacccggtatggtggtcacctttgctccagtcaacgttacaacggaagtaaaatctgtcgaaatgcaccatgaagctttgagtgaagctcttcctggggacaatgtgggcttcaatgtcaagaatgtgtctgtcaaggatgttcgtcgtggcaacgttgctggtgacagcaaaaatgacccaccaatggaagcagctggcttcactgctcaggtgattatcctgaaccatccaggccaaataagcgccggctatgcccctgtattggattgccacacggctcacattgcatgcaagtttgctgagctgaaggaaaagattgatcgccgttctggtaaaaagctggaagatggccctaaattcttgaagtctggtgatgctgccattgttgatatggttcctggcaagcccatgtgtgttgagagcttctcagactatccacctttgggtcgctttgctgttcgtgatatgagacagacagttgcggtgggtgtcatcaaagcagtggacaagaaggctgctggagctggcaaggtcaccaagtctgcccagaaagctcagaaggctaaatgaatattatccctaatacctgccaccccactcttaatcagtggtggaagaacggtctcagaactgtttgtttcaattggccatttaagtttagtagtaaaagactggttaatgataacaatgcatcgtaaaaccttcagaaggaaaggagaatgttttgtggaccactttggttttcttttttgcgtgtggcagttttaagttattagtttttaaaatcagtactttttaatggaaacaacttgaccaaaaatttgtcacagaattttgagacccattaaaaaagttaaatgagaaacctgtgtgttcctttggtcaacaccgagacatttaggtgaaagacatctaattctggttttacgaatctggaaacttcttgaaaatgtaattcttgagttaacacttctgggtggagaatagggttgttttccccccacataattggaaggggaaggaatatcatttaaagctatgggagggttgctttgattacaacactggagagaaatgcagcatgttgctgattgcctgtcactaaaacaggccaaaaactgagtccttgtgttgcatagaaagcttcatgttgctaaaccaatgttaagtgaatctttggaaacaaaatgtttccaaattactgggatgtgcatgttgaaacgtgggttaaaatgactgggcagtgaaagttgactatttgccatgacataagaaataagtgtagtggctagtgtacaccctatgagtggaagggtccattttgaagtcagtggagtaagctttatgccagtttgatggtttcacaagttctattgagtgctattcagaataggaacaaggttctaatagaaaaagatggcaatttgaagtagctataaaattagactaatctacattgcttttctcctgcagagtctaataccttttatgctttgataattagcagtttgtctacttggtcactaggaatgaaactacatggtaataggcttaacaggtgtaatagcccacttactcctgaatctttaagcatttgtgcatttgaaaaatgcttttcgcgatcttcctgctgggattacaggcatgagccactgtgcctgacctcccatatgtaaaagtgtctaaaggtttttttttggttataaaaggaaaatttttgcttaagtttgaaggataggtaaaattaaaggacatgctttctgtttgtgtgatggtttttaaaaattttttttaagatggagttcttgttgcccaggctagaatgcaatggcaaaatctcactgcaatctcctcctcctgggttcaagcaattctcctacttcagcctcccaagtagctgggattacaggcatgtgctaatttggtgtttttaatagagatgaggtttttccatgttggtcaggctggtctcaaactcctgaccttaggtgatcgcctcggcctcctaaagtgctggaattacaggcatgagccaccatgcctggccaggacatgtgttcttaaggacatgctaagcaggagttaaagcagcccaagagataaggcctcttaaagtgactggcaatgtgtattgctcaagattcaaaggtacttgaattggccatagacaagtctgtaatgaagtgttatcgttttccctcatctgagtctgaattagataaaatgccttcccatcagccagtgctctgaggtatcaagtctaaattgaactagagatttttgtccttagtttctttgctatctaatgtttacacaagtaaatagtctaagatttgctggatgacagaaaaaacaggtaaggcctttaatagatggccaatagatgccctgataatgaaagttgacacctgtaagatttaccagtagagaattcttgacatgcaaggaagcaagatttaactgaaaaattgttcccactggaagcaggaatgagtcagtttacttgcatatactgagattgagattaacttcctgtgaaacccagtgtcttagacaactgtggcttgagcaccacctgctggtattcattacaaacttgctcactacaataaatgaattttaagctttaaaaaaaaaaaaaaaaaa

SEQ ID NO: 14319 - DNA, 4234 bp, Homo sapiens
cgtgagcggcgcagcaagatcccagctcggaccccggacggcgcgcgcccccgaagccccggatcccagtcgggcccgcagctgaccgccagattactgtgcatcccgaatcacgaccacctgcaccctcctgccccggcccgccccccaagtcctcaggcacccagctccccggcgccccggatcctcctggaccggtccgtccagattcccgcgggaccgacctgtccgcatccccaggaccgccgggctcggtgcaccgcctcggtcccggagccgcccgcctggattgcattccctcctctcctggatctcctgggacccgacgcgagcctgccccggagcccgccgagcgcaccctctctcgggtgcctgcagccccgccggcgcggcccggcccggcgcggcccggctcggctcctagagctgccacggccatggccagagcccgcccgccgccgccgccgtcgccgccgccggggcttctgccgctgctccctccgctgctgctgctgccgctgctgctgctgcccgccggctgccgggcgctggaagagaccctcatggacacaaaatgggtaacatctgagttggcgtggacatctcatccagaaagtgggtgggaagaggtgagtggctacgatgaggccatgaatcccatccgcacataccaggtgtgtaatgtgcgcgagtcaagccagaacaactggcttcgcacggggttcatctggcggcgggatgtgcagcgggtctacgtggagctcaagttcactgtgcgtgactgcaacagcatccccaacatccccggctcctgcaaggagaccttcaacctcttctactacgaggctgacagcgatgtggcctcagcctcctcccccttctggatggagaacccctacgtgaaagtggacaccattgcacccgatgagagcttctcgcggctggatgccggccgtgtcaacaccaaggtgcgcagctttgggccactttccaaggctggcttctacctggccttccaggaccagggcgcctgcatgtcgctcatctccgtgcgcgccttctacaagaagtgtgcatccaccaccgcaggcttcgcactcttccccgagaccctcactggggcggagcccacctcgctggtcattgctcctggcacctgcatccctaacgccgtggaggtgtcggtgccactcaagctctactgcaacggcgatggggagtggatggtgcctgtgggtgcctgcacctgtgccaccggccatgagccagctgccaaggagtcccagtgccgcccctgtccccctgggagctacaaggcgaagcagggagaggggccctgcctcccatgtccccccaacagccgtaccacctccccagccgccagcatctgcacctgccacaataacttctaccgtgcagactcggactctgcggacagtgcctgtaccaccgtgccatctccaccccgaggtgtgatctccaatgtgaatgaaacctcactgatcctcgagtggagtgagccccgggacctgggtggccgggatgacctcctgtacaatgtcatctgcaagaagtgccatggggctggaggggcctcagcctgctcacgctgtgatgacaacgtggagtttgtgcctcggcagctgggcctgacggagcgccgggtccacatcagccatctgctggcccacacgcgctacacctttgaggtgcaggcggtcaacggtgtctcgggcaagagccctctgccgcctcgttatgcggccgtgaatatcaccacaaaccaggctgccccgtctgaagtgcccacactacgcctgcacagcagctcaggcagcagcctcaccctatcctgggcacccccagagcggcccaacggagtcatcctggactacgagatgaagtactttgagaagagcgagggcatcgcctccacagtgaccagccagatgaactccgtgcagctggacgggcttcggcctgacgcccgctatgtggtccaggtccgtgcccgcacagtagctggctatgggcagtacagccgccctgccgagtttgagaccacaagtgagagaggctctggggcccagcagctccaggagcagcttcccctcatcgtgggctccgctacagctgggcttgtcttcgtggtggctgtcgtggtcatcgctatcgtctgcctcaggaagcagcgacacggctctgattcggagtacacggagaagctgcagcagtacattgctcctggaatgaaggtttatattgacccttttacctacgaggaccctaatgaggctgttcgggagtttgccaaggagatcgacgtgtcctgcgtcaagatcgaggaggtgatcggagctggggaatttggggaagtgtgccgtggtcgactgaaacagcctggccgccgagaggtgtttgtggccatcaagacgctgaaggtgggctacaccgagaggcagcggcgggacttcctaagcgaggcctccatcatgggtcagtttgatcaccccaatataatccggctcgagggcgtggtcaccaaaagtcggccagttatgatcctcactgagttcatggaaaactgcgccctggactccttcctccggctcaacgatgggcagttcacggtcatccagctggtgggcatgttgcggggcattgctgccggcatgaagtacctgtccgagatgaactatgtgcaccgcgacctggctgctcgcaacatccttgtcaacagcaacctggtctgcaaagtctcagactttggcctctcccgcttcctggaggatgacccctccgatcctacctacaccagttccctgggcgggaagatccccatccgctggactgccccagaggccatagcctatcggaagttcacttctgctagtgatgtctggagctacggaattgtcatgtgggaggtcatgagctatggagagcgaccctactgggacatgagcaaccaggatgtcatcaatgccgtggagcaggattaccggctgccaccacccatggactgtcccacagcactgcaccagctcatgctggactgctgggtgcgggaccggaacctcaggcccaaattctcccagattgtcaataccctggacaagctcatccgcaatgctgccagcctcaaggtcattgccagcgctcagtctggcatgtcacagcccctcctggaccgcacggtcccagattacacaaccttcacgacagttggtgattggctggatgccatcaagatggggcggtacaaggagagcttcgtcagtgcggggtttgcatcttttgacctggtggcccagatgacggcagaagacctgctccgtattggggtcaccctggccggccaccagaagaagatcctgagcagtatccaggacatgcggctgcagatgaaccagacgctgcctgtgcaggtctgacaccggctcccacggggaccctgaggaccgtgcagggatgccaagcagccggctggactttcggactcttggacttttggatgcctggccttaggctgtggcccagaagctggaagtttgggaaaggcccaagctgggacttctccaggcctgtgttccctccccaggaagtgcgccccaaacctcttcatattgaagatggattaggagagggggtgatgacccctccccaagcccctcagggcccagaccttcctgctctccagcaggggatccccacaacctcacacttgtctgttcttcagtgctggaggtcctggcagggtcaggctggggtaagccggggttccacagggcccagccctggcaggggtctggccccccaggtaggcggagagcagtccctccctcaggaactggaggaggggactccaggaatggggaaatgtgacaccaccatcctgaagccagcttgcacctccagtttgcacagggatttgttctgggggctgagggccctgtccccacccccgcccttggtgctgtcataaaagggcaggcaggggcaggctgaggagttgccctttgccccccagagactgactctcagagccagagatgggatgtgtgagtgtgtgtgtgtgtgtgtgtgtgtgcgcgcgcgcgcgcgtgtgtgtgtgcacgcactggcctgcacagagagcatgggtgagcgtgtaaaagcttggccctgtgccctacaatggggccagctgggccgacagcagaataaaggcaataagatgaaaaaaaaaaaaaaa

SEQ ID NO: 14320 - DNA, 3682 bp, Homo sapiens
acggcgcgcgcgcaccccttccgcgcagccccctgacctgcagcctccggacctcgctgcagcgcggacccggcccgcccgcccgaatgagtcagctgaggctgctgccgtcccgtcttggggtacaggctgcgaggctcctggctgcacatgacgtcccggtgtttggctggcgcagcaggtcctccgggccaccggccaccttcccaagcagcaaaggtggaggcggctccagttacatggaggagatgtacttcgcctggttggaaaacccccagagtgtccacaagtcctgggacagcttcttcagggaagccagcgaggaagccttttctggctctgctcagccacggcccccttctgttgtccatgagggcaggtctgcagtctcaagtcggaccaagaccagcaaattggtggaggaccacctggctgtacagtccctgatccgggcctaccagatccggggtcaccatgtggcccagctggaccccctgggcattctggatgcagacctggactcctttgtgccctcagacttgatcacaaccattgataaactggccttctatgaccttcaggaggctgaccttgataaggagttccagctgccgacaaccaccttcattgggggctctgaaaacaccctttctctgcgggagatcattcggcgcctggagaacacctactgccagcacattggcctggagttcatgttcatcaacgatgtggagcagtgccagtggatccggcagaagtttgagacccctggtgtgatgcagttctccagcgaggagaagcggaccctgctggcccggctagtgcgctccatgaggtttgaagacttcctggcccggaaatggtcctcagagaagcggtttggcctggagggctgtgaagtgatgattcctgccctcaagaccatcatcgacaaatccagcgagatggggattgagaatgtcatcttggggatgccacacaggggaaggctgaacgtgctggccaacgtgatccgcaaggacctggagcagatcttctgccggtttgaccccaagctggaggcggcggacgagggctccggggatgtcaagtaccacctgggcatgtaccatgagaggatcaaccgcgtcaccaaccggaacatcactctgtcgctggttgccaacccctcccacctggaggcagtggaccctgtggtgcaggggaagacaaaggcagagcagttctaccgtggagatgcccagggcaagaaggtcatgtccatcctggttcatggggacgccgcctttgctggccagggcgtggtatatgagaccttccacctgagcgacttgccctcctacacgaccaatggtaccgtgcacgtcgtcgtcaacaaccagattggattcaccacagacccccgaatggcccgctcctcaccatacccgaccgacgtggcccgggtggtcaatgcgcctatcttccatgtgaatgccgatgacccagaggctgtgatatatgtgtgcagtgtggcagccgaatggagaaacactttcaacaaagatgttgtcgtggacctggtctgttaccgccggcgtggccacaatgagatggacgagcccatgttcacccagccgctcatgtacaagcagatccacagacaggtgcctgtgctgaagaagtacgcagacaagctgattgccgagggcacagtcaccctgcaggagtttgaggaagaaattgccaaatacgaccggatctgtgaggaggcttatggcaggtccaaggataaaaagattctgcatataaagcactggttggactccccctggcctggcttcttcaacgtagatggggagcccaagagcatgacatgcccagccacggggatccctgaggacatgctcacccacatcggcagtgtggccagctctgtgcccctggaggactttaagatccacactggcctctctcgcattctgcggggccgtgcggacatgaccaagaaccggacggtggactgggcgttggcagagtacatggcctttggctccctgctgaaggaaggcatccacgtgcggctcagcgggcaggatgtggagaggggcacattcagtcaccggcaccatgttctccatgaccaggaggttgaccgcaggacgtgtgtgcctatgaatcatctctggcctgaccaggccccgtacaccgtgtgcaacagctccctctcggagtacggagtcctgggctttgagctgggctatgccatggccagccccaatgccctggtcctctgggaggcccagtttggggacttccacaacacggcccagtgcatcatcgaccagttcatcagcaccggccaggccaagtgggtgcggcataatggcattgtgctgctgctgccccatggcatggaaggcatgggcccagagcactcgtcagcgaggcccgaaaggttcctgcagatgagcaatgatgactcggatgcctaccctgcattcaccaaggacttcgaggtgagccagctctatgactgcaactggatcgtggtcaactgctccacaccggccaactacttccacgtgctgcgccggcagatcctgctgcccttccgcaagccgctgattatcttcacacctaaatctctgctgaggcacccagaggccaagtccagctttgaccaaatggtatccgggaccagcttccagcgggtgattcctgaagatggggccgcagcacgggcccctgagcaggtgcagcggctcatcttctgcacgggaaaggtgtactatgacctggtgaaggagcggagcagccaggacctggaggagaaagtggccatcacgcgcctggagcagatctctccattccccttcgacctgatcaagcaggaggcagagaagtacccaggtgcggagctggcctggtgtcaggaggagcacaagaacatgggctactatgactacatcagcccacgcttcatgaccatcctgaggcgcgcacggcccatatggtatgttggccgggacccagcggctgcaccagccacaggaaacaggaacactcacctggtgtcactgaagaagtttctggatactgccttcaatctccaggcctttgagggcaagacattttagagctgggcaaaacctgtgtaggtctcgctgtgggtttgctggggaccaagggggtgatgaaaaggggaggggcggagctcctgcccaagagaggggctgtggggccccaggataaaacagacacagtgacagggccaagagccagcactgctggccttggtgtcatgccagaatctaccaggactgagggagccagaggagtcctgtaggcaggctactgtgctggagcatcccccagctgctcccatcttgctggaatttcttgggcggcttctccacctgtatctcaagacagacacccgggggcctgtgtctgtggccgctcccatcccggcagccctggctgctgctcgccccaccctcgcttatctgtagattcaaagcgatgttctcttctgtgctcttagaagtagggagttcagcagtaacagccaggtgaagcgaacctgctgggtgatttgtttgcgctctgttttatggggcattcctgcgagatgtgtcagcttctgtatgagatgcagccacagctcatgtgtaccaaagtagaaaaccaaatcacagag

SEQ ID NO: 14321 - DNA, 1806 bp, Homo sapiens
gccgctcgctcggctccgctccctggctcggctccctgcctccgcgtcgcagcccccgccgtagccgcctccgagcccgccgccacatcctctgagaagatggctgtgccacccacgtatgccgatcttggcaaatctgccagggatgtcttcaccaagggctatggatttggcttaataaagcttgatttgaaaacaaaatctgagaatggattggaatttacaagctcaggctcagccaacactgagaccaccaaagtgacgggcagtctggaaaccaagtacagatggactgagtacggcctgacgtttacagagaaatggaataccgacaatacactaggcaccgagattactgtggaagatcagcttgcacgtggactgaagctgaccttcgattcatccttctcacctaacactgggaaaaaaaatgctaaaatcaagacagggtacaagcgggagcacattaacctgggctgcgacatggatttcgacattgctgggccttccatccggggtgctctggtgctaggttacgagggctggctggccggctaccagatgaattttgagactgcaaaatcccgagtgacccagagcaactttgcagttggctacaagactgatgaattccagcttcacactaatgtgaatgacgggacagagtttggcggctccatttaccagaaagtgaacaagaagttggagaccgctgtcaatcttgcctggacagcaggaaacagtaacacgcgcttcggaatagcagccaagtatcagattgaccctgacgcctgcttctcggctaaagtgaacaactccagcctgataggtttaggatacactcagactctaaagccaggtattaaactgacactgtcagctcttctggatggcaagaacgtcaatgctggtggccacaagcttggtctaggactggaatttcaagcataaatgaatactgtacaattgtttaattttaaactattttgcagcatagctaccttcagaatttagtgtatcttttaatgttgtatgtctgggatgcaagtattgctaaatatgttagccctccaggttaaagttgattcagctttaagatgttacccttccagaggtacagaagaaacctatttccaaaaaaggtcctttcagtggtagactcggggagaacttggtggcccctttgagatgccaggtttcttttttatctagaaatggctgcaagtggaagcggataatatgtaggcactttgtaaattcatattgagtaaatgaatgaaattgtgatttcctgagaatcgaaccttggttccctaaccctaattgatgagaggctcgctgcttgatggtgtgtacaaactcacctgaatgggacttttttagacagatcttcatgacctgttcccaccccagttcatcatcatctcttttacaccaaaaggtctgcagggtgtggtaactgtttcttttgtgccattttggggtggagaaggtggatgtgatgaagccaataattcaggacttattccttcttgtgttgtgtttttttttggcccttgcaccagagtatgaaatagcttccaggagctccagctataagcttggaagtgtctgtgtgattgtaatcacatggtgacaacactcagaatctaaattggacttctgttgtattctcaccactcaatttgttttttagcagtttaatgggtacattttagagtcttccattttgttggaattagatcctccccttcaaatgctgtaattaacaacacttaaaaaacttgaataaaatattgaaacctc

SEQ ID NO: 14322 - DNA, 7987 bp, Homo sapiens
aatcttccccaccaaagtcaagggtggaattgggcaaaattcattttaagaaacatctgcttcatgtaacatccaggccactgctggctactaccacagcagtagcatctccacctactcatgcagcaccattaccagcagtgatagcagaatcaacaactgtagactcaccgccctcatctccgcctccaccgcctccacctgcccaagccacaacactctcatcaccagcaccagtaacagagccagtggccttgccacatacaccaataacagttctaatggcagcaccagtacccttaccagtagatgtagcagttagatctctgaaagaaccaccaattataattgtaccagaatctttagaagcagatactaagcaggacactatatctaatagtttagaagaacacgtaactcaaatattgaatgagcaagcagatatttcctcaaaaaaagaagattcccatattgggaaggatgaagaaattccagatagttctaagattagtctgagctgtaaaaaaacaggttctaagaagaaatcctcacaatctgaaggcatctttcttggttcagaatctgatgaagattctgtacggacttcttcaagtcaaagatcacatgatttaaaattttcagcaagcattgaaaaggaaagagattttaaaaagagctcagcacctttaaaaagtgaggatctagggaaaccttcacgatctaaaacagacagagatgataaatattttagctattcaaaacttgaaagagatactcggtatgtatcttcccgatgtagatcagaaagagagcgacggcggagcagatctcactctaggtctgagagaggctctagaactaatttatcctattccaggtcagaacgatctcattattatgactctgatcgtcgctaccataggagctccccttatcgagagaggacgcgctattctcggccatacacagataacagagcacgagagagttctgactcagaagaagagtataagaagacatactcaaggcgtacctcatctcattcctcttcttacagagacctaaggacatcatcctattctaaatctgatcgggactgtaaaactgagacctcttacttagagatggaaagaagaggcaagtattcttcaaaactagaaagagaatctaaaaggacttcagaaaatgaagcaattaaaagatgttgttctccccctaatgaactgggattccgacgagggtcatcatattctaagcatgacagtagtgcttcccgttataaatctaccctttcaaaacctatacccaagtctgataaatttaaaaattctttctgttgtacagaattaaatgaagaaatcaaacagtctcattcttttagtttacagacaccttgttcaaaaggtagtgaattaagaatgattaataaaaatcctgaaagagaaaaggctgggtctccagctccatcaaatcgattaaatgattcacctactttaaaaaagctagatgaattgcctatttttaagtccgaatttataacacatgatagccatgatagtattaaggaattagactctttatctaaagtgaagaatgatcaattaagaagtttttgtcccatagaattaaatataaatggatctcctggggcagaatctgatttggcaacattttgcacttctaaaactgatgctgttttaatgacttctgatgatagtgtgactggatcggaattatcccctttggtcaaagcatgcatgctttcatcaaatggatttcagaatattagtaggtgcaaagaaaaagacttggatgatacctgcatgctgcataagaagtcagaaagcccatttagagaaacagaacctctggtgtcaccacaccaagataaactcatgtctatgccagttatgactgtggattattccaaaacagtagttaaagaaccagttgatacgagggtttcttgctgcaaaaccaaagattcagacatatactgtactttgaacgatagcaacccttctttgtgtaactctgaagctgaaaatattgagccttcagttatgaagatttcttcaaatagctttatgaatgtgcatttggaatcaaaaccagttatatgtgatagtagaaatttgacagatcactcaaaatttgcatgtgaagaatataagcagagcatcggtagcactagttcagcttctgttaatcattttgatgatttatatcaacctattgggagttcaggtattgcttcatctcttcagagtcttccaccaggaataaaggtggacagtctaactctcttgaaatgcggagagaacacatctccagttctggatgcagtgctaaagagtaaaaaaagttcagagtttttaaagcatgcagggaaagaaacaatagtagaagtaggtagtgaccttcctgattcaggaaagggatttgcttccagggagaacaggcgtaataatgggttatctgggaaatgtttgcaagaggctcaagaagaagggaattccatattgcctgaaagaagaggaagaccagaaatctctttagatgaaagaggagaaggaggacatgtgcatacttctgatgactcagaagttgtattttcttcttgtgatttgaatttaaccatggaagacagtgatggtgtaacttatgcattaaagtgtgacagtagtggtcatgccccagaaattgtgtctacagttcatgaagattattctggctcttctgaaagttcaaatgatgaaagtgattcagaagatacagattcggatgatagcagtattccaagaaaccgtctccagtctgttgtggttgtgccaaagaattctactttgcccatggaagaaacaagtccttgttcttctcggagcagtcaaagttatagacactattctgaccattgggaagatgagagattggagtcaaggagacatttgtatgaggaaaaatttgaaagtatagcaagtaaagcctgtcctcaaactgataagtttttccttcataaaggaacagagaagaatccggaaatttcttttacacagtccagtagaaaacaaatagataatcgcctgcctgaactttctcatcctcagagtgatggggttgatagtacaagtcatacagatgtgaaatctgaccctctgggtcacccaaattcagaggaaaccgtgaaagccaaaataccttctaggcagcaagaagagctgccaatttattcttctgattttgaagatgtcccaaataagtcttggcaacagaccactttccaaaacaggccagatagtagactgggaaaaacagaattgagtttttcttcctcttgtgagataccacatgtggatggcttgcactcatcagaagagctcagaaacttaggttgggacttctctcaagaaaagccttctaccacgtatcagcaacctgacagtagctatggagcttgtggtggacacaagtatcagcaaaatgcagaacagtatggtgggacacgtgattactggcaaggcaatggttactgggatccaagatcaggtagacctcctggaactggggttgtgtatgatcgaactcaaggacaagtaccagattccctaacagatgatcgtgaagaagaggagaattgggatcaacaggatggatcccatttttcagaccagtccgataaatttcttctatcccttcagaaagacaaggggtcagtgcaagcacctgaaataagcagcaattccattaaggacactttagctgtgaatgaaaagaaagatttttcaaaaaacttagaaaaaaatgatatcaaagatagagggcctcttaaaaaaaggaggcaggaaatagagagtgattctgaaagtgatggtgagcttcaggacagaaagaaagttagagtggaggtagagcagggagagacatcagtgcccccaggttcagcactggttgggccctcctgtgtcatggatgacttcagggacccacagcgatggaaggaatgtgccaagcaagggaaaatgccatgttactttgatcttattgaagaaaatgtttatttaacagaaagaaagaagaataaatctcatcgagatattaagcgaatgcagtgtgagtgtacacctctttctaaagatgaaagagctcaaggtgaaatagcatgtggggaagattgtcttaatcgtcttctcatgattgaatgttcttctcggtgtccaaatggggattattgttccaatagacggtttcagagaaaacagcatgcagatgtggaagtcatactcacagaaaagaaaggctggggcttgagagctgccaaagaccttccttcgaacacctttgtcctagaatattgtggagaggtactcgatcataaagagtttaaagctcgagtgaaggagtatgcacgaaacaaaaacatccattactatttcatggccctgaagaatgatgagataatagatgccactcaaaaaggaaattgctctcgtttcatgaatcacagctgtgaaccaaattgtgaaacccaaaaatggactgtgaacggacaactgagggttgggttttttaccaccaaactggttccttcaggctcagagttaacgtttgactatcagttccagagatatggaaaagaagcccagaaatgtttctgcggatcagccaattgccggggttacctgggaggagaaaacagagtcagcatcagagcagcaggagggaaaatgaagaaggaacgatctcgtaagaaggattcagtggatggagagctagaagctctgatggaaaatggtgagggtctctctgataaaaaccaggtgctcagcttatcccggctaatggttagaattgaaactttggagcagaaacttacctgtctggaactcatacagaacacacactcacagtcctgcctgaagtcctttctggaacgtcatgggctgtctttgttgtggatctggatggcagagctaggtgacggccgggaaagtaaccagaagcttcaggaagagattataaagactttggaacacttgcccattcctactaaaaatatgttggaggaaagcaaagtacttccaattattcaacgctggtctcagactaagactgctgtccctccgttgagtgaaggagatgggtattctagtgagaatacatcgcgtgctcatacaccactcaacacacctgatccttccaccaagctgagcacagaagctgacacagacactcccaagaaactaatgtttcgcagactgaaaattataagtgaaaatagcatggacagtgcaatctctgatgcaaccagtgagctagaaggcaaggatggcaaagaggatcttgatcaattagaaaatgtccctgtagaggaagaggaagaattgcagtcacaacagctactcccacaacagctgcctgaatgcaaagttgatagtgaaaccaacatagaagctagtaagctacctacatctgaaccagaagctgacgctgaaatagagcccaaagagagcaacggcacaaaactagaagaacctattaatgaagaaacaccatcccaagatgaagaggagggtgtgtctgatgtggagagtgaaaggagccaagaacagccagataaaacagtggatataagtgatttggccaccaaactcctggacagttggaaagacctaaaggaggtatatcgaattccaaagaaaagtcaaactgaaaaggaaaacacaacaactgaacgaggaagggatgctgttggcttcagagatcaaacacctgccccgaagactcctaataggtcaagagagagagacccagacaagcaaactcaaaataaagagaaaaggaaacgaagaagctccctctcaccaccctcttctgcctatgagcggggaacaaaaaggccagatgacagatatgatacaccaacttctaaaaagaaagtacgaattaaagaccgcaataaactttctacagaggaacgccggaagttgtttgagcaagaggtggctcaacgggaggctcagaaacaacagcaacagatgcagaacctgggaatgacatcaccactgccctatgactctcttggttataatgccccgcatcatccctttgctggttacccaccaggttatcccatgcaggcctatgtggatcccagcaaccctaatgctggaaaggtgctcctgcccacacccagcatggacccagtgtgttctcctgctccttatgatcatgctcagcccttggtgggacattctacagaacccctttctgcccctccaccagtaccagtggtgccacatgtggcagctcctgtggaagtttccagttcccagtatgtggcccagagtgatggtgtagtacaccaagactccagcgttgctgtcttgccagtgccggcccccggcccagttcagggacagaattatagtgtttgggattcaaaccaacagtctgtcagtgtacagcagcagtactctcctgcacagtctcaagcaaccatatattatcaaggacagacatgtccaacagtctatggtgtgacatcaccttattcacagacaactccaccaattgtacagagttatgcccagccaagtcttcagtatatccaggggcaacagattttcacagctcatccacaaggagtggtggtacagccagccgcagcagtgactacaatagttgcaccagggcagcctcagcccttgcagccatctgaaatggttgtgacaaataatctcttggatctgccgcccccctctcctcccaaaccaaaaaccattgtcttacctcccaactggaagacagctcgagatccagaagggaagatttattactaccatgtgatcacaaggcagactcagtgggatcctcctacttgggaaagcccaggagatgatgccagccttgagcatgaagctgagatggacctgggaactccaacatatgatgaaaaccccatgaaggcctcgaaaaagcccaagacagcagaagcagacacctccagtgaactagcaaagaaaagcaaagaagtattcagaaaagagatgtcccagttcatcgtccagtgcctgaacccttaccggaaacctgactgcaaagtgggaagaattaccacaactgaagactttaaacatctggctcgcaagctgactcacggtgttatgaataaggagctgaagtactgtaagaatcctgaggacctggagtgcaatgagaatgtgaaacacaaaaccaaggagtacattaagaagtacatgcagaagtttggggctgtttacaaacccaaagaggacactgaattagagtgactgttgggccagggtgggaggatgggtggtcaggtaagacagactctagggagaggaaatcctgtgggcctttctgtcccacccctgtcagcactgtgctactgatgatacatcaccctggggaattcaaccctgcagatgtcaactgaaggccacaaaaatgaactccatctacaagtgattacctagttgtgagctgttggcatgtggttagaagccatcagaggtgcaagggcttagaaaagaccctggccagacctgactccactcttaaacctgggtcttctccttggcggtgctgtcagcgcacagacccatgcgcatccccacccacaaccctttaccctgatgatctgtattatattttaatgtatatgtgaatatattgaaaataatttgttttttcctggtttttgtttggttttcgttttgcttttagcctctacatgctaggatcacaggaagactttgtaaggacagtttaagttctcctgcaaggtttaatttgttatcatgtaaatattctaaagcaggctgccttgtggttttggccagccttgtgctatgttgataagattgatttactgcttaaaatcactttactttatccaatttttactgaactttttatgtaaaaaaataaaatcaattaaagaacttggcatgtgtgttcccta

SEQ ID NO: 14323 - DNA, 2410 bp, Homo sapiens
agggagtgcgcaggactggcaagagggaagccgggctgctccacgcctttcacgccttccacctcctgcgtgtccatctgtgagaaggagccagagcccaagggagatgatggagcctgaggagtacagagagagagggagagagatggtggattacatctgccagtacctgagcactgtgcgggagagacgtgtgacgccagacgtgcagcctggctacctgcgagcccagctgcctgagagtgctcctgaggaccccgacagctgggacagcatctttggggacattgaacgaatcatcatgcctggggtggtacattggcagagcccccatatgcacgcctactacccagccctcacctcttggccctccctgctaggagacatgctggctgatgccatcaactgcttgggattcacctgggcatccagccctgcgtgtacagagctggagatgaacgtcatggactggttggcaaaaatgctgggacttccagagcacttcttgcaccaccaccccagcagccagggcggaggcgtcctgcagagcacggtcagtgaatccactttgattgccctgctggcagcaaggaagaacaaaatcctggaaatgaaaacgtctgagcccgatgctgatgagtcctgcctaaatgcccgactcgtggcctatgcctctgaccaggctcactcctctgtggaaaaggctggtttgatttcccttgtgaagatgaaatttctgcctgtggatgacaacttctcactccgaggggaagctcttcagaaggccatcgaggaagacaagcagcggggcttggtgcccgtctttgtctgtgcaacactagggaccactggggtctgtgcatttgactgcctgtcagagctgggccccatctgtgcccgtgaggggctgtggctccacatcgatgctgcttatgcaggcactgccttcctgtgccccgagttccgggggtttctgaaggggattgagtatgccgactccttcacctttaatccttccaagtggatgatggtgcattttgactgtactgggttctgggtcaaggacaagtacaagctgcagcagaccttcagtgtgaatcccatctacctcaggcatgccaactcaggcgtggccaccgacttcatgcactggcagatccccctgagccgacggtttcgctctgttaaactctggttcgtgattcggtccttcggggtgaagaatcttcaagcacatgtcagacatggtactgaaatggctaaatattttgaatctctggtcagaaacgacccttcctttgaaattcctgccaagaggcaccttggcctggtggtttttcgtctaaagggtcctaattgtctcacagaaaatgtgttaaaggaaatagctaaagctggccgtctcttcctcatcccggccactatccaggacaagttaatcatccgtttcactgtgacatcccagtttaccactagggatgacatcctgagagactggaatctcattcgagatgctgccactctcatcctgagtcagcactgtacttcccaacccagccctcgggttgggaacctcatctcccaaatcaggggtgccagagcctgggcctgtggaacgtcccttcagtctgtcagtggggcaggagatgatccagtccaggccaggaagatcatcaagcagcctcagcgtgtgggagccggtcccatgaaaagggaaaatggcctccatcttgaaaccctgctggacccagttgatgactgcttttcagaagaggccccagatgccaccaagcacaagctgtcctccttcctgttcagttacttgtctgtgcagactaagaagaagacggtgcgctccctcagttgcaacagtgtgccagtgagtgctcagaagccactgcccacagaggcctctgtgaagaatgggggctcctccagggtcagaatcttttccaggtttccagaagacatgatgatgctgaagaaaagtgccttcaaaaaactcatcaaattctacagcgtccccagctttcctgaatgcagctctcaatgtggactccagctgccctgttgccctctgcaggccatggtttagacacagggccttcagccagagtctgaggatatacttcagggactctgtgaacccctcacaattgtatgccaactttgtgtgcttatgtgtacatgcatttttcttggggcgagttcataattttaatcaaattctcataggggttcatgacccacaataggatacaaacgaagagtttaagccagcatgatccagatgggttcagcagtctggtcagtgagaaagggccgagggtagacaggcagcttctgtggttcagcttgtgacatgatatataacacagaaataaattatgcttgtccctgaaacaaaaaa

SEQ ID NO: 14324 - DNA, 2022 bp, Homo sapiens
gcgccggtggcgggactctggggaaaatggctgcgtcttcgagtggtgagaaggagaaggagcggctgggaggcggtttgggagtggcgggtggtaacagcacacgagagcggctgctgtctgcgcttgaggacttggaggtcctgtctagggaacttatagaaatgctggcaatttcaagaaaccaaaagttgttacaggctggagaggaaaaccaggtcctggagttgttaattcaccgagatggggaatttcaagaactaatgaaattggcacttaatcagggaaaaattcatcatgaaatgcaagttttagaaaaagaagtagagaagagagacagtgatattcagcagctacaaaaacagctaaaggaagcagaacaaatactggcaacagctgtttaccaagcgaaggagaaactcaagtcaatagaaaaagcaagaaaaggtgctatctcctctgaagaaataattaagtatgcacataggatcagtgcaagtaatgctgtatgtgctccactgacctgggttccaggggacccccggagaccctacccaactgatttagagatgagaagtgggttactgggtcagatgaacaatccttccactaatggcgtgaatggccatttaccaggagatgcacttgcagcaggaagattgccagatgtccttgctccacagtatccatggcagtcaaatgacatgtcgatgaatatgttaccaccaaatcatagtagtgactttttgttggaacctcctgggcataataaagaaaatgaagatgatgtagagattatgtcaacggactcctcaagcagtagtagtgagtctgattgaaaaaccttaaaagacaatatacagaattgaatactgtagaattctgtttctttaacagtagcagggaaatgtaaactacaggtgacaaaaaatacccaggtaaacactggctttggtagaattgtgcagtcattaaaagtcaaaattttttgactttctttttaaagccaaagaccatagttttagttttaagccactaggtagatatttaggggaatagtcaaaatttactgttgaaaaagcagttgctatgtgctttcttaccctgttctgttccagttttgctggatttgtacatagccattctagaaatagagtcgagggaaattatccatatacatatcactaataggcttcttggaattatttagaaaagcatttttaaactggcagtggatgactgaataggcatcatatttctttttgtgtgtcatttaaaagtaacaaaaactgccatttgacagtaaaggctcttggcttctgttggaggcatgggaaattgtctcaatttgtacagtttgtaattgtaatttttgtaaataaatttgtttgtacattgtatgctttttttttagtttaaatatactgtcagtgtaggtaggaaattatttctgtaaatccagttgcattttataatacttgagtgactaactgaattgaaacctattacaattaatagggttctcaaaggcctattcctattagaagaaataattttttttaataattgaaaaaatttaccacagccttgtctgattttaagaatagattgtgtgaagatttagaatggaaagcaaccatttcttcccttcaccttcctcttcttacagttccccaggagtcatttttaaccacttttaatttctgttggtaacctctgtgtttaggtaatatgcttatacaactatttcttgatgtatcagttttagacaatgtatcttctgatttcaaaggtaatacaacatttaatgtgaaacatttagtgaatacagtaaaggagaaaataaaattgttagcattctacccagagataatatcaattcatattgtagtgtagatttttttaaagttcacatacacttttttgtaaaatgagaataatgtttatttcctgagatactgctgtattttttaattgctaatctgtattcttcaaatgaactgagaattccatttttccatc

SEQ ID NO: 14325 - DNA, 4417 bp, Homo sapiens
gactcacctctgacgccgctcttcgcgctccgctggtgaatggagtcgcgttctctgttttgctgttgctgctgcctttgtgacgggatcgctttctcccatcgaaccttctagttgcttattgcagctttgtctcctcagcactctgctgtcactcaaggaagtatcatcaagaacaaggagggcatggatgctaagtcactaactgcctggtcccggacactggtgaccttcaaggatgtatttgtggacttcaccagggaggagtggaagctgctggacactgctcagcagatcgtgtacagaaatgtgatgctggagaactataagaacctggtttccttgggttatcagcttactaagccagatgtgatcctccggttggagaagggagaagagccctggctggtggagagagaaattcaccaagagacccatcctgattcagagactgcatttgaaatcaaatcatcagtttccagcaggagcatttttaaagataagcaatcctgtgacattaaaatggaaggaatggcaaggaatgatctctggtatttgtcattagaagaagtctggaaatgtagagaccagttagacaagtatcaggaaaacccagagagacatttgaggcaagtggcattcacccaaaagaaagtacttactcaggagagagtctctgaaagtggtaaatatgggggaaactgtcttcttcctgctcagctagtactgagagagtatttccataaacgtgactcacatactaaaagtttaaaacatgatttagttcttaatggtcatcaggacagttgtgcaagtaacagtaatgaatgtggtcaaactttctgtcaaaacattcaccttattcagtttgcaagaactcacacaggtgataaatcctacaaatgccctgataatgacaactctcttactcatggttcatctcttggtatatcaaagggcatacatagagagaaaccctatgaatgtaaggaatgtggaaaattcttcagctggcgctctaatcttactaggcatcagcttattcatactggagaaaaaccctatgagtgtaaagaatgtggaaagtctttcagccggagttctcacctcattggacatcaaaagacccatactggtgaggaaccctatgaatgtaaagaatgtggaaaatccttcagctggttctctcaccttgttactcatcagagaactcatacaggagacaaactgtacacatgtaatcagtgtgggaaatcttttgttcatagctctaggcttattagacaccagaggacacatactggagagaaaccctatgaatgtcctgaatgtgggaaatctttcagacagagcacacatctcattctgcatcagagaacccatgtgagagtgaggccctatgaatgcaatgaatgtggaaagtcttacagccagagatctcaccttgttgtgcatcatagaattcacactggactaaaaccttttgagtgtaaggattgtggaaaatgttttagtcgaagctctcacctttattcacatcaaagaacccacactggagagaaaccatatgagtgtcatgattgtggaaaatctttcagccagagttctgcccttattgtgcatcagaggatacacactggagagaaaccatatgaatgctgtcagtgtgggaaagccttcatccggaagaatgacctcattaagcaccagagaattcatgttggagaagagacctataaatgtaatcaatgtggcattatcttcagccagaactctccatttatagttcatcaaatagctcacactggagagcagttcttaacatgcaatcaatgtgggacagcgcttgttaatacctctaaccttattggataccagacaaatcatattagagaaaatgcttactaataaatatgggaatttttcacaaagagcaatgactttattttgcattggagaactcctggagataagctgtacaaattgaatctatgtggaaatgctttcagtcttgttactatcctattgcacattagagaattggtcctggaagggaaagaaaccacagattttatttcagtacacaaatccatcagattttcttcttttcatgaattcctacagaagtaattggcctgagagcattcttgaccaagtcttaaatgctagaatctgagaaggaattattaaataggtgagttgttgagcgagaaccccttcatttgaaaagaaatgagtatgctactatagggagagttgttgctgagaattaagaaatgatacagttaatgcaacaaaagatggaaaataatatttcagtcaatatgtcattgttttcttgactatgtctctcttctgggacatttagtagtgtttggtatgttttatgtgtctggtagaaaccatattttggttaacagcaagaaaaatgcttataatgtagtacaattaaaaacaacacatctccactaccagtgctaacccatttttaagtacatttgcatgtgggcaagaattgaaagtatacagataattgaacagaattgatttgttagataaggagattttgactgagttttatagtctgtttaatgttgctgtaataattattttaagaaacttttaaatattgtaagaggatatctagtttctctattctaccatcaaagaagcttttgagtaccacctgttaatgagctttcctattctaaattgttttgggtcacagagttccactttttccactcttattagcactgcaaaagctcctgagaatttaaaaacacagtaattctctggatgttaggacctaggggaacattgggcatttgaacatatcagggagggtccccattttagtgggaacaagtatttaaacaatatttagagcaagtgtcctcatgtgataaacagagcacagtccaaagataccctctttctcaaggtagtcttttatctttataaagaaagattagtgtttaagagcgtagacttgagctagactacccaggttgaaaccccactagctgggtgatcttgaacatgctgcttagcttctctgtgccaaacttactgatatcctcatctgtaaattagcgataataatagtacttacctggtaggattatggtgagtattaaatgagtaaatggaaacagcttagaatagtgcctgacatatattatgttctctgtagttactggctgtgattattaataatattgccgcaccctaatatctgttatttaattgaaatctgcttgtgtgcttataagaatttactgagttctcacttcccttacagtcatacatggtttttcccttttgcctaaatcagaactcaacagcctgggaaaatcactgacaaatagtggatataggtttcatttctgaggatcaataaacagcttgtaatgttgtatacacatttattctgtttgtacaaaggttttccattctatggagaggatcccagtcttcagattctctggtaagttaataacccacaaaagattcaggaagaggatctattttaattttctctttcattctataaatcagtctgttgtatatagggactgaccatgattctccattttctggcataaatattagctgctcaatgattgattgttgaatgatagatgaagtattgctgaagccaaccagagatcttgatctctctctgaggaaaaaacctagaaatgatggttagaatcaggagacttgagaactacgaggaacatggcagcctctagctcatacttgtcgttgtacaattgagatcaagtgaattggccccggtctcacattttcagtgaagtcagactcagaactaggtcctgggtttcatgtttcctgctgctcttctcactgtgtacacaccatgcccacatacaacatacctatcagaaatggttttcattaagggagtagaatagtcacttaactggggctcttaacattgctaataacctgtggctcaatttcctcaactgtataatgaggttactactagtatctacctcaaagcgttgtcatgtggattgagatgatatgtatgaatcacataaaagagtgcctggcacatagtaggtgccattaataatattactattgttaacaccttaagggtctaacttgtaatgaagacagaaatatgtatgaggatgatcactgaaatatttatgacagtgcataatttgcaaaataaaaaatgtacactagcataatatttgtggcatatccgtgtaatggaagattatgcaggcattaaaatatgtacacaaaaagtttggtaaaggaaaaatgctgtcatgtgttacaaaagcatgataaataattgttaatatggaataagctcaaatatgtcaaaataaatgtaaaaaatgagtgttgcccaaaaaaaaaaaaaaaa

SEQ ID NO: 14326 - DNA, 1279 bp, Homo sapiens
cagcgaggagccggcgcctcccgcgccccgcggtcgccctggagtaatttcggatgcccagccgcggccgccttccccagtagacccgggagaggagttgcggccaacttgtgtgcctttcttccgccccggtgggagccggcgctgcgcgaagggctctcccggcggctcatgctgccggccctgcgcctgcccagcctcgggtgagccgcctccggagagacgggggagcgcggcggcgccgcgggctcggcgtgctctcctccggggacgcgggacgaagcagcagccccgggcgcgcgccagaggcatggagcgctgccccagcctaggggtcaccctctacgccctggtggtggtcctggggctgcgggcgacaccggccggcggccagcactatctccacatccgcccggcacccagcgacaacctgcccctggtggacctcatcgaacacccagaccctatctttgaccccaaggaaaaggatctgaacgagacgctgctgcgctcgctgctcgggggccactacgacccaggcttcatggccacctcgccccccgaggaccggcccggcgggggcgggggtgcagctgggggcgcggaggacctggcggagctggaccagctgctgcggcagcggccgtcgggggccatgccgagcgagatcaaagggctagagttctccgagggcttggcccagggcaagaagcagcgcctaagcaagaagctgcggaggaagttacagatgtggctgtggtcgcagacattctgccccgtgctgtacgcgtggaacgacctgggcagccgcttttggccgcgctacgtgaaggtgggcagctgcttcagtaagcgctcgtgctccgtgcccgagggcatggtgtgcaagccgtccaagtccgtgcacctcacggtgctgcggtggcgctgtcagcggcgcgggggccagcgctgcggctggattcccatccagtaccccatcatttccgagtgcaagtgctcgtgctagaactcgggggccccctgcccgcacccggacacttgatcgatccccaccgacgccccctgcaccgcctccaaccagttccaccaccctctagcgagggttttcaatgaacttttttttttttttttttttttttctgggctacagagacctagctttctggttcctgtaatgcactgtttaactgtgtaggaatgtatatgtgtgtgtatatacggtcccagttttaatttacttattaaaaggtcagtattatacgttaaaaaaaaaaaa

SEQ ID NO: 14327 - DNA, 4015 bp, Homo sapiens
gtggagccgagcggtgcggagcagatctggtggttctccggagagcagcttccttgggtgttacatgagccaagccctcactgtacagaagagtgagagctgaaacctgttccctgagctgatcagaaggacatcccttggcccctccatctgggctcctgtggataggaggggctgggtgagcaggccagctgggctatggtgtggtgcctcggcctggccgtcctcagcctggtcatcagccagggggctgacggtcgagggaagcctgaggtggtatcggtggtgggccgggctgaggagagtgtggtgctgggctgtgacctgctgcccccggccggccggccccccctgcatgtcatcgagtggctgcgctttggattcctgcttcccatcttcatccagttcggcctctactctccccgaattgaccctgattacgtgggacgagtccggctgcagaagggggcctctctccagattgagggtctccgggtggaagaccagggctggtacgagtgccgcgtgttcttcctggaccagcacatccctgaagacgattttgctaacggctcctgggtgcatctgacagtcaattcaccccctcaattccaggagacacctcctgctgtgttggaagtgcaggaactggagcctgtgaccctgcgttgtgtggcccgtggcagccccctgcctcatgtgacgtggaagctccgaggaaaggaccttggccagggccagggccaggtgcaagtgcagaacgggacgctgcggatccgccgggtagagcgaggcagctctggggtctacacctgccaagcctccagcactgagggcagcgccacccacgccacccagctgctagtgctaggacccccagtcatcgtggtgccccccaagaacagcacagtcaatgcctcccaggatgtttcattggcctgccatgctgaggcataccctgctaacctcacctacagctggttccaggacaacatcaatgtcttccacattagccgcctgcagccccgggtgcagatcctggtggacgggagcctgcggctgctggccacccagcctgatgatgccggctgctacacctgtgtgcccagcaatggcctcctgcatccaccctcagcctctgcctacctcactgtgctctgcatgccgggggtgatccgctgcccggttcgtgccaaccccccactgctctttgtcagctggaccaaggatggaaaggccctgcagctggacaagttccctggctggtcccagggcacagaaggctcactgatcatcgccctggggaacgaggatgccctgggagaatactcctgcaccccctacaacagtcttggtaccgccgggccctctcctgtgacccgcgtgctgctcaaggctcccccagcttttatagagcggcccaaggaagaatatttccaagaagtagggcgggagctgctcatcccctgctccgcccaaggggaccctcctcctgttgtctcttggaccaaggtgggccgggggctgcaaggccaggcccaggtggacagcaacagcagcctcatcctgcgaccattgaccaaggaggcccacgggcactgggaatgcagtgccagcaatgctgtggcccgagtggccacctccacgaacgtctacgtgctgggcactagccctcatgttgtcaccaatgtgtccgtggtggctttgcccaagggtgccaatgtctcctgggagcctggctttgatggtggttatctgcagagattcagtgtctggtacaccccactggccaagcgtcctgaccgaatgcaccatgactgggtgtccttggcagtgcctgtgggggctgctcacctcctagtgccagggctgcagccccacacccagtaccagttcagcgtgctagctcagaacaagctggggagtggtcccttcagcgaaatcgtcttgtctgctccggaagggcttcctaccacgccagctgcacccgggcttcccccaacagagataccgcctcccctgtcccctccgcggggtctggtggcagtgaggacaccccggggggtactcctgcattgggatcccccagagctggtccctaagagactggatggctacgtcttggaaggccggcaaggctcccagggctgggaggtgctggacccggctgtggcaggcacagaaacagagctgctggtgccaggcctcatcaaggatgttctctacgagttccgcctcgtggccttcgcgggcagcttcgtcagcgaccccagcaacacggccaacgtctccacttccggtctggaggtctacccttcgcgcacgcagctgccgggcctcctgcctcagcccgtgctggccggcgtggtgggcggagtctgctttctgggagtggccgtccttgtgagcatcctggccggctgcctcctgaaccggcgcagggctgcccgccgccgccgcaagcgcctccgccaagatccacctcttatcttctctccgaccgggaagtcagctgcaccctctgctctgggctcaggcagtcctgacagcgtggcgaagctgaagctccagggatccccagtccccagcctgcgccagagtctgctctggggggatcctgccggaactcccagcccccacccggatcctccatctagccggggacccttacctctggagcccatttgccggggcccagacgggcgctttgtgatggggcccactgtggcggccccccaggaaaggtcaggccgggagcaggcagaacctcggactccagcccagcgtctggcccggtcctttgactgtagcagcagcagccccagtggggcaccccagcccctctgcattgaagacatcagccctgtggcaccccctccagcagccccacccagtcccttgccaggtcctggacccctgctccagtacctgagcctgcccttcttccgagagatgaatgtggatggggactggcccccgcttgaggagcccagccctgctgcacccccagattacatggatacccggcgctgtcccacctcatctttccttcgttctccagaaacccctcctgtatcccccagggaatcacttcctggggctgtggtaggggctggggccactgcagagcccccttacacagccctggctgactggacactgagggagcggctgctgccaggccttctccctgctgcccctcgaggcagcctcaccagccagagcagcgggcgaggcagcgcttcgttcctgcggcccccctccacagccccctctgcaggaggcagctacctcagccctgctccaggagacaccagcagctgggccagtggccctgagagatggccccgaagggagcatgtggtgacagtcagcaagaggaggaacacatctgtggacgagaactatgagtgggactcagaattccctggggacatggaattgctggagactttgcacctgggcttggccagctcccggctcagacctgaagctgagacagagctaggtgtgaagactccagaggagggctgcctcctgaacactgcccatgttactggccctgaggcccgctgtgctgcccttcgggaggaattcctggccttccgccgccgccgagatgctactagggctcggctaccagcctatcgacagccagtcccccaccccgaacaggccactctgctgtgaacatccctaatgtgaggctgtgaaaaggcatatggacctgcaaaggaggcccccaaccagacagacctagtttcaaacgagggcactgcccctgcctgcccctttggtgcccaggcacagaccctgatagtgggtttgggtcaccttggtatggaatgtatgtgctgaccccctaggtgagtctggggattggaacagggatcttaggtctgcctctctctctctctctctctctctctctctctctctgtgtgtgtgtgtgtgtgtgaagttttttacaggtgaataaacaaagtttgaaagaaaaaaaaaaaaaaaaaaaaaa

SEQ ID NO: 14328 - DNA, 7965 bp, Homo sapiens
gcctgtgctgtgcctgcctcctagagctcattccctacgccccgactctgtcctggacagcgtgcccaccagccatggcggggccccggggcctcctcccactctgcctcctggccttctgcctggcaggcttcagcttcgtcagggggcaggtgctgttcaaaggctgtgatgtgaaaaccacgtttgtcactcatgtaccctgcacctcgtgcgcggccatcaagaagcagacgtgtccctcaggctggctgcgggagctcccggatcagataacccaggactgccgctacgaagtacagctggggggctctatggtgtccatgagcggctgcagacggaagtgccggaagcaagtggtgcagaaggcctgctgccctggctactggggttcccggtgccatgaatgccctgggggcgctgagaccccatgcaatggccacgggacctgcttggatggcatggacaggaatgggacctgtgtgtgccaggaaaacttccgcggctcagcctgccaggagtgccaagaccccaaccggttcgggcctgactgccaatcggtgtgcagctgtgtgcacggagtgtgcaaccatgggccacgtggggatggaagctgcctgtgctttgctggatacactggcccccactgtgatcaagagctgcccgtctgccaggagctgcgctgtccccagaacacccagtgctccgcagaggctcccagctgcaggtgcctgcccggctacacacagcagggcagtgaatgccgagcccccaacccctgctggccatcaccctgctcactgctggcccagtgctcggtgagccccaaggggcaggctcagtgtcactgccctgagaactaccatggcgatgggatggtgtgtctgcccaaggacccatgcactgacaaccttggtggctgccccagcaactctactttgtgtgtgtaccagaagccgggccaggccttctgcacctgccggccaggcctggtcagcatcaacagcaacgcttctgcgggctgcttcgccttctgctcccccttctcctgcgaccggtctgccacttgccaggtgaccgctgatgggaagaccagctgtgtgtgcagggaaagcgaggtgggggatgggcgtgcctgctacggacacctgctccacgaggtgcagaaggccacgcagacaggccgggtgttcctgcagctgagggtcgccgtggccatgatggaccagggctgccgggaaatccttaccacagcgggccctttcaccgtgctggtgccatccgtctcctccttctcctccaggaccatgaatgcatcccttgcccagcagctctgtagacagcacatcatcgcagggcagcacatcctggaggacacaaggacccaacaaacacgaaggtggtggacgctggccgggcaggagatcaccgtcacctttaaccaattcacgaaatactcctacaagtacaaagaccagccccagcagacgttcaacatctacaaggccaacaacatagcagctaatggcgtcttccacgtggtcactggcctgcggtggcaggccccctctgggacccctggggatcccaagagaactatcggacagatcctcgcctctaccgaggccttcagccgctttgaaaccatcctggagaactgtgggctgccctccatcctggacggacctgggcccttcacagtctttgccccaagcaatgaggctgtggacagcttgcgtgacggccgcctgatctacctcttcacagcgggtctctctaaactgcaggagttggtgcggtaccacatctacaaccacggccagctgaccgttgagaagctcatctccaagggtcggatcctcaccatggcgaaccaggtcctggctgtgaacatttctgaggaggggcgcatcctgctgggacccgagggggtcccgctgcagagggtagacgtgatggccgccaatggtgtgatccacatgctggacggcatcctgctgcccccgaccatcctgcccatcctgcccaagcactgcagcgaggagcagcacaagattgtggcgggctcctgtgtggactgccaagccctgaacaccagcacgtgtccccccaacagtgtgaagctggacatcttccccaaggagtgtgtctacatccatgacccaacggggctcaatgtgctaaagaagggctgtgccagctactgcaaccaaaccatcatggaacaaggctgctgcaaaggttttttcgggcctgactgcacgcagtgtcctgggggcttctccaacccctgctatggcaaaggcaattgcagtgatgggatccagggcaatggggcctgcctctgcttcccagactacaagggcatcgcctgccacatctgctcgaacccaaacaagcatggagagcaatgccaggaagactgcggctgtgtccatggtctctgcgacaaccgcccaggcagtgggggggtgtgccagcagggcacgtgtgcccctggcttcagtggccggttctgcaacgagtccatgggggactgtgggcccacagggctggcccagcactgccacctgcatgcccgctgtgttagccaggagggtgttgccagatgtcgctgtcttgatggctttgagggtgatggcttctcctgcacacctagcaacccctgctcccacccggaccgtggaggctgctcagagaatgctgagtgtgtccctgggtccctgggcacccaccactgcacatgccacaaaggctggagtggggatggccgcgtctgtgtggctattgacgagtgtgagctggacatgagaggtggctgccacaccgatgccctctgcagctatgtgggccccgggcagagccgatgcacctgcaagctgggctttgccggggatggctaccagtgcagccccatcgacccctgccgggcaggcaatggcggctgccacggcctggccacctgccgggcagtggggggaggtcagcgggtctgcacgtgcccccctggctttgggggtgatggcttcagctgttatggagacatcttccgggagctggaggcaaatgcccacttctccatcttctaccaatggcttaagagtgccggcatcacgcttcctgccgaccgccgagtcacagccctggtgccctccgaggctgcagtccgtcagctgagccccgaggaccgagctttctggctgcagccaaggacgctgccgaacctggtcagggcccattttctccagggtgccctcttcgaggaggagctggcccggctgggtgggcaggaagtggccaccctgaaccccaccacacgctgggagattcgcaacattagtgggagggtctgggtgcagaatgccagcgtggatgtggctgacctccttgccaccaacggtgtcctacacatcctcagccaggtcttactgcccccccgaggggatgtgcccggtgggcaggggttgctgcagcagctggacttggtgcctgccttcagcctcttccgggaattgctgcagcaccatgggttggtgccccagattgaggctgccactgcctacaccatctttgtgcccaccaaccgctccctggaggcccagggcaacagcagtcacctggacgcagacacagtgcggcaccatgtggtcctgggggaggccctctccatggaaaccctgcggaagggtggacaccgcaactccctcctgggccctgcccactggatcgtcttctacaaccacagtggccagcctgaggtgaaccatgtgccactggaaggccccatgctggaggcccctggccgctcgctgattggtctgtcgggggtcctgacggtgggctcaagtcgctgcctgcatagccacgctgaggccctgcgggagaaatgtgtaaactgcaccaggagattccgctgcactcagggcttccagctgcaggacacacccaggaagagctgtgtctaccgatctggcttctccttctcccggggctgctcttacacatgtgccaagaagatccaggtgccggactgctgccctggtttctttggcacgctgtgtgagccatgcccagggggtctagggggggtgtgctcaggccatgggcagtgccaggacaggttcctgggcagcggggagtgccactgccacgagggcttccatggaacggcctgtgaggtgtgtgagctgggccgctacgggcccaactgcaccggagtgtgtgactgtgcccatgggctgtgccaggaggggctgcaaggggacggaagctgtgtctgtaacgtgggctggcagggcctccgctgtgaccagaaaatcaccagccctcagtgccctaggaagtgcgaccccaatgccaactgcgtgcaggactcggccggagcctccacctgcgcctgtgctgcgggatactccggcaatggcatcttctgttcagaggtggacccctgcgcccacggccatgggggctgctcccctcatgccaactgtaccaaggtggcacctgggcagcggacatgcacctgccaggatggctacatgggcgacggggagctgtgccaggaaattaacagctgtctcatccaccacgggggctgccacattcacgccgagtgcatccccactggcccccagcaggtctcctgcagctgccgtgagggttacagcggggatggcatccggacctgcgagctcctggacccctgctctaagaacaatggaggatgcagcccatatgccacctgcaaaagcacaggggatggccagaggacatgtacctgcgacacagcccacaccgtgggggacggcctcacctgccgtgcccgagtcggcctggagctcctgagggataagcatgcctcattcttcagcctccgcctcctggaatataaggagctcaagggcgatgggcctttcaccatcttcgtgccgcacgcagatctaatgagcaacctgtcgcaggatgagctggcccggattcgtgcgcatcgccagctggtgtttcgctaccacgtggttggctgtcggcggctgcggagcgaggacctgctggagcaggggtacgccacggccctctcagggcacccactgcgcttcagcgagagggagggcagcatatacctcaatgacttcgcgcgcgtggtgagcagcgaccatgaggccgtgaacggcatcctgcacttcattgaccgtgtcctgctgccccccgaggcgctgcactgggagcctgatgatgctcccatcccgaggagaaatgtcaccgccgccgcccagggcttcggttacaagatcttcagcggcctcctgaaggtggccggcctcctgcccctgcttcgagaggcatcccataggcccttcacaatgctgtggcccacagacgccgcctttcgagctctgcctccggatcgccaggcctggctgtaccatgaggaccaccgtgacaagctagcagccattctgcggggccacatgattcgcaatgtcgaggccttggcatctgacctgcccaacctgggcccacttcgaaccatgcatgggacccccatctctttctcctgcagccgaacgcgggccggtgagctcatggtgggtgaggatgatgctcgcattgtgcagcggcacttgccctttgagggtggcctggcctatggcatcgaccagctgctggagccacctggccttggtgctcgctgtgaccactttgagacccggcccctgcgactgaacacctgcagcatctgtgggctggagccaccctgtcctgaggggtcacaggagcagggcagccctgaggcctgctggcgcttctacccgaagttctggacgtcccctccgctgcactctttgggattacgcagcgtctgggtccaccccagcctttggggtaggccccaaggcctgggcaggggctgccaccgcaattgtgtcaccaccacctggaagcccagctgctgccctggtcactatggcagtgagtgccaagcttgccctggcggccccagcagcccttgtagtgaccgtggcgtgtgcatggacggcatgagtggcagtgggcagtgtctgtgccgttcaggttttgctgggacagcctgtgaactctgtgctcctggtgcctttgggccccattgtcaagcctgccgctgcactgtgcatggccgctgtgatgagggccttgggggctctggctcctgcttctgtgatgaaggctggactgggccacgctgtgaggtgcaactggagctgcagcctgtgtgtaccccaccctgtgcacccgaggctgtgtgccgtgcaggcaacagctgtgagtgcagcctgggctatgaaggggatggccgtgtgtgtacagtggcagacctgtgccaggacgggcatggtggctgcagtgagcacgccaactgtagccaggtaggaacaatggtcacttgtacctgcctgcccgactacgagggtgatggctggagctgccgggcccgcaacccctgcacagatggccaccgcgggggctgcagcgagcacgccaactgcttgagcaccggcctgaacacacggcgctgtgagtgccacgcaggctacgtaggcgatggactgcagtgtctggaggagtcggaaccacctgtggaccgctgcttgggccagccaccgccctgccactcagatgccatgtgcactgacctgcacttccaggagaaacgggctggcgttttccacctccaggccaccagcggcccttatggtctgaacttttcggaggctgaggcggcatgcgaagcacagggagccgtccttgcttcattccctcagctctctgctgcccagcagctgggcttccacctgtgcctcatgggctggctggccaatggctccactgcccaccctgtggttttccctgtggcggactgtggcaatggtcgggtgggcatagtcagcctgggtgcccgcaagaacctctcagaacgctgggatgcctactgcttccgtgtgcaagatgtggcctgccgatgccgaaatggcttcgtgggtgacgggatcagcacgtgcaatgggaagctgctggatgtgctggctgccactgccaacttctccaccttctatgggatgctattgggctatgccaatgccacccagcggggtctcgacttcctggacttcctggatgatgagctcacgtataagacactcttcgtccctgtcaatgaaggctttgtggacaacatgacgctgagtggcccagacttggagctgcatgcctccaacgccaccctcctaagtgccaacgccagccaggggaagttgcttccggcccactcaggcctcagcctcatcatcagtgacgcaggccctgacaacagttcctgggcccctgtggccccagggacagttgtggttagccgtatcattgtgtgggacatcatggccttcaatggcatcatccatgctctggccagccccctcctggcacccccacagccccaggcagtgctggcgcctgaagccccacctgtggcggcaggcgtgggggctgtgcttgccgctggagcactgcttggcttggtggccggagctctctacctccgtgcccgaggcaagcccatgggctttggcttctctgccttccaggcggaagatgatgctgatgacgacttctcaccgtggcaagaagggaccaaccccaccctggtctctgtccccaaccctgtctttggcagcgacaccttttgtgaacccttcgatgactcactgctggaggaggacttccctgacacccagaggatcctcacagtcaagtgacgaggctggggctgaaagcagaagcatgcacagggaggagaccacttttattgcttgtctgggtggatggggcaggaggggctgagggcctgtcccagacaataaaggtgccctcagcggatgtgggccatgtcaccaaaaaaaaaaaaaaaaaaaaaaaaaaaaaaaaaaaaaaaaa

SEQ ID NO: 14329 - DNA, 3850 bp, Homo sapiens
agactgggtgcctgtggccctgggaggaggtggaaggggaggagcaggccacacaggcacaggccggtgagggacctgcccagacctggagggtctcgctctgtcacacaggctggagtgcagtggtgtgatcttggctcatcgtaacctccacctcccgggttcaagtgattctcatgcctcagcctcccgagtagctgggattacaggtggtgacttccaagagtgactccgtcggaggaaaatgactccccagtcgctgctgcagacgacactgttcctgctgagtctgctcttcctggtccaaggtgcccacggcaggggccacagggaagactttcgcttctgcagccagcggaaccagacacacaggagcagcctccactacaaacccacaccagacctgcgcatctccatcgagaactccgaagaggccctcacagtccatgcccctttccctgcagcccaccctgcttcccgatccttccctgaccccaggggcctctaccacttctgcctctactggaaccgacatgctgggagattacatcttctctatggcaagcgtgacttcttgctgagtgacaaagcctctagcctcctctgcttccagcaccaggaggagagcctggctcagggccccccgctgttagccacttctgtcacctcctggtggagccctcagaacatcagcctgcccagtgccgccagcttcaccttctccttccacagtcctccccacacggccgctcacaatgcctcggtggacatgtgcgagctcaaaagggacctccagctgctcagccagttcctgaagcatccccagaaggcctcaaggaggccctcggctgcccccgccagccagcagttgcagagcctggagtcgaaactgacctctgtgagattcatgggggacatggtgtccttcgaggaggaccggatcaacgccacggtgtggaagctccagcccacagccggcctccaggacctgcacatccactcccggcaggaggaggagcagagcgagatcatggagtactcggtgctgctgcctcgaacactcttccagaggacgaaaggccggagcggggaggctgagaagagactcctcctggtggacttcagcagccaagccctgttccaggacaagaattccagccaagtcctgggtgagaaggtcttggggattgtggtacagaacaccaaagtagccaacctcacggagcccgtggtgctcactttccagcaccagctacagccgaagaatgtgactctgcaatgtgtgttctgggttgaagaccccacattgagcagcccggggcattggagcagtgctgggtgtgagaccgtcaggagagaaacccaaacatcctgcttctgcaaccacttgacctactttgcagtgctgatggtctcctcggtggaggtggacgccgtgcacaagcactacctgagcctcctctcctacgtgggctgtgtcgtctctgccctggcctgccttgtcaccattgccgcctacctctgctccagggtgcccctgccgtgcaggaggaaacctcgggactacaccatcaaggtgcacatgaacctgctgctggccgtcttcctgctggacacgagcttcctgctcagcgagccggtggccctgacaggctctgaggctggctgccgagccagtgccatcttcctgcacttctccctgctcacctgcctttcctggatgggcctcgaggggtacaacctctaccgactcgtggtggaggtctttggcacctatgtccctggctacctactcaagctgagcgccatgggctggggcttccccatctttctggtgacgctggtggccctggtggatgtggacaactatggccccatcatcttggctgtgcataggactccagagggcgtcatctacccttccatgtgctggatccgggactccctggtcagctacatcaccaacctgggcctcttcagcctggtgtttctgttcaacatggccatgctagccaccatggtggtgcagatcctgcggctgcgcccccacacccaaaagtggtcacatgtgctgacactgctgggcctcagcctggtccttggcctgccctgggccttgatcttcttctcctttgcttctggcaccttccagcttgtcgtcctctaccttttcagcatcatcacctccttccaaggcttcctcatcttcatctggtactggtccatgcggctgcaggcccggggtggcccctcccctctgaagagcaactcagacagcgccaggctccccatcagctcgggcagcacctcgtccagccgcatctaggcctccagcccacctgcccatgtgatgaagcagagattcggcctcgtcgcacactgcctgtggcccccgagcccggcccagccccaggccagtcagccgcagactttggaaagcccaacgaccatggagagatgggccgttgccatggtggacggactcccgggctgggcttttgaattggccttggggactactcggctctcactcagctcccacgggactcagaagtgcgccgccatgctgcctagggtactgtccccacatctgtcccaacccagctggaggcctggtctctccttacaacccctgggcccagccctcattgctgggggccaggccttggatcttgagggtctggcacatccttaatcctgtgcccctgcctgggacagaaatgtggctccagttgctctgtctctcgtggtcaccctgagggcactctgcatcctctgtcattttaacctcaggtggcacccagggcgaatggggcccagggcagaccttcagggccagagccctggcggaggagaggccctttgccaggagcacagcagcagctcgcctacctctgagcccaggccccctccctccctcagccccccagtcctccctccatcttccctggggttctcctcctctcccagggcctccttgctccttcgttcacagctgggggtccccgattccaatgctgttttttggggagtggtttccaggagctgcctggtgtctgctgtaaatgtttgtctactgcacaagcctcggcctgcccctgagccaggctcggtaccgatgcgtgggctgggctaggtccctctgtccatctgggcctttgtatgagctgcattgcccttgctcaccctgaccaagcacacgcctcagaggggccctcagcctctcctgaagccctcttgtggcaagaactgtggaccatgccagtcccgtctggtttccatcccaccactccaaggactgagactgacctcctctggtgacactggcctagggcctgacactctcctaagaggttctctccaagcccccaaatagctccaggcgccctcggccgcccatcatggttaattctgtccaacaaacacacacgggtagattgctggcctgttgtaggtggtagggacacagatgaccgacctggtcactcctcctgccaacattcagtctggtatgtgaggcgtgcgtgaagcaagaactcctggagctacagggacagggagccatcattcctgcctgggaatcctggaagacttcctgcaggagtcagcgttcaatcttgaccttgaagatgggaaggatgttctttttacgtaccaattcttttgtcttttgatattaaaaagaagtacatgttcattgtagagaatttggaaactgtagaagagaatcaagaagaaaaataaaaatcagctgttgtaatcacctagcaaactggaaaaaaaaaaaaaaaaaaaaaaaaaaaaaaaaaaaaaaaaaaaaaaaaaaaaaaaaaaaaaaaaaaaaaaaaaa

SEQ ID NO: 14330 - DNA, 2463 bp, Homo sapiens
atccttatcttctcgtctagttctccgaggttgaaggctcggcctgctcagagaaggaaactgaggtccaccgagttggagaaacctactcaacaccaggactaacttcttcagtgcttagagtgtgagaaaaatggcaaatatgaatagtgattctaggcatcttggcacctctgaggtagatcatgaaagagatcctggacctatgaatatccagtttgagccatcggatctaagatccaaaaggcctttctgtatagagcccacaaacatcgtgaatgtgaatcatgtcattcagagggttagtgaccatgcctctgccatgaacaagagaattcattactacagccggctcaccactcctgcagacaaggcactgattgccccagaccatgtagttccagctccagaagagtgctatgtgtatagtccattgggctctgcttataaacttcaaagttacactgaaggatacggtaaaaacaccagtttagtaaccatttttatgatttggaataccatgatgggaacatctatactaagcattccttggggcataaaacaggctggatttactactggaatgtgtgtcatcatactgatgggccttttaacactttattgctgctacagagtagtgaaatcacggactatgatgttttcattggataccactacctgggaatatccagatgtctgcagacattatttcggctcctttgggcagtggtcgagtctcctcttctccttggtgtctctcattggagcaatgatagtttattgggtgcttatgtcaaattttctttttaatactggaaagtttatttttaattttattcatcacattaatgacacagacactatactgagtaccaataatagcaaccctgtgatttgtccaagtgccgggagtggaggccatcctgacaacagctctatgattttctatgccaatgacacaggagcccaacagtttgaaaagtggtgggataagtccaggacagtccccttttatcttgtagggctcctcctcccactgctcaatttcaagtctccttcatttttttcaaaatttaatatcctaggcacagtgtctgtcctttatttgattttccttgtcacctttaaggctgttcgcttgggatttcatttggaatttcattggtttataccaacagaattttttgtaccagagataagatttcagtttccacagctgactggagtgcttacccttgctttttttattcataattgtatcatcacactcttgaagaacaacaagaaacaagaaaacaatgtgagggacttgtgcattgcttatatgctggtgacattaacttatctctatattggagtcctggtttttgcttcatttccttcaccaccattatccaaagattgtattgagcagaattttttagacaacttccctagcagtgacaccctgtccttcattgcaaggatattcctgctgttccagatgatgactgtatacccactcttaggctacctggctcgtgtccagcttttgggccatatcttcggtgacatttatcctagcattttccatgtgctgattcttaatctaattattgtgggagctggagtgatcatggcctgtttctacccaaacataggagggatcataagatattcaggagcagcatgtggactggcctttgtattcatatacccatctctcatctatataatttccctccaccaagaagagcgtctgacatggcctaaattaatcttccacgttttcatcatcattttgggcgtggctaacctgattgttcagttttttatgtgaaatacctcaactgtttttttcaagagctctcatgatattttgagccttgacaacagttctatataaattcacttgtaaatgctgctgttgtgtaattctaaatattttctaagataatttgaaagcaagggaaatagtggccccttaatgagtatttttttattggggtggggaaaggggcaaaaagaatgatcttagtgtctttacctttctcatattaactcacctctttattctgtggtcttttctgaatagaaatgtatgccctaggaagaaatcatgctgggttttgcttttagagataaaaggtggtggatttattttgcctgcagtaaagattctcagggtgtcagagcagcatattgtcaaatcctgcttctgttttatgtttcagtgtattcactttcattttcttacttactagaccatttctgcagtttgcccaaacctctactgtttgggacagtaagccaaatacctcatttttaaaaagaagttttcatggcatcagtgttaataaagtacatttttaactgagtcttaatctctatttgaagaaaaagtagagacaaaagtaatgtcaatgtaatccccaggatcatgaaatgtatacaaaataaataaagtaggagagtttgttgctg

SEQ ID NO: 14331 - DNA, 1899 bp, Homo sapiens
gtccgtactgcagagccgctgccggagggtcgttttaaagggccgcgttgccgccccctcggcccgccatgctgctatccgtgccgctgctgctcggcctcctcggcctggccgtcgccgagcccgccgtctacttcaaggagcagtttctggacggagacgggtggacttcccgctggatcgaatccaaacacaagtcagattttggcaaattcgttctcagttccggcaagttctacggtgacgaggagaaagataaaggtttgcagacaagccaggatgcacgcttttatgctctgtcggccagtttcgagcctttcagcaacaaaggccagacgctggtggtgcagttcacggtgaaacatgagcagaacatcgactgtgggggcggctatgtgaagctgtttcctaatagtttggaccagacagacatgcacggagactcagaatacaacatcatgtttggtcccgacatctgtggccctggcaccaagaaggttcatgtcatcttcaactacaagggcaagaacgtgctgatcaacaaggacatccgttgcaaggatgatgagtttacacacctgtacacactgattgtgcggccagacaacacctatgaggtgaagattgacaacagccaggtggagtccggctccttggaagacgattgggacttcctgccacccaagaagataaaggatcctgatgcttcaaaaccggaagactgggatgagcgggccaagatcgatgatcccacagactccaagcctgaggactgggacaagcccgagcatatccctgaccctgatgctaagaagcccgaggactgggatgaagagatggacggagagtgggaacccccagtgattcagaaccctgagtacaagggtgagtggaagccccggcagatcgacaacccagattacaagggcacttggatccacccagaaattgacaaccccgagtattctcccgatcccagtatctatgcctatgataactttggcgtgctgggcctggacctctggcaggtcaagtctggcaccatctttgacaacttcctcatcaccaacgatgaggcatacgctgaggagtttggcaacgagacgtggggcgtaacaaaggcagcagagaaacaaatgaaggacaaacaggacgaggagcagaggcttaaggaggaggaagaagacaagaaacgcaaagaggaggaggaggcagaggacaaggaggatgatgaggacaaagatgaggatgaggaggatgaggaggacaaggaggaagatgaggaggaagatgtccccggccaggccaaggacgagctgtagagaggcctgcctccagggctggactgaggcctgagcgctcctgccgcagagcttgccgcgccaaataatgtctctgtgagactcgagaactttcatttttttccaggctggttcggatttggggtggattttggttttgttcccctcctccactctcccccaccccctccccgccctttttttttttttttttaaactggtattttatcctttgattctccttcagccctcacccctggttctcatctttcttgatcaacatcttttcttgcctctgtgccccttctctcatctcttagctcccctccaacctggggggcagtggtgtggagaagccacaggcctgagatttcatctgctctccttcctggagcccagaggagggcagcagaagggggtggtgtctccaaccccccagcactgaggaagaacggggctcttctcatttcacccctccctttctcccctgcccccaggactgggccacttctgggtggggcagtgggtcccagattggctcacactgagaatgtaagaactacaaacaaaatttctattaaattaaattttgtgtctc

SEQ ID NO: 14332 - DNA, 5398 bp, Homo sapiens
cgcggcggaggaggcagcatcccgcggcgctgacggtcctggggagagcatggcgccgaggtgcccctggccatggccgcggcggcggcgcctcctggacgtgctcgcgcccctggtcctgctgctcggggtccgcgcggcctccgcggagccagagcgcatcagcgaggaggtggggctgctgcagctccttggggaccccccgccccagcaggtcacccagacggatgaccccgacgtcgggctggcctacgtctttgggccagatgccaacagtggccaagtggcccggtaccacttccccagcctcttcttccgtgacttctcactgctgttccacatccggccagccacagagggcccaggggtgctgttcgccatcacggactcggcgcaggccatggtcttgctgggcgtgaagctctctggggtgcaggacgggcaccaggacatctccctgctctacacagaacctggtgcaggccagacccacacagccgccagcttccggctccccgccttcgtcggccagtggacacacttagccctcagtgtggcaggtggctttgtggccctctacgtggactgtgaggagttccagagaatgccgcttgctcggtcctcacggggcctggagctggagcctggcgccgggctcttcgtggctcaggcggggggagcggaccctgacaagttccagggggtgatcgctgagctgaaggtgcgcagggacccccaggtgagccccatgcactgcctggacgaggaaggcgatgactcagatggggcattcggagactctggcagcgggctcggggacgcccgggagcttctcagggaggagacgggcgcggccctaaaacccaggctccccgcgccaccccccgtcaccacgccacccttggctggaggcagcagcacggaagattccagaagtgaagaagtcgaggagcagaccacggtggcttcgttaggagctcagacacttcctggctcagattctgtctccacgtgggacgggagtgtccggacccctgggggccgcgtgaaagagggcggcctgaaggggcagaaaggggagccaggtgttccgggcccacctggccgggcaggccccccaggatccccatgcctacctggtcccccgggtctcccgtgcccagtgagtcccctgggtcctgcaggcccagcgttgcaaactgtccccggaccacaaggacccccagggcctccggggagggacggcacccctggaagggacggcgagccgggcgaccccggtgaagacggaaagccgggcgacaccgggccacaaggcttccctgggactccaggggatgtaggtcccaagggagacaagggagaccctggggttggagagagagggcccccaggaccccaagggcctccagggcccccaggaccctccttcagacacgacaagctgaccttcattgacatggagggatctggctttgggggcgatctggaggccctgcggggtcctcgaggcttccctggacctcccggaccccccggtgtcccaggcctgcccggcgagccaggccgctttggggtgaacagctccgacgtcccaggacccgccggccttcctggtgtgcctgggcgcgagggtccccccgggtttcctggcctcccgggacccccaggccctccgggaagagaggggcccccaggaaggactgggcagaaaggcagcctgggtgaagcaggcgccccaggacataaggggagcaagggagcccccggtcctgctggtgctcgtggggagagcggcctggcaggagcccccggacctgctggaccaccaggcccccctgggccccctgggcccccaggaccaggactccccgctggatttgatgacatggaaggctccggggggcccttctggtcaacagcccgaagcgctgatgggccacagggacctcccggcctgccgggacttaagggggatcctggcgtgcctgggctgccgggggcgaagggagaagttggagcagatggaatccccgggttccccggcctccctggcagagagggcattgctgggccccaggggccaaagggagacagaggcagccggggagaaaagggagatccagggaaggacggagtcgggcagccgggcctccctggcccccccggacccccgggacctgtggtctacgtgtcggagcaggacggatccgtcctgagcgtgccgggacctgagggccggccgggtttcgcaggctttcccggacctgcaggacccaagggcaacctgggctctaagggcgaacgaggctccccgggacccaagggtgagaagggtgaaccgggcagcatcttcagccccgacggcggtgccctgggccctgcccagaaaggagccaagggagagccgggcttccgaggacccccgggtccatacggacggccggggtacaagggagagattggctttcctggacggccgggtcgccccgggatgaacggattgaaaggagagaaaggggagccgggagatgccagccttggatttggcatgaggggaatgcccggccccccaggacctccagggcccccaggccctccagggactcctgtttacgacagcaatgtgtttgctgagtccagccgccccgggcctccaggattgccagggaatcagggccctccaggacccaagggcgccaaaggagaagtgggcccccccggaccaccagggcagtttccgtttgactttcttcagttggaggctgaaatgaagggggagaagggagaccgaggtgatgcaggacagaaaggcgaaaggggggagcccgggggcggcggtttcttcggctccagcctgcccggcccccccggccccccaggcccacgtggctaccctgggattccaggtcccaagggagagagcatccggggccagcccggcccacctggacctcagggaccccccggcatcggctacgaggggcgccagggccctcccggccccccaggccccccagggcccccttcatttcctggccctcacaggcagactatcagcgttcccggccctccgggcccccctgggccccctgggccccctggaaccatgggcgcctcctcaggggtgaggctctgggctacacgccaggccatgctgggccaggtgcacgaggttcccgagggctggctcatcttcgtggccgagcaggaggagctctacgtccgcgtgcagaacgggttccggaaggtccagctggaggcccggacaccactcccacgagggacggacaatgaagtggccgccttgcagccccccgtggtgcagctgcacgacagcaacccctacccgcggcgggagcacccccaccccaccgcgcggccctggcgggcagatgacatcctggccagcccccctcgcctgcccgagccccagccctaccccggagccccgcaccacagctcctacgtgcacctgcggccggcgcgacccacaagcccacccgcccacagccaccgcgacttccagccggtgctccacctggttgcgctcaacagccccctgtcaggcggcatgcggggcatccgcggggccgacttccagtgcttccagcaggcgcgggccgtggggctggcgggcaccttccgcgccttcctgtcctcgcgcctgcaggacctgtacagcatcgtgcgccgtgccgaccgcgcagccgtgcccatcgtcaacctcaaggacgagctgctgtttcccagctgggaggctctgttctcaggctctgagggtccgctgaagcccggggcacgcatcttctcctttgacggcaaggacgtcctgaggcaccccacctggccccagaagagcgtgtggcatggctcggaccccaacgggcgcaggctgaccgagagctactgtgagacgtggcggacggaggctccctcggccacgggccaggcctcctcgctgctggggggcaggctcctggggcagagtgccgcgagctgccatcacgcctacatcgtgctctgcattgagaacagcttcatgactgcctccaagtagccaccgcctggatgcggatggccggagaggaccggcggctcggaggaagcccccaccgtgggcagggagcggccggccagcccctggccccaggacctggctgccatactttcctgtatagttcacgtttcatgtaatcctcaagaaataaaaggaagccaaagagtgtatttttttaaaagtttaaaacagaagcctgatgctgacattcacctgccccaactctcccctgacctgtgagcccagctgggtcaggcagggtgcagtatcatgccctgtgcaacctcttggcctgatcagaccacggctcgatttctccaggatttcctgctttgggaagccgtgctcgccccagcaggtgctgacttcatctcccacctagcagcaccgttctgtgcacaaaacccagacctgttagcagacaggccccgtgaggcaatgggagctgaggccacactcagcacaaggccatctgggctcctccagggtgtgtgctcgccctgcggtagatgggagggaggctcaggtccctggggctagggggagccccttctgctcagctctgggccattctccacagcaaccccaggctgaagcaggttcccaagctcagaggcgcactgtgacccccagctccggcctgtcctccaacaccaagcacagcagcctggggctggcctcccaaatgagccatgagatgatacatccaaagcagacagctccaccctggccgagtccaagctgggagattcaagggacccatgagttggggtctggcagcctcccatccagggcccccatctcatgcccctggctgggacgtggctcagccagcacttgtccagctgagcgccaggatggaacacggccacatcaaagaggctgaggctggcacaggacatgcggtagccagcacacagggcagtgagggagggctgtcatctgtgcactgcccatggacaggctggctccagatgcagggcagtcattggctgtctcctaggaaacccatatccttaccctccttgggactgaaggggaaccccggggtgcccacaggccgccctgcgggtgaacaaagcagccacgaggtgcaacaaggtcctctgtcagtcacagccacccctgagatccggcaacatcaacccgagtcattcgttctgtggagggacaagtggactcagggcagcgccaggctgaccacagcacagccaacacgcacctgcctcaggactgcgacgaaaccggtggggctggttctgtaattgtgtgtgatgtgaagccaattcagacaggcaaataaaagtgaccttttacactgaaaaaaaaaaaaaaaaa

SEQ ID NO: 14333 - DNA, 5910 bp, Homo sapiens
agctccagccgcactgccccgatggctccctacccctgtggctgccacatcctgctgctgctcttctgctgcctggcggctgcccgggccaacctgctgaacctgaactggctttggttcaataatgaggacaccagccacgcagctaccacgatccctgagccccaggggcccctgcctgtgcagcccacagcagataccaccacacacgtgaccccccggaatggttccacagagccagcgacagcccctggcagccctgagccaccctcagagctgctggaagatggccaggacacccccacttctgccgagagcccggacgcgccagaggagaacattgccggtgtcggagccgagatcctgaacgtggccaaaggcatccggagcttcgtccagctgtggaatgacactgtccccactgagagcttggccagggcggaaaccctggtcctggagactcctgtgggcccccttgccctcgctgggccttccagcaccccccaggagaatgggaccactctctggcccagccgtggcattcctagctctccgggcgcccacacaaccgaggctggcaccttgcctgcacccaccccatcgcctccgtccctgggcaggccctgggcaccactcacggggccctcagtgccaccaccatcttcagagcgcatcagcgaggaggtggggctgctgcagctccttggggaccccccgccccagcaggtcacccagacggatgaccccgacgtcgggctggcctacgtctttgggccagatgccaacagtggccaagtggcccggtaccacttccccagcctcttcttccgtgacttctcactgctgttccacatccggccagccacagagggcccaggggtgctgttcgccatcacggactcggcgcaggccatggtcttgctgggcgtgaagctctctggggtgcaggacgggcaccaggacatctccctgctctacacagaacctggtgcaggccagacccacacagccgccagcttccggctccccgccttcgtcggccagtggacacacttagccctcagtgtggcaggtggctttgtggccctctacgtggactgtgaggagttccagagaatgccgcttgctcggtcctcacggggcctggagctggagcctggcgccgggctcttcgtggctcaggcggggggagcggaccctgacaagttccagggggtgatcgctgagctgaaggtgcgcagggacccccaggtgagccccatgcactgcctggacgaggaaggcgatgactcagatggggcattcggagactctggcagcgggctcggggacgcccgggagcttctcagggaggagacgggcgcggccctaaaacccaggctccccgcgccaccccccgtcaccacgccacccttggctggaggcagcagcacggaagattccagaagtgaagaagtcgaggagcagaccacggtggcttcgttaggagctcagacacttcctggctcagattctgtctccacgtgggacgggagtgtccggacccctgggggccgcgtgaaagagggcggcctgaaggggcagaaaggggagccaggtgttccgggcccacctggccgggcaggccccccaggatccccatgcctacctggtcccccgggtctcccgtgcccagtgagtcccctgggtcctgcaggcccagcgttgcaaactgtccccggaccacaaggacccccagggcctccggggagggacggcacccctggaagggacggcgagccgggcgaccccggtgaagacggaaagccgggcgacaccgggccacaaggcttccctgggactccaggggatgtaggtcccaagggagacaagggagaccctggggttggagagagagggcccccaggaccccaagggcctccagggcccccaggaccctccttcagacacgacaagctgaccttcattgacatggagggatctggctttgggggcgatctggaggccctgcggggtcctcgaggcttccctggacctcccggaccccccggtgtcccaggcctgcccggcgagccaggccgctttggggtgaacagctccgacgtcccaggacccgccggccttcctggtgtgcctgggcgcgagggtccccccgggtttcctggcctcccgggacccccaggccctccgggaagagaggggcccccaggaaggactgggcagaaaggcagcctgggtgaagcaggcgccccaggacataaggggagcaagggagcccccggtcctgctggtgctcgtggggagagcggcctggcaggagcccccggacctgctggaccaccaggcccccctgggccccctgggcccccaggaccaggactccccgctggatttgatgacatggaaggctccggggggcccttctggtcaacagcccgaagcgctgatgggccacagggacctcccggcctgccgggacttaagggggatcctggcgtgcctgggctgccgggggcgaagggagaagttggagcagatggaatccccgggttccccggcctccctggcagagagggcattgctgggccccaggggccaaagggagacagaggcagccggggagaaaagggagatccagggaaggacggagtcgggcagccgggcctccctggcccccccggacccccgggacctgtggtctacgtgtcggagcaggacggatccgtcctgagcgtgccgggacctgagggccggccgggtttcgcaggctttcccggacctgcaggacccaagggcaacctgggctctaagggcgaacgaggctccccgggacccaagggtgagaagggtgaaccgggcagcatcttcagccccgacggcggtgccctgggccctgcccagaaaggagccaagggagagccgggcttccgaggacccccgggtccatacggacggccggggtacaagggagagattggctttcctggacggccgggtcgccccgggatgaacggattgaaaggagagaaaggggagccgggagatgccagccttggatttggcatgaggggaatgcccggccccccaggacctccagggcccccaggccctccagggactcctgtttacgacagcaatgtgtttgctgagtccagccgccccgggcctccaggattgccagggaatcagggccctccaggacccaagggcgccaaaggagaagtgggcccccccggaccaccagggcagtttccgtttgactttcttcagttggaggctgaaatgaagggggagaagggagaccgaggtgatgcaggacagaaaggcgaaaggggggagcccgggggcggcggtttcttcggctccagcctgcccggcccccccggccccccaggcccacgtggctaccctgggattccaggtcccaagggagagagcatccggggccagcccggcccacctggacctcagggaccccccggcatcggctacgaggggcgccagggccctcccggccccccaggccccccagggcccccttcatttcctggccctcacaggcagactatcagcgttcccggccctccgggcccccctgggccccctgggccccctggaaccatgggcgcctcctcaggggtgaggctctgggctacacgccaggccatgctgggccaggtgcacgaggttcccgagggctggctcatcttcgtggccgagcaggaggagctctacgtccgcgtgcagaacgggttccggaaggtccagctggaggcccggacaccactcccacgagggacggacaatgaagtggccgccttgcagccccccgtggtgcagctgcacgacagcaacccctacccgcggcgggagcacccccaccccaccgcgcggccctggcgggcagatgacatcctggccagcccccctcgcctgcccgagccccagccctaccccggagccccgcaccacagctcctacgtgcacctgcggccggcgcgacccacaagcccacccgcccacagccaccgcgacttccagccggtgctccacctggttgcgctcaacagccccctgtcaggcggcatgcggggcatccgcggggccgacttccagtgcttccagcaggcgcgggccgtggggctggcgggcaccttccgcgccttcctgtcctcgcgcctgcaggacctgtacagcatcgtgcgccgtgccgaccgcgcagccgtgcccatcgtcaacctcaaggacgagctgctgtttcccagctgggaggctctgttctcaggctctgagggtccgctgaagcccggggcacgcatcttctcctttgacggcaaggacgtcctgaggcaccccacctggccccagaagagcgtgtggcatggctcggaccccaacgggcgcaggctgaccgagagctactgtgagacgtggcggacggaggctccctcggccacgggccaggcctcctcgctgctggggggcaggctcctggggcagagtgccgcgagctgccatcacgcctacatcgtgctctgcattgagaacagcttcatgactgcctccaagtagccaccgcctggatgcggatggccggagaggaccggcggctcggaggaagcccccaccgtgggcagggagcggccggccagcccctggccccaggacctggctgccatactttcctgtatagttcacgtttcatgtaatcctcaagaaataaaaggaagccaaagagtgtatttttttaaaagtttaaaacagaagcctgatgctgacattcacctgccccaactctcccctgacctgtgagcccagctgggtcaggcagggtgcagtatcatgccctgtgcaacctcttggcctgatcagaccacggctcgatttctccaggatttcctgctttgggaagccgtgctcgccccagcaggtgctgacttcatctcccacctagcagcaccgttctgtgcacaaaacccagacctgttagcagacaggccccgtgaggcaatgggagctgaggccacactcagcacaaggccatctgggctcctccagggtgtgtgctcgccctgcggtagatgggagggaggctcaggtccctggggctagggggagccccttctgctcagctctgggccattctccacagcaaccccaggctgaagcaggttcccaagctcagaggcgcactgtgacccccagctccggcctgtcctccaacaccaagcacagcagcctggggctggcctcccaaatgagccatgagatgatacatccaaagcagacagctccaccctggccgagtccaagctgggagattcaagggacccatgagttggggtctggcagcctcccatccagggcccccatctcatgcccctggctgggacgtggctcagccagcacttgtccagctgagcgccaggatggaacacggccacatcaaagaggctgaggctggcacaggacatgcggtagccagcacacagggcagtgagggagggctgtcatctgtgcactgcccatggacaggctggctccagatgcagggcagtcattggctgtctcctaggaaacccatatccttaccctccttgggactgaaggggaaccccggggtgcccacaggccgccctgcgggtgaacaaagcagccacgaggtgcaacaaggtcctctgtcagtcacagccacccctgagatccggcaacatcaacccgagtcattcgttctgtggagggacaagtggactcagggcagcgccaggctgaccacagcacagccaacacgcacctgcctcaggactgcgacgaaaccggtggggctggttctgtaattgtgtgtgatgtgaagccaattcagacaggcaaataaaagtgaccttttacactgaaaaaaaaaaaaaaaaa

SEQ ID NO: 14334 - DNA, 3998 bp, Homo sapiens
agtggagcctgtccggcccccttgctgcccgctagctcccgccggctggcgcaagctgtcggcgccggggcactgcgggcggggtcggagcctggccttcctgacgttgcagctgccgtccccgcacgttccggccagggcctccctcttagggccgggcggtgcccgtggctcaggctgcagagtagaaagcacaaaaaccagcctgattgtatctggaaaaaaccattatgttacagttgataggctcaccccaaaatatgcttttggggactgatttagcacctgcatattctgcgtgaatctctttaattggttgcagttgagctaatggtggagccaaaatgctattgccctgtcttcatcaacatttaatcaagtgttgcggagataggaacatgggagagaaacaatctgggtaacatgaaagtgatgctggttgctaagggaaggcaacttgattctgtgggaagggctgtagctgatccatccgttgtctagatttgagtatgagcacagtggaagaggattctgacacagtaacagtagaaactgtgaactctgtgactttgactcaggacacagaagggaatctcattcttcactgccctcagaatgaagcggatgaaatagactcagaagatagtattgaacctccacataaaaggctttgtttgtcctctgaggatgatcagagtattgatgattctactccttgcatatcagttgttgcacttccactttcagaaaatgatcagagctttgaagtgaccatgactgcaaccacagaagtagcagatgatgaggttactgaggggactgtgacacagatacagattttgcagaatgagcaactagatgaaatatctcccttgggtaacgaggaagtttcagcagttagccaagcatggtttacaactaaagaagataaggattctctgactaataaaggacataaatggaagcaggggatgtggtccaaggaagaaattgatattttgatgaacaatattgaacgctatcttaaggcacgcggaataaaagatgctacagaaatcatctttgagatgtcaaaagacgaaagaaaagatttctacaggactatagcatggggtctgaaccggcctttgtttgcagtttatagaagagtgcttcgcatgtatgatgacagaaaccatgtgggaaaatatacacctgaagaaattgagaagctcaaggagctccggataaagcatggcaatgactgggcaacaataggggcggcgctaggaagaagtgcatcttctgtcaaagatcggtgccgactgatgaaggatacttgcaacacagggaagtggacagaagaagaagaaaagagacttgcagaagtggttcatgagttgacaagcactgagccaggtgacatagtcacacagggtgtgtcttgggcagctgtggctgaacgagtcggtacccgctcagaaaagcaatgtcgttctaaatggctcaactacctgaattggaaacagagtgggggtactgaatggaccaaggaagatgaaatcaatctcatcctcaggatagcagaacttgatgtagctgatgaaaatgacattaactgggatctgttagctgagggatggagtagtgtccgttcaccacaatggctacgaagtaaatggtggaccatcaaaaggcaaattgcaaaccataaggatgtttcgttccctgtcttaataaaaggtcttaaacagttacatgagaaccaaaaaaacaacccaacgcttttggagaataaatcaggatctggagttccaaacagtaataccaattccagtgtgcagcatgttcagataagagttgcccgcttggaagataatacagccatctcttctagccccatggcagcattgcagattccagtccagatcacccatgtttcttcagcagactctcctgctaccgttgactcagaaacaataacactaaacagtggaacactacagacatttgagattcttccctctttccatctacagcccactggcactccaggcacctacctacttcaaacaagctcaagccaaggccttcccctaactctgactgctagtcccacagtaaccctgacagctgctgctcctgcttctcctgaacagattattgttcatgctttatccccagaacatttgttgaacacaagtgataatgttacagtgcagtgtcacacaccaagagtcatcattcagactgttgccacagaggacatcacttcttccatatcccaagcagaactgacagtcgatagtgatattcagtcatctgattttcctgagcctccagacgccctagaagcagacactttcccagatgaagttcatcaccctaagatgactgtggagccatcatttaatgatgctcatgtatccaaattcagtgaccaaaatagcacagaactgatgaatagtgttatggtcagaacagaagaagaaatctctgacaccgaccttaaacaagaggaatcaccctctgatttagccagtgcttatgttactgagggtttagagtctcccactatagaagaacaagttgatcaaacaattgatgatgaaacaatacttatcgttccttcaccacatggctttatccaggcatctgatgttatagatactgaatctgtcttgcctttgacaacactaacagatcccatactccaacatcatcaggaagaatcaaatatcattggatcatccttgggcagtcctgtttcagaagattcaaaggatgtcgaagatttggtaaactgtcattagaataattcttagaaataggcagttcaagcaaagaaggcacactgttaattacaacctcttcaaagaaataggagcaacccccaagaggcttaatttaccaatttaaatagccacagtccttaagccacacacattgttgctgctatgactttttacctcctttaaacacatcatctgaggttgagttttatgacagtatgtagttgagtggaggctgggagttttaagcataaatccctgtttagtgttacatgggaataaggaatttcattcacttcagccactaagaaaagtttagaatcacgaaagcttaactgctgtggtttaaagtacagtttctctaaagatcagacatggcactgtctcctctcaagcctggttgtagttcagatgagtcttttcaacatggtcttcaacatggtctagagcttaccagtgatcttctgatcttcaagaagactaagtttgagacttgaccagcattcaagtatagagacctaggaggtggtcttgtggtggtacatttggttaacccattgctggcagtgggagctgatttaggcagggtaaacaggaaagcattaaaagttaaaattcactacaggttttttgttacttttaaagggaatatggataagcatagtaacaaaacccaccagaatctaagcagttttcaccccctcagaaaccactgtcattagtttacaaagttagcactttgaagtaaaactaaatgaggaaggaagtaatgttacctatccttgataccatgaccatttattagatgttttgctatataaattaccgagagaatagtttgtcatccacttagtgtgttagctggtggggtacaatataacctctcatctcaggctattttaaaaaaacaatatttgcttctataacaaaaggaaacaaatctaagaatcattcctgtactacagaagggttaaggcaaaggtagccttttgggctttttaatgaatatgacccctatagaaaagtcaagaaaaaaaaacccttgtataaattattttatttattattgtaattagatcttcacaaagttgtcttttcactgtgttttgtcaacgtgaaattaaattgtagttataagcaaaagttggttgcctagggaacaattgtatattcagtttaacagaaataaaagaatatttgtcttaagatacaaaaaaaaaaaaaaaa

SEQ ID NO: 14335 - DNA, 5220 bp, Homo sapiens
gctcgttcgccctaaaggtaccaatatggcggaggcttcttttggaagttcgagcccagttgggtctttgtcttctgaggatcatgattttgaccccactgctgagatgttggtccatgactatgatgatgaaagaactcttgaagaagaggaaatgatggatgagggtaaaaacttcagttcagaaattgaagacttagaaaaggaaggaaccatgcctctagaagatttactggcattctatggctatgaacctacaattccagcagttgcaaattccagtgcaaatagttccccaagtgaactggcagatgaactaccagacatgacactagacaaagaggaaatagcaaaagacctgttgtcaggtgatgacgaggaaactcagtcttctgcggatgatctgacgccatctgtgacttcccatgaaacttctgatttcttccctaggcctttacgatcaaatactgcatgtgatggtgataaggaatcagaggttgaagatgttgaaacagacagtggtaattcacctgaagatttgaggaaggaaataatgattggtttacaatatcaggcagagattcccccttatcttggagagtacgatggtaatgagaaagtatatgaaaacgaagaccagttactttggtgtcctgatgtggttttggagagcaaagttaaggaataccttgttgagacttcattaaggactggcagtgaaaaaataatggataggatttctgcaggaacacacacaagggacaatgaacaggcattatatgaacttctcaagtgtaaccacaatataaaggaagcaatcgaaagatactgctgcaatggaaaggcctctcaaggaatgactgcatggacggaagaagaatgccgaagctttgaacatgcactcatgctttttggaaaagattttcatcttatacagaagaataaggtgagaactaggacagttgctgagtgtgtagcattctactatatgtggaagaaatctgaacgttatgattactttgctcaacagacaagatttgggaaaaaaagatataaccatcaccctggagttacggactatatggatcgtttagtagatgaaacagaagctttgggtgggacggtaaatgcttcagccttaacttctaaccggcctgagcctattcctgatcaacagctaaacattctcaactccttcactgccagtgacttgacagctttgaccaacagtgtagcaaccgtctgcgaccccacagatgtgaattgtttggatgatagctttcctccactgggcaacacaccccgtggacaagttaatcatgtgcctgttgtaacagaagagttactcaccctgcccagcaatggggaaagtgattgttttaatttatttgagactggattttatcactcggagctaaaccctatgaacatgtgcagtgaagagtcagagagaccagcaaaaagattgaaaatgggcattgccgtccctgaatcctttatgaatgaagtttctgtaaataacctgggtgtggactttgaaaatcacacacatcacatcaccagtgccaaaatggctgtttctgtggctgactttggcagtctctctgccaacgagaccaatggtttcatcagtgcccatgctctgcatcagcacgcggccctacactctgagtgacctgagtgaggatcccggaactgcgtgtgcagcaccagtaaacttgaggggagctatcaggtttgcatagtctttcactggaagtttgaacctttctcactatgacatcagtgatgtcagtatgtatagaactatatcttgatttatcaagagtattttcatttttcaatccataaatgtggaaatgaactatgatcagcagagttgggaactaagattgaactctgtggtgcagctttaagctctgcttctctcttcctcatctcccaatacctcttccccactcccttctttttctattcttttgtgttccccactgccctcactcccaattttaaaacctgtagacagaggccaccagctcaaaaccagcacagatgttctgaactgaatggtgtggcctctttttgtgtaaattccttttgccgtaatggatgcagtggaataacaatgtttacaggtaccgatcccgatccctgctcaatgtagcatttttttggttttattttcttaataaaagcaggggtaggtttctttaaactgcacaaacatgcaaggattttttaaaaatggaaacttctctcatgttattcaactagagcacttcagtttacaaaacagcaagtccatctttatggaagccagcacaaggaactgtgtgcaaataatgaagacgcttgcttggatcctgtttcaaaattctagaccagggctaccttacacagaattggtcatgttactgccaggagatttctgtgtaacttcatttattggctacagttttggcatttgaagatgtggtactcagatggggttttgtccaccattgtcaagattgtaatcttaaaaatcataccagtcattgataatttagtttatcctgaggcagtcgacttgcagaggcacagtctacaaagcctaggatgttgccactcaatggtttacattttgggacatcttttaagttgtttgtagcactgcagttcaaagtgttaatatttagagggacttctagattttatacctaatgcagtagaaccttgaagtatatttaagcttttttgttaagcttgaacagttggcaagaataatgtgagttcctatctgaaatagaatggtacattaccacttttaagttttaaaaattgatagatgttcagatgtatctcaaactcagttttatttttattccaaatattgtgaatgagaagccattgtcctaaactttggccatttttgtgctataaacatgcatttttaagttataaggtgaatcaaacaatatgtaatacagtattaggatgtaatctttgcttttgtagtactgttaaaatagagaattatgttgtttgcaccgtcttaattaaaattcttgatttttactagttgctttgcaaaaaacaaatgtttggctgcattgctaatatttgtaagtataagttgcttcaaggttgtgctgatgagtagataggatgtagtgatcttagtagtgattgaaagggagggtatttattatacaaactgtgaactgcaatgacatccttagttttggatgatgtgtattcttgtttttctttgcagcattttaatgaagattgctttgaagtgtttacgcagtagcacattagtataaaatttagtttagcacagtggacaaaaagtagttaaattaataacttaaaatcagtctctaatttatacatctgaagtatagcattcctgtatgcacacagtaaataatgggtagcctgggctctgtgttactttcttgtatttttatccaagttgtcagcttcttattgctgtgttgttgtgctaaactttgaaccttatttcttttattaaaaatcagtacactttctataatttagtaagatactggccataatcttccattgttataaccttaattttcactctgggtttacagtggctggtctgtataaataatttacacaaagatgactgaatgctaataccagttgcacttaaatgaacatgcccattctcagtagctgatgcagtaatatattcagtttatctatgcattgctggggtcttgatataagatggaaacagtgtttcttatctaaagttttgattatcagcaagttgaatggacactttagttatttaaataaagatttttgaccaaaatccagaaaatggtatgagagaaaaataaattccagctagtttaatagatttttaaatgtcaatctgattttagcctcttagagagtgctaactagctggtaatgtttacttttaattccttgttaaaatgaggcaataatttgcaagatttttgtatataagtgtaaattcttcatatctttttagatctaattcaatattttctgactacttctgccatgtataataccatttttgtgcatgcttgatgtgacattcataaattgtaccactatgactttatccatgtaaaatagctatttattgaattttcttttaaaagctggatttactgggttttttttttctctcagtttaaacatcttaacagagaatttgttactgtttattaaaagaattgcatttggaagcaagaaaacaaccggatttgcaatcatgtgaagaaacaataatgcctttattatcaagtgttaagcacaattcttataacaaactgtgataaattctttttgtttttttttcctttgccccattattttcttatgaacaaaccaaaaattcatggtgagcagttgcagtgttggctgatatatcttttatgtacagggaatttgaaaaggacagtggattcatttagaagtgtaactggtgctgtgattatagcaatacatttgttagttgtacttcatctttttcatgctagctttttaaatgtttagttttcctcttgtcatggtcagctgctgaatttacttgaaggatgtagaatactgtttaaaaaatactaaaatttgtacaattagatcaaagaattgtgcaatcatttcctttttaatttttaaaatgttgaggctcataaatatttgagaacatcagatctaatagagcatagtgatactatttaatttaaccaaagtctctagtgaatatttcaactttgaatgtaaactaacaaataaacctgaccaccaaggagattgtttgcccagagtttcaaagcacattgtctacaaatggaaattgaaataatttataaaatattgacgttactatgttttttaaaaagttcctaattttttcactaaatggaggaaactattagttttattgttaaatatggtagatattaatattcctcttagatgaccagtgattccaattgtcccagtttgaaataagtaccctgtgagtatgagataaattagtgacaatcagaacaagtttcagtatcagatgttcaagaggaagttgctattgcattgattttaatatttgtacataaacactgatttttttgagcattattttgtatttgttgtactttaatacctggtgtacagttccagaaataaaaatctgggaatcttttaaaaaaaaaaaaaaaaaaa

SEQ ID NO: 14336 - DNA, 1603 bp, Homo sapiens
gaattgcggccgtatgcgcggctctgtggagtgcacctggggttgggggcactgtgcccccagccccctgctcctttggactctacttctgtttgcagccccatttggcctgctgggggagaagacccgccaggtgtctctggaggtcatccctaactggctgggccccctgcagaacctgcttcatatacgggcagtgggcaccaattccacactgcactatgtgtggagcagcctggggcctctggcagtggtaatggtggccaccaacaccccccacagcaccctgagcgtcaactggagcctcctgctatcccctgagcccgatgggggcctgatggtgctccctaaggacagcattcagttttcttctgcccttgtttttaccaggctgcttgagtttgacagcaccaacgtgtccgatacggcagcaaagcctttgggaagaccatatcctccatactccttggccgatttctcttggaacaacatcactgattcattggatcctgccaccctgagtgccacatttcaaggccaccccatgaacgaccctaccaggacttttgccaatggcagcctggccttcagggtccaggccttttccaggtccagccgaccagcccaaccccctcgcctcctgcacacagcagacacctgtcagctagaggtggccctgattggagcctctccccggggaaaccgttccctgtttgggctggaggtagccacattgggccagggccctgactgcccctcaatgcaggagcagcactccatcgacgatgaatatgcaccggccgtcttccagttggaccagctactgtggggctccctcccatcaggctttgcacagtggcgaccagtggcttactcccagaagccggggggccgagaatcagccctgccctgccaagcttcccctcttcatcctgccttagcatactctcttccccagtcacccattgtccgagccttctttgggtcccagaataacttctgtgccttcaatctgacgttcggggcttccacaggccctggctattgggaccaacactacctcagctggtcgatgctcctgggtgtgggcttccctccagtggacggcttgtccccactagtcctgggcatcatggcagtggccctgggtgccccagggctcatgctgctagggggcggcttggttctgctgctgcaccacaagaagtactcagagtaccagtccataaattaaggcccgctctctggagggaaggacattactgaacctgtcttgctgtgcctcgaaactctggaggttggagcatcaagttccagccggccccttcactcccccatcttgcttttctgtggaacctcagaggccagcctcgacttcctggagacccccaggtggggcttccttcatactttgttgggggactttggaggcgggcaggggacagggctattgataaggtccccttggtgttgccttcttgcatctccacacatttcccttggatgggacttgcaggcctaaatgagaggcattctgactggttggctgccctggaaggcaagaaaatagatttattttttttcaaaaaaaaaaaaaaaaaaa

SEQ ID NO: 14337 - DNA, 5616 bp, Homo sapiens
ccccggcgcagcgcggccgcagcagcctccgccccccgcacggtgtgagcgcccgacgcggccgaggcggccggagtcccgagctagccccggcggccgccgccgcccagaccggacgacaggccacctcgtcggcgtccgcccgagtccccgcctcgccgccaacgccacaaccaccgcgcacggccccctgactccgtccagtattgatcgggagagccggagcgagctcttcggggagcagcgatgcgaccctccgggacggccggggcagcgctcctggcgctgctggctgcgctctgcccggcgagtcgggctctggaggaaaagaaagtttgccaaggcacgagtaacaagctcacgcagttgggcacttttgaagatcattttctcagcctccagaggatgttcaataactgtgaggtggtccttgggaatttggaaattacctatgtgcagaggaattatgatctttccttcttaaagaccatccaggaggtggctggttatgtcctcattgccctcaacacagtggagcgaattcctttggaaaacctgcagatcatcagaggaaatatgtactacgaaaattcctatgccttagcagtcttatctaactatgatgcaaataaaaccggactgaaggagctgcccatgagaaatttacaggaaatcctgcatggcgccgtgcggttcagcaacaaccctgccctgtgcaacgtggagagcatccagtggcgggacatagtcagcagtgactttctcagcaacatgtcgatggacttccagaaccacctgggcagctgccaaaagtgtgatccaagctgtcccaatgggagctgctggggtgcaggagaggagaactgccagaaactgaccaaaatcatctgtgcccagcagtgctccgggcgctgccgtggcaagtcccccagtgactgctgccacaaccagtgtgctgcaggctgcacaggcccccgggagagcgactgcctggtctgccgcaaattccgagacgaagccacgtgcaaggacacctgccccccactcatgctctacaaccccaccacgtaccagatggatgtgaaccccgagggcaaatacagctttggtgccacctgcgtgaagaagtgtccccgtaattatgtggtgacagatcacggctcgtgcgtccgagcctgtggggccgacagctatgagatggaggaagacggcgtccgcaagtgtaagaagtgcgaagggccttgccgcaaagtgtgtaacggaataggtattggtgaatttaaagactcactctccataaatgctacgaatattaaacacttcaaaaactgcacctccatcagtggcgatctccacatcctgccggtggcatttaggggtgactccttcacacatactcctcctctggatccacaggaactggatattctgaaaaccgtaaaggaaatcacagggtttttgctgattcaggcttggcctgaaaacaggacggacctccatgcctttgagaacctagaaatcatacgcggcaggaccaagcaacatggtcagttttctcttgcagtcgtcagcctgaacataacatccttgggattacgctccctcaaggagataagtgatggagatgtgataatttcaggaaacaaaaatttgtgctatgcaaatacaataaactggaaaaaactgtttgggacctccggtcagaaaaccaaaattataagcaacagaggtgaaaacagctgcaaggccacaggccaggtctgccatgccttgtgctcccccgagggctgctggggcccggagcccagggactgcgtctcttgccggaatgtcagccgaggcagggaatgcgtggacaagtgcaaccttctggagggtgagccaagggagtttgtggagaactctgagtgcatacagtgccacccagagtgcctgcctcaggccatgaacatcacctgcacaggacggggaccagacaactgtatccagtgtgcccactacattgacggcccccactgcgtcaagacctgcccggcaggagtcatgggagaaaacaacaccctggtctggaagtacgcagacgccggccatgtgtgccacctgtgccatccaaactgcacctacggatgcactgggccaggtcttgaaggctgtccaacgaatgggcctaagatcccgtccatcgccactgggatggtgggggccctcctcttgctgctggtggtggccctggggatcggcctcttcatgcgaaggcgccacatcgttcggaagcgcacgctgcggaggctgctgcaggagagggagcttgtggagcctcttacacccagtggagaagctcccaaccaagctctcttgaggatcttgaaggaaactgaattcaaaaagatcaaagtgctgggctccggtgcgttcggcacggtgtataagggactctggatcccagaaggtgagaaagttaaaattcccgtcgctatcaaggaattaagagaagcaacatctccgaaagccaacaaggaaatcctcgatgaagcctacgtgatggccagcgtggacaacccccacgtgtgccgcctgctgggcatctgcctcacctccaccgtgcagctcatcacgcagctcatgcccttcggctgcctcctggactatgtccgggaacacaaagacaatattggctcccagtacctgctcaactggtgtgtgcagatcgcaaagggcatgaactacttggaggaccgtcgcttggtgcaccgcgacctggcagccaggaacgtactggtgaaaacaccgcagcatgtcaagatcacagattttgggctggccaaactgctgggtgcggaagagaaagaataccatgcagaaggaggcaaagtgcctatcaagtggatggcattggaatcaattttacacagaatctatacccaccagagtgatgtctggagctacggggtgaccgtttgggagttgatgacctttggatccaagccatatgacggaatccctgccagcgagatctcctccatcctggagaaaggagaacgcctccctcagccacccatatgtaccatcgatgtctacatgatcatggtcaagtgctggatgatagacgcagatagtcgcccaaagttccgtgagttgatcatcgaattctccaaaatggcccgagacccccagcgctaccttgtcattcagggggatgaaagaatgcatttgccaagtcctacagactccaacttctaccgtgccctgatggatgaagaagacatggacgacgtggtggatgccgacgagtacctcatcccacagcagggcttcttcagcagcccctccacgtcacggactcccctcctgagctctctgagtgcaaccagcaacaattccaccgtggcttgcattgatagaaatgggctgcaaagctgtcccatcaaggaagacagcttcttgcagcgatacagctcagaccccacaggcgccttgactgaggacagcatagacgacaccttcctcccagtgcctgaatacataaaccagtccgttcccaaaaggcccgctggctctgtgcagaatcctgtctatcacaatcagcctctgaaccccgcgcccagcagagacccacactaccaggacccccacagcactgcagtgggcaaccccgagtatctcaacactgtccagcccacctgtgtcaacagcacattcgacagccctgcccactgggcccagaaaggcagccaccaaattagcctggacaaccctgactaccagcaggacttctttcccaaggaagccaagccaaatggcatctttaagggctccacagctgaaaatgcagaatacctaagggtcgcgccacaaagcagtgaatttattggagcatgaccacggaggatagtatgagccctaaaaatccagactctttcgatacccaggaccaagccacagcaggtcctccatcccaacagccatgcccgcattagctcttagacccacagactggttttgcaacgtttacaccgactagccaggaagtacttccacctcgggcacattttgggaagttgcattcctttgtcttcaaactgtgaagcatttacagaaacgcatccagcaagaatattgtccctttgagcagaaatttatctttcaaagaggtatatttgaaaaaaaaaaaaagtatatgtgaggatttttattgattggggatcttggagtttttcattgtcgctattgatttttacttcaatgggctcttccaacaaggaagaagcttgctggtagcacttgctaccctgagttcatccaggcccaactgtgagcaaggagcacaagccacaagtcttccagaggatgcttgattccagtggttctgcttcaaggcttccactgcaaaacactaaagatccaagaaggccttcatggccccagcaggccggatcggtactgtatcaagtcatggcaggtacagtaggataagccactctgtcccttcctgggcaaagaagaaacggaggggatggaattcttccttagacttacttttgtaaaaatgtccccacggtacttactccccactgatggaccagtggtttccagtcatgagcgttagactgacttgtttgtcttccattccattgttttgaaactcagtatgctgcccctgtcttgctgtcatgaaatcagcaagagaggatgacacatcaaataataactcggattccagcccacattggattcatcagcatttggaccaatagcccacagctgagaatgtggaatacctaaggatagcaccgcttttgttctcgcaaaaacgtatctcctaatttgaggctcagatgaaatgcatcaggtcctttggggcatagatcagaagactacaaaaatgaagctgctctgaaatctcctttagccatcaccccaaccccccaaaattagtttgtgttacttatggaagatagttttctccttttacttcacttcaaaagctttttactcaaagagtatatgttccctccaggtcagctgcccccaaaccccctccttacgctttgtcacacaaaaagtgtctctgccttgagtcatctattcaagcacttacagctctggccacaacagggcattttacaggtgcgaatgacagtagcattatgagtagtgtggaattcaggtagtaaatatgaaactagggtttgaaattgataatgctttcacaacatttgcagatgttttagaaggaaaaaagttccttcctaaaataatttctctacaattggaagattggaagattcagctagttaggagcccaccttttttcctaatctgtgtgtgccctgtaacctgactggttaacagcagtcctttgtaaacagtgttttaaactctcctagtcaatatccaccccatccaatttatcaaggaagaaatggttcagaaaatattttcagcctacagttatgttcagtcacacacacatacaaaatgttccttttgcttttaaagtaatttttgactcccagatcagtcagagcccctacagcattgttaagaaagtatttgatttttgtctcaatgaaaataaaactatattcatttccactctaaaaaaaaaaaaaaaaa

SEQ ID NO: 14338 - DNA, 2730 bp, Homo sapiens
gccgcgcgctgtgtctccgctgcgtccgccgaggcccccgagtgtcagggacaaaagcctccgcctgctcccgcagccggggctcatctgccgccgccgccgcgctgaggagagttcgccgccgtcgccgcccgtgaggatctgagagccatgtcggccagcagcctcttggagcagagaccaaaaggtcaaggaaacaaagtacaaaatggatctgtacatcaaaaggatggattaaacgatgatgattttgaaccttacttgagtccacaggcaaggcccaataatgcatatactgccatgtcagattcctacttacccagttactacagtccctccattggcttctcctattctttgggtgaagctgcttggtctacggggggtgacacagccatgccctacttaacttcttatggacagctgagcaacggagagccccacttcctaccagatgcaatgtttgggcaaccaggagccctaggtagcactccatttcttggtcagcatggttttaatttctttcccagtgggattgacttctcagcatggggaaataacagttctcagggacagtctactcagagctctggatatagtagcaattatgcttatgcacctagctccttaggtggagccatgattgatggacagtcagcttttgccaatgagaccctcaataaggctcctggcatgaatactatagaccaagggatggcagcactgaagttgggtagcacagaagttgcaagcaatgttccaaaagttgtaggttctgctgttggtagcgggtccattactagtaacatcgtggcttccaatagtttgcctccagccaccattgctcctccaaaaccagcatcttgggctgatattgctagcaagcctgcaaaacagcaacctaaactgaagaccaagaatggcattgcagggtcaagtcttccgccacccccgataaagcataacatggatattggaacttgggataacaagggtcccgttgcaaaagccccctcacaggctttggttcagaatataggtcagccaacccaggggtctcctcagcctgtaggtcagcaggctaacaatagcccaccagtggctcaggcatcagtagggcaacagacacagccattgcctccacctccaccacagcctgcccagctttcagtccagcaacaggcagctcagccaacccgctgggtagcacctcggaaccgtggcagtgggttcggtcataatggggtggatggtaatggagtaggacagtctcaggctggttctggatctactccttcagaaccccacccagtgttggagaagcttcggtccattaataactataaccccaaagattttgactggaatctgaaacatggccgggttttcatcattaagagctactctgaggacgatattcaccgttccattaagtataatatttggtgcagcacagagcatggtaacaagagactggatgctgcttatcgttccatgaacgggaaaggccccgtttacttacttttcagtgtcaacggcagtggacacttctgtggcgtggcagaaatgaaatctgctgtggactacaacacatgtgcaggtgtgtggtcccaggacaaatggaagggtcgttttgatgtcaggtggatttttgtgaaggacgttcccaatagccaactgcgacacattcgcctagagaacaacgagaataaaccagtgaccaactctagggacactcaggaagtgcctctggaaaaggctaagcaggtgttgaaaattatagccagctacaagcacaccacttccatttttgatgacttctcacactatgagaaacgccaaagaggaagaagaaagtgttaaaaaggaacgtcaaggtcgtgggaaataaaaggcagttctacacagactgcagcaacggttgcatctgcatatcctaagaggaaaaaatgaccttcaagagaattaggacttttttcttaatttcactgacttcagagacgattgcagacttgcagtttaagtattggaatttcacaaaagacataggacttaactggaaaatgaaaagaaaagaaaaagaaaaaactaaacaaaaaatccctctaggtagtttaggtgaaaaatgtcccttttattttggctttggttgtgatttcagagcataatgctatgttttttgtctttttactatgtttttcggatttttaagtccgtaagtgcatacagttttctctaatttttaaaccctttcctcctcccatttggacatttgcacttggagaacacttgagttgtgaaggttttgggcatccaccccagaaagtgggaatttgattttatccttccgaactggaagaacatttttatgaagaatttttgtctaggagaatataacagtgttacccaaggttgtgtctttaagggtggttcattttctctgaccttttgttactcaaagtaaagtactaggagtcctaagaaatgttctgttcttgtacattatactgattaagtcaggattaatttgatttcaaagctgagaacagtggtaaaaactcgtttacagaaatgcattttggaagagaaaaatactgtaaaacgtgtcgtgaatgtttcttcagtttcttgttcagccaatgaggaaagggcattgcctttctttttaccattaatcacttctcaataaacgtgagatcctgttgagcatcaaaaaaaaaaaaaaaaaaa

SEQ ID NO: 14339 - DNA, 4369 bp, Homo sapiens
ttccagcgcagctcagcccctgcccggcccggcccgcccggctccgcgccgcagtctccctccctcccgctccgtccccgctcgggctcccaccatccccgcccgcgaggagagcactcggcccggcggcgcgagcagagccactccagggagggggggagaccgcgagcggccggctcagcccccgccacccggggcgggaccccgaggccccggagggaccccaactccagccacgtcttgctgcgcgcccgcccggcgcggccactgccagcacgctccgggcccgccgcccgcgcgcgcggcacagacgcggggccacacttggcgccgccgcccggtgccccgcacgctcgcatgggcccgcgctgagggccccgacgaggagtcccgcgcggagtatcggcgtccacccgcccagggagagtcagacctgggggggcgagggccccccaaactcagttcggatcctacccgagtgaggcggcgccatggagctccgggtgctgctctgctgggcttcgttggccgcagctttggaagagaccctgctgaacacaaaattggaaactgctgatctgaagtgggtgacattccctcaggtggacgggcagtgggaggaactgagcggcctggatgaggaacagcacagcgtgcgcacctacgaagtgtgtgacgtgcagcgtgccccgggccaggcccactggcttcgcacaggttgggtcccacggcggggcgccgtccacgtgtacgccacgctgcgcttcaccatgctcgagtgcctgtccctgcctcgggctgggcgctcctgcaaggagaccttcaccgtcttctactatgagagcgatgcggacacggccacggccctcacgccagcctggatggagaacccctacatcaaggtggacacggtggccgcggagcatctcacccggaagcgccctggggccgaggccaccgggaaggtgaatgtcaagacgctgcgtctgggaccgctcagcaaggctggcttctacctggccttccaggaccagggtgcctgcatggccctgctatccctgcacctcttctacaaaaagtgcgcccagctgactgtgaacctgactcgattcccggagactgtgcctcgggagctggttgtgcccgtggccggtagctgcgtggtggatgccgtccccgcccctggccccagccccagcctctactgccgtgaggatggccagtgggccgaacagccggtcacgggctgcagctgtgctccggggttcgaggcagctgaggggaacaccaagtgccgagcctgtgcccagggcaccttcaagcccctgtcaggagaagggtcctgccagccatgcccagccaatagccactctaacaccattggatcagccgtctgccagtgccgcgtcgggtacttccgggcacgcacagacccccggggtgcaccctgcaccacccctccttcggctccgcggagcgtggtttcccgcctgaacggctcctccctgcacctggaatggagtgcccccctggagtctggtggccgagaggacctcacctacgccctccgctgccgggagtgccgacccggaggctcctgtgcgccctgcgggggagacctgacttttgaccccggcccccgggacctggtggagccctgggtggtggttcgagggctacgtcctgacttcacctatacctttgaggtcactgcattgaacggggtatcctccttagccacggggcccgtcccatttgagcctgtcaatgtcaccactgaccgagaggtacctcctgcagtgtctgacatccgggtgacgcggtcctcacccagcagcttgagcctggcctgggctgttccccgggcacccagtggggctgtgctggactacgaggtcaaataccatgagaagggcgccgagggtcccagcagcgtgcggttcctgaagacgtcagaaaaccgggcagagctgcgggggctgaagcggggagccagctacctggtgcaggtacgggcgcgctctgaggccggctacgggcccttcggccaggaacatcacagccagacccaactggatgagagcgagggctggcgggagcagctggccctgattgcgggcacggcagtcgtgggtgtggtcctggtcctggtggtcattgtggtcgcagttctctgcctcaggaagcagagcaatgggagagaagcagaatattcggacaaacacggacagtatctcatcggacatggtactaaggtctacatcgaccccttcacttatgaagaccctaatgaggctgtgagggaatttgcaaaagagatcgatgtctcctacgtcaagattgaagaggtgattggtgcaggtgagtttggcgaggtgtgccgggggcggctcaaggccccagggaagaaggagagctgtgtggcaatcaagaccctgaagggtggctacacggagcggcagcggcgtgagtttctgagcgaggcctccatcatgggccagttcgagcaccccaatatcatccgcctggagggcgtggtcaccaacagcatgcccgtcatgattctcacagagttcatggagaacggcgccctggactccttcctgcggctaaacgacggacagttcacagtcatccagctcgtgggcatgctgcggggcatcgcctcgggcatgcggtaccttgccgagatgagctacgtccaccgagacctggctgctcgcaacatcctagtcaacagcaacctcgtctgcaaagtgtctgactttggcctttcccgattcctggaggagaactcttccgatcccacctacacgagctccctgggaggaaagattcccatccgatggactgccccggaggccattgccttccggaagttcacttccgccagtgatgcctggagttacgggattgtgatgtgggaggtgatgtcatttggggagaggccgtactgggacatgagcaatcaggacgtgatcaatgccattgaacaggactaccggctgcccccgcccccagactgtcccacctccctccaccagctcatgctggactgttggcagaaagaccggaatgcccggccccgcttcccccaggtggtcagcgccctggacaagatgatccggaaccccgccagcctcaaaatcgtggcccgggagaatggcggggcctcacaccctctcctggaccagcggcagcctcactactcagcttttggctctgtgggcgagtggcttcgggccatcaaaatgggaagatacgaagaaagtttcgcagccgctggctttggctccttcgagctggtcagccagatctctgctgaggacctgctccgaatcggagtcactctggcgggacaccagaagaaaatcttggccagtgtccagcacatgaagtcccaggccaagccgggaaccccgggtgggacaggaggaccggccccgcagtactgacctgcaggaactccccaccccagggacaccgcctccccattttccggggcagagtggggactcacagaggcccccagccctgtgccccgctggattgcactttgagcccgtggggtgaggagttggcaatttggagagacaggatttgggggttctgccataataggaggggaaaatcaccccccagccacctcggggaactccagaccaagggtgagggcgcctttccctcaggactgggtgtgaccagaggaaaaggaagtgcccaacatctcccagcctccccaggtgcccccctcaccttgatgggtgcgttcccgcagaccaaagagagtgtgactcccttgccagctccagagtgggggggctgtcccagggggcaagaaggggtgtcagggcccagtgacaaaatcattggggtttgtagtcccaacttgctgctgtcaccaccaaactcaatcatttttttcccttgtaaatgcccctcccccagctgctgccttcatattgaaggtttttgagttttgtttttggtcttaatttttctccccgttccctttttgtttcttcgttttgtttttctaccgtccttgtcataactttgtgttggagggaacctgtttcactatggcctcctttgcccaagttgaaacaggggcccatcatcatgtctgtttccagaacagtgccttggtcatcccacatccccggaccccgcctgggacccccaagctgtgtcctatgaaggggtgtggggtgaggtagtgaaaagggcggtagttggtggtggaacccagaaacggacgccggtgcttggaggggttcttaaattatatttaaaaaagtaactttttgtataaataaaagaaaatgggacgtgtcccagctccaggggtaaaaaaaaaaaaaaaaaa

SEQ ID NO: 14340 - DNA, 5809 bp, Homo sapiens
gtgaccacggaccaggcagtctctaatgaataggcaaggccacaacctccattctcccagaaaagaagaaatgctcatctgaaattcatcacctctctggagtcttcaaactgaccaagcattgaaaagaacacagtttcagaaaacagtttccagtgcctctggccttcctactgaaagcagacacagagtgcatgaagaccgttcaaatatgtcagggacctcctcccatgagtccttctatgactccctctcagacatgcaggaagaaagcaagaatactgacttcttcccgggcctttctgctttcctcagccaggaagagataaacaagagtcttgacctggcccggagagccatagccgactccgaaacagaagattttgactcggaaaaggagatctcgcagattttcagtacttctcctgcaagcctctgtgaacatccttcccataaggagaccaaattgggtgaacacgcctcgaggagacctcaggataacaggtcaacacctgtccagcctctggcagagaaacaaactaagagtatctcttcacctgtttcaaagaggaaacctgccatgtcacccctgctcaccaggcccagctacatccggagcctccgaaaggctgaaaagcgtggtgcaaaaactcccagcacaaacgtaaagcccaaaacgccacatcaaagaaagggtggcccccagagccagctgtgtgacaaggcagctaatttaattgaggagctaacatccatatttaaagccgcaaagccaagaaacagaagcccaaatggggagtcctcgtcaccagacagtgggtacctgtctcctaaaaatcagccgtcagccctgctgagtgcctcagccagccagagccctatggaagaccaaggggagatggaaagagaggtcaagtcccctggggccaggcattgctaccaggacaaccaggacttggcagtgccacacaaccgcaagtctcacccacagccccacagcgccctccacttcccagctgcacctcgattcatccaaaagctgaggagccaagaagtagcagaagggagccgagtttatctggagtgtagagtcactggaaaccccactcctcgagtcagatggttctgtgaagggaaagaactgcacaacactcctgatattcaaatccactgtgagggaggggacctccataccctgatcatagcagaggcctttgaggacgacacaggtcgctacacctgtttggctacgaatcccagcggctcagacacaacatctgctgaggtgttcattgaaggtgccagttcaacagattctgacagtgaaagtttagctttcaaatcaagagctggagctatgccacaagctcaaaagaaaacaacttctgtttccttgacaataggatcatcatctccaaagacaggggtgaccacagctgtgattcaaccactgtctgtccctgtgcaacaggttcacagtccaacttcatatctctgccgacctgatggaaccactactgcctactttcctcctgtttttacaaaggaactgcaaaacacagccgtggcggaaggccaggtggtggttctggagtgccgggtccgtggggcaccccctctgcaggtccagtggtttcggcaagggagtgaaatccaagactctccagatttccgaattctacagaaaaaacctagatctacagctgaacctgaggagatttgcaccctagttatcgctgagactttccctgaagatgcagggatctttacatgttcagcaagaaatgattatggatcagcaaccagcactgcccagctggttgtcacctcagccaacactgaaaactgtagttacgagtcaatgggagaatccaacaatgaccacttccaacactttccacctccccctccaatcttggagacaagttccttggagttggcttcaaagaaaccatctgagatccagcaggtgaacaaccctgagttaggcctgagcagggcagcccttcaaatgcaattcaatgctgctgagagggaaacgaacggagtccatcccagccgtggagtaaatggactgattaacggcaaagctaacagtaataaatctcttccaacaccagctgtcctgctttcacccactaaggagccaccacctctgcttgccaaaccaaaactaggatttccaaagaaggccagtagaactgctagaatagcctccgatgaggaaattcaaggcacaaaggatgctgttattcaagacctggaacgaaaacttcgcttcaaggaggacctcctgaacaatggccagccgaggttaacatacgaagaaagaatggctcgtcgactgctaggtgctgacagtgcaactgtctttaatattcaggagccagaagaggaaacagctaatcaggaatacaaagtctccagctgtgaacagagactcatcagtgaaatagagtacaggctagaaaggtctcctgtggatgaatcaggtgatgaagttcagtatggagatgtgcctgtggaaaatggaatggcaccattctttgagatgaagctgaaacattacaagatctttgagggaatgccagtaactttcacatgtagagtggctggaaatccaaagccaaagatctattggtttaaagatgggaagcagatctctccaaagagtgatcactacaccattcaaagagatctcgatgggacctgctccctccataccacagcctccaccctagatgatgatgggaattatacaattatggctgcaaaccctcagggccgcatcagttgtactggacggctaatggtacaggctgtcaaccaaagaggtcgaagtccccggtctccctcaggccatcctcatgtcagaaggcctcgttctagatcaagggacagtggagacgaaaatgaaccaattcaggagcgattcttcagacctcacttcttgcaggctcctggagatctgactgttcaagaaggaaaactctgcagaatggactgcaaagtcagtgggttaccaaccccagatctaagctggcaactagatggaaagcccgtacgccctgacagtgctcacaagatgctggtgcgtgagaacggggtgcactctctgatcatagagccagtcacgtcacgtgatgccggcatctacacatgtatagctaccaaccgagcaggacagaactcattcagcctggagcttgtggttgctgctaaagaagcacacaaaccccctgtgtttattgagaagctccaaaacacaggagttgctgatgggtacccagtgcggctggaatgtcgtgtattgggagtgccaccacctcagatattttggaagaaagaaaatgaatcactcactcacagcactgaccgagtgagcatgcaccaggacaaccacggctacatctgcctgctcattcagggagccacaaaagaagatgctgggtggtatactgtgtcagccaagaatgaagcagggattgtgtcctgtactgccaggctggacgtttacatttctcgacattaatagtgaaccacaccaggagaacaaatacccaacccagtggcatcagcagtcacagagcaccaagccaaaaaaagtacggccctcagccagtcgctatgcagcactttcggaccagggactagacatcaaagcagcgttccaacctgaggccaacccatctcacctgacactgaatactgccttggtagaaagtgaggacctgtaatccagcattcttgttaaagctgaaacactgaaacagccattgccttgaccaacatattcctttgtcacattatgtaaaaggcagaaacatacctttgactataagaaattaaaaaaaaaacaccaaaataatatttttcttacttgatataccaaacttagtttaagtagataatgctaatacaaatatacacattgcacagaaaatacacatttactgtccaatttaaaactttggaattgctgtgattaaagtgatcaaaatgccaaaatactaaaggaaatcaattgttcacaggtaactacaatttgtattatctacaagtgcctttaaacacaagatataggtgctgtgtagcctgatagtgtgaaatgtttaatgagggagttgtaccacaaacagtactacaatgattctgaagcacagtgtattcagacagatacagtgaaccaagtgcaatatgtaaggatgaaagaagaagagatgacaaagaaatccaagtaaatgccttgtctttgcaaatgtttttatattaaatcataaggaaggaactacttgccttaaatgttaatatcaaaagagttttctaacaaggttaataccttagttcttaacattttttttctttatgtgtagtgttttcatgctaccttggtaggaaacttatttacaaaccatattaaaaggctaatttaaatataaataatataaagtgctctgaataaagcagaaatatattacagttcattccacagaaagcatccaaaccacccaaatgaccaaggcatatatagtatttggaggaatcaggggtttggaaggagtagggaggagaatgaaggaaaatgcaaccagcatgattatagtgtgttcatttagataaaagtagaaggcacaggagaggtagcaaaggccaggcttttctttggttttcttcaaacataggtgaaaaaaacactgccattcacaagtcaaggaacccagggccagctggaagtgtggagcacacatgctgtggagcacacatgctgtggagattgcagtgtgtctgaggtttgtgtagtagtggaagattttaggtatgtagagcaagttgaaaatggattgagactgcatggtggcataaatgagaaattgcctgtagcatctagtctacttgaaggaagtggagacataaggagagacaaaaacaggtttgtgccataaagtattttttcaaagacaccaagatgtggtaaatgaaaattattagttcacttccctgctgccatgaaactttgccttaagaaggtgctggattccaaggtttgtaaaggcatctcggtaaagactgctttttgaatgcatatgattttgcatcagctagactgagttgattctgaccagacttgatggttttaagtcggaaccgataaattttaaaaaggagaaaaaataatttgacctagtagtataaaacatgaggctttaatggtactttgctatgaaaagaaaacactgtattccttatgcaaaacacatgtatctttcattatttataagtggcctctcttagctcagttactcaattcatacgtagtattttttaaaataattttatatctgtgtaccaccccatatatttcatattactgtttcacatgtacagctttctacttctttgtaagaacaccaaccaaccaaggtttaagtgattaataggcttgagcaccgggtggcagatgttctatgcagtgtggttcaagtttctttgaccgcacttatatgcattgctaatatggaatttaagataccatacacagtctctcatggacctatctctattgtagaattatgacttatgtcttacttgccaaatttttctgaatgtgacctttttttgctgatttgctgggtttgggattaactagcattattttgccacctttatattgtatttataaaaaaaaaagtactatcaatcaatcatactactttggattgttgtgctggtgtaatgtggatttaacatcaataaatatttgacaaataatagttgcagttttgtgaagcaaaataaatattcagtttta

SEQ ID NO: 14341 - DNA, 1324 bp, Homo sapiens
cccactgcgcaggcgcttacagtgcaccaagatggccgcccccgtggatctagagctgaagaaggccttcacagagcttcaagccaaagttattgacactcaacagaaggtgaagctcgcagacatacagattgaacagctaaacagaacgaaaaagcatgcacatcttacagatacagagatcatgactttggtagatgagactaacatgtatgaaggtgtaggaagaatgtttattcttcagtccaaggaagcaattcacagtcagctgttagagaagcagaaaatagcagaagaaaaaattaaagaactagaacagaaaaagtcctacctggagcgaagcgttaaggaagctgaggacaacatccgggagatgctgatggcacgaagggcccagtagggagcctctctgggaagctcttcctcctgcccctcccattcctggtgggggcagaggagtgtctgcagggaaacagcttctcctctgccccgatggatgctttatttggatggcctggcaacatcacattttctgcatcaccctgagccccatttgcttcccagccctggagtttttacccggctttgcctgccacctctgcccaggacactcttccctctcgggatgtgtgatgaactcccaggagagggaagatgggagccagggcaagataggaagctctgcctgagctttccactaggcacgccagccagaccaataaaaagcgtctgtcccactctgctaagcctggttttcttgagcagagggatggaacagagggtgagagaggcagtggccgtctccacctcagctcctgctccctctgcatcagagcccttcctttcttgggggatgggccttgccctcttctcttttcccttcctgtacctttgactaacgctcagcttccgggcctgcatgcagtagacagaagaggaagaaagaacagatgttcacagctgaatctcagtgaacagaatagcagtccctggatggcagtctgcctaaagattcctttccctgccttctcccatacattccaaaaggaagttcaacagtaagcagcacctccaagactgtctccttttggccaatatcataagatggacgccataatcctgaggcctcctagaggctgagggggcaacggtgtgatccagctggctcatcccagcccaggtgggccaattattcaattttcaagaattttgttgcaagccagttgtcaaacacagccattataattatgtaaatttgcaaattatgttaaaaacaaggacaataaatattcaaaatgcatccctaattactacatttgaccac

SEQ ID NO: 14342 - DNA, 5337 bp, Homo sapiens
gatgcccccgccaggggggatgcccggcaccgtgcgtccgcggaggccaagatgcagcggccaggggccggcagcctgcgaggggaggcagcttccgccggggccgggctgctgcacagtctgagcggccgggactgcgcgcttcagagcctggagcatcccagtcgctggggccgagacgccgccgccgccgccgttcccgctttctcccgcgagccgggccagtagctttgctagctggccttcccgtggaggcgttttccagccccagcgcggggagacatgcctgaatttgggagcgatgtgactctcagcctcccacttcacccggggacgcaggcttgctgaagcccgagacaggagggggaccatgggagggacgcaagtcaaatgcctgacttcacccagtccaatccacagtgcaaagagcgagtccattataacccagtcagaagagaaggcagattttgtgattattcccgctgaaggaatagagaacagaacagaagggacagattctccattatctcgagactggcggccagggagccctggaacctatctggagacctcatgggaagaacagctgttggaacaacaagaatatttagaaaaagaaatggaggaagcaaagaaaatgatatcaggactacaggccttactgctcaatggatccttacctgaagatgaacaggagaggcccttggccctctgtgaaccaggtgtcaatcccgaggaacaactgattataatccaaagtcgtctggatcagagtatggaggagaatcaggacttaaagaaggaactgctgaaatgtaaacaagaagccagaaacttacaggggataaaggatgccttgcagcagagattgactcagcaggacacatctgttcttcagctcaaacaagagctactgagggcaaatatggacaaagatgagctgcacaaccagaatgtggatctgcagaggaagctagatgagaggaaccggctcttgggagaatataaaaaagagctggggcagaaggatcgccttcttcagcagcaccaggccaagttagaagaagcactccggaaactctctgatgtcagttaccaccaggtggatctagagcgagagctagaacacaaagatgtcctcttggctcactgtatgaaaagagaggcagatgaggcgaccaactacaacagtcacaactctcaaagcaatggttttctccttccaacggcaggaaaaggagctacttcagtcagcaacagagggaccagcgacctgcagcttgttcgagatgctctccgcagcctgcgcaacagcttcagtggccacgatcctcagcaccacactattgacagcttggagcagggcatttctagcctcatggagcgcctgcatgttatggagacgcagaagaaacaagaaagaaaggttcgggtcaagtcacccagaactcaagtaggtagtgaataccgggagtcctggccccctaactcaaagttgcctcactcacagagctctccaactgtcagcagcacctgtactaaagtgctctatttcactgaccggtcacttacgcccttcatggtcaatataccaaagaggttggaggaggtgacgttaaaggattttaaagcagctattgatcgggaaggaaatcaccggtatcacttcaaagcactggatcctgagtttggcactgtcaaagaggagattttccatgatgatgatgccatccctggatgggaagggaaaattgtagcttgggtggaagaagaccatggagagaattaatgccaagtatcagattgagggcttatggaacctggtcactccctggctgcttcactcaggaaagggaactaaaaccagaatacactaagaagtttctagtttgtgtgccaaaacagaagcttctccaagcatgatggccacaggtcagtcctctttctgtgcctggcatatctggtacttaaaattctgtccaaatgtagaccatgggttcatctggagttccttgtccgtgggaacacagtgttctattctactctgaggacaacaaaccgaaggccttaaacgatggggatggatgatcccgcctctgtaggggcatggctgctattatctggaaattaggaattggatgcatcattcctgtgtgttacagtattattttaattggcctcaatggttgcagcaatcagagtcccagcgtttgtactcacagacaaggcaaaggtaccagcttttctgtttctttgaacctactgcaaaccaagaataactcatgaggtggtaccaaagatgaaagcccagacttcagtaatcttttgaaccagacgtggatggtgctgaattgttgcttggatggaaaaagggctgcccatgttgtgctacactatgctaaaactgtaatttagtaagaccttgggctgcctcttctgtcttaactggttctgcagcttgtccttttgcccacatagggcctatttcatgtactgttagttttctctggggactctttaactttagagccatttctttttcttcaaactgatgaacttttgtttgaaaggcataaggagtgaaaagctccttgaaaatccaggcgggtatggaaaggtgctgctacccatatctttttgactttctttgtttcatgactttaactcatggcatctcctttgtagtaaaaggagacagaccattaatttcagcatttctttgtgatttataagtactgagcatgaagtacttgtctgcccctcatttcaaggccagagttattttctatttatgtattagtctaggctgatcttttagggcacaatagaaaccatggggcgtggagcatgagttgtgaatggcagggatcattctgggtaaaaaaaacctagaatcatttctgatgtgcaacattgtcaagtgaagaagctaacagttcaactaccgagattatttgataacctgggttttctcattcatccatcaagcaccatcaaccagtcagccattattatttatatatgtattaccaaaagcagtctatctgcctgtgacctccaatgtacactgccaaacacaagagtaggacacatctgttctgggttcttgacctatctgtctccaattcatctccccttttcagccatttcaacaaactactctttggagctctgagatgacatcttgttgttttatatagatgtatcttttaaaaatagttcacgtttggagaattcttttgtactcatttgctttttgtctgagaaccatgtctatttttataactggagtgtgagttctgtatcttctcacattctgtatactgtatccattttctagagaacccagtagcttttatacagtctcttcttaccaccccttgtggtttcagaacaagctttattttattacgagtatattaatgacaactaattcctgttccaattctacctgttttagttgtgaaggtagttttgtgtaatccagttgattgctcctctggcagagagaaggagctcaaaagatacttgatgtctttcatgtaagtttacctggtcttttcctattgaagaatttttcatcagaaacgactgggaaagtttgggaaagtcagcaaaagaaagaatgcatttcgaaagcaaacagaagaaaaaagtatattctcacagtttttccccaggaagtctggagaaaaagtcctcatgtcaccaatttctctgttgcatgaattttagtgttttgctataagacagcatgagggctatcaggccaaaattcattattgtatttccaatacagtttgtcttgaatgtctgtctcttaaaccagtttttacttgtcagttttctctcagcaaacagtcttactattatgtggaatttaacttttcagagaaaatttccaaagtcctctaccttatttggcttttatctgtgtcttttggaaaaggagctgcatggcctcagtgcctccataaaaagcttaagttgagttcatgggagaacattaagatcgttttttttcccttttagctcggtaatctcatgtaccacaggtaatgaccaagcatctctgctagaggatgtaactctcataactcctgtgtaaaatgaggatcctgttggtgatcctcattccagtttccaaagcgagaggagccttctgagcagaagtatgcaagactgattctgtttggaacagtttcctatttggctgcattctaggaggcctcctgacttattcatagtattgtcgcctggtggcattggtgtggggtagcttgtcctgctacttgctaaagttctctttctttgagaaaactgaggaaccagaatgcttagagttcataaaataatctctaaaccatgttaggttaaaacaaaatgaccatctcacaaaaacgagtttagttgaatgctcaattccttacaaaatcttcatttaaggctgagtgtggtggctcatgcctgtaattccagcactttgggaggccgaggcaggaagactgcttgagcccaggagttcaagaccagcctgggcaacgtaggaagactccgtctctacatagaaattttattataaaagtagctggggatggtggcacacacctgtagtcccagctactcaggaggttgaggtgggaagattgcttgagcccaggagtttgaggttgcagtgagctgatcatgccactgcactctagcctaggctacagagcaggaccccatctccaaaaaaaaaaaaaaaaaagtcatttaaaaactgaagaatgttctcttcttgctcagttccctaaattagctggggggattgggatactttacaatttttacatttttaaatttgaagaatttgttttaaacttacttggtaatggcacttctacttactgaccaacttttcagctctttttgaccaggatggttgcaaattagggaaaatatctttatactatacatccaattcaagaggactttaattacttaaaagcatttaggtcataattaaaattattttcactgtttccataaaataagcattatgattgcacactccttctactgtctgaatttatgtaagaggtatagcttgcttaaaatacatatatatgtaaagttatattttcttagaaacatggatgtttacagccattgctttcaaagagattattactgtgtattctccctgttttacaatatgttttcatgaagactatgttacaccagaggcttctgattatcaaagtgataaccagttttaactgccggtatgtaccagatttgtgaactaatttaaaaaaccacaaactatgaataaaatggggtttgcaaactaaa

SEQ ID NO: 14343 - DNA, 3071 bp, Homo sapiens
ccgccattttgtgagaagcaaggtggcctccacgtttcctgagcgtcttcttcgcttttgcctcgaccgccccttgaccacagacatgtctcgggatcggttccggagtcgtggcggtggcggtggtggcttccacaggcgtggaggaggcggcggccgcggcggcctccacgacttccgttctccgccgcccggcatgggcctcaatcagaatcgcggccccatgggtcctggcccgggccagagcggccctaagcctccgatcccgccaccgcctccacaccaacagcagcaacagccaccaccgcagcagccaccgccgcagcagccgccaccgcatcagccgccgccgcatccacagccgcatcagcagcagcagccgccgccaccgccgcaggactcttccaagcccgtcgttgctcagggacccggccccgctcccggagtaggcagcgcaccaccagcctccagctcggccccgcccgccactccaccaacctcgggggccccgccagggtccgggccaggcccgactccgaccccgccgcctgcagtcacctcggcccctcccggggcgccgccacccaccccgccaagcagcggggtccctaccacacctcctcaggccggaggcccgccgcctccgcccgcggcagtcccgggcccgggtccagggcctaagcagggcccaggtccgggtggtcccaaaggcggcaaaatgcctggcgggccgaagccaggtggcggcccgggcctaagtacgcctggcggccaccccaagccgccgcatcgaggcggcggggagccccgcgggggccgccagcaccacccgccctaccaccagcagcatcaccaggggcccccgcccggcgggcccggcggccgcagcgaggagaagatctcggactcggaggggtttaaagccaatttgtctctcttgaggaggcctggagagaaaacttacacacagcgatgtcggttgtttgttgggaatctacctgctgatatcacggaggatgaattcaaaagactatttgctaaatatggagaaccaggagaagtttttatcaacaaaggcaaaggattcggatttattaagcttgaatctagagctttggctgaaattgccaaagccgaactggatgatacacccatgagaggtagacagcttcgagttcgctttgccacacatgctgctgccctttctgttcgtaatctttcaccttatgtttccaatgaactgttggaagaagcctttagccaatttggtcctattgaaagggctgttgtaatagtggatgatcgtggaagatctacagggaaaggcattgttgaatttgcttctaagccagcagcaagaaaggcatttgaacgatgcagtgaaggtgttttcttactgacgacaactcctcgtccagtcattgtggaaccacttgaacaactagatgatgaagatggtcttcctgaaaaacttgcccagaagaatccaatgtatcaaaaggagagagaaacccctcctcgttttgcccagcatggcacgtttgagtacgaatattctcagcgatggaagtctttggatgaaatggaaaaacagcaaagggaacaagttgaaaaaaacatgaaagatgcaaaagacaaattggaaagtgaaatggaagatgcctatcatgaacatcaggcaaatcttttgcgccaagatctgatgagacgacaggaagaattaagacgcatggaagaacttcacaatcaagaaatgcagaaacgtaaagaaatgcaattgaggcaagaggaggaacgacgtagaagagaggaagagatgatgattcgtcaacgtgagatggaagaacaaatgaggcgccaaagagaggaaagttacagccgaatgggctacatggatccacgggaaagagacatgcgaatgggtggcggaggagcaatgaacatgggagatccctatggttcaggaggccagaaatttccacctctaggaggtggtggtggcataggttatgaagctaatcctggcgttccaccagcaaccatgagtggttccatgatgggaagtgacatgcgtactgagcgctttgggcagggaggtgcggggcctgtgggtggacagggtcctagaggaatggggcctggaactccagcaggatatggtagagggagagaagagtacgaaggcccaaacaaaaaaccccgattttagatgtgatatttaggctttcattccagtttgttttgtttttttgtttagataccaatcttttaaattcttgcattttagtaagaaagctatctttttatggatgttagcagtttattgacctaatatttgtaaatggtctgtttgggcaggtaaaattatgtaatgcagtgtttggaacaggagaatttttttttcctttttatttctttattttttcttttttactgtataatgtccctcaagtttatggcagtgtaccttgtgccactgaatttccaaagtgtaccaatttttttttttttactgtgcttcaaataaatagaaaaatagttataatattggatcttcaactttgccattcatgcttctatgcatattaggctacgtattccacattgaaagcatgagagtgtctaggcctttgaatggcatatgccatttctgggaaatgcatctggaggctaagtattgctttctacaaataattgccccctttgttttaaaaagaagaaatgcatattgaagtagtttgatgatttgtttggcatataggaagcacgctggtgctaagtattttttaaatggttatgtaagcaaagctgaactgtaaatcttcaggaatatgtattaagattgtggaatgggtgtaagacaattggtagggggtgaaagtgggtttgattaaatggatcttttatggccctatgatctatcctttacttgaaagcttttgaaaagtggaaaggtcattttgttgcatttccccatttcttgtttttaaaagaccaacaaatctcaagccctataaatggcttgtattgaacttttacatttgaattaaagatgttaaacatgaaaaaaa

SEQ ID NO: 14344 - DNA, 3824 bp, Homo sapiens
actgcctctctcacagccctcaagacacaccatgggcccagaggcaggtttgctacacagcagcgacgacgcaggcggcggccccagcgactcgcaactgcctccctgaccacagcggccaccgcccaacacccccgagaagccatcgccaccaccggcaggagaacctagggtccataaagccatcttcgcgatcgactaaagctacgtcaacaactatggcgggcgacgggcggcgggcagaggcggtgcgggaaggatggggtgtgtacgtcacccccagggcccccatccgagagggaaggggccggctcgcccctcaaaatggcggcagcagcgatgcgcctgcgtacagaactcctccgtcgcgccagggccggcgggaagtgaggttctcggacgagccgccagaagtgtacggcgacttcgagcccctggtggccaaagaaaggtccccggtgggaaaacgaacccggctagaagagttccggtccgattctgcgaaagaggaagtgagagaaagcgcgtactaccttcggtctaggcagcggaggcagccgcgaccccaggaaaccgaggaaatgaagacgcgaaggactacccgccttcagcagcagcactcagagcagcctccgctacagccgtctcctgttatgaccaggagagggctgcgggactctcattcctctgaagaggatgaagcatcttcccaaactgatttaagccaaacgatctcaaagaaaactgtcaggagcatacaagaggctccagtgagtgaagatcttgtaatcaggttacgtcgaccccctctaagatacccaagatatgaagccaccagtgtccaacagaaggtcaatttctctgaagaaggagaaactgaagaagatgatcaagacagctctcacagcagtgtcactactgttaaggccagatccagggattctgatgaatctggagataaaaccaccagatcatctagtcaatatatagaatcattttggcagtcatcacaaagtcaaaacttcacagctcatgataagcaaccttcagtgctaagctcaggatatcaaaaaactccccaggaatgggccccacaaactgcaagaataaggaccaggatgcaaaatgacagcattctgaaatcagagcttggaaaccagtcaccatcaacctccagccgacaagtgactggacaaccccaaaatgcatcttttgtcaagaggaaccggtggtggctacttcctctgatagctgctcttgcctctgggagtttttggttctttagtactcctgaggtagaaaccactgctgttcaagagttccagaaccagatgaatcaacttaagaataagtaccaaggtcaagatgagaagctgtggaaaaggagccaaacattcctggaaaaacatcttaatagctcccatcctcggtctcagcctgctatcttactgctcactgctgcccgagatgctgaagaagcacttaggtgtctgagtgaacaaattgctgatgcctattcttcttttcgtagtgtccgtgccatccggattgatgggacagataaagctactcaagacagtgatactgtcaaactagaggtagaccaagaactgagcaatggatttaagaatggccagaatgcagctgtggtacaccgctttgagtcatttcccgcaggctctactttgatcttctacaaatattgtgaccatgaaaacgcggccttcaaagatgtagccttagtcctgactgtcttattggaggaagagacacttggaacaagtctaggcctaaaggaagttgaagaaaaagtaagagattttcttaaagtcaagttcaccaattctaacacacccaactcctacaatcatatggacccagacaaactgaatggcctctggagccgtatttctcacttagttctgcctgtgcaacctgaaaatgccctgaaaaggggcatctgcttataagaagtgagagagaagaaaaatcatgtcccaagttctgagaattgttcacactttctaaccagagacagaattcagagctctttttgaaagaactagtttctttttaaagaagttaagtgcttacataaacatggaacatataaatcattcattcaacctaattatctgtgatatgagagaatcatttcagtttccattgagagctctgttaaaggtatcttaggagtgcagattatatgcagttccttagagaatctgttttgattctgggctgagttattacagttatggtatgaccagtgagagggatttgtgtcctttcttatgaaccttcctgattttttaacttagatttctcactaagtttcctgagttattagtaagattgctccctaaatgtaaccagggattttcccattatgttcccttttataccatttaggtgtgagttccttagcttctgcctataggaacataagtaatgaaaggtcatctaggtgtgtgtttggaatttttttcttttgttttttggaaaatggaaagaacaaggcaaggaaggaaaattaatggggaagctgaagggaggaaatgttacagtaatccactgagatgtagtttagtcaaacataggtatatgaactgttaatcttggtggattccgttgggatttgttttttacatctcctttttccttccttgaagaaaaattcttggctgtcccaaggattcttcatgtatattgcaaaatttaatatatttgttcacttgagtcttaagagtaggtcaggccaaggcaggtggatcacctgaggtcagaagttcaagaccagcctggccaacatggtgaaaccccgtctctactaaaaatacaaaaattagctgggcgtggtggtgcatgcctgaaatcccagctacttgggaggctgaggcaggagaattgcttgaacccgggaggcggaggttgcagtaagccgagaccatgcttattgccctccagtctgggcaacaaaaatgaaactccgtctcaaaaaaaaaaaagtaggtcaattcgtaacagtttattttggacacaccctgaagcttttgttttgaattaagaaatgagtttcaggaattgacaaaccatttgttaaccagctgtcctgggctattgaagaagatttcattttccgcgcatccacttgttgcagtccaagtcctctagtgcaacgccatagcaaatataaagatttactatgcacgtgatacattttatggagtgcctcaagccaagatagtgaatttatatgaagggtgtgaaatgtatttctttactactatagtagtttagttataactttgcatctataattgagctttctcatctgtcaaatgctatggttttcttaaaatgttacaattctagatctatccaccttgtttttttattgtctacaaaccattaaatgtaaatattgtttttagagtcagtcattggctttgtcatttaccctttgagagttccacaagtggtagtagagtggtttaacgtctttcctctagtactaccagtattcataaatgtataccccttactgtaatttgttcctcttagaagtcagatcatctgatttatagaggattatgaaaaccagagtttttgaaaaggcttattttatacatacgtattatatagagaaacaaatgtttttattaaatgtttcattgacccaagtaatttaaaagtaatatgttacctatgtctttcaggaaaaataattatagcagctgatctgtaaatgactttaaaagctattttagtaatttaaataaatttactttcttggtttatactctcaaaaaaaaaaaaaaaaa

SEQ ID NO: 14345 - DNA, 3268 bp, Homo sapiens
gccggggaagtcatgctcgcttcacggaggcaatagctagccggtgtctgtgggaggttatgtttatttgagacttctccatcgggatcgcctggtgtcaccaagtgtccactggtactgaggtttgctgcctgccttcttgccatgtctaacgaagtagaaacaagtgcaaccaatggtcagcccgaccaacaggccgcaccaaaagcaccctcaaagaaggaaaaaaagaaaggccctgaaaagacagatgaatatctcctagcaaggttcaaaggcgatggcgtaaaatataaggccaagctgattggcattgatgatgtgccagatgcaagaggggataaaatgagccaagactctatgatgaaactaaagggaatggcggcacgtggtcggtctcagggacaacacaaacaaaggatctgggtcaacatttccctttctgggataaaaataattgatgagaaaactggggtaatagagcatgaacatccagtaaataagatttctttcattgcccgtgatgtgacagacaaccgggcatttggttacgtgtgtggaggagaaggccagcatcagttttttaccataaaaaccgggcaacaggctgaaccattagttgttgatcttaaagacctttttcaagttatctataatgtaaagaaaaaggaagaagaaaagaaaaagatagaggaagccagcaaagcagttgagaatgggagtgaggccctaaggattctagatgaccaaactaacaaactgaaatcgggtgttgaccagatggatttgtttggggacatgtctacacctcctgacctaaatagtccaacagaaagcaaagatatcctgttagtggatctaaactctgaaatcgacaccaatcagaattctttaagagaaaatccattcttaacaaacggcatcacctcctgttctcttcctcgaccaacgcctcaggcatccttcttgcctgaaaatgccttttctgccaatctcaacttctttcccacccctaatcctgatcctttccgtgacgatcctttcacacagccagaccaatcgacaccttcttcgtttgattctctcaaatctccagatcagaagaaagagaattcgagtagctcgtctactccgctgagtaatgggcccctgaatggtgatgttgactactttggtcagcaatttgaccagatctctaaccggactggcaaacaggaagctcaggcaggcccatggcccttttcaagttcgcaaacccagccagcagtgagaactcaaaatggggtatctgaaagagaacagaacggcttctctgtcaaatcctccccgaacccttttgtgggaagccctcccaaaggactgtccatacagaatggcgtaaagcaggacttggaaagctctgtccagtcctcaccacatgactccatagccattatcccacctccacaaagtaccaaaccaggaagaggcagaaggactgctaagtcttcagccaatgacttgcttgcatcagacatctttgctcctcccgtctcagaaccttcaggccaggcgtcacccacaggacaacctacagccctgcagcccaaccctctggatctcttcaaaacaagtgctcctgccccagtggggcccctggtgggtctaggtggtgtaactgtcacactccctcaggcaggaccatggaacacagcatctttggtcttcaatcagtccccttcaatggctccgggagccatgatgggtggtcaaccttcaggttttagtcagcccgtcatttttggtacaagtccagctgtttcaggttggaaccagccttcaccctttgcagcctcaactccccctccagtgcctgttgtctggggcccttctgcatctgtggcacccaatgcttggtcaacaacaagccctttggggaatccttttcagagcaatatttttccagctcctgctgtgtccactcagcccccatccatgcactcctctctcctggtcactcctcctcagccacctcccagagctggccctcccaaggacatctccagtgatgccttcactgccttagacccacttggggataaagagatcaaggatgtgaaagaaatgtttaaggatttccaactgcggcagccacctgctgtgcccgcgcggaagggagagcagacttcttctgggactttgagtgcctttgccagttatttcaacagcaaggttggcattcctcaggagaatgcagaccatgatgactttgatgctaatcaactattgaacaagatcaatgaaccaccaaagccagctcccagacaagtttccctgccagttaccaaatctactgacaatgcatttgagaaccctttctttaaagattcttttggttcatcacaagcctctgtggcttcttctcaacctgtatcttctgagatgtatagggatccatttggaaatccttttgcctaaattctgaacttggtctgcagaccatccagaggaataaaaaggttggccttagtagtcaaaaacaaagctgatagccagacacgttctgatttctgcccttgttccagctttgacgtattatctgttgccttatttctcattgcctcttctacttgtaaaatgcttttcactttctgtctaggttaaagctaaactgaatctatggctttaaataaattaagatcctaaactctctagcttaagtgtaaatgaagtacagtagtttccctactgaaccctacctcttgtgtccctggaaccttctagaacacctgccttctaccctctggttgggagatgcagccaccacatcccttcatatcatactgttttgaataaattttcaaatccttattgttcagagttgtttgggggttctgtttcagagcataaaacctaaaggttatagtagaacaaggcaccttcttaaaagaaatcttgcttcagaccatcagttacagagaatttcctaaagtaaaattgaagcaactacaacttctccttagacactttggaatctaaccacttaaggacctttttaaagagatagcttctcttctttctgaagatcaatttctcccaaggccaagattgtccttttctcccatttcttgctagctattgcaaatgagggaagaacattattcatctctcctccccttttttttctgattcttttttcagtcagttttgctcctgggttcaagtagtattaccaccctttcacaagcaacagactctcacagggcaaaaaaaaaaaaaaaaaaaaaaa

SEQ ID NO: 14346 - DNA, 3963 bp, Homo sapiens
attaaggactcggggcaggaggggcagaagttgcgcgcaggccggcgggcgggagcggacaccgaggccggcgtgcaggcgtgcgggtgtgcgggagccgggctcggggggatcggaccgagagcgagaagcgcggcatggagctccaggcagcccgcgcctgcttcgccctgctgtggggctgtgcgctggccgcggccgcggcggcgcagggcaaggaagtggtactgctggactttgctgcagctggaggggagctcggctggctcacacacccgtatggcaaagggtgggacctgatgcagaacatcatgaatgacatgccgatctacatgtactccgtgtgcaacgtgatgtctggcgaccaggacaactggctccgcaccaactgggtgtaccgaggagaggctgagcgtatcttcattgagctcaagtttactgtacgtgactgcaacagcttccctggtggcgccagctcctgcaaggagactttcaacctctactatgccgagtcggacctggactacggcaccaacttccagaagcgcctgttcaccaagattgacaccattgcgcccgatgagatcaccgtcagcagcgacttcgaggcacgccacgtgaagctgaacgtggaggagcgctccgtggggccgctcacccgcaaaggcttctacctggccttccaggatatcggtgcctgtgtggcgctgctctccgtccgtgtctactacaagaagtgccccgagctgctgcagggcctggcccacttccctgagaccatcgccggctctgatgcaccttccctggccactgtggccggcacctgtgtggaccatgccgtggtgccaccggggggtgaagagccccgtatgcactgtgcagtggatggcgagtggctggtgcccattgggcagtgcctgtgccaggcaggctacgagaaggtggaggatgcctgccaggcctgctcgcctggattttttaagtttgaggcatctgagagcccctgcttggagtgccctgagcacacgctgccatcccctgagggtgccacctcctgcgagtgtgaggaaggcttcttccgggcacctcaggacccagcgtcgatgccttgcacacgacccccctccgccccacactacctcacagccgtgggcatgggtgccaaggtggagctgcgctggacgccccctcaggacagcgggggccgcgaggacattgtctacagcgtcacctgcgaacagtgctggcccgagtctggggaatgcgggccgtgtgaggccagtgtgcgctactcggagcctcctcacggactgacccgcaccagtgtgacagtgagcgacctggagccccacatgaactacaccttcaccgtggaggcccgcaatggcgtctcaggcctggtaaccagccgcagcttccgtactgccagtgtcagcatcaaccagacagagccccccaaggtgaggctggagggccgcagcaccacctcgcttagcgtctcctggagcatccccccgccgcagcagagccgagtgtggaagtacgaggtcacttaccgcaagaagggagactccaacagctacaatgtgcgccgcaccgagggtttctccgtgaccctggacgacctggccccagacaccacctacctggtccaggtgcaggcactgacgcaggagggccagggggccggcagcaaggtgcacgaattccagacgctgtccccggagggatctggcaacttggcggtgattggcggcgtggctgtcggtgtggtcctgcttctggtgctggcaggagttggcttctttatccaccgcaggaggaagaaccagcgtgcccgccagtccccggaggacgtttacttctccaagtcagaacaactgaagcccctgaagacatacgtggacccccacacatatgaggaccccaaccaggctgtgttgaagttcactaccgagatccatccatcctgtgtcactcggcagaaggtgatcggagcaggagagtttggggaggtgtacaagggcatgctgaagacatcctcggggaagaaggaggtgccggtggccatcaagacgctgaaagccggctacacagagaagcagcgagtggacttcctcggcgaggccggcatcatgggccagttcagccaccacaacatcatccgcctagagggcgtcatctccaaatacaagcccatgatgatcatcactgagtacatggagaatggggccctggacaagttccttcgggagaaggatggcgagttcagcgtgctgcagctggtgggcatgctgcggggcatcgcagctggcatgaagtacctggccaacatgaactatgtgcaccgtgacctggctgcccgcaacatcctcgtcaacagcaacctggtctgcaaggtgtctgactttggcctgtcccgcgtgctggaggacgaccccgaggccacctacaccaccagtggcggcaagatccccatccgctggaccgccccggaggccatttcctaccggaagttcacctctgccagcgacgtgtggagctttggcattgtcatgtgggaggtgatgacctatggcgagcggccctactgggagttgtccaaccacgaggtgatgaaagccatcaatgatggcttccggctccccacacccatggactgcccctccgccatctaccagctcatgatgcagtgctggcagcaggagcgtgcccgccgccccaagttcgctgacatcgtcagcatcctggacaagctcattcgtgcccctgactccctcaagaccctggctgactttgacccccgcgtgtctatccggctccccagcacgagcggctcggagggggtgcccttccgcacggtgtccgagtggctggagtccatcaagatgcagcagtatacggagcacttcatggcggccggctacactgccatcgagaaggtggtgcagatgaccaacgacgacatcaagaggattggggtgcggctgcccggccaccagaagcgcatcgcctacagcctgctgggactcaaggaccaggtgaacactgtggggatccccatctgagcctcgacagggcctggagccccatcggccaagaatacttgaagaaacagagtggcctccctgctgtgccatgctgggccactggggactttatttatttctagttctttcctccccctgcaacttccgctgaggggtctcggatgacaccctggcctgaactgaggagatgaccagggatgctgggctgggccctctttccctgcgagacgcacacagctgagcacttagcaggcaccgccacgtcccagcatccctggagcaggagccccgccacagccttcggacagacatataggatattcccaagccgaccttccctccgccttctcccacatgaggccatctcaggagatggagggcttggcccagcgccaagtaaacagggtacctcaagccccatttcctcacactaagagggcagactgtgaacttgactgggtgagacccaaagcggtccctgtccctctagtgccttctttagaccctcgggccccatcctcatccctgactggccaaacccttgctttcctgggcctttgcaagatgcttggttgtgttgaggtttttaaatatatattttgtactttgtggagagaatgtgtgtgtgtggcagggggccccgccagggctggggacagagggtgtcaaacattcgtgagctggggactcagggaccggtgctgcaggagtgtcctgcccatgccccagtcggccccatctctcatccttttggataagtttctattctgtcagtgttaaagattttgttttgttggacatttttttcgaatcttaatttattattttttttatatttattgttagaaaatgacttatttctgctctggaataaagttgcagatgattcaaaccgaaaaaaaaaaaaaaaaaa

SEQ ID NO: 14347 - DNA, 2828 bp, Homo sapiens
agcagccggcacggggacagccggccgcacaacggatctgcaggcgcggagcaaaatgcacccgccgcgccgcgcggtcctgcagccccgccacggccccgcggcccgcacccccccggggcgacagtgagcctctcccgccaccaccgggggccgagcggagggctctcgggtgggagagcgggaccagatctcgacagctgttcatttccaggaagccaccgcagccagagcgaaaggggaccttctgccaccagcggggcatcagccagcggcgcgcatggatttatgaagacactcatgcaagaagtgggcaggacttggacaaacttttccaccggctccgcgtccgccgctccccgcgcctcgtctcctttcccctcctctcccggcggccgccgctgcccgcgatggtggccgcgctgctgggcggcggcggcgaggcccgcggggggacagtgccgggcgcctggctgtgcctgatggcgctgctgcagctgctgggctcggcgccgcggggatcggggctggcgcacggccgccgcctcatctgctggcaggcgctgctgcagtgccagggggagccggagtgcagctacgcctacaaccagtacgccgaggcgtgcgcgccggtgctggcgcagcacggcgggggcgacgcgcccggggccgccgccgccgctttcccggcctcggccgcctctttctcgtcgcgctggcgctgcccgagtcactgcatctcggccctcattcagctcaaccacacgcgccgcgggcccgccctggaggactgtgactgcgcgcaggacgagaactgcaagtccaccaagcgcgccattgagccgtgcctgccccggacgagcggcggcggcgcgggcggccccggcgcgggcggggtcatgggctgcaccgaggcccggcggcgctgcgaccgcgacagccgctgcaacctggcgctgagccgctacctgacctactgcggcaaagtcttcaacgggctgcgctgcacggacgaatgccgcaccgtcattgaggacatgctggctatgcccaaggtggcgctgctcaacgactgcgtgtgcgacggcctcgagcggcccatctgcgagtcggtcaaggagaacatggcccgcctgtgcttcggcgccgagctgggcaacggccccggcagcagcggctcggacgggggcctggacgactactacgatgaggactacgatgacgagcagcgcaccgggggcgcgggtggtgagcagccgctggacgacgacgacggcgtcccgcacccaccgcgcccgggcagcggcgctgctgcatcgggcggccgcggggacctgccctatgggcctgggcgcaggagcagcggcggcggcggccgcttggcgccccggggcgcctggaccccactcgcctccatcttgctgctgctgcttgggccgctcttttagccctcgcgccccccgccgttggctgcgggagagcccgcgtcccactcccgtgctcgcctcgaccccgcgccgggcacctgtggcttgggacagatagaagggatggttggggatacttcccaaaactttttccaagtcaacttggtgtagccggttccccggccacgactctgggcacttcccctgaagctcctctccggagcttgacttcttggacctcctcccccgccccaattccaagctccagaaactcccaactcgtctgccgtccagaaagctagctgcagtgttcaggacgtccgggaggaagcaagcatgtgggggacagaacagtagtcctggactcgaaagggaaggtgctgaccagtggggccttagcaatttgaagggttgggaaggaggaattatatttgcaaaggggctgtctattagcatatttcctttgagggggcaaaaaaaagtgccagtatcgacttttacagattgtggccagtgaggatattataatcctatgtaaacagaaaagtcccacttaccgattcattctttcactgtttgtatctgcgcccagaattctcagtgacgtgggggtgagggtgggtggcgattgccttagagggaacccctaaattggttttggataagtttgagcccttgaccttaatttcattgctaccactctgatctcttagcacatttcttaggattaagggtccaaaaatgctgatctaaggggttgccatggtgttgaacaatgcaactttttatttaaaaaagctctgcactgccatgtatgaaagtctctttatgatgtttgtttttttgtcatttttgttctttacatcaagaaattttatgtttaaatatgcggagaatgtatattgcctctgctcctatcagggttgctaaaccctggtacatcgtatataaaatgtattaaaactggggtttgttaccagttgctgtactttgtatatagaatttttataaattgtatgcttcagaaataatttatttttaaaaagaaattaaaagttttaaactcacatccatattacacctttcccccctgaaatgtatagaatccatttgtcatcaggaatcaaaacccacagtccattgtgaagtgtgctatatttagaacagtcttaaaatgtacagtgtattttatagaattgaagttaacattcttattttcaagagaatttatggacgttgtagaaatgtacaaatgcatttccaaactgccttaaacgttgtatttttatagacatgtttttttaaaaatcctaagtttttaaataactatggatttgtgtattttttttggttatttgttttattaaaacatgtacatcagtaaagagttttaaacaatga

SEQ ID NO: 14348 - DNA, 3693 bp, Homo sapiens
cgcgccccgggctcggccgacccggcggggatctaggggtgggcgacttcgcgggaccgtggcgcatgtttcctgggagttactgatcatcttctttgaagaaacatgaagttacactatgttgctgtgcttactctagccatcctgatgttcctgacatggcttccagaatcactgagctgtaacaaagcactctgtgctagtgatgtgagcaaatgcctcattcaggagctctgccagtgccggccgggagaaggcaattgctcctgctgtaaggagtgcatgctgtgtcttggggccctttgggacgagtgctgtgactgtgttggtatgtgtaatcctcgaaattatagtgacacacctccaacttcaaagagcacagtggaggagctgcatgaaccgatcccttctctcttccgggcactcacagaaggagatactcagttgaattggaacatcgtttctttccctgttgcagaagaactttcacatcatgagaatctggtttcatttttagaaactgtgaaccagccacaccaccagaatgtgtctgtccccagcaataatgttcacgcgccttattccagtgacaaagaacacatgtgtactgtggtttattttgatgactgcatgtccatacatcagtgtaaaatatcctgtgagtccatgggagcatccaaatatcgctggtttcataatgcctgctgcgagtgcattggtccagaatgtattgactatggtagtaaaactgtcaaatgtatgaactgcatgttttaaagaagacaaatgcaaaccaaagcaacttagtaaaataataggtataaaaagttattctgtaagtctgttggttgtatcttgtatcagaatcccagtaagttaagttgtaaagactttggaataagtttcttttaaaaatatgacatagccagtgatgtgtttaattatataactgttcttactgattttattgccccctagcaataagccctttcctttgaatacatgtacaactttggtcatatgagaagcaggtgcgcagagaattccttgaaagatctgaggtttttaacataaagtctgatgtggttttcctctagcattccaaaaggtttttgctttgaaagtgttagcagaagcatgttgatgtgaattatgatttcttcatgtgctactgttagcacactgagtttttatagttgcacatcattcctcattgtgccttgttttatccattttataaatagagtagatatttgatataccactctgataactcatataaaaatatcatcataaaaagcttaatttcatcccttttatgttggttttaaaaggtaaatgcttaccatattttataattgagaactcttacatagtagaatccattctataatacatgtgttgacaaagctttagagaaagtttcctattctcttccatttcccctgcccaaagtgctgacataggcagtgatgaagaatctttaccaagattttcagggtgtacctatgaaattgctttaaatgcactgctggtgtaaataattagcaagcaaaagcgtttctgtgacttcaggtaccagcttaaagagcactagggatggggaacgaatgccaaatcagactccacctagagcaccaggaaacagcttgtaccctggtagggaaatggtgtcgctgaaaggggaggctgagccagtgcgagactgaacttgtgcagccttagccaagacaaagcagtgtttttcagcagacggctgatgggacaggaattgaagaagagaattgactcgtatgaacaggacagggtgaaaatgctgggaattataatgggaaacaaaactatctatgttcatattttgtaatatttcatttgttaagtttatatctggatataatgttctttttaaacaagtataatcatatcgtcggaggttaagattatgaaattttaaaatctctattcaagatgatgttcactccaaatacactacagaatttagtcaacattttatataatgtttcaataaatgtttctttcaataaagatactatgtgcccttcatagtaataaaatctcaatcttaaagcatgaatctaaaacataaatatttatattacagactcaattttacaaaattactaattgctctagtgcatatttgaactacaagcaactttttaggaatacctctttatacgtctacatattttagtatataaaaatagataatgctcttggacacattttgtattattcatgatctgaatagtagttagttaaaagatcatttgtaatattatgatcaactgttataaattaaggtcttaataccttttctgctctttcaaataactctaatgaatattcaagatattttagccttttaaaaagttgagatttagctcatggatatattttttggtagggaaacattagggtctccttttcttccttttacctagaatgcctcatttaaaagtgccttgaaaacatttagctccccttcttcatgagcatctgtagagctgaaagtattctggaactttagacagaaagctgaaaggaatctgcagtctcctgctgcagttcaactctgctgtttttcagtcatttcctactgtgagtggagtgatgtttgtgtgtgtgttggcaacatgcctaatgttttcttaatgatgacaacaaatattttaaaactgcatttatcattttttaggtcttcattaaattttaaaatgtaatatctgtttcccaccccctacattaggaggataatttcttaaaccacattgttttaattgatttttcttatcttgatttctttcattagaaactatccctaaatgtaaagatcttttgccttcaaatttggcttattttttctgatttatgagggtttgaaagaaagaattcacctaaaagattccatttccagttttataatgtatttcaggttctgaataacaatatttttccaaattgaaagtaaatattcaagaagttgatagcctggttaaaagttagatcctctattaccattctaagcacattcacttctatattgaagttttggtaaaaattcttttttcttttttaataaaaaattaggttattactttttttataaccagatttttaaagcactaggttttaaatcagtgggtatcataaaagccatatataaaagatcctttcttatagtaagacttgtgcttgttagcaggtttttctgttagtttttcccccataacatttaattattactaaaattgtatttacaatagtggtgccaaatcaaatggtaatttaaataaaatctattctgtgtttatgtagggtggtataaaaaagaggtcttcatttagacatgtgatttctaaaattccagaaagcaaaattgataagatgttagaaatttggaccgttatttataatcagggtagcattaaaatggagaaaagaaagttttctgaaaaaatgcagtaaatataagccacatttctaaagtttatttttatgaaagcttcttttaagattttgaaatctattctgcattcccaagagtttatgtttattgtattttatatgatctacaacatataaaattgtgtatttttctttggttgtccctattaacaaaaaagtattttaataaaaaattgaaatgaaaaaaaaaaaaaaaaaaaaaaa

SEQ ID NO: 14349 - DNA, 2692 bp, Homo sapiens
cctacccgcgcgcaggccaagttgctgaatcaatggagccctccccaacccgggcgttccccagcgaggcttccttcccatcctcctgaccaccggggcttttcgtgagctcgtctctgatctcgcgcaagagtgacacacaggtgttcaaagacgcttctggggagtgagggaagcggtttacgagtgacttggctggagcctcaggggcgggcactggcacggaacacaccctgaggccagccctggctgcccaggcggagctgcctcttctcccgcgggttggtggacccgctcagtacggagttggggaagctctttcacttcggaggattgctcaacaaccatgctgggcatctggaccctcctacctctggttcttacgtctgttgctagattatcgtccaaaagtgttaatgcccaagtgactgacatcaactccaagggattggaattgaggaagactgttactacagttgagactcagaacttggaaggcctgcatcatgatggccaattctgccataagccctgtcctccaggtgaaaggaaagctagggactgcacagtcaatggggatgaaccagactgcgtgccctgccaagaagggaaggagtacacagacaaagcccatttttcttccaaatgcagaagatgtagattgtgtgatgaaggacatggcttagaagtggaaataaactgcacccggacccagaataccaagtgcagatgtaaaccaaactttttttgtaactctactgtatgtgaacactgtgacccttgcaccaaatgtgaacatggaatcatcaaggaatgcacactcaccagcaacaccaagtgcaaagaggaagtgaagagaaaggaagtacagaaaacatgcagaaagcacagaaaggaaaaccaaggttctcatgaatctccaaccttaaatcctgaaacagtggcaataaatttatctgatgttgacttgagtaaatatatcaccactattgctggagtcatgacactaagtcaagttaaaggctttgttcgaaagaatggtgtcaatgaagccaaaatagatgagatcaagaatgacaatgtccaagacacagcagaacagaaagttcaactgcttcgtaattggcatcaacttcatggaaagaaagaagcgtatgacacattgattaaagatctcaaaaaagccaatctttgtactcttgcagagaaaattcagactatcatcctcaaggacattactagtgactcagaaaattcaaacttcagaaatgaaatccaaagcttggtctagagtgaaaaacaacaaattcagttctgagtatatgcaattagtgtttgaaaagattcttaatagctggctgtaaatactgcttggttttttactgggtacattttatcatttattagcgctgaagagccaacatatttgtagatttttaatatctcatgattctgcctccaaggatgtttaaaatctagttgggaaaacaaacttcatcaagagtaaatgcagtggcatgctaagtacccaaataggagtgtatgcagaggatgaaagattaagattatgctctggcatctaacatatgattctgtagtatgaatgtaatcagtgtatgttagtacaaatgtctatccacaggctaaccccactctatgaatcaatagaagaagctatgaccttttgctgaaatatcagttactgaacaggcaggccactttgcctctaaattacctctgataattctagagattttaccatatttctaaactttgtttataactctgagaagatcatatttatgtaaagtatatgtatttgagtgcagaatttaaataaggctctacctcaaagacctttgcacagtttattggtgtcatattatacaatatttcaattgtgaattcacatagaaaacattaaattataatgtttgactattatatatgtgtatgcattttactggctcaaaactacctacttctttctcaggcatcaaaagcattttgagcaggagagtattactagagctttgccacctctccatttttgccttggtgctcatcttaatggcctaatgcacccccaaacatggaaatatcaccaaaaaatacttaatagtccaccaaaaggcaagactgcccttagaaattctagcctggtttggagatactaactgctctcagagaaagtagctttgtgacatgtcatgaacccatgtttgcaatcaaagatgataaaatagattcttatttttcccccacccccgaaaatgttcaataatgtcccatgtaaaacctgctacaaatggcagcttatacatagcaatggtaaaatcatcatctggatttaggaattgctcttgtcatacccccaagtttctaagatttaagattctccttactactatcctacgtttaaatatctttgaaagtttgtattaaatgtgaattttaagaaataatatttatatttctgtaaatgtaaactgtgaagatagttataaactgaagcagatacctggaaccacctaaagaacttccatttatggaggatttttttgccccttgtgtttggaattataaaatataggtaaaagtacgtaattaaataatgtttttggtaaaaaaaaaaaaaaaaaaaaaaaaaaaaaaaaaaaaaaaaaaaaaaaaaaaaaaaaaaaaaaaaaaa

SEQ ID NO: 14350 - DNA, 2730 bp, Homo sapiens
cctacccgcgcgcaggccaagttgctgaatcaatggagccctccccaacccgggcgttccccagcgaggcttccttcccatcctcctgaccaccggggcttttcgtgagctcgtctctgatctcgcgcaagagtgacacacaggtgttcaaagacgcttctggggagtgagggaagcggtttacgagtgacttggctggagcctcaggggcgggcactggcacggaacacaccctgaggccagccctggctgcccaggcggagctgcctcttctcccgcgggttggtggacccgctcagtacggagttggggaagctctttcacttcggaggattgctcaacaaccatgctgggcatctggaccctcctacctctggttcttacgtctgttgctagattatcgtccaaaagtgttaatgcccaagtgactgacatcaactccaagggattggaattgaggaagactgttactacagttgagactcagaacttggaaggcctgcatcatgatggccaattctgccataagccctgtcctccaggtgaaaggaaagctagggactgcacagtcaatggggatgaaccagactgcgtgccctgccaagaagggaaggagtacacagacaaagcccatttttcttccaaatgcagaagatgtagattgtgtgatgaaggacatggcttagaagtggaaataaactgcacccggacccagaataccaagtgcagatgtaaaccaaactttttttgtaactctactgtatgtgaacactgtgacccttgcaccaaatgtgaacatggaatcatcaaggaatgcacactcaccagcaacaccaagtgcaaagaggaaggatccagatctaacttggggtggctttgtcttcttcttttgccaattccactaattgtttgggtgaagagaaaggaagtacagaaaacatgcagaaagcacagaaaggaaaaccaaggttctcatgaatctccaaccttaaatcctatgttgacttgagtaaatatatcaccactattgctggagtcatgacactaagtcaagttaaaggctttgttcgaaagaatggtgtcaatgaagccaaaatagatgagatcaagaatgacaatgtccaagacacagcagaacagaaagttcaactgcttcgtaattggcatcaacttcatggaaagaaagaagcgtatgacacattgattaaagatctcaaaaaagccaatctttgtactcttgcagagaaaattcagactatcatcctcaaggacattactagtgactcagaaaattcaaacttcagaaatgaaatccaaagcttggtctagagtgaaaaacaacaaattcagttctgagtatatgcaattagtgtttgaaaagattcttaatagctggctgtaaatactgcttggttttttactgggtacattttatcatttattagcgctgaagagccaacatatttgtagatttttaatatctcatgattctgcctccaaggatgtttaaaatctagttgggaaaacaaacttcatcaagagtaaatgcagtggcatgctaagtacccaaataggagtgtatgcagaggatgaaagattaagattatgctctggcatctaacatatgattctgtagtatgaatgtaatcagtgtatgttagtacaaatgtctatccacaggctaaccccactctatgaatcaatagaagaagctatgaccttttgctgaaatatcagttactgaacaggcaggccactttgcctctaaattacctctgataattctagagattttaccatatttctaaactttgtttataactctgagaagatcatatttatgtaaagtatatgtatttgagtgcagaatttaaataaggctctacctcaaagacctttgcacagtttattggtgtcatattatacaatatttcaattgtgaattcacatagaaaacattaaattataatgtttgactattatatatgtgtatgcattttactggctcaaaactacctacttctttctcaggcatcaaaagcattttgagcaggagagtattactagagctttgccacctctccatttttgccttggtgctcatcttaatggcctaatgcacccccaaacatggaaatatcaccaaaaaatacttaatagtccaccaaaaggcaagactgcccttagaaattctagcctggtttggagatactaactgctctcagagaaagtagctttgtgacatgtcatgaacccatgtttgcaatcaaagatgataaaatagattcttatttttcccccacccccgaaaatgttcaataatgtcccatgtaaaacctgctacaaatggcagcttatacatagcaatggtaaaatcatcatctggatttaggaattgctcttgtcatacccccaagtttctaagatttaagattctccttactactatcctacgtttaaatatctttgaaagtttgtattaaatgtgaattttaagaaataatatttatatttctgtaaatgtaaactgtgaagatagttataaactgaagcagatacctggaaccacctaaagaacttccatttatggaggatttttttgccccttgtgtttggaattataaaatataggtaaaagtacgtaattaaataatgtttttggtaaaaaaaaaaaaaaaaaaaaaaaaaaaaaaaaaaaaaaaaaaaaaaaaaaaaaaaaaaaaaaaaaaa

SEQ ID NO: 14351 - DNA, 2755 bp, Homo sapiens
cctacccgcgcgcaggccaagttgctgaatcaatggagccctccccaacccgggcgttccccagcgaggcttccttcccatcctcctgaccaccggggcttttcgtgagctcgtctctgatctcgcgcaagagtgacacacaggtgttcaaagacgcttctggggagtgagggaagcggtttacgagtgacttggctggagcctcaggggcgggcactggcacggaacacaccctgaggccagccctggctgcccaggcggagctgcctcttctcccgcgggttggtggacccgctcagtacggagttggggaagctctttcacttcggaggattgctcaacaaccatgctgggcatctggaccctcctacctctggttcttacgtctgttgctagattatcgtccaaaagtgttaatgcccaagtgactgacatcaactccaagggattggaattgaggaagactgttactacagttgagactcagaacttggaaggcctgcatcatgatggccaattctgccataagccctgtcctccaggtgaaaggaaagctagggactgcacagtcaatggggatgaaccagactgcgtgccctgccaagaagggaaggagtacacagacaaagcccatttttcttccaaatgcagaagatgtagattgtgtgatgaaggacatggcttagaagtggaaataaactgcacccggacccagaataccaagtgcagatgtaaaccaaactttttttgtaactctactgtatgtgaacactgtgacccttgcaccaaatgtgaacatggaatcatcaaggaatgcacactcaccagcaacaccaagtgcaaagaggaaggatccagatctaacttggggtggctttgtcttcttcttttgccaattccactaattgtttgggtgaagagaaaggaagtacagaaaacatgcagaaagcacagaaaggaaaaccaaggttctcatgaatctccaaccttaaatcctgaaacagtggcaataaatttatctgatgttgacttgagtaaatatatcaccactattgctggagtcatgacactaagtcaagttaaaggctttgttcgaaagaatggtgtcaatgaagccaaaatagatgagatcaagaatgacaatgtccaagacacagcagaacagaaagttcaactgcttcgtaattggcatcaacttcatggaaagaaagaagcgtatgacacattgattaaagatctcaaaaaagccaatctttgtactcttgcagagaaaattcagactatcatcctcaaggacattactagtgactcagaaaattcaaacttcagaaatgaaatccaaagcttggtctagagtgaaaaacaacaaattcagttctgagtatatgcaattagtgtttgaaaagattcttaatagctggctgtaaatactgcttggttttttactgggtacattttatcatttattagcgctgaagagccaacatatttgtagatttttaatatctcatgattctgcctccaaggatgtttaaaatctagttgggaaaacaaacttcatcaagagtaaatgcagtggcatgctaagtacccaaataggagtgtatgcagaggatgaaagattaagattatgctctggcatctaacatatgattctgtagtatgaatgtaatcagtgtatgttagtacaaatgtctatccacaggctaaccccactctatgaatcaatagaagaagctatgaccttttgctgaaatatcagttactgaacaggcaggccactttgcctctaaattacctctgataattctagagattttaccatatttctaaactttgtttataactctgagaagatcatatttatgtaaagtatatgtatttgagtgcagaatttaaataaggctctacctcaaagacctttgcacagtttattggtgtcatattatacaatatttcaattgtgaattcacatagaaaacattaaattataatgtttgactattatatatgtgtatgcattttactggctcaaaactacctacttctttctcaggcatcaaaagcattttgagcaggagagtattactagagctttgccacctctccatttttgccttggtgctcatcttaatggcctaatgcacccccaaacatggaaatatcaccaaaaaatacttaatagtccaccaaaaggcaagactgcccttagaaattctagcctggtttggagatactaactgctctcagagaaagtagctttgtgacatgtcatgaacccatgtttgcaatcaaagatgataaaatagattcttatttttcccccacccccgaaaatgttcaataatgtcccatgtaaaacctgctacaaatggcagcttatacatagcaatggtaaaatcatcatctggatttaggaattgctcttgtcatacccccaagtttctaagatttaagattctccttactactatcctacgtttaaatatctttgaaagtttgtattaaatgtgaattttaagaaataatatttatatttctgtaaatgtaaactgtgaagatagttataaactgaagcagatacctggaaccacctaaagaacttccatttatggaggatttttttgccccttgtgtttggaattataaaatataggtaaaagtacgtaattaaataatgtttttggtaaaaaaaaaaaaaaaaaaaaaaaaaaaaaaaaaaaaaaaaaaaaaaaaaaaaaaaaaaaaaaaaaaa

SEQ ID NO: 14352 - DNA, 2521 bp, Homo sapiens
ggccgggacggggcagggcgaacctgccagtgactggactcagcttctttgcgtaaccaatactggaaggcatttaaaggcacctctgccgccacagaccttgcagttaactccgccctgacccacccttcccgatgcagtccctgatgcaggctcccctcctgatcgccctgggcttgcttctcgcggcccctgcgcaagcccacctgaaaaagccatcccagctcagtagcttttcctgggataactgtgatgaagggaaggaccctgcggtgatcagaagcctgactctggagcctgaccccatcatcgttcctggaaatgtgaccctcagtgtcatgggcagcaccagtgtccccctgagttctcctctgaaggtggatttagttttggagaaggaggtggctggcctctggatcaagatcccatgcacagactacattggcagctgtacctttgaacacttctgtgatgtgcttgacatgttaattcctactggggagccctgcccagagcccctgcgtacctatgggcttccttgccactgtcccttcaaagaaggaacctactcactgcccaagagcgaattcgttgtgcctgacctggagctgcccagttggctcaccaccgggaactaccgcatagagagcgtcctgagcagcagtgggaagcgtctgggctgcatcaagatcgctgcctctctaaagggcatataacatggcatctgccacagcagaatggagcggtgtgaggaaggtcccttttcctctgttttgtgtttgccaaggccaaactcccactctctgcccccctttaatcccctttctacagtgagtccactaccctcactgaaaatcattttgtaccacttacattttaggctggggcaagcagccctgacctaagggagaatgagttggacagttcttgatagcccagggcatctgctgggctgaccacgttactcatccccgttaacattctctctaaagagcctcgttcatttccaaagcagttaaggaatgggaaccagagtgttttaggacctgaagaatctttatgactctctctctttcactcttttttttttttgtcactaagttaaaagcgaagtgagagtattaacgtttttgttctcctccggccccctgttacaatgaaggggcaaaagtatttgctcttagtctattcctcccttaacttctgtgactaatttttatttcctttctagatttgcccaattaatactagggtgcagtgtatcctggagaggtagggtgtgtgggggaggaatcccttgggggagatattaggagtgctctgttgtttacaaactcaggtacccgcagggcctagcaagagacttaaatgactgataagaaccgtgagaaacatgttgcttccaggcttgatttcgatttttcgctttttttttttttgagacagaatctcactttgtcaccaggctggagtgcagtggtgcaatctcacctcactgcaacctccgcctcctgggttcaagcaattctcctgcctcagcctcccaagtagcttggactacaggccctgccaccacgcccggctaatttgtgtatttttagtagagatggggtttcaccatgttggccaggatggtctcgatctcttgacctcgtgatctgtccaccttggccttgcaaagcgctggattacaggcatgagccactacacccagccgatttttcctttttgattaaagatgctattacaatgtaaatatttcttacacagaaagtcacagcacatgtgcccattgatacaaggctgctgaggcctggtctccagttggaaatataattaagggtggcaaggactggagtcagttggagagtgcatagccagtctgtgaagacaactgccagatactggcaatactccagcctggtgacagagtgagactctgtctcaaaaaaaaagtttcaatgtttactcctagagaagccaaaaatccagatttgtatatgaaatcttaccattttaaaagattggcagctaattatttttttaaaaagctgtgcagtgtgatgtgtcccaaacggactggctcatgggtggccacgtcacaacctctgatctcagaccgtgcatgccttgtcctcttaagacaactcctgtggcaccgtttctccctccacagggccaaagccatagtgtccggtcccaaggacaaggctcttccagtgctaggagaggtatgagcagcctctcacctgtgagctgtggggatcacaaggctgcctgcctcagtcttggagtcctgttgggtgaatgaggcagatgggaaagagcctcaccagcagctgcttttggagcaggggtccaaggaagagagggtggcctcgacatcaaactgcctggatttttctaccaccctgttacatcataacaacttctgaaacacacaccagccctgagttctgggctcatttgaagcctggaatagcaataaatctttttaacttgcggacagttaaaaaaaaaa

SEQ ID NO: 14353 - DNA, 6928 bp, Homo sapiens
ggcgggagcgcgtgcgcccgaggacccggccggaaggcttgcgccagctcaggatgaggacaggctgggcgacccctcgccgcccggcggggctcctcatgctgctcttctggttcttcgatctcgcggagccctctggccgcgcagctaatgaccccttcaccatcgtccatggaaatacgggcaagtgcatcaagccagtgtatggctggatagtagcagacgactgtgatgaaactgaggacaagttatggaagtgggtgtcccagcatcggctctttcatttgcactcccaaaagtgccttggcctcgatattaccaaatcggtaaatgagctgagaatgttcagctgtgactccagtgccatgctgtggtggaaatgtgagcaccactctctgtacggagctgcccggtaccggctggctctgaaggatggacatggcacagcaatctcaaatgcatctgatgtctggaagaaaggaggctcagaggaaagcctttgtgaccagccttatcatgagatctataccagagatgggaactcttatgggagaccttgtgaatttccattcttaattgatgggacctggcatcatgattgcattcttgatgaagatcatagtgggccatggtgtgccaccaccttaaattatgaatatgaccgaaagtggggcatctgcttaaagcctgaaaacggttgtgaagataattgggaaaagaacgagcagtttggaagttgctaccaatttaatactcagacggctctttcttggaaagaagcttatgtttcatgtcagaatcaaggagctgatttactgagcatcaacagtgctgctgaattaacttaccttaaagaaaaagaaggcattgctaagattttctggattggtttaaatcagctatactctgctagaggctgggaatggtcagaccacaaaccattaaactttctcaactgggatccagacaggcccagtgcacctactataggtggctccagctgtgcaagaatggatgctgagtctggtctgtggcagagcttttcctgtgaagctcaactgccctatgtctgcaggaaaccattaaataatacagtggagttaacagatgtctggacatactcagatacccgctgtgatgcaggctggctgccaaataatggattttgctatctgctggtaaatgaaagtaattcctgggataaggcacatgcgaaatgcaaagccttcagtagtgacctaatcagcattcattctctagcagatgtggaggtggttgtcacaaaactccataatgaggatatcaaagaagaagtgtggataggccttaagaacataaacataccaactttatttcagtggtcagatggtactgaagttactctaacatattgggatgagaatgagccaaatgttccctacaataagacgcccaactgtgtttcctacttaggagagctaggtcagtggaaagtccaatcatgtgaggagaaactaaaatatgtatgcaagagaaagggagaaaaactgaatgacgcaagttctgataagatgtgtcctccagatgagggctggaagagacatggagaaacctgttacaagatttatgaggatgaggtcccttttggaacaaactgcaatctgactatcactagcagatttgagcaagaatacctaaatgatttgatgaaaaagtatgataaatctctaagaaaatacttctggactggcctgagagatgtagattcttgtggagagtataactgggcaactgttggtggaagaaggcgggctgtaaccttttccaactggaattttcttgagccagcttccccgggcggctgcgtggctatgtctactggaaagtctgttggaaagtgggaggtgaaggactgcagaagcttcaaagcactttcaatttgcaagaaaatgagtggaccccttgggcctgaagaagcatcccctaagcctgatgacccctgtcctgaaggctggcagagtttccccgcaagtctttcttgttataaggtattccatgcagaaagaattgtaagaaagaggaactgggaagaagctgaacgattctgccaagcccttggagcacacctttctagcttcagccatgtggatgaaataaaggaatttcttcactttttaacggaccagttcagtggccagcattggctgtggattggtttgaataaaaggagcccagatttacaaggatcctggcaatggagtgatcgtacaccagtgtctactattatcatgccaaatgagtttcagcaggattatgacatcagagactgtgctgctgtcaaggtatttcataggccatggcgaagaggctggcatttctatgatgatagagaatttatttatttgaggccttttgcttgtgatacaaaacttgaatgggtgtgccaaattccaaaaggccgtactccaaaaacaccagactggtacaatccagaccgtgctggaattcatggacctccacttataattgaaggaagtgaatattggtttgttgctgatcttcacctaaactatgaagaagccgtcctgtactgtgccagcaatcacagctttcttgcgactataacatcttttgtgggactaaaagccatcaaaaacaaaatagcaaatatatctggtgatggacagaagtggtggataagaattagcgagtggccaatagatgatcattttacatactcacgatatccatggcaccgctttcctgtgacatttggagaggaatgcttgtacatgtctgccaagacttggcttatcgacttaggtaaaccaacagactgtagtaccaagttgcccttcatctgtgaaaaatataatgtttcttcgttagagaaatacagcccagattctgcagctaaagtgcaatgttctgagcaatggattccttttcagaataagtgttttctaaagatcaaacccgtgtctctcacattttctcaagcaagcgatacctgtcactcctatggtggcacccttccttcagtgttgagccagattgaacaagactttattacatccttgcttccggatatggaagctactttatggattggtttgcgctggactgcctatgaaaagataaacaaatggacagataacagagagctgacgtacagtaactttcacccattattggttagtgggaggctgagaataccagaaaatttttttgaggaagagtctcgctaccactgtgccctaatactcaacctccaaaaatcaccgtttactgggacgtggaattttacatcctgcagtgaacgccactttgtgtctctctgtcagaaatattcagaagttaaaagcagacagacgttgcagaatgcttcagaaactgtaaagtatctaaataatctgtacaaaataatcccaaagactctgacttggcacagtgctaaaagggagtgtctgaaaagtaacatgcagctggtgagcatcacggacccttaccagcaggcattcctcagtgtgcaggcgctccttcacaactcttccttatggatcggactcttcagtcaagatgatgaactcaactttggttggtcagatgggaaacgtcttcattttagtcgctgggctgaaactaatgggcaactcgaagactgtgtagtattagacactgatggattctggaaaacagttgattgcaatgacaatcaaccaggtgctatttgctactattcaggaaatgagactgaaaaagaggtcaaaccagttgacagtgttaaatgtccatctcctgttctaaatactccgtggataccatttcagaactgttgctacaatttcataataacaaagaataggcatatggcaacaacacaggatgaagttcatactaaatgccagaaactgaatccaaaatcacatattctgagtattcgagatgaaaaggagaataactttgttcttgagcaactgctgtacttcaattatatggcttcatgggtcatgttaggaataacttatagaaataattctcttatgtggtttgataagaccccactgtcatatacacattggagagcaggaagaccaactataaaaaatgagaagtttttggctggtttaagtactgacggcttctgggatattcaaacctttaaagttattgaagaagcagtttattttcaccagcacagcattcttgcttgtaaaattgaaatggttgactacaaagaagaacataatactacactgccacagtttatgccatatgaagatggtatttacagtgttattcaaaaaaaggtaacatggtatgaagcattaaacatgtgttctcaaagtggaggtcacttggcaagcgttcacaaccaaaatggccagctctttctggaagatattgtaaaacgtgatggatttccactatgggttgggctctcaagtcatgatggaagtgaatcaagttttgaatggtctgatggtagtacatttgactatatcccatggaaaggccaaacatctcctggaaattgtgttctcttggatccaaaaggaacttggaaacatgaaaaatgcaactctgttaaggatggtgctatttgttataaacctacaaaatctaaaaagctgtcccgtcttacatattcatcaagatgtccagcagcaaaagagaatgggtcacggtggatccagtacaagggtcactgttacaagtctgatcaggcattgcacagtttttcagaggccaaaaaattgtgttcaaaacatgatcactctgcaactatcgtttccataaaagatgaagatgagaataaatttgtgagcagactgatgagggaaaataataacattaccatgagagtttggcttggattatctcaacattctgttgaccagtcttggagttggttagatggatcagaagtgacatttgtcaaatgggaaaataaaagtaagagtggtgttggaagatgtagcatgttgatagcttcaaatgaaacttggaaaaaagttgaatgtgaacatggttttggaagagttgtctgcaaagtgcctctgggccctgattacacagcaatagctatcatagttgccacactaagtatcttagttctcatgggcggactgatttggttcctcttccaaaggcaccgtttgcacctggcgggtttctcatcagttcgatatgcacaaggagtgaatgaagatgagattatgcttccttctttccatgactaaattcttctaaaagttttctaatttgcactaatgtggttatggagaaattagtcacttaaaatgtcccagtgtcagtatttactctgctccaaagtagaactcttaaatactttttcagttgtttagatcttaggcatgtgctggtatccacagttaattccctgctaaatgccatgtttatcaccctaattaatagaatggaggggactccaaagctggaactgaagtccaaattgtttgtacagtaatatgtttaatgttcattttctctgtatgaatgtgattggtaactaggatatgtatattttaatagaatttttaacaaaacttcttagaaaattaaaataggcatattactaggtgacatgtctactttttaatttttaagagcatccggccaaatgcaaaattagtacctcaaagtaaaaattgaactgtaaactctatcagcattgtttcaaaatagtcatttttagcactggggaaaaataaacaataagacatgcttactttttaatttttatttttttgagactgagtctctctctgttgcccaggctggagtacaatggcgtgatctcggctcactgcaaatctccgcctcccaggttcaagcgattctcctgcctcagcctcctgagtagctgggattacaggcaactgccaccatgcccggctaatttttgtatttttagtagagatggggtttcaccatgttggccaggctggtctcgaactcgtgaccgcagtgatcctcccgcctcggcctcccaaagtgctgggattacaggcatgagccaccgcgcctggcctctgcttactttttatatagcaaaatgattccccttggcaagatgtttcttatattattccaaagttatttcataccattattatgtaaatatgaagagtttttttctgtttataattgtttataaaacaatgacttttaaagatttagtgcttaacattttcccaagtgtgggaacattatttttagattgagtaggtaccttgtagcagtgtgctttgcattttctgatgtattacatgactgtttcttttgtaaagagaatcaactaggtatttaagactgataattttacaatttatatgcttcacatagcatgtcaacttttgactaagaattttgttttacttttttaacatgtgttaaacagagaaagggtccatgaaggaaagtgtatgagttgcatttgtaaaaatgagactttttcagtggaactctaaaccttgtgatgactactaacaaatgtaaaattatgagtgattaagaaaacattgctttgtggttatcactttaagttttgacacctagattatagtcttagtaatagcatccactggaaaaggtgaaaatgttttattcagcatttaacttacatttgtactttagagtatttttgtataaaatccatagatttattttacatttagagtatttacactatgataaagttgtaaataattttctaagacagtttttatatagtctacagttgtcctgatttcttattgaatttgttagactagttctcttgtcttgtgatctgtgtacaattttagtcactaagactttcctccaagaactaagccaacttgatgtgaaaagcacggctgtatataatggtgatgtcataataaagttgttttatcttttaagtaaaaaaaaaaaaaaaaaaaaa

SEQ ID NO: 14354 - DNA, 3319 bp, Homo sapiens
gcttccggccgcggccctggcgcgtggtctgcgcgcgcccggccgtgcgtgcggatgcggggaggctgcgtgtgtgcgcagggagagaacgccggccaccttcccgcttccgagctgggtgcgcgccgagcacaggagattgcctgcgtttaggaggtggctgcgttgtgggaaaagctatcaaggaagaaattgccaaaccatgtctttttttctgttttcagagtagttcacaacagatctgagtgttttaattaagcatggaatacagaaaacaacaaaaaacttaagctttaatttcatctggaattccacagttttcttagctccctggacccggttgacctgttggctcttcccgctggctgctctatcacgtggtgctctccgactactcaccccgagtgtaaagaaccttcggctcgcgtgcttctgagctgctgtggatggcctcggctctctggactgtccttccgagtaggatgtcactgagatccctcaaatggagcctcctgctgctgtcactcctgagtttctttgtgatgtggtacctcagccttccccactacaatgtgatagaacgcgtgaactggatgtacttctatgagtatgagccgatttacagacaagactttcacttcacacttcgagagcattcaaactgctctcatcaaaatccatttctggtcattctggtgacctcccacccttcagatgtgaaagccaggcaggccattagagttacttggggtgaaaaaaagtcttggtggggatatgaggttcttacatttttcttattaggccaagaggctgaaaaggaagacaaaatgttggcattgtccttagaggatgaacaccttctttatggtgacataatccgacaagattttttagacacatataataacctgaccttgaaaaccattatggcattcaggtgggtaactgagttttgccccaatgccaagtacgtaatgaagacagacactgatgttttcatcaatactggcaatttagtgaagtatcttttaaacctaaaccactcagagaagtttttcacaggttatcctctaattgataattattcctatagaggattttaccaaaaaacccatatttcttaccaggagtatcctttcaaggtgttccctccatactgcagtgggttgggttatataatgtccagagatttggtgccaaggatctatgaaatgatgggtcacgtaaaacccatcaagtttgaagatgtttatgtcgggatctgtttgaatttattaaaagtgaacattcatattccagaagacacaaatcttttctttctatatagaatccatttggatgtctgtcaactgagacgtgtgattgcagcccatggcttttcttccaaggagatcatcactttttggcaggtcatgctaaggaacaccacatgccattattaacttcacattctacaaaaagcctagaaggacaggatactttgtggaaagtgttaaataaagtaggtactgtggaaaattcatggggaggtcagtgtgctggcttacactgaactgaaactcatgaaaaacccagactggagactggagggttacacttgtgatttattagtcaggcccttcaaagatgatatgtggaggaattaaatataaaggaattggaggtttttgctaaagaaattaataggaccaaacaatttggacatgtcattctgtagactagaatttcttaaaagggtgttactgagttataagctcactaggctgtaaaaacaaaacaatgtagagttttatttattgaacaatgtagtcacttgaaggttttgtgtatatcttatgtggattaccaatttaaaaatatatgtagttctgtgtcaaaaaacttcttcactgaagttatactgaacaaaattttacctgtttttggtcatttataaagtacttcaagatgttgcagtatttcacagttattattatttaaaattacttcaactttgtgtttttaaatgttttgacgatttcaatacaagataaaaaggatagtgaatcattctttacatgcaaacattttccagttacttaactgatcagtttattattgatacatcactccattaatgtaaagtcataggtcattattgcatatcagtaatctcttggactttgttaaatattttactgtggtaatatagagaagaattaaagcaagaaaatctgaagtattgtcttgtttttaaaaaatacagttcctagtgtttttagaagtcacttaatttgtctcatttttccacctggaaattaggaataatgtagaatgcaaggcagtaatttccttttggaaaggactctgaaggcagaaaagaagggagagaacctcatgggcagaatattataaaaagagtgtcatattccagcatttgaattggaaagagaagagtgaagatccaagttgcattattaatctgccctgtgttttttccttttaacaatcagtttgagctgctgctgttatgagtttctcatcaagatgaaagccctaatatgtaaagtcaaatccgatttaaattttgtgcttttatagaaagaaatttcttcatagacgtggtgatatatcatttgttggacctgctaatagtaggtcaaaggggagcactccttgccccctgttcctgggtttatgcagttttctttttagagtttatatagggcaagtggttctttttctctgaattacaggatggaaaaaggtcatatcctttgtcaggaaatataaacttgaaagtatgtagtcagctcttgtaatactcatatttatgattgtcctatatgaaaaacaacttcagttaaaactataatgtgtgattctgtataacaaggtgatgtctgtttcccagggctcagacctaatccagttataataaaatcaattaaatgaaatattctatagaatcgatctatgcccttgttaatctccatccatataggagtcacgttctttaagacagatggtggtagttatttttgtggcatggttagatttgactggttttgcagaagattacagttatgtactgcataatgacatatacaatagtggtcccataaaattataatggagcagaaaatctattgcctcatgatgttttagccgttttaatgtcatagcctagtgcattactcacgtgtctgtggagatgctggtgtaaacaaacctactacactgccagttgtataaaagtacagcacattcagttatgtacagtatgtaatactgataatgacaataaatgacaccggtttgtgtatttactttttataaa

SEQ ID NO: 14355 - DNA, 3438 bp, Homo sapiens
gcttccggccgcggccctggcgcgtggtctgcgcgcgcccggccgtgcgtgcggatgcggggaggctgcgtgtgtgcgcagggagagaacgccggccaccttcccgcttccgagctgggtgcgcgccgagcacaggagattgcctgcgtttaggaggtggctgcgttgtgggaaaagctatcaaggaagaaattgccaaaccatgtctttttttctgttttcagagtagttcacaacagatctgagtgttttaattaagcatggaatacagaaaacaacaaaaaacttaagctttaatttcatctggaattccacagttttcttagctccctggacccggttgacctgttggctcttcccgctggctgctctatcacgtggtgctctccgactactcaccccgagtgtaaagtcttgctgctctgttgcccaggctggagtacagtggcaggatctcagctcactgcaatctccgtctctcaggtttaagcagttctcctgcctcagcctcccaagtaggtgggactacagaaccttcggctcgcgtgcttctgagctgctgtggatggcctcggctctctggactgtccttccgagtaggatgtcactgagatccctcaaatggagcctcctgctgctgtcactcctgagtttctttgtgatgtggtacctcagccttccccactacaatgtgatagaacgcgtgaactggatgtacttctatgagtatgagccgatttacagacaagactttcacttcacacttcgagagcattcaaactgctctcatcaaaatccatttctggtcattctggtgacctcccacccttcagatgtgaaagccaggcaggccattagagttacttggggtgaaaaaaagtcttggtggggatatgaggttcttacatttttcttattaggccaagaggctgaaaaggaagacaaaatgttggcattgtccttagaggatgaacaccttctttatggtgacataatccgacaagattttttagacacatataataacctgaccttgaaaaccattatggcattcaggtgggtaactgagttttgccccaatgccaagtacgtaatgaagacagacactgatgttttcatcaatactggcaatttagtgaagtatcttttaaacctaaaccactcagagaagtttttcacaggttatcctctaattgataattattcctatagaggattttaccaaaaaacccatatttcttaccaggagtatcctttcaaggtgttccctccatactgcagtgggttgggttatataatgtccagagatttggtgccaaggatctatgaaatgatgggtcacgtaaaacccatcaagtttgaagatgtttatgtcgggatctgtttgaatttattaaaagtgaacattcatattccagaagacacaaatcttttctttctatatagaatccatttggatgtctgtcaactgagacgtgtgattgcagcccatggcttttcttccaaggagatcatcactttttggcaggtcatgctaaggaacaccacatgccattattaacttcacattctacaaaaagcctagaaggacaggatactttgtggaaagtgttaaataaagtaggtactgtggaaaattcatggggaggtcagtgtgctggcttacactgaactgaaactcatgaaaaacccagactggagactggagggttacacttgtgatttattagtcaggcccttcaaagatgatatgtggaggaattaaatataaaggaattggaggtttttgctaaagaaattaataggaccaaacaatttggacatgtcattctgtagactagaatttcttaaaagggtgttactgagttataagctcactaggctgtaaaaacaaaacaatgtagagttttatttattgaacaatgtagtcacttgaaggttttgtgtatatcttatgtggattaccaatttaaaaatatatgtagttctgtgtcaaaaaacttcttcactgaagttatactgaacaaaattttacctgtttttggtcatttataaagtacttcaagatgttgcagtatttcacagttattattatttaaaattacttcaactttgtgtttttaaatgttttgacgatttcaatacaagataaaaaggatagtgaatcattctttacatgcaaacattttccagttacttaactgatcagtttattattgatacatcactccattaatgtaaagtcataggtcattattgcatatcagtaatctcttggactttgttaaatattttactgtggtaatatagagaagaattaaagcaagaaaatctgaagtattgtcttgtttttaaaaaatacagttcctagtgtttttagaagtcacttaatttgtctcatttttccacctggaaattaggaataatgtagaatgcaaggcagtaatttccttttggaaaggactctgaaggcagaaaagaagggagagaacctcatgggcagaatattataaaaagagtgtcatattccagcatttgaattggaaagagaagagtgaagatccaagttgcattattaatctgccctgtgttttttccttttaacaatcagtttgagctgctgctgttatgagtttctcatcaagatgaaagccctaatatgtaaagtcaaatccgatttaaattttgtgcttttatagaaagaaatttcttcatagacgtggtgatatatcatttgttggacctgctaatagtaggtcaaaggggagcactccttgccccctgttcctgggtttatgcagttttctttttagagtttatatagggcaagtggttctttttctctgaattacaggatggaaaaaggtcatatcctttgtcaggaaatataaacttgaaagtatgtagtcagctcttgtaatactcatatttatgattgtcctatatgaaaaacaacttcagttaaaactataatgtgtgattctgtataacaaggtgatgtctgtttcccagggctcagacctaatccagttataataaaatcaattaaatgaaatattctatagaatcgatctatgcccttgttaatctccatccatataggagtcacgttctttaagacagatggtggtagttatttttgtggcatggttagatttgactggttttgcagaagattacagttatgtactgcataatgacatatacaatagtggtcccataaaattataatggagcagaaaatctattgcctcatgatgttttagccgttttaatgtcatagcctagtgcattactcacgtgtctgtggagatgctggtgtaaacaaacctactacactgccagttgtataaaagtacagcacattcagttatgtacagtatgtaatactgataatgacaataaatgacaccggtttgtgtatttactttttataaa

SEQ ID NO: 14356 - DNA, 3224 bp, Homo sapiens
gcttccggccgcggccctggcgcgtggtctgcgcgcgcccggccgtgcgtgcggatgcggggaggctgcgtgtgtgcgcagggagagaacgccggccaccttcccgcttccgagctgggtgcgcgccgagcacaggagattgcctgcgtttaggaggtggctgcgttgtgggaaaagctatcaaggaagaaattgccaaaccatgtctttttttctgttttcagagtagttcacaacagatctgagtgttttaattaagcatggaatacagaaaacaacaaaaaacttaagctttaatttcatctggaattccacagaaccttcggctcgcgtgcttctgagctgctgtggatggcctcggctctctggactgtccttccgagtaggatgtcactgagatccctcaaatggagcctcctgctgctgtcactcctgagtttctttgtgatgtggtacctcagccttccccactacaatgtgatagaacgcgtgaactggatgtacttctatgagtatgagccgatttacagacaagactttcacttcacacttcgagagcattcaaactgctctcatcaaaatccatttctggtcattctggtgacctcccacccttcagatgtgaaagccaggcaggccattagagttacttggggtgaaaaaaagtcttggtggggatatgaggttcttacatttttcttattaggccaagaggctgaaaaggaagacaaaatgttggcattgtccttagaggatgaacaccttctttatggtgacataatccgacaagattttttagacacatataataacctgaccttgaaaaccattatggcattcaggtgggtaactgagttttgccccaatgccaagtacgtaatgaagacagacactgatgttttcatcaatactggcaatttagtgaagtatcttttaaacctaaaccactcagagaagtttttcacaggttatcctctaattgataattattcctatagaggattttaccaaaaaacccatatttcttaccaggagtatcctttcaaggtgttccctccatactgcagtgggttgggttatataatgtccagagatttggtgccaaggatctatgaaatgatgggtcacgtaaaacccatcaagtttgaagatgtttatgtcgggatctgtttgaatttattaaaagtgaacattcatattccagaagacacaaatcttttctttctatatagaatccatttggatgtctgtcaactgagacgtgtgattgcagcccatggcttttcttccaaggagatcatcactttttggcaggtcatgctaaggaacaccacatgccattattaacttcacattctacaaaaagcctagaaggacaggatactttgtggaaagtgttaaataaagtaggtactgtggaaaattcatggggaggtcagtgtgctggcttacactgaactgaaactcatgaaaaacccagactggagactggagggttacacttgtgatttattagtcaggcccttcaaagatgatatgtggaggaattaaatataaaggaattggaggtttttgctaaagaaattaataggaccaaacaatttggacatgtcattctgtagactagaatttcttaaaagggtgttactgagttataagctcactaggctgtaaaaacaaaacaatgtagagttttatttattgaacaatgtagtcacttgaaggttttgtgtatatcttatgtggattaccaatttaaaaatatatgtagttctgtgtcaaaaaacttcttcactgaagttatactgaacaaaattttacctgtttttggtcatttataaagtacttcaagatgttgcagtatttcacagttattattatttaaaattacttcaactttgtgtttttaaatgttttgacgatttcaatacaagataaaaaggatagtgaatcattctttacatgcaaacattttccagttacttaactgatcagtttattattgatacatcactccattaatgtaaagtcataggtcattattgcatatcagtaatctcttggactttgttaaatattttactgtggtaatatagagaagaattaaagcaagaaaatctgaagtattgtcttgtttttaaaaaatacagttcctagtgtttttagaagtcacttaatttgtctcatttttccacctggaaattaggaataatgtagaatgcaaggcagtaatttccttttggaaaggactctgaaggcagaaaagaagggagagaacctcatgggcagaatattataaaaagagtgtcatattccagcatttgaattggaaagagaagagtgaagatccaagttgcattattaatctgccctgtgttttttccttttaacaatcagtttgagctgctgctgttatgagtttctcatcaagatgaaagccctaatatgtaaagtcaaatccgatttaaattttgtgcttttatagaaagaaatttcttcatagacgtggtgatatatcatttgttggacctgctaatagtaggtcaaaggggagcactccttgccccctgttcctgggtttatgcagttttctttttagagtttatatagggcaagtggttctttttctctgaattacaggatggaaaaaggtcatatcctttgtcaggaaatataaacttgaaagtatgtagtcagctcttgtaatactcatatttatgattgtcctatatgaaaaacaacttcagttaaaactataatgtgtgattctgtataacaaggtgatgtctgtttcccagggctcagacctaatccagttataataaaatcaattaaatgaaatattctatagaatcgatctatgcccttgttaatctccatccatataggagtcacgttctttaagacagatggtggtagttatttttgtggcatggttagatttgactggttttgcagaagattacagttatgtactgcataatgacatatacaatagtggtcccataaaattataatggagcagaaaatctattgcctcatgatgttttagccgttttaatgtcatagcctagtgcattactcacgtgtctgtggagatgctggtgtaaacaaacctactacactgccagttgtataaaagtacagcacattcagttatgtacagtatgtaatactgataatgacaataaatgacaccggtttgtgtatttactttttataaa

SEQ ID NO: 14357 - DNA, 3292 bp, Homo sapiens
ggtgcaatacctgccttgcgtcgcccgtgccgctccagccaccgtcaaatccgggtagcgacccggggcgtttgcagcggtgccgaggaagaggacgggaacggtgttacgattgcctgcgtttaggaggtggctgcgttgtgggaaaagctatcaaggaagaaattgccaaaccatgtctttttttctgttttcagagtagttcacaacagatctgagtgttttaattaagcatggaatacagaaaacaacaaaaaacttaagctttaatttcatctggaattccacagttttcttagctccctggacccggttgacctgttggctcttcccgctggctgctctatcacgtggtgctctccgactactcaccccgagtgtaaagaaccttcggctcgcgtgcttctgagctgctgtggatggcctcggctctctggactgtccttccgagtaggatgtcactgagatccctcaaatggagcctcctgctgctgtcactcctgagtttctttgtgatgtggtacctcagccttccccactacaatgtgatagaacgcgtgaactggatgtacttctatgagtatgagccgatttacagacaagactttcacttcacacttcgagagcattcaaactgctctcatcaaaatccatttctggtcattctggtgacctcccacccttcagatgtgaaagccaggcaggccattagagttacttggggtgaaaaaaagtcttggtggggatatgaggttcttacatttttcttattaggccaagaggctgaaaaggaagacaaaatgttggcattgtccttagaggatgaacaccttctttatggtgacataatccgacaagattttttagacacatataataacctgaccttgaaaaccattatggcattcaggtgggtaactgagttttgccccaatgccaagtacgtaatgaagacagacactgatgttttcatcaatactggcaatttagtgaagtatcttttaaacctaaaccactcagagaagtttttcacaggttatcctctaattgataattattcctatagaggattttaccaaaaaacccatatttcttaccaggagtatcctttcaaggtgttccctccatactgcagtgggttgggttatataatgtccagagatttggtgccaaggatctatgaaatgatgggtcacgtaaaacccatcaagtttgaagatgtttatgtcgggatctgtttgaatttattaaaagtgaacattcatattccagaagacacaaatcttttctttctatatagaatccatttggatgtctgtcaactgagacgtgtgattgcagcccatggcttttcttccaaggagatcatcactttttggcaggtcatgctaaggaacaccacatgccattattaacttcacattctacaaaaagcctagaaggacaggatactttgtggaaagtgttaaataaagtaggtactgtggaaaattcatggggaggtcagtgtgctggcttacactgaactgaaactcatgaaaaacccagactggagactggagggttacacttgtgatttattagtcaggcccttcaaagatgatatgtggaggaattaaatataaaggaattggaggtttttgctaaagaaattaataggaccaaacaatttggacatgtcattctgtagactagaatttcttaaaagggtgttactgagttataagctcactaggctgtaaaaacaaaacaatgtagagttttatttattgaacaatgtagtcacttgaaggttttgtgtatatcttatgtggattaccaatttaaaaatatatgtagttctgtgtcaaaaaacttcttcactgaagttatactgaacaaaattttacctgtttttggtcatttataaagtacttcaagatgttgcagtatttcacagttattattatttaaaattacttcaactttgtgtttttaaatgttttgacgatttcaatacaagataaaaaggatagtgaatcattctttacatgcaaacattttccagttacttaactgatcagtttattattgatacatcactccattaatgtaaagtcataggtcattattgcatatcagtaatctcttggactttgttaaatattttactgtggtaatatagagaagaattaaagcaagaaaatctgaagtattgtcttgtttttaaaaaatacagttcctagtgtttttagaagtcacttaatttgtctcatttttccacctggaaattaggaataatgtagaatgcaaggcagtaatttccttttggaaaggactctgaaggcagaaaagaagggagagaacctcatgggcagaatattataaaaagagtgtcatattccagcatttgaattggaaagagaagagtgaagatccaagttgcattattaatctgccctgtgttttttccttttaacaatcagtttgagctgctgctgttatgagtttctcatcaagatgaaagccctaatatgtaaagtcaaatccgatttaaattttgtgcttttatagaaagaaatttcttcatagacgtggtgatatatcatttgttggacctgctaatagtaggtcaaaggggagcactccttgccccctgttcctgggtttatgcagttttctttttagagtttatatagggcaagtggttctttttctctgaattacaggatggaaaaaggtcatatcctttgtcaggaaatataaacttgaaagtatgtagtcagctcttgtaatactcatatttatgattgtcctatatgaaaaacaacttcagttaaaactataatgtgtgattctgtataacaaggtgatgtctgtttcccagggctcagacctaatccagttataataaaatcaattaaatgaaatattctatagaatcgatctatgcccttgttaatctccatccatataggagtcacgttctttaagacagatggtggtagttatttttgtggcatggttagatttgactggttttgcagaagattacagttatgtactgcataatgacatatacaatagtggtcccataaaattataatggagcagaaaatctattgcctcatgatgttttagccgttttaatgtcatagcctagtgcattactcacgtgtctgtggagatgctggtgtaaacaaacctactacactgccagttgtataaaagtacagcacattcagttatgtacagtatgtaatactgataatgacaataaatgacaccggtttgtgtatttactttttataaa

SEQ ID NO: 14358 - DNA, 2645 bp, Homo sapiens
aggcaaccatgtggttccagctgaattttttttttccctctctctttcttcactcctttttctttccaaacagggaaaagtgttccacgaagcggtagcgcctttccgcctcgcgttttcctccctgaccctggtcccggctcccgtccgggcgccagctggtggggcgagcgccgggagcccatctgcccccaggggcacggggcgcggggccggctcccgcccggcacatggctgcagccacctcgcgcgcaccccgaggcgccgcgcccagctcgcccgaggtccgtcggaggcgcccggccgccccggagccaagcagcagctgagcggggaagcgcccgcgtccggggatcgggatgtccctcctccttctcctcttgctagtttcctactatgttggaaccttggggactcacactgagatcaagagagtggcagaggaaaaggtcactttgccctgccaccatcaactggggcttccagaaaaagacactctggatattgaatggctgctcaccgataatgaagggaaccaaaaagtggtgatcacttactccagtcgtcatgtctacaataacttgactgaggaacagaagggccgagtggcctttgcttccaatttcctggcaggagatgcctccttgcagattgaacctctgaagcccagtgatgagggccggtacacctgtaaggttaagaattcagggcgctacgtgtggagccatgtcatcttaaaagtcttagtgagaccatccaagcccaagtgtgagttggaaggagagctgacagaaggaagtgacctgactttgcagtgtgagtcatcctctggcacagagcccattgtgtattactggcagcgaatccgagagaaagagggagaggatgaacgtctgcctcccaaatctaggattgactacaaccaccctggacgagttctgctgcagaatcttaccatgtcctactctggactgtaccagtgcacagcaggcaacgaagctgggaaggaaagctgtgtggtgcgagtaactgtacagtatgtacaaagcatcggcatggttgcaggagcagtgacaggcatagtggctggagccctgctgattttcctcttggtgtggctgctaatccgaaggaaagacaaagaaagatatgaggaagaagagagacctaatgaaattcgagaagatgctgaagctccaaaagcccgtcttgtgaaacccagctcctcttcctcaggctctcggagctcacgctctggttcttcctccactcgctccacagcaaatagtgcctcacgcagccagcggacactgtcaactgacgcagcaccccagccagggctggccacccaggcatacagcctagtggggccagaggtgagaggttctgaaccaaagaaagtccaccatgctaatctgaccaaagcagaaaccacacccagcatgatccccagccagagcagagccttccaaacggtctgaattacaatggacttgactcccacgctttcctaggagtcagggtctttggactcttctcgtcattggagctcaagtcaccagccacacaaccagatgagaggtcatctaagtagcagtgagcattgcacggaacagattcagatgagcattttccttatacaataccaaacaagcaaaaggatgtaagctgattcatctgtaaaaaggcatcttattgtgcctttagaccagagtaagggaaagcaggagtccaaatctatttgttgaccaggacctgtggtgagaaggttggggaaaggtgaggtgaatatacctaaaacttttaatgtgggatattttgtatcagtgctttgattcacaattttcaagaggaaatgggatgctgtttgtaaattttctatgcatttctgcaaacttattggattattagttattcagacagtcaagcagaacccacagccttattacacctgtctacaccatgtactgagctaaccacttctaagaaactccaaaaaaggaaacatgtgtcttctattctgacttaacttcatttgtcataaggtttggatattaatttcaaggggagttgaaatagtgggagatggagaagagtgaatgagtttctcccactctatactaatctcactatttgtattgagcccaaaataactatgaaaggagacaaaaatttgtgacaaaggattgtgaagagctttccatcttcatgatgttatgaggattgttgacaaacattagaaatatataatggagcaattgtggatttcccctcaaatcagatgcctctaaggactttcctgctagatatttctggaaggagaaaatacaacatgtcatttatcaacgtccttagaaagaattcttctagagaaaaagggatctaggaatgctgaaagattacccaacataccattatagtctcttctttctgagaaaatgtgaaaccagaattgcaagactgggtggactagaaagggagattagatcagttttctcttaatatgtcaaggaaggtagccgggcatggtgccaggcacctgtaggaaaatccagcaggtggaggttgcagtgagccaagattatgccattgcactccagcctgggtgacaaagcaagactccatctcaaaaaaaaaaaaaaaaa

SEQ ID NO: 14359 - DNA, 1766 bp, Homo sapiens
ccacgcgtccggaaccctgaggaacagacgttccctcgcggccctggcacctccaaccccagatatgctgctgctgctgctgctgcccctgctctgggggagggagagggtggaaggacagaagagtaaccggaaggattactcgctgacgatgcagagttccgtgaccgtgcaagagggcatgtgtgtccatgtgcgctgctccttctcctacccagtggacagccagactgactctgacccagttcatggctactggttccgggcagggaatgatataagctggaaggctccagtggccacaaacaacccagcttgggcagtgcaggaggaaactcgggaccgattccacctccttggggacccacagaccaaaaattgcaccctgagcatcagagatgccagaatgagtgatgcggggagatacttctttcgtatggagaaaggaaatataaaatggaattataaatatgaccagctctctgtgaacgtgacagccttgacccacaggcccaacatccttatccccggtaccctggagtctggctgcttccagaatctgacctgctctgtgccctgggcctgtgagcaggggacgccccctatgatctcctggatggggacctctgtgtcccccctgcacccctccaccacccgctcctcagtgctcaccctcatcccacagccccagcaccacggcaccagcctcacctgtcaggtgaccttgcctggggccggcgtgaccacgaacaggaccatccaactcaatgtgtcctaccctcctcagaacttgactgtgactgtcttccaaggagaaggcacagcatccacagctctggggaacagctcatctctttcagtcctagagggccagtctctgcgcttggtctgtgctgttgacagcaatccccctgccaggctgagctggacctggaggagtctgaccctgtacccctcacagccctcaaaccctctggtactggagctgcaagtgcacctgggggatgaaggggaattcacctgtcgagctcagaactctctgggttcccagcacgtttccctgaacctctccctgcaacaggagtacacaggcaaaatgaggcctgtatcaggagtgttgctgggggcggtcgggggagctggagccacagccctggtcttcctctccttctgtgtcatcttcattgtagtgaggtcctgcaggaagaaatcggcaaggccagcagcggacgtgggagacataggcatgaaggatgcaaacaccatcaggggctcagcctctcagggtaacctgactgagtcctgggcagatgataacccccgacaccatggcctggctgcccactcctcaggggaggaaagagagatccagtatgcacccctcagctttcataagggggagcctcaggacctatcaggacaagaagccaccaacaatgagtactcagagatcaagatccccaagtaagaaaatgcagaggctcgggcttgtttgagggttcacgacccctccagcaaaggagtctgaggctgattccagtagaattagcagccctcaatgctgtgcaacaagacatcagaacttattcctcttgtctaactgaaaatgcatgcctgatgaccaaactctccctttccccatccaatcggtccacactccccgccctggcctctggtacccaccattctcctctgtacttctctaaggatgactactttagattccgaatatagtgagattgtaacgtgaaaaaaaaaaaaaaagg

SEQ ID NO: 14360 - DNA, 1476 bp, Homo sapiens
cccacgcgtccggaacagacgttccctcgcggccctggcacctccaaccccagatatgctgctgctgctgctgctgcccctgctctgggggagggagagggtggaaggacagaagagtaaccggaaggattactcgctgacgatgcagagttccgtgaccgtgcaagagggcatgtgtgcccatgtgcgctgctccttctcctacccagtggacagccagactgactctgacccagttcatggctactggttccgggcagggaatgatataagctggaaggctccagtggccacaaacaacccagcttgggcagtgcaggaggaaactcgggaccgattccacctccttggggacccacagaccaaaaattgcaccctgagcatcagagatgccagaatgagtgatgcggggagatacttctttcgtatggagaaaggaaatataaaatggaattataaatatgaccagctctctgtgaacgtgacagaccctcctcagaacttgactgtgactgtcttccaaggagaaggcacagcatccacagctctggggaacagctcatctctttcagtcctagagggccagtctctgcgcttggtctgtgctgttgacagcaatccccctgccaggctgagctggacctggaggagtctgaccctgtacccctcacagccctcaaaccctctggtactggagctgcaagtgcacctgggggatgaaggggaattcacctgtcgagctcagaactctctgggttcccagcacgtttccctgaacctctccctgcaacaggagtacacaggcaaaatgaggcctgtatcaggagtgttgctgggggcggtcgggggagctggagccacagccctggtcttcctctccttctgtgtcatcttcattgtagtgaggtcctgcaggaagaaatcggcaaggccagcagcggacgtgggagacataggcatgaaggatgcaaacaccatcaggggctcagctctcagggtaacctgactgagtcctgggcagatgataacccccgacaccatggcctggctgcccactcctcaggggaggaaagagagatccagtatgcacccctcagctttcataagggggagcctcaggacctatcaggacaagaagccaccaacaatgagtactcagagatcaagatccccaagtaagaaaatgcagaggctcgggcttgtttgagggttcacgacccctccagcaaaggagtctgaggctgattccagtagaattagcagccctcaatgctgtgcaacaagacatcagaacttattcctcttgtctaactgaaaatgcatgcctgatgaccaaactctccctttccccatccaatcggtccacactccccgccctggcctctggtacccaccattctcctctgtacttctctaaggatgactactttagattccgaatatagtgagattgtaacgtgaaaaaaaaaaaaaaaa

SEQ ID NO: 14361 - DNA, 1580 bp, Homo sapiens
catcctgccacccctagccttgctggggacgtgaaccctctccccgcgcctgggaagccttcttggcaccgggacccggagaatccccacggaagccagttccaaaagggatgaaaagggggcgtttcgggcactgggagaagcctgtattccagggcccctcccagagcaggaatctgggacccaggagtgccagcctcacccacgcagatcctggccatgagagctccgcacctccacctctccgccgcctctggcgcccgggctctggcgaagctgctgccgctgctgatggcgcaactctgggccgcagaggcggcgctgctcccccaaaacgacacgcgcttggaccccgaagcctatggctccccgtgcgcgcgcggctcgcagccctggcaggtctcgctcttcaacggcctctcgttccactgcgcgggtgtcctggtggaccagagttgggtgctgacggccgcgcactgcggaaacaagccactgtgggctcgagtaggggatgaccacctgctgcttcttcagggagagcagctccgccggaccactcgctctgttgtccatcccaagtaccaccagggctcaggccccatcctgccaaggcgaacggatgagcacgatctcatgttgctgaagctggccaggcccgtagtgctggggccccgcgtccgggccctgcagcttccctaccgctgtgctcagcccggagaccagtgccaggttgctggctggggcaccacggccgcccggagagtgaagtacaacaagggcctgacctgctccagcatcactatcctgagccctaaagagtgtgaggtcttctaccctggcgtggtcaccaacaacatgatatgtgctggactggaccggggccaggacccttgccagagtgactctggaggccccctggtctgtgacgagaccctccaaggcatcctctcgtggggtgtttacccctgtggctctgcccagcatccagctgtctacacccagatctgcaaatacatgtcctggatcaataaagtcatacgctccaactgatccagatgctacgctccagctgatccagatgttatgctcctgctgatccagatgcccagaggctccatcgtccatcctcttcctccccagtcggctgaactctccccttgtctgcactgttcaaacctctgccgccctccacacctctaaacatctcccctctcacctcattcccccacctatccccattctctgcctgtactgaagctgaaatgcaggaagtggtggcaaaggtttattccagagaagccaggaagccggtcatcacccagcctctgagagcagttactggggtcacccaacctgacttcctctgccactccctgctgtgtgactttgggcaagccaagtgccctctctgaacctcagtttcctcatctgcaaaatgggaacaatgacgtgcctacctcttagacatgttgtgaggagactatgatataacatgtgtatgtaaatcttcatggtgattgtcatgtaaggcttaacacagtgggtggtgagttctgactaaaggttacctgttgtcgtga

SEQ ID NO: 14362 - DNA, 1443 bp, Homo sapiens
accagcggcagaccacaggcagggcagaggcacgtctgggtcccctccctccttcctatcggcgactcccaggatcctggccatgagagctccgcacctccacctctccgccgcctctggcgcccgggctctggcgaagctgctgccgctgctgatggcgcaactctgggccgcagaggcggcgctgctcccccaaaacgacacgcgcttggaccccgaagcctatggctccccgtgcgcgcgcggctcgcagccctggcaggtctcgctcttcaacggcctctcgttccactgcgcgggtgtcctggtggaccagagttgggtgctgacggccgcgcactgcggaaacaagccactgtgggctcgagtaggggatgaccacctgctgcttcttcagggagagcagctccgccggaccactcgctctgttgtccatcccaagtaccaccagggctcaggccccatcctgccaaggcgaacggatgagcacgatctcatgttgctgaagctggccaggcccgtagtgctggggccccgcgtccgggccctgcagcttccctaccgctgtgctcagcccggagaccagtgccaggttgctggctggggcaccacggccgcccggagagtgaagtacaacaagggcctgacctgctccagcatcactatcctgagccctaaagagtgtgaggtcttctaccctggcgtggtcaccaacaacatgatatgtgctggactggaccggggccaggacccttgccagagtgactctggaggccccctggtctgtgacgagaccctccaaggcatcctctcgtggggtgtttacccctgtggctctgcccagcatccagctgtctacacccagatctgcaaatacatgtcctggatcaataaagtcatacgctccaactgatccagatgctacgctccagctgatccagatgttatgctcctgctgatccagatgcccagaggctccatcgtccatcctcttcctccccagtcggctgaactctccccttgtctgcactgttcaaacctctgccgccctccacacctctaaacatctcccctctcacctcattcccccacctatccccattctctgcctgtactgaagctgaaatgcaggaagtggtggcaaaggtttattccagagaagccaggaagccggtcatcacccagcctctgagagcagttactggggtcacccaacctgacttcctctgccactccctgctgtgtgactttgggcaagccaagtgccctctctgaacctcagtttcctcatctgcaaaatgggaacaatgacgtgcctacctcttagacatgttgtgaggagactatgatataacatgtgtatgtaaatcttcatggtgattgtcatgtaaggcttaacacagtgggtggtgagttctgactaaaggttacctgttgtcgtga

SEQ ID NO: 14363 - DNA, 3756 bp, Homo sapiens
gtcgggatggaggtgagaagacggccgtgacgcgcgcccgcggggccccctgcacccccagcagcccacagcgctccctgcccccctcccccgcagcagcgggccttgccgtcgagtgacagcggcctgggggggcagggggggcgggggcggccggatcagcgatgccggcgggcatgacgaagcatggctcccgctccaccagctcgctgccgcccgagcccatggagatcgtgcgcagcaaggcgtgctctcggcgggtccgcctcaacgtcggggggctggcgcacgaggtactctggcgtaccctggaccgcctgccccgcacgcggctgggcaagctccgcgactgcaacacgcacgactcgctgctcgaggtgtgcgatgactacagcctcgacgacaacgagtacttctttgaccgccacccgggcgccttcacctccatcctcaacttctaccgcactgggcgactgcacatgatggaggagatgtgcgcgctcagcttcagccaagagctcgactactggggcatcgacgagatctacctggagtcctgctgccaggcccgctaccaccagaagaaagagcagatgaacgaggagctcaagcgtgaggccgagaccctacgggagcgggaaggcgaggagttcgataacacgtgctgcgcagagaagaggaaaaaactctgggacctactggagaagcccaattcctctgtggctgccaagatccttgccataatttccatcatgttcatcgtcctctccaccattgccctgtccctcaacacgctgcctgagctacagagcctcgatgagttcggccagtccacagacaacccccagctggcccacgtggaggccgtgtgcatcgcatggttcaccatggagtacctgctgaggttcctctcctcgcccaagaagtggaagttcttcaagggcccactcaatgccattgacttgttggccattctgccatactatgtcaccattttcctcaccgaatccaacaagagcgtgctgcaattccagaatgtccgccgcgtggtccagatcttccgcatcatgcgaattctccgcatccttaagcttgcacgccactccactggcctccagtctctgggcttcactttgcggaggagctacaatgagttgggcttgctcatcctcttccttgccatgggcattatgatcttctccagccttgtcttctttgctgagaaggatgaggacgacaccaagttcaaaagcatcccagcctctttctggtgggccaccatcaccatgactactgttgggtatggagacatctaccccaagactctcctggggaaaattgttgggggactctgctgcattgcaggagtcctggtgattgctcttcccatccccatcatcgtcaataacttctctgagttctataaggagcagaagagacaggagaaagcaatcaaacggcgagaggctctggagagagccaagaggaatggcagcatcgtatccatgaacatgaaggatgcttttgcccggagcattgagatgatggacattgtggttgagaaaaatggggagaatatgggtaagaaagacaaagtacaagataaccacttgtctcctaacaaatggaaatggacaaagaggacactgtctgaaaccagctcaagtaagtcctttgaaaccaaggaacagggatcccctgaaaaagccagatcgtcttctagtcctcagcacctgaacgttcagcagttggaagacatgtacaataagatggccaagacccaatcccaacccatcctcaataccaaggagtcagcagcacagagcaaaccaaaggaagaacttgaaatggagagtatccccagccccgtagcccctctgcccactcgcacagaaggggtcattgacatgcgaagtatgtcaagcattgatagtttcattagctgtgccacagacttccctgaggccaccagattctcccacagccctttgacatcactccccagcaagactgggggcagcacagccccagaagtgggctggcggggagctctgggtgccagtggtggtaggtttgtggaggccaaccccagccctgatgccagccagcactctagtttcttcatcgagagccccaagagttccatgaaaactaacaaccctttgaagctccgagcacttaaagtcaacttcatggagggtgaccccagtccactcctccccgttctagggatgtaccatgaccctctcaggaaccgggggagtgctgcggctgctgtcgctggactggagtgtgccacgcttttggacaaggctgtgctgagcccagagtcctccatctacaccacagcaagtgctaagacacccccccggtctcctgagaaacacacagcaatagcgttcaactttgaggcgggtgtccaccagtacattgacgcagacacagatgatgagggacagctgctctacagtgtggactccagcccccccaaaagcctccctgggagcaccagtccgaagttcagcacggggacaagatcggagaaaaaccactttgaaagctcccctttacccacctcccctaagttcttaaggcagaactgtatttactccacagaagcattgactggaaaaggccccagtggtcaggaaaagtgcaaacttgagaaccacatctcccctgacgtccgtgtgttgccagggggaggagcccatggaagcacacgagatcagagcatctgaactgccctgccttggaggagagacttttgggtgaggtccaaagaggagagctgttcagcttacctgccacagagcttttctgcatgaactctggaacagaaaggccctgtaaagccctcagagagaagagagactccagagaaggctccctaagaccttgagagccatgacaggtccatcagcatgaagttggccaagccatagggcacagcacctccttgtaacaactctatagccctctttgggagatgacatgagtggaactcacagccaccactaccaccactttagacaggaccgaggccacatactccccattctctcgtggctttccatctcagcctcggagggcaacattgacagtcctcctggcttcagctagagaaggatgctggaacaagcggctggtgttgaaagagtgggttgaccaatttggtattgaatgttgcccagccacccctaggaacacctgtccatcacctcctggatggattccactgttagacagctacagggaatgattggtcatggggaagtctctgcgccataagccacgatcccagcgcaaaacccttactcaaatgtcttcattgacttcggtatttcatagtacctgagattttattttgagataccatcagggtgagttgcaccacttgtactcaattctaattgccccctggcaatctgggaagggttcagaaggtgggcacccagccaacagcatgaactcagagcattgttttagggttggaggaggaacacgctttctttacatcactagtgtagactcaaaagatatgcaagtgtcaaatatgcaaaagaaatagtttattcaaagagactgtgtgttactgaagaacagcataaaaatatgatttttttacttgcaaaaatgaaaggaaaaaaataccacgcattgaaatgcccagttcagactgaataattcctgctgcagcaaggaaagtacctactataatagaaattctgttttgttttctgtggttttcaagtt

SEQ ID NO: 14364 - DNA, 3782 bp, Homo sapiens
cctcttgcggccacaggcgcggcgtcctcggcggcgggcggcagctagcgggagccgggacgccggtgcagccgcagcgcgcggaggaacccgggtgtgccgggagctgggcggccacgtccggacgggaccgagacccctcgtagcgcattgcggcgacctcgccttccccggccgcgagcgcgccgctgcttgaaaagccgcggaacccaaggacttttctccggtccgagctcggggcgccccgcaggcgcacggtacccgtgctgcagtcgggcacgccgcggcgccgggggcctccgcagggcgatggagccggtctgcaaggaaagtgaggcgccgccgctgcgttctggaggaggggggcacaaggtctggagaccccgggtggcggacgggagccctccccccgccccgcctccggggcaccagctccggctccattgttcccgcccgggctggaggcgccgagcaccgagcgccgccgggagtcgagcgccggccgcggagctcttgcgaccccgccaggacccgaacagagcccgggggcggcgggccggagccggggacgcgggcacacgcccgctcgcacaagccacggcggactctcccgaggcggaacctccacgccgagcgagggtcagtttgaaaaggaggatcgagctcactgtggagtatccatggagatgtggagccttgtcaccaacctctaactgcagaactgggatgtggagctggaagtgcctcctcttctgggctgtgctggtcacagccacactctgcaccgctaggccgtccccgaccttgcctgaacaagatgctctcccctcctcggaggatgatgatgatgatgatgactcctcttcagaggagaaagaaacagataacaccaaaccaaaccgtatgcccgtagctccatattggacatccccagaaaagatggaaaagaaattgcatgcagtgccggctgccaagacagtgaagttcaaatgcccttccagtgggaccccaaaccccacactgcgctggttgaaaaatggcaaagaattcaaacctgaccacagaattggaggctacaaggtccgttatgccacctggagcatcataatggactctgtggtgccctctgacaagggcaactacacctgcattgtggagaatgagtacggcagcatcaaccacacataccagctggatgtcgtggagcggtcccctcaccggcccatcctgcaagcagggttgcccgccaacaaaacagtggccctgggtagcaacgtggagttcatgtgtaaggtgtacagtgacccgcagccgcacatccagtggctaaagcacatcgaggtgaatgggagcaagattggcccagacaacctgccttatgtccagatcttgaagactgctggagttaataccaccgacaaagagatggaggtgcttcacttaagaaatgtctcctttgaggacgcaggggagtatacgtgcttggcgggtaactctatcggactctcccatcactctgcatggttgaccgttctggaagccctggaagagaggccggcagtgatgacctcgcccctgtacctggagatcatcatctattgcacaggggccttcctcatctcctgcatggtggggtcggtcatcgtctacaagatgaagagtggtaccaagaagagtgacttccacagccagatggctgtgcacaagctggccaagagcatccctctgcgcagacaggtaacagtgtctgctgactccagtgcatccatgaactctggggttcttctggttcggccatcacggctctcctccagtgggactcccatgctagcaggggtctctgagtatgagcttcccgaagaccctcgctgggagctgcctcgggacagactggtcttaggcaaacccctgggagagggctgctttgggcaggtggtgttggcagaggctatcgggctggacaaggacaaacccaaccgtgtgaccaaagtggctgtgaagatgttgaagtcggacgcaacagagaaagacttgtcagacctgatctcagaaatggagatgatgaagatgatcgggaagcataagaatatcatcaacctgctgggggcctgcacgcaggatggtcccttgtatgtcatcgtggagtatgcctccaagggcaacctgcgggagtacctgcaggcccggaggcccccagggctggaatactgctacaaccccagccacaacccagaggagcagctctcctccaaggacctggtgtcctgcgcctaccaggtggcccgaggcatggagtatctggcctccaagaagtgcatacaccgagacctggcagccaggaatgtcctggtgacagaggacaatgtgatgaagatagcagactttggcctcgcacgggacattcaccacatcgactactataaaaagacaaccaacggccgactgcctgtgaagtggatggcacccgaggcattatttgaccggatctacacccaccagagtgatgtgtggtctttcggggtgctcctgtgggagatcttcactctgggcggctccccataccccggtgtgcctgtggaggaacttttcaagctgctgaaggagggtcaccgcatggacaagcccagtaactgcaccaacgagctgtacatgatgatgcgggactgctggcatgcagtgccctcacagagacccaccttcaagcagctggtggaagacctggaccgcatcgtggccttgacctccaaccaggagtacctggacctgtccatgcccctggaccagtactcccccagctttcccgacacccggagctctacgtgctcctcaggggaggattccgtcttctctcatgagccgctgcccgaggagccctgcctgccccgacacccagcccagcttgccaatggcggactcaaacgccgctgactgccacccacacgccctccccagactccaccgtcagctgtaaccctcacccacagcccctgctgggcccaccacctgtccgtccctgtcccctttcctgctggcaggagccggctgcctaccaggggccttcctgtgtggcctgccttcaccccactcagctcacctctccctccacctcctctccacctgctggtgagaggtgcaaagaggcagatctttgctgccagccacttcatcccctcccagatgttggaccaacacccctccctgccaccaggcactgcctggagggcagggagtgggagccaatgaacaggcatgcaagtgagagcttcctgagctttctcctgtcggtttggtctgttttgccttcacccataagcccctcgcactctggtggcaggtgccttgtcctcagggctacagcagtagggaggtcagtgcttcgtgcctcgattgaaggtgacctctgccccagataggtggtgccagtggcttattaattccgatactagtttgctttgctgaccaaatgcctggtaccagaggatggtgaggcgaaggccaggttgggggcagtgttgtggccctggggcccagccccaaactgggggctctgtatatagctatgaagaaaacacaaagtgtataaatctgagtatatatttacatgtctttttaaaagggtcgttaccagagatttacccatcgggtaagatgctcctggtggctgggaggcatcagttgctatatattaaaaacaaaaaagaaaaaaaaggaaaatgtttttaaaaaggtcatatattttttgctacttttgctgttttatttttttaaattatgttctaaac

SEQ ID NO: 14365 - DNA, 2590 bp, Homo sapiens
cctcttgcggccacaggcgcggcgtcctcggcggcgggcggcagctagcgggagccgggacgccggtgcagccgcagcgcgcggaggaacccgggtgtgccgggagctgggcggccacgtccggacgggaccgagacccctcgtagcgcattgcggcgacctcgccttccccggccgcgagcgcgccgctgcttgaaaagccgcggaacccaaggacttttctccggtccgagctcggggcgccccgcaggcgcacggtacccgtgctgcagtcgggcacgccgcggcgccgggggcctccgcagggcgatggagccggtctgcaaggaaagtgaggcgccgccgctgcgttctggaggaggggggcacaaggtctggagaccccgggtggcggacgggagccctccccccgccccgcctccggggcaccagctccggctccattgttcccgcccgggctggaggcgccgagcaccgagcgccgccgggagtcgagcgccggccgcggagctcttgcgaccccgccaggacccgaacagagcccgggggcggcgggccggagccggggacgcgggcacacgcccgctcgcacaagccacggcggactctcccgaggcggaacctccacgccgagcgagggtcagtttgaaaaggaggatcgagctcactgtggagtatccatggagatgtggagccttgtcaccaacctctaactgcagaactgggatgtggagctggaagtgcctcctcttctgggctgtgctggtcacagccacactctgcaccgctaggccgtccccgaccttgcctgaacaagatgctctcccctcctcggaggatgatgatgatgatgatgactcctcttcagaggagaaagaaacagataacaccaaaccaaaccgtatgcccgtagctccatattggacatccccagaaaagatggaaaagaaattgcatgcagtgccggctgccaagacagtgaagttcaaatgcccttccagtgggaccccaaaccccacactgcgctggttgaaaaatggcaaagaattcaaacctgaccacagaattggaggctacaaggtccgttatgccacctggagcatcataatggactctgtggtgccctctgacaagggcaactacacctgcattgtggagaatgagtacggcagcatcaaccacacataccagctggatgtcgtggagcggtcccctcaccggcccatcctgcaagcagggttgcccgccaacaaaacagtggccctgggtagcaacgtggagttcatgtgtaaggtgtacagtgacccgcagccgcacatccagtggctaaagcacatcgaggtgaatgggagcaagattggcccagacaacctgccttatgtccagatcttgaaggtaatcatggcaccagtcttcgtgggccagtctactgggaaggagaccactgtctcgggggctcaagttcctgtgggcaggctcagttgcccccgaatgggatcattcctcacgcttcaggcacacacactccatctcagtagggatctagccacatcccccaggactagtaacagaggtcacaaagtggaggtgagctgggaacagagggctgcagggatgggtggtgctggtctgtaataagctttgagagcaacgtcactggggctttggggtcagctacacaaggaaggcatttggacccctgccttttcattgcccgaaaccagagcctttccaccaagcgtttcccagtcttagccctgtgttctgagttacgtacgatctttctggcaaatggggtgcatgataagagcatctcttacgaagagttggaaaaacaaatgccatatataaattctaagccatatgaggacgaggagtaatggcattttcttcctttttcctctcactcccagacattcattgtccctgaatgctccattaatccagggaaggtaattgcctaaatctccagtggatctcgcaacaggaaggaaccagaagctgggaaagttgtttacctctttgtcccagagttagacctcatcctcccctagcttagctgtctcagagatatactggccctcccttctcttctctttgctgctggtgctaaaactgctctgtaggtcattggccactgtctccactcacaacccctgctccagtcctggagggagtgggttaaacacaaatagaacattccatttgaagcagtgattctttttttttttttttttttttaatcaaatgctttggacttttgaagtccacttgttctgtacttgtaaaagggaaagaaggccgggcgcagtcgtcacgcctgtaatcccagcactttagatcacttgaggtcaggagtttgagaccagcccggccaacatggtgaaaccccatctctactaaaaatacaaaaattagctgtgcatagtggttggcacctgtagtcccagctactcaggaggctgaggcaagctaactgcttgaacccagaaggcagaggttgcagtgagctgagatcacgccactgcactccagcctgggtgacagagtgagtgagactctgcgttaaaaaaaaaaaaaaaaaaaaaaa

SEQ ID NO: 14366 - DNA, 4043 bp, Homo sapiens
cctcttgcggccacaggcgcggcgtcctcggcggcgggcggcagctagcgggagccgggacgccggtgcagccgcagcgcgcggaggaacccgggtgtgccgggagctgggcggccacgtccggacgggaccgagacccctcgtagcgcattgcggcgacctcgccttccccggccgcgagcgcgccgctgcttgaaaagccgcggaacccaaggacttttctccggtccgagctcggggcgccccgcaggcgcacggtacccgtgctgcagtcgggcacgccgcggcgccgggggcctccgcagggcgatggagccggtctgcaaggaaagtgaggcgccgccgctgcgttctggaggaggggggcacaaggtctggagaccccgggtggcggacgggagccctccccccgccccgcctccggggcaccagctccggctccattgttcccgcccgggctggaggcgccgagcaccgagcgccgccgggagtcgagcgccggccgcggagctcttgcgaccccgccaggacccgaacagagcccgggggcggcgggccggagccggggacgcgggcacacgcccgctcgcacaagccacggcggactctcccgaggcggaacctccacgccgagcgagggtcagtttgaaaaggaggatcgagctcactgtggagtatccatggagatgtggagccttgtcaccaacctctaactgcagaactgggatgtggagctggaagtgcctcctcttctgggctgtgctggtcacagccacactctgcaccgctaggccgtccccgaccttgcctgaacaagcccagccctggggagcccctgtggaagtggagtccttcctggtccaccccggtgacctgctgcagcttcgctgtcggctgcgggacgatgtgcagagcatcaactggctgcgggacggggtgcagctggcggaaagcaaccgcacccgcatcacaggggaggaggtggaggtgcaggactccgtgcccgcagactccggcctctatgcttgcgtaaccagcagcccctcgggcagtgacaccacctacttctccgtcaatgtttcagatgctctcccctcctcggaggatgatgatgatgatgatgactcctcttcagaggagaaagaaacagataacaccaaaccaaaccccgtagctccatattggacatccccagaaaagatggaaaagaaattgcatgcagtgccggctgccaagacagtgaagttcaaatgcccttccagtgggaccccaaaccccacactgcgctggttgaaaaatggcaaagaattcaaacctgaccacagaattggaggctacaaggtccgttatgccacctggagcatcataatggactctgtggtgccctctgacaagggcaactacacctgcattgtggagaatgagtacggcagcatcaaccacacataccagctggatgtcgtggagcggtcccctcaccggcccatcctgcaagcagggttgcccgccaacaaaacagtggccctgggtagcaacgtggagttcatgtgtaaggtgtacagtgacccgcagccgcacatccagtggctaaagcacatcgaggtgaatgggagcaagattggcccagacaacctgccttatgtccagatcttgaagactgctggagttaataccaccgacaaagagatggaggtgcttcacttaagaaatgtctcctttgaggacgcaggggagtatacgtgcttggcgggtaactctatcggactctcccatcactctgcatggttgaccgttctggaagccctggaagagaggccggcagtgatgacctcgcccctgtacctggagatcatcatctattgcacaggggccttcctcatctcctgcatggtggggtcggtcatcgtctacaagatgaagagtggtaccaagaagagtgacttccacagccagatggctgtgcacaagctggccaagagcatccctctgcgcagacaggtaacagtgtctgctgactccagtgcatccatgaactctggggttcttctggttcggccatcacggctctcctccagtgggactcccatgctagcaggggtctctgagtatgagcttcccgaagaccctcgctgggagctgcctcgggacagactggtcttaggcaaacccctgggagagggctgctttgggcaggtggtgttggcagaggctatcgggctggacaaggacaaacccaaccgtgtgaccaaagtggctgtgaagatgttgaagtcggacgcaacagagaaagacttgtcagacctgatctcagaaatggagatgatgaagatgatcgggaagcataagaatatcatcaacctgctgggggcctgcacgcaggatggtcccttgtatgtcatcgtggagtatgcctccaagggcaacctgcgggagtacctgcaggcccggaggcccccagggctggaatactgctacaaccccagccacaacccagaggagcagctctcctccaaggacctggtgtcctgcgcctaccaggtggcccgaggcatggagtatctggcctccaagaagtgcatacaccgagacctggcagccaggaatgtcctggtgacagaggacaatgtgatgaagatagcagactttggcctcgcacgggacattcaccacatcgactactataaaaagacaaccaacggccgactgcctgtgaagtggatggcacccgaggcattatttgaccggatctacacccaccagagtgatgtgtggtctttcggggtgctcctgtgggagatcttcactctgggcggctccccataccccggtgtgcctgtggaggaacttttcaagctgctgaaggagggtcaccgcatggacaagcccagtaactgcaccaacgagctgtacatgatgatgcgggactgctggcatgcagtgccctcacagagacccaccttcaagcagctggtggaagacctggaccgcatcgtggccttgacctccaaccaggagtacctggacctgtccatgcccctggaccagtactcccccagctttcccgacacccggagctctacgtgctcctcaggggaggattccgtcttctctcatgagccgctgcccgaggagccctgcctgccccgacacccagcccagcttgccaatggcggactcaaacgccgctgactgccacccacacgccctccccagactccaccgtcagctgtaaccctcacccacagcccctgctgggcccaccacctgtccgtccctgtcccctttcctgctggcaggagccggctgcctaccaggggccttcctgtgtggcctgccttcaccccactcagctcacctctccctccacctcctctccacctgctggtgagaggtgcaaagaggcagatctttgctgccagccacttcatcccctcccagatgttggaccaacacccctccctgccaccaggcactgcctggagggcagggagtgggagccaatgaacaggcatgcaagtgagagcttcctgagctttctcctgtcggtttggtctgttttgccttcacccataagcccctcgcactctggtggcaggtgccttgtcctcagggctacagcagtagggaggtcagtgcttcgtgcctcgattgaaggtgacctctgccccagataggtggtgccagtggcttattaattccgatactagtttgctttgctgaccaaatgcctggtaccagaggatggtgaggcgaaggccaggttgggggcagtgttgtggccctggggcccagccccaaactgggggctctgtatatagctatgaagaaaacacaaagtgtataaatctgagtatatatttacatgtctttttaaaagggtcgttaccagagatttacccatcgggtaagatgctcctggtggctgggaggcatcagttgctatatattaaaaacaaaaaagaaaaaaaaggaaaatgtttttaaaaaggtcatatattttttgctacttttgctgttttatttttttaaattatgttctaaac

SEQ ID NO: 14367 - DNA, 2583 bp, Homo sapiens
cctcttgcggccacaggcgcggcgtcctcggcggcgggcggcagctagcgggagccgggacgccggtgcagccgcagcgcgcggaggaacccgggtgtgccgggagctgggcggccacgtccggacgggaccgagacccctcgtagcgcattgcggcgacctcgccttccccggccgcgagcgcgccgctgcttgaaaagccgcggaacccaaggacttttctccggtccgagctcggggcgccccgcaggcgacggtacccgtgctgcagtcgggcacgccgcgggcccggggcctccgcagggcgatggagcccggtctgcaaggaaagtgaggcgccgccgctgcgttctggaggaggggggcacaaggtctggagaccccgggtggcggacgggagccctccccccgccccgcctccggggcaccagctccggctccattgttcccgcccgggctggaggcgccgagcaccgagcgccgccgggagtcgagcgccggccgcggagctcttgcgaccccgccaggacccgaacagagcccgggggcggcgggccggagccggggacgcgggcacacgcccgctcgcacaagccacggcggactctcccgaggcggaacctccacgccgagcgagggtcagtttgaaaaggaggatcgagctcactgtggagtatccatggagatgtggagccttgtcaccaacctctaactgcagaactgggatgtggagctggaagtgcctcctcttctgggctgtgctggtcacagccacactctgcaccgctaggccgtccccgaccttgcctgaacaagatgctctcccctcctcggaggatgatgatgatgatgatgactcctcttcagaggagaaagaaacagataacaccaaaccaaaccccgtagctccatattggacatccccagaaaagatggaaaagaaattgcatgcagtgccggctgccaagacagtgaagttcaaatgcccttccagtgggaccccaaaccccacactgcgctggttgaaaaatggcaaagaattcaaacctgaccacagaattggaggctacaaggtccgttatgccacctggagcatcataatggactctgtggtgccctctgacaagggcaactacacctgcattgtggagaatgagtacggcagcatcaaccacacataccagctggatgtcgtggagcggtcccctcaccggcccatcctgcaagcagggttgcccgccaacaaaacagtggccctgggtagcaacgtggagttcatgtgtaaggtgtacagtgacccgcagccgcacatccagtggctaaagcacatcgaggtgaatgggagcaagattggcccagacaacctgccttatgtccagatcttgaaggtaatcatggcaccagtcttcgtgggccagtctactgggaaggagaccactgtctcgggggctcaagttcctgtgggcaggctcagttgcccccgaatgggatcattcctcacgcttcaggcacacacactccatctcagtagggatctagccacatcccccaggactagtaacagaggtcacaaagtggaggtgagctgggaacagagggctgcagggatgggtggtgctggtctgtaataagctttgagagcaacgtcactggggctttggggtcagctacacaaggaaggcatttggacccctgccttttcattgcccgaaaccagagcctttccaccaagcgtttcccagtcttagccctgtgtcctgagttacgtacgatctttctggcaaatggggtgcatgataagagcatctcttacgaagagttggaaaaacaaatgccatatataaattctaagccatatgaggacgaggagtaatggcattttcttcctttttcctctcactcccagacattcattgtccctgaatgctccattaatccagggaaggtaattgcctaaatctccagtggatctcgcaacaggaaggaaccagaagctgggaaagttgtttacctctttgtcccagagttagacctcatcctcccctagcttagctgtctcagagatatactggccctcccttctcttctctttgctgctggtgctaaaactgctctgtaggtcattggccactgtctccactcacaacccctgctccagtcctggagggagtgggttaaacacaaatagaacattccatttgaagcagtgattctttttttttttttttttttttaatcaaatgctttggacttttgaagtccacttgttctgtacttgtaaaagggaaagaaggccgggcgcagtcgtcacgcctgtaatcccagcactttagatcacttgaggtcaggagtttgagaccagcccggccaacatggtgaaaccccatctctactaaaaatacaaaaattagctgtgcatagtggttggcacctgtagtcccagctactcaggaggctgaggcaagctaactgcttgaacccagaaggcagaggttgcagtgagctgagatcacgccactgcactccagcctgggtgacagagtgagtgagactctgcgttaaaaaaaaaaaaaaaaaaaaaaa

SEQ ID NO: 14368 - DNA, 3786 bp, Homo sapiens
cctcttgcggccacaggcgcggcgtcctcggcggcgggcggcagctagcgggagccgggacgccggtgcagccgcagcgcgcggaggaacccgggtgtgccgggagctgggcggccacgtccggacgggaccgagacccctcgtagcgcattgcggcgacctcgccttccccggccgcgagcgcgccgctgcttgaaaagccgcggaacccaaggacttttctccggtccgagctcggggcgccccgcaggcgcacggtacccgtgctgcagtcgggcacgccgcggcgccgggggcctccgcagggcgatggagccggtctgcaaggaaagtgaggcgccgccgctgcgttctggaggaggggggcacaaggtctggagaccccgggtggcggacgggagccctccccccgccccgcctccggggcaccagctccggctccattgttcccgcccgggctggaggcgccgagcaccgagcgccgccgggagtcgagcgccggccgcggagctcttgcgaccccgccaggacccgaacagagcccgggggcggcgggccggagccggggacgcggagccggggacgcacacgcccgctcgcacaagccacggcggactctcccgaggcggaacctccacgccgagcgagggtcagtttgaaaaggaggatcgagctcactgtggagtatccatggagatgtggagccttgtcaccaacctctaactgcagaactgggatgtggagctggaagtgcctcctcttctgggctgtgctggtcacagccacactctgcaccgctaggccgtccccgaccttgcctgaacaagatgctctcccctcctcggaggatgatgatgatgatgatgactcctcttcagaggagaaagaaacagataacaccaaaccaaaccccgtagctccatattggacatccccagaaaagatggaaaagaaattgcatgcagtgccggctgccaagacagtgaagttcaaatgcccttccagtgggaccccaaaccccacactgcgctggttgaaaaatggcaaagaattcaaacctgaccacagaattggaggctacaaggtccgttatgccacctggagcatcataatggactctgtggtgccctctgacaagggcaactacacctgcattgtggagaatgagtacggcagcatcaaccacacataccagctggatgtcgtggagcggtcccctcaccggcccatcctgcaagcagggttgcccgccaacaaaacagtggccctgggtagcaacgtggagttcatgtgtaaggtgtacagtgacccgcagccgcacatccagtggctaaagcacatcgaggtgaatgggagcaagattggcccagacaacctgccttatgtccagatcttgaagactgctggagttaataccaccgacaaagagatggaggtgcttcacttaagaaatgtctcctttgaggacgcaggggagtatacgtgcttggcgggtaactctatcggactctcccatcactctgcatggttgaccgttctggaagccctggaagagaggccggcagtgatgacctcgcccctgtacctggagatcatcatctattgcacaggggccttcctcatctcctgcatggtggggtcggtcatcgtctacaagatgaagagtggtaccaagaagagtgacttccacagccagatggctgtgcacaagctggccaagagcatccctctgcgcagacaggtaacagtgtctgctgactccagtgcatccatgaactctggggttcttctggttcggccatcacggctctcctccagtgggactcccatgctagcaggggtctctgagtatgagcttcccgaagaccctcgctgggagctgcctcgggacagactggtcttaggcaaacccctgggagagggctgctttgggcaggtggtgttggcagaggctatcgggctggacaaggacaaacccaaccgtgtgaccaaagtggctgtgaagatgttgaagtcggacgcaacagagaaagacttgtcagacctgatctcagaaatggagatgatgaagatgatcgggaagcataagaatatcatcaacctgctgggggcctgcacgcaggatggtcccttgtatgtcatcgtggagtatgcctccaagggcaacctgcgggagtacctgcaggcccggaggcccccagggctggaatactgctacaaccccagccacaacccagaggagcagctctcctccaaggacctggtgtcctgcgcctaccaggtggcccgaggcatggagtatctggcctccaagaagtgcatacaccgagacctggcagccaggaatgtcctggtgacagaggacaatgtgatgaagatagcagactttggcctcgcacgggacattcaccacatcgactactataaaaagacaaccaacggccgactgcctgtgaagtggatggcacccgaggcattatttgaccggatctacacccaccagagtgatgtgtggtctttcggggtgctcctgtgggagatcttcactctgggcggctccccataccccggtgtgcctgtggaggaacttttcaagctgctgaaggagggtcaccgcatggacaagcccagtaactgcaccaacgagctgtacatgatgatgcgggactgctggcatgcagtgccctcacagagacccaccttcaagcagctggtggaagacctggaccgcatcgtggccttgacctccaaccaggagtacctggacctgtccatgcccctggaccagtactcccccagctttcccgacacccggagctctacgtgctcctcaggggaggattccgtcttctctcatgagccgctgcccgaggagccctgcctgccccgacacccagcccagcttgccaatggcggactcaaacgccgctgactgccacccacacgccctccccagactccaccgtcagctgtaaccctcacccacagcccctgctgggcccaccacctgtccgtccctgtcccctttcctgctggcaggagccggctgcctaccaggggccttcctgtgtggcctgccttcaccccactcagctcacctctccctccacctcctctccacctgctggtgagaggtgcaaagaggcagatctttgctgccagccacttcatcccctcccagatgttggaccaacacccctccctgccaccaggcactgcctggagggcagggagtgggagccaatgaacaggcatgcaagtgagagcttcctgagctttctcctgtcggtttggtctgttttgccttcacccataagcccctcgcactctggtggcaggtgccttgtcctcagggctacagcagtagggaggtcagtgcttcgtgcctcgattgaaggtgacctctgccccagataggtggtgccagtggcttattaattccgatactagtttgctttgctgaccaaatgcctggtaccagaggatggtgaggcgaaggccaggttgggggcagtgttgtggccctggggcccagccccaaactgggggctctgtatatagctatgaagaaaacacaaagtgtataaatctgagtatatatttacatgtctttttaaaagggtcgttaccagagatttacccatcgggtaagatgctcctggtggctgggaggcatcagttgctatatattaaaaacaaaaaagaaaaaaaaggaaaatgtttttaaaaaggtcatatattttttgctacttttgctgttttatttttttaaattatgttctaaac

SEQ ID NO: 14369 - DNA, 3938 bp, Homo sapiens
cctcttgcggccacaggcgcggcgtcctcggcggcgggcggcagctagcgggagccgggacgccggtgcagccgcagcgcgcggaggaacccgggtgtgccgggagctgggcggccacgtccggacgggaccgagacccctcgtagcgcattgcggcgacctcgccttccccggccgcgagcgcgccgctgcttgaaaagccgcggaacccaaggacttttctccggtccgagctcggggcgccccgcaggcgcacggtacccgtgctgcagtcgggcacgccgcggcgccgggggcctccgcagggcgatggagccggtctgcaaggaaagtgaggcgccgccgctgcgttctggaggaggggggcacaaggtctggagaccccgggtggcggacgggagccctccccccgccccgcctccggggcaccagctccggctccattgttcccgcccgggctggaggcgccgagcaccgagcgccgccgggagtcgagcgccggccgcggagctcttgcgaccccgccaggacccgaacagagcccgggggcggcgggccggagccggggacgcgggcacacgcccgctcgcacaagccacggcggactctcccgaggcggaacctccacgccgagcgagggtcagtttgaaaaggaggatcgagctcactgtggagtatccatggagatgtggagccttgtcaccaacctctaactgcagaactgggatgtggagctggaagtgcctcctcttctgggctgtgctggtcacagccacactctgcaccgctaggccgtccccgaccttgcctgaacaagcccagccctggggagcccctgtggaagtggagtccttcctggtccaccccggtgacctgctgcagcttcgctgtcggctgcgggacgatgtgcagagcatcaactggctgcgggacggggtgcagctggcggaaagcaaccgcacccgcatcacaggggaggaggtggaggtgcaggactccgtgcccgcagactccggcctctatgcttgcgtaaccagcagcccctcgggcagtgacaccacctacttctccgtcaatgtttcagatgctctcccctcctcggaggatgatgatgatgatgatgactcctcttcagaggagaaagaaacagataacaccaaaccaaaccgtatgcccgtagctccatattggacatccccagaaaagatggaaaagaaattgcatgcagtgccggctgccaagacagtgaagttcaaatgcccttccagtgggaccccaaaccccacactgcgctggttgaaaaatggcaaagaattcaaacctgaccacagaattggaggctacaaggtccgttatgccacctggagcatcataatggactctgtggtgccctctgacaagggcaactacacctgcattgtggagaatgagtacggcagcatcaaccacacataccagctggatgtcgtggagcggtcccctcaccggcccatcctgcaagcagggttgcccgccaacaaaacagtggccctgggtagcaacgtggagttcatgtgtaaggtgtacagtgacccgcagccgcacatccagtggctaaagcacatcgaggtgaatgggagcaagattggcccagacaacctgccttatgtccagatcttgaagactgctggagttaataccaccgacaaagagatggaggtgcttcacttaagaaatgtctcctttgaggacgcaggggagtatacgtgcttggcgggtaactctatcggactctcccatcactctgcatggttgaccgttctggaagccctggaagagaggccggcagtgatgacctcgcccctgtacctggagatcatcatctattgcacaggggccttcctcatctcctgcatggtggggtcggtcatcgtctacaagatgaagagtggtaccaagaagagtgacttccacagccagatggctgtgcacaagctggccaagagcatccctctgcgcagacaggtaacagtgtctgctgactccagtgcatccatgaactctggggttcttctggttcggccatcacggctctcctccagtgggactcccatgctagcaggggtctctgagtatgagcttcccgaagaccctcgctgggagctgcctcgggacagactggtcttaggcaaacccctgggagagggctgctttgggcaggtggtgttggcagaggctatcgggctggacaaggacaaacccaaccgtgtgaccaaagtggctgtgaagatgttgaagtcggacgcaacagagaaagacttgtcagacctgatctcagaaatggagatgatgaagatgatcgggaagcataagaatatcatcaacctgctgggggcctgcacgcaggatggtcccttgtatgtcatcgtggagtatgcctccaagggcaacctgcgggagtacctgcaggcccggaggcccccagggctggaatactgctacaaccccagccacaacccagaggagcagctctcctccaaggacctggtgtcctgcgcctaccaggtggcccgaggcatggagtatctggcctccaagaagtgcatacaccgagacctggcagccaggaatgtcctggtgacagaggacaatgtgatgaagatagcagactttggcctcgcacgggacattcaccacatcgactactataaaaagacaaccaacggccgactgcctgtgaagtggatggcacccgaggcattatttgaccggatctacacccaccagagtgatgtgtggtctttcggggtgctcctgtgggagatcttcactctgggcggctccccataccccggtgtgcctgtggaggaacttttcaagcagctggtggaagacctggaccgcatcgtggccttgacctccaaccaggagtacctggacctgtccatgcccctggaccagtactcccccagctttcccgacacccggagctctacgtgctcctcaggggaggattccgtcttctctcatgagccgctgcccgaggagccctgcctgccccgacacccagcccagcttgccaatggcggactcaaacgccgctgactgccacccacacgccctccccagactccaccgtcagctgtaaccctcacccacagcccctgctgggcccaccacctgtccgtccctgtcccctttcctgctggcaggagccggctgcctaccaggggccttcctgtgtggcctgccttcaccccactcagctcacctctccctccacctcctctccacctgctggtgagaggtgcaaagaggcagatctttgctgccagccacttcatcccctcccagatgttggaccaacacccctccctgccaccaggcactgcctggagggcagggagtgggagccaatgaacaggcatgcaagtgagagcttcctgagctttctcctgtcggtttggtctgttttgccttcacccataagcccctcgcactctggtggcaggtgccttgtcctcagggctacagcagtagggaggtcagtgcttcgtgcctcgattgaaggtgacctctgccccagataggtggtgccagtggcttattaattccgatactagtttgctttgctgaccaaatgcctggtaccagaggatggtgaggcgaaggccaggttgggggcagtgttgtggccctggggcccagccccaaactgggggctctgtatatagctatgaagaaaacacaaagtgtataaatctgagtatatatttacatgtctttttaaaagggtcgttaccagagatttacccatcgggtaagatgctcctggtggctgggaggcatcagttgctatatattaaaaacaaaaaagaaaaaaaaggaaaatgtttttaaaaaggtcatatattttttgctacttttgctgttttatttttttaaattatgttctaaac

SEQ ID NO: 14370 - DNA, 847 bp, Homo sapiens
acagcgagcggagccgcggtccggacggcagcgcgtgccccgagctctccgcctccccccgcccgccagccgaggcagctcgagcccagtccgcggccccagcagcagcgccgagagcagccccagtagcagcgccatggccgggtggaacgcctacatcgacaacctcatggcggacgggacctgtcaggacgcggccatcgtgggctacaaggactcgccctccgtctgggccgccgtccccgggaaaacgttcgtcaacatcacgccagctgaggtgggtgtcctggttggcaaagaccggtcaagtttttacgtgaatgggctgacacttgggggccagaaatgttcggtgatccgggactcactgctgcaggatggggaatttagcatggatcttcgtaccaagagcaccggtggggcccccaccttcaatgtcactgtcaccaagactgacaagacgctagtcctgctgatgggcaaagaaggtgtccacggtggtttgatcaacaagaaatgttatgaaatggcctcccaccttcggcgttcccagtactgacctcgtctgtcccttccccttcaccgctccccacagctttgcacccctttcctccccatacacacacaaaccattttattttttgggccattaccccataccccttattgctgccaaaaccacatgggctgggggccagggctggatggacagacacctccccctacccatatccctcccgtgtgtggttggaaaacttttgttttttggggttttttttttctgaataaaaaagattctactaacaaaaaaaaaaaaaaaaaaaaaaaaaaaaaaaaaaaaaaaaaa

SEQ ID NO: 14371 - DNA, 3213 bp, Homo sapiens
cccacacaccccactccagctccggagcacccgtgctgggctgcatggggactggccggaggggcagggccaggggagcgggtaggcagagcttcgggaggagatgaggtgaaagtaattgacgctgcccagcccggcagtgggagaggcaggggatgcgtcagtgtcgcgctggagctggcagaggtgtgaatgagcggcggagacacgcgggctgcgatcgctcgccccaggatggccgcggctcatggacctgtggccccctcttccccagaacagaatggtgctgtgcccagcgaggccaccaagagggaccagaacctcaaacggggcaactggggcaaccagatcgagtttgtactgacgagcgtgggctatgccgtgggcctgggcaatgtctggcgcttcccatacctctgctatcgcaacgggggaggcgccttcatgttcccctacttcatcatgctcatcttctgcgggatccccctcttcttcatggagctctccttcggccagtttgcaagccaggggtgcctgggggtctggaggatcagccccatgttcaaaggagtgggctatggtatgatggtggtgtccacctacatcggcatctactacaatgtggtcatctgcatcgccttctactacttcttctcgtccatgacgcacgtgctgccctgggcctactgcaataacccctggaacacgcatgactgcgccggtgtactggacgcctccaacctcaccaatggctctcggccagccgccttgcccagcaacctctcccacctgctcaaccacagcctccagaggaccagccccagcgaggagtactggaggctgtacgtgctgaagctgtcagatgacattgggaactttggggaggtgcggctgcccctccttggctgcctcggtgtctcctggttggtcgtcttcctctgcctcatccgaggggtcaagtcttcagggaaagtggtgtacttcacggccacgttcccctacgtggtgctgaccattctgtttgtccgcggagtgaccctggagggagcctttgacggcatcatgtactacctaaccccgcagtgggacaagatcctggaggccaaggtgtggggtgatgctgcctcccagatcttctactcactgggctgcgcgtggggaggcctcatcaccatggcttcctacaacaagttccacaataactgttaccgggacagtgtcatcatcagcatcaccaactgtgccaccagcgtctatgctggcttcgtcatcttctccatcctcggcttcatggccaatcacctgggcgtggatgtgtcccgtgtggcagaccacggccctggcctggccttcgtggcttaccccgaggccctcacactacttcccatctccccgctgtggtctctgctcttcttcttcatgcttatcctgctggggctgggcactcagttctgcctcctggagacgctggtcacagccattgtggatgaggtggggaatgagtggatcctgcagaaaaagacctatgtgaccttgggcgtggctgtggctggcttcctgctgggcatccccctcaccagccaggcaggcatctattggctgctgctgatggacaactatgcggccagcttctccttggtggtcatctcctgcatcatgtgtgtggccatcatgtacatctacgggcaccggaactacttccaggacatccagatgatgctgggattcccaccacccctcttctttcagatctgctggcgcttcgtctctcccgccatcatcttctttattctagttttcactgtgatccagtaccagccgatcacctacaaccactaccagtacccaggctgggccgtggccattggcttcctcatggctctgtcctccgtcctctgcatccccctctacgccatgttccggctctgccgcacagacggggacaccctcctccagcgtttgaaaaatgccacaaagccaagcagagactggggccctgccctcctggagcaccggacagggcgctacgcccccaccatagccccctctcctgaggacggcttcgaggtccagccactgcacccggacaaggcgcagatccccattgtgggcagtaatggctccagccgcctccaggactcccggatatgagcacagctgccaggggagtggccccacccccaccccgtgctcccaccgcagagactggtgaggcagaggccaggtgtctctgcctgccccctgccacgccctggccaggacggctgctgtcaccttggtcaccactgctagtgcagtcattcatgctcatgtccccagtgtttacatgtcctttggatgccaagatagcagctggggggaggggtgggagtggagggttgctgggaggtccaaagcactttggaggggtctcgggccaggtccccagcagcctggatggctttacgtggcctccgatacccttataccctgccctgagctgaggttctgggtgggcctccagccccatgactagtgctcctgccctcagagccgaccccagcctctgccaggcacatttggctattcctccctaggggcaggatgaagggctgggggactgcccagtgttacttgtcaggctgtgctgcccagccctgtttatctgtgtaattatttttgtaaacattgtattctctgtggtcgccacctcctcgcccccagcctcgggttcagtctgtcttccaggcctgcttgcacctcactgggctgctccggggtctctgcccctcattccaggcctggctgtcaggcccagccagcaggggcccgtgacccagcagcctgcccaaagcatttgtttctgggggatggggtgggggctgctccacaggaggtttgagcccagcaccctggggaaggggaccctgcacgacacccccttgccctccctccatgaggctaaaggcccagtcttcccaaatgtgctgccctcgttcatgtgccaaatggccccagcccacatgcccctcccctctctggagtgggagccccttctgaagtgtctgaatccctgaagtgttcatttgtccgtcctctgtgcagtgacagccccggccaagccacctctaatcctctgtagcaataacggtgcgccgcccatccctgcccattgtgcaccactaggattttaaagtccatagattttaatgaaatttctattcctgtctctga

SEQ ID NO: 14372 - DNA, 8240 bp, Homo sapiens
agaggctgcggtgagtccgccagccccagctgctcctcctcaagcccccaaggcccttcggcgggcccctgctgaaagaccggcatgccctattctgtgggcttccgcgaagccgatgctgctaccagctttctgagagcagcaagatcaggtaacttggacaaagctttggatcacctgcggaatggggtagatattaacacctgtaaccagaatgggttgaatggcttgcatctggcttctaaggaaggccatgtgaaaatggtggttgaacttctgcacaaagaaatcattctagaaacgacaaccaagaaggggaacacggccctgcacatcgctgctctagccgggcaggatgaggtggtccgggagcttgtcaactatggagccaacgtcaacgcccagtcacagaaaggttttacacccctgtacatggcagcacaagagaaccacttggaagtggttaagtttttactggaaaatggagctaaccagaatgtagccacagaagacggcttcacgcctctggcggtagccctgcagcagggccatgagaacgtcgtcgcgcacctcatcaactacggcaccaaggggaaggtgcgcctcccggccctgcacatcgcggcccgcaacgacgacacgcgcacggctgcggtgctgctgcagaacgaccccaacccggacgtgctttccaagacgggattcacgcccctgcacattgcggctcactacgagaacctcaacgtggcccagttgctcctcaacagaggagccagcgtcaatttcacaccacagaacggcatcacgccactgcacatcgcctcccgcaggggcaacgtgatcatggtgcggctgctgctggatcggggagcccagatagaaaccaagaccaaggacgaattgacacctctccactgtgcagctcgaaatgggcacgtgcgaatctcagagatcctgctggaccacggggcaccaatccaagccaaaaccaagaacggcctgtccccaattcacatggcggctcagggagaccacctcgactgtgtccggctcctgttgcaatacgacgcagagatagacgacatcaccctggaccacctgaccccactccacgtggctgcccactgtggacaccacagggtggctaaggtccttctggataaaggggccaaacccaactccagagccctgaatggctttacccccttacacatcgcctgcaaaaagaaccacgtccgtgtcatggagctgctgctgaagacgggagcctcgatcgacgcggtcaccgagtctggcctgacacctctccacgtggcctccttcatggggcaccttcccatcgtgaagaacctcctgcagcggggggcgtcgcccaacgtctccaacgtgaaagtggagaccccgctacacatggcagccagagccgggcacacggaagtggccaaatatttactccagaacaaagccaaagtcaatgccaaggccaaggatgaccagaccccacttcactgtgcagctcgcatcggccacacaaacatggtgaagctcctgctggaaaataacgccaaccccaacctggccaccaccgccgggcacacccccctgcacattgcagcccgtgagggccatgtggaaacagtcctggcccttctggaaaaggaagcatcccaggcctgcatgaccaagaaaggatttacccctctgcacgtggcggccaagtacgggaaggtgcgggtggcagagctgctgctggagcgggacgcacacccgaatgctgccggaaaaaatggcctgacccccctgcacgtggccgtccatcacaacaacctggacatcgtcaagctgctgcttccccggggcggctccccgcacagccctgcctggaatggctacacccctttgcacatcgctgccaagcagaaccaggtggaggtggcccgtagtctgctgcagtatgggggctcagcaaacgccgagtcggtgcaaggtgtgacgccccttcacctggccgcccaggagggccacgcagagatggtggctctgctgctctcgaaacaagccaatggcaacctggggaacaagagcggactcactcccctccatctggtagcacaagaaggccacgttccagtggcagatgtgctgatcaaacacggcgtcatggtggacgccaccacccggatgggctacactcccctccatgtggccagtcactatggaaacatcaagctggtgaagtttctgctgcagcaccaggcagatgtcaatgccaagaccaagctaggatacagccccctgcaccaggcagcccagcagggacacacagacatcgtgactctgcttctgaaaaacggtgcttccccaaacgaggtcagctcggatggaaccacacctctggccatagccaagcgcttgggctacatttctgtcaccgacgtgctcaaggtcgtcacggatgaaaccagtttcgtgttagtcagtgataagcatcgaatgagtttccctgagacagttgatgagatcctggatgtctcggaagatgaaggggaagaactcatcagcttcaaggctgagaggcgggattccagggatgttgatgaagagaaggagctgctggattttgtgccgaagctagaccaagtggtggaatctccagccatccccaggattccctgtgccatgcctgagacagtggtgatcaggtcagaagagcaggagcaggcatctaaagagtatgatgaggactccctcatccccagcagcccggccaccgagacctcagacaacatcagcccggtggccagcccggtgcatacagggtttctggtgagcttcatggttgacgcccggggtggttccatgagaggaagtcgccacaacggcctgcgagtggtgatcccgccacggacgtgcgcagcgcccacccgcatcacctgccgcctggtcaagccccagaagctcagcacgccgcccccactggccgaggaggagggcctggccagcaggatcatagcactggggcccacgggggcacagttcctgagccctgtaatcgtggagatcccgcactttgcctcccatggccgtggagaccgcgagctcgtggttctgaggagcgaaaacggctccgtgtggaaggagcacaggagccgctatggagagagctacctggatcagatcctcaacgggatggacgaagagctggggagcctggaggagctagagaagaagagggtgtgccgaatcatcaccaccgacttcccgctgtacttcgtgatcatgtcacggctctgccaggactacgacaccatcggtcccgaagggggctccctgaagagcaagctggtgcccctggtacaggcaacgttcccggagaatgccgtcaccaagagagtgaagctggctctgcaggcccagcctgtcccggatgagcttgtcactaagctcctgggcaaccaggccacattcagccccattgtcaccgtggagccccggcgccggaagttccaccgccccattgggcttcggatcccactacctccttcctggaccgacaacccgagggacagcggggagggagacaccaccagcctgcgcctgctttgcagcgtcattggaggaacagaccaagcccagtgggaagacataacaggaaccaccaaacttgtatatgccaacgagtgcgccaacttcaccaccaatgtctctgccaggttttggctgtcggactgtcctcggactgctgaggctgtgaactttgccaccctgctgtacaaagagctcactgcagtgccctacatggccaaattcgtcatctttgccaagatgaatgacccccgagaggggcgcctgcgctgctactgcatgacagatgataaagtggacaagaccctggagcagcatgagaacttcgtggaggtggcccggagcagggacatagaggtgttggaaggaatgtccctgtttgcagaactctctgggaacctggtgcctgtgaagaaagctgcccagcagcggagcttccacttccagtcatttcgggagaaccgtctggccatgcctgtaaaggtgagggacagcagtcgagagccgggagggtccctgtcgtttctgcgcaaggcgatgaagtacgaggacacccagcacattctctgccacctgaacatcaccatgcccccctgcgccaagggaagtggagccgaagataggagaaggaccccgacgcccctggccctgcgatacagcattctcagtgagtccacaccaggttctctcagtgggacagagcaggcagagatgaagatggctgttatctcagagcacctcggtctcagctgggcagagttggcccgggagctgcagttcagtgtggaagacatcaacaggatccgagtggaaaatcccaactccctgttggagcagagtgtggccttgctgaacctctgggtcatccgtgaaggccaaaacgcaaacatggagaatctgtacacagccctgcagagcattgaccgtggcgagatcgtgaacatgctggagggttccggccgacagagccgcaacttgaagccagacaggcggcacaccgaccgcgactactcgctgtcaccctcccagatgaatggttactcctcactgcaggacgagctgctgtcccctgcctccctgggctgtgcactttcctctccgctacgtgcagaccagtactggaatgaggtggccgtcctagacgccatccccttggcggccacggagcatgacaccatgctggagatgtctgacatgcaggtgtggtctgcgggcctcacgccttctctggtcactgctgaggactcctctctggagtgtagcaaggctgaggactctgatgccacaggtcacgagtggaagttggagggggcactctcagaggaaccgcggggccccgagttgggctctctggaacttgtggaggacgacacagtggattcagatgccacaaatggccttatcgatttgcttgaacaggaggaaggtcagaggtcagaagagaagctgccaggttctaagaggcaggatgacgcgacaggtgcagggcaggactcagagaatgaagtgtctcttgtttcaggccatcagagggggcaagcccgaatcacacattcccccaccgtgagtcaggtgacggagaggagtcaggacagactgcaggactgggatgcagacggctcgattgtctcatacctgcaagatgctgcacaaggttcctggcaagaggaggtcacgcaaggtccacactcattccagggaacaagtaccatgactgaagggctagagcccggtggatctcaggagtacgagaaggtcctggtgtctgtaagtgagcacacgtggacagaacagcccgaggctgagagctcccaggccgacagggaccggaggcagcaaggccaagaagagcaggtgcaggaggccaagaacaccttcacccaagtggtgcaggggaatgagtttcagaatattccaggggagcaggtgacagaggagcaattcacggatgagcagggcaacattgtcaccaagaagatcattcgcaaggtggttcgacagatagacttgtccagcgccgatgccgcccaggagcacgaggaggtgactgtagaggggcccctggaggatcccagtgagctggaggtcgatattgattactttatgaaacactccaaggatcacacctcgacacccaacccctgaaccccacacactctgccatgcacacaggaggagagctggacctgagggccaccgcagcggtgcacacattcctctgggctgacggcatgacctctgtaagggactcctgctagtcccctcttggcatgaatgactgactgtagacgcatgacctccaggcttcaatcctgcctcttgcaatgacagctgatctgtcggaaccaggacacaaaagcagcaagaagcggggagagagagggatagaaaacaagcgcaggagagcctgcgaacgcaaaagtgaatgagggctttttgtggctggggatgggttttggttttggggttttttttttaaattgttttgacttcgtacagggtactttttcccaacctcatctgtcagaaatccatgtgggcttcctggaaagaaaaaaaaaaaaaagaaaactaggcatgaaatcagtttaacaccttaatcttaagccatgtcctcatctgcccaccctccccaacccacatacctccattccacttgtgacaccccctcgactccctggtgacgctcctcccagatcgctctacatgacattcaggacacacacacacacacacacacaccactcgcctccactgaatctacacacagattttactgtgacttctgaagctgtatagactctgctgtggataaattggaattttttatgttgtctctctctctgccaatttcaatacgaatcatcttccaatggaaaatcattaccttgaagagtgcattcggggttccttgtgttagggacttaagaatctgaggcgaggacccccaggcttacctgtaggactcaaagggagccaggaccccatctgaaagggtctcctctctcagttgggggacaggccggtggctgacccaggattgcaccagcatgtccatagagaagaggttttctatgtcttcaagcactatatcatagtccgtgttcaaagtgtaaactgtacagtaatcagccttgtgtatatgaaaaacaataaatactatgcaaaccaatagaaacatttagcagtacgtacagagcctgacagcgcagctcctgaggacttctgcggctgcaggagaaggagctgtggcctgtctttcagtgaaagaggaaggaaaggagtagggctagtgaatgtatctgccaggtcttagaagtcaggaccacccagggtctcccagagtgaacttggtgctctaagtccaggcagcctgcaggctggggaccctgggtgcaggtgccaggctcgaggctgttccctgtcctgcctcagtgcctcccctctgcccagcccctgtggcctcttggagaggcgagccagggggctccccggaccgcatggccggtgagagtagagtcggaggcggagagcctggacgcccagaggccggggccaggctctgggtcaaggcaggaaggagacagacagctggcagttcctcgcctcggtgccatcagggaggagccttaagttccactagagcctccggcccagggaggccagaatcagcacaatcccggccccgccctcgcggcgggcgcccccagggccaggagagagagacagggctggctcctctcgcccctggagccgcggtgtggacggcccggccccgtccgccccgccgctctgcgggagtgtcctcgggacacacttaaaccttccaagtagcacagaagccccctccacgtcagaggccccctggccgcggggcctgtgagcggagaggggccctgcttcccacacaaatccgccccggtgcacccccggccaggcaggccccggggcggcctaggcgccttgtcggccgggggtggggctgcttttgcttcctttagaggggcgggcagggagaggaagctctagctccgggcctgagtttccccgaggctgcgtcggaggagctgcagggcgagcccggacggctgccgtctccgccagaggccaccccggcccggcctccagggcgcagaggcgcccccctccatcctcccccatcccgggggccacggcaggggggccgcacagcgcggctgggaccgattcggtgacggcccaaggaagctgggctcagggctcgcctctcccgcctcgatcctgcaccttcctctcccaggtcgctgctgcagccaacccagtagcccccttagcgcccccgcggaccccgcagctccagactccgctttggcacctctgctccggctggcatggctgcacgctccggctgctagtaggagccgttaggggaggagtttggggtctccacacgatgcctagagaatgctgcagtctgcacattagacgctttttagaagttttgaaattaccttgatttttttaattgttatgaaaatggatcttttcttgactctcccacatgctctgttatgggagagaatcccctaccctactctgatgtatagaccattctcccttcaccagccgaaccaatgtcaaaattaataaagaaatggactaatggcaaaaaaaaa

SEQ ID NO: 14373 - DNA, 8300 bp, Homo sapiens
agaggctgcggtgagtccgccagccccagctgctcctcctcaagcccccaaggcccttcggcgggcccctgctgaaagaccggcatgccctattctgtgggcttccgcgaagccgatgctgctaccagctttctgagagcagcaagatcaggtaacttggacaaagctttggatcacctgcggaatggggtagatattaacacctgtaaccagaatgggttgaatggcttgcatctggcttctaaggaaggccatgtgaaaatggtggttgaacttctgcacaaagaaatcattctagaaacgacaaccaagaaggggaacacggccctgcacatcgctgctctagccgggcaggatgaggtggtccgggagcttgtcaactatggagccaacgtcaacgcccagtcacagaaaggttttacacccctgtacatggcagcacaagagaaccacttggaagtggttaagtttttactggaaaatggagctaaccagaatgtagccacagaagacggcttcacgcctctggcggtagccctgcagcagggccatgagaacgtcgtcgcgcacctcatcaactacggcaccaaggggaaggtgcgcctcccggccctgcacatcgcggcccgcaacgacgacacgcgcacggctgcggtgctgctgcagaacgaccccaacccggacgtgctttccaagacgggattcacgcccctgcacattgcggctcactacgagaacctcaacgtggcccagttgctcctcaacagaggagccagcgtcaatttcacaccacagaacggcatcacgccactgcacatcgcctcccgcaggggcaacgtgatcatggtgcggctgctgctggatcggggagcccagatagaaaccaagaccaaggacgaattgacacctctccactgtgcagctcgaaatgggcacgtgcgaatctcagagatcctgctggaccacggggcaccaatccaagccaaaaccaagaacggcctgtccccaattcacatggcggctcagggagaccacctcgactgtgtccggctcctgttgcaatacgacgcagagatagacgacatcaccctggaccacctgaccccactccacgtggctgcccactgtggacaccacagggtggctaaggtccttctggataaaggggccaaacccaactccagagccctgaatggctttacccccttacacatcgcctgcaaaaagaaccacgtccgtgtcatggagctgctgctgaagacgggagcctcgatcgacgcggtcaccgagtctggcctgacacctctccacgtggcctccttcatggggcaccttcccatcgtgaagaacctcctgcagcggggggcgtcgcccaacgtctccaacgtgaaagtggagaccccgctacacatggcagccagagccgggcacacggaagtggccaaatatttactccagaacaaagccaaagtcaatgccaaggccaaggatgaccagaccccacttcactgtgcagctcgcatcggccacacaaacatggtgaagctcctgctggaaaataacgccaaccccaacctggccaccaccgccgggcacacccccctgcacattgcagcccgtgagggccatgtggaaacagtcctggcccttctggaaaaggaagcatcccaggcctgcatgaccaagaaaggatttacccctctgcacgtggcggccaagtacgggaaggtgcgggtggcagagctgctgctggagcgggacgcacacccgaatgctgccggaaaaaatggcctgacccccctgcacgtggccgtccatcacaacaacctggacatcgtcaagctgctgcttccccggggcggctccccgcacagccctgcctggaatggctacacccctttgcacatcgctgccaagcagaaccaggtggaggtggcccgtagtctgctgcagtatgggggctcagcaaacgccgagtcggtgcaaggtgtgacgccccttcacctggccgcccaggagggccacgcagagatggtggctctgctgctctcgaaacaagccaatggcaacctggggaacaagagcggactcactcccctccatctggtagcacaagaaggccacgttccagtggcagatgtgctgatcaaacacggcgtcatggtggacgccaccacccggatgggctacactcccctccatgtggccagtcactatggaaacatcaagctggtgaagtttctgctgcagcaccaggcagatgtcaatgccaagaccaagctaggatacagccccctgcaccaggcagcccagcagggacacacagacatcgtgactctgcttctgaaaaacggtgcttccccaaacgaggtcagctcggatggaaccacacctctggccatagccaagcgcttgggctacatttctgtcaccgacgtgctcaaggtcgtcacggatgaaaccagtttcgtgttagtcagtgataagcatcgaatgagtttccctgagacagttgatgagatcctggatgtctcggaagatgaaggggaagaactcatcagcttcaaggctgagaggcgggattccagggatgttgatgaagagaaggagctgctggattttgtgccgaagctagaccaagtggtggaatctccagccatccccaggattccctgtgccatgcctgagacagtggtgatcaggtcagaagagcaggagcaggcatctaaagagtatgatgaggactccctcatccccagcagcccggccaccgagacctcagacaacatcagcccggtggccagcccggtgcatacagggtttctggtgagcttcatggttgacgcccggggtggttccatgagaggaagtcgccacaacggcctgcgagtggtgatcccgccacggacgtgcgcagcgcccacccgcatcacctgccgcctggtcaagccccagaagctcagcacgccgcccccactggccgaggaggagggcctggccagcaggatcatagcactggggcccacgggggcacagttcctgagccctgtaatcgtggagatcccgcactttgcctcccatggccgtggagaccgcgagctcgtggttctgaggagcgaaaacggctccgtgtggaaggagcacaggagccgctatggagagagctacctggatcagatcctcaacgggatggacgaagagctggggagcctggaggagctagagaagaagagggtgtgccgaatcatcaccaccgacttcccgctgtacttcgtgatcatgtcacggctctgccaggactacgacaccatcggtcccgaagggggctccctgaagagcaagctggtgcccctggtacaggcaacgttcccggagaatgccgtcaccaagagagtgaagctggctctgcaggcccagcctgtcccggatgagcttgtcactaagctcctgggcaaccaggccacattcagccccattgtcaccgtggagccccggcgccggaagttccaccgccccattgggcttcggatcccactacctccttcctggaccgacaacccgagggacagcggggagggagacaccaccagcctgcgcctgctttgcagcgtcattggaggaacagaccaagcccagtgggaagacataacaggaaccaccaaacttgtatatgccaacgagtgcgccaacttcaccaccaatgtctctgccaggttttggctgtcggactgtcctcggactgctgaggctgtgaactttgccaccctgctgtacaaagagctcactgcagtgccctacatggccaaattcgtcatctttgccaagatgaatgacccccgagaggggcgcctgcgctgctactgcatgacagatgataaagtggacaagaccctggagcagcatgagaacttcgtggaggtggcccggagcagggacatagaggtgttggaaggaatgtccctgtttgcagaactctctgggaacctggtgcctgtgaagaaagctgcccagcagcggagcttccacttccagtcatttcgggagaaccgtctggccatgcctgtaaaggtgagggacagcagtcgagagccgggagggtccctgtcgtttctgcgcaaggcgatgaagtacgaggacacccagcacattctctgccacctgaacatcaccatgcccccctgcgccaagggaagtggagccgaagataggagaaggaccccgacgcccctggccctgcgatacagcattctcagtgagtccacaccaggttctctcagtgggacagagcaggcagagatgaagatggctgttatctcagagcacctcggtctcagctgggcagagttggcccgggagctgcagttcagtgtggaagacatcaacaggatccgagtggaaaatcccaactccctgttggagcagagtgtggccttgctgaacctctgggtcatccgtgaaggccaaaacgcaaacatggagaatctgtacacagccctgcagagcattgaccgtggcgagatcgtgaacatgctggagggttccggccgacagagccgcaacttgaagccagacaggcggcacaccgaccgcgactactcgctgtcaccctcccagatgaatggttactcctcactgcaggacgagctgctgtcccctgcctccctgggctgtgcactttcctctccgctacgtgcagaccagtactggaatgaggtggccgtcctagacgccatccccttggcggccacggagcatgacaccatgctggagatgtctgacatgcaggtgtggtctgcgggcctcacgccttctctggtcactgctgaggactcctctctggagtgtagcaaggctgaggactctgatgccacaggtcacgagtggaagttggagggggcactctcagaggaaccgcggggccccgagttgggctctctggaacttgtggaggacgacacagtggattcagatgccacaaatggccttatcgatttgcttgaacaggaggaaggtcagaggtcagaagagaagctgccaggttctaagaggcaggatgacgcgacaggtgcagggcaggactcagagaatgaagtgtctcttgtttcaggccatcagagggggcaagcccgaatcacacattcccccaccgtgagtcaggtgacggagaggagtcaggacagactgcaggactgggatgcagacggctcgattgtctcatacctgcaagatgctgcacaaggttcctggcaagaggaggtcacgcaaggtccacactcattccagggaacaagtaccatgactgaagggctagagcccggtggatctcaggagtacgagaaggtcctggtgtctgtaagtgagcacacgtggacagaacagcccgaggctgagagctcccaggccgacagggaccggaggcagcaaggccaagaagagcaggtgcaggaggccaagaacaccttcacccaagtggtgcaggggaatgagtttcagaatattccaggggagcaggtgacagaggagcaattcacggatgagcagggcaacattgtcaccaagaagatcattcgcaaggtggttcgacagatagacttgtccagcgccgatgccgcccaggagcacgaggaggtggagctgagagggagtggcctacagccggacctgatagagggcaggaagggggcgcagatagtgaagcgggccagcctgaaaagggggaaacagtgaccccgagccgctctccttggagtagcctctcgggaggatcacacctcgacacccaacccctgaaccccacacactctgccatgcacacaggaggagagctggacctgagggccaccgcagcggtgcacacattcctctgggctgacggcatgacctctgtaagggactcctgctagtcccctcttggcatgaatgactgactgtagacgcatgacctccaggcttcaatcctgcctcttgcaatgacagctgatctgtcggaaccaggacacaaaagcagcaagaagcggggagagagagggatagaaaacaagcgcaggagagcctgcgaacgcaaaagtgaatgagggctttttgtggctggggatgggttttggttttggggttttttttttaaattgttttgacttcgtacagggtactttttcccaacctcatctgtcagaaatccatgtgggcttcctggaaagaaaaaaaaaaaaaagaaaactaggcatgaaatcagtttaacaccttaatcttaagccatgtcctcatctgcccaccctccccaacccacatacctccattccacttgtgacaccccctcgactccctggtgacgctcctcccagatcgctctacatgacattcaggacacacacacacacacacacacaccactcgcctccactgaatctacacacagattttactgtgacttctgaagctgtatagactctgctgtggataaattggaattttttatgttgtctctctctctgccaatttcaatacgaatcatcttccaatggaaaatcattaccttgaagagtgcattcggggttccttgtgttagggacttaagaatctgaggcgaggacccccaggcttacctgtaggactcaaagggagccaggaccccatctgaaagggtctcctctctcagttgggggacaggccggtggctgacccaggattgcaccagcatgtccatagagaagaggttttctatgtcttcaagcactatatcatagtccgtgttcaaagtgtaaactgtacagtaatcagccttgtgtatatgaaaaacaataaatactatgcaaaccaatagaaacatttagcagtacgtacagagcctgacagcgcagctcctgaggacttctgcggctgcaggagaaggagctgtggcctgtctttcagtgaaagaggaaggaaaggagtagggctagtgaatgtatctgccaggtcttagaagtcaggaccacccagggtctcccagagtgaacttggtgctctaagtccaggcagcctgcaggctggggaccctgggtgcaggtgccaggctcgaggctgttccctgtcctgcctcagtgcctcccctctgcccagcccctgtggcctcttggagaggcgagccagggggctccccggaccgcatggccggtgagagtagagtcggaggcggagagcctggacgcccagaggccggggccaggctctgggtcaaggcaggaaggagacagacagctggcagttcctcgcctcggtgccatcagggaggagccttaagttccactagagcctccggcccagggaggccagaatcagcacaatcccggccccgccctcgcggcgggcgcccccagggccaggagagagagacagggctggctcctctcgcccctggagccgcggtgtggacggcccggccccgtccgccccgccgctctgcgggagtgtcctcgggacacacttaaaccttccaagtagcacagaagccccctccacgtcagaggccccctggccgcggggcctgtgagcggagaggggccctgcttcccacacaaatccgccccggtgcacccccggccaggcaggccccggggcggcctaggcgccttgtcggccgggggtggggctgcttttgcttcctttagaggggcgggcagggagaggaagctctagctccgggcctgagtttccccgaggctgcgtcggaggagctgcagggcgagcccggacggctgccgtctccgccagaggccaccccggcccggcctccagggcgcagaggcgcccccctccatcctcccccatcccgggggccacggcaggggggccgcacagcgcggctgggaccgattcggtgacggcccaaggaagctgggctcagggctcgcctctcccgcctcgatcctgcaccttcctctcccaggtcgctgctgcagccaacccagtagcccccttagcgcccccgcggaccccgcagctccagactccgctttggcacctctgctccggctggcatggctgcacgctccggctgctagtaggagccgttaggggaggagtttggggtctccacacgatgcctagagaatgctgcagtctgcacattagacgctttttagaagttttgaaattaccttgatttttttaattgttatgaaaatggatcttttcttgactctcccacatgctctgttatgggagagaatcccctaccctactctgatgtatagaccattctcccttcaccagccgaaccaatgtcaaaattaataaagaaatggactaatggcaaaaaaaaa

SEQ ID NO: 14374 - DNA, 8165 bp, Homo sapiens
agaggctgcggtgagtccgccagccccagctgctcctcctcaagcccccaaggcccttcggcgggcccctgctgaaagaccggcatgccctattctgtgggcttccgcgaagccgatgctgctaccagctttctgagagcagcaagatcaggtaacttggacaaagctttggatcacctgcggaatggggtagatattaacacctgtaaccagaatgggttgaatggcttgcatctggcttctaaggaaggccatgtgaaaatggtggttgaacttctgcacaaagaaatcattctagaaacgacaaccaagaaggggaacacggccctgcacatcgctgctctagccgggcaggatgaggtggtccgggagcttgtcaactatggagccaacgtcaacgcccagtcacagaaaggttttacacccctgtacatggcagcacaagagaaccacttggaagtggttaagtttttactggaaaatggagctaaccagaatgtagccacagaagacggcttcacgcctctggcggtagccctgcagcagggccatgagaacgtcgtcgcgcacctcatcaactacggcaccaaggggaaggtgcgcctcccggccctgcacatcgcggcccgcaacgacgacacgcgcacggctgcggtgctgctgcagaacgaccccaacccggacgtgctttccaagacgggattcacgcccctgcacattgcggctcactacgagaacctcaacgtggcccagttgctcctcaacagaggagccagcgtcaatttcacaccacagaacggcatcacgccactgcacatcgcctcccgcaggggcaacgtgatcatggtgcggctgctgctggatcggggagcccagatagaaaccaagaccaaggacgaattgacacctctccactgtgcagctcgaaatgggcacgtgcgaatctcagagatcctgctggaccacggggcaccaatccaagccaaaaccaagaacggcctgtccccaattcacatggcggctcagggagaccacctcgactgtgtccggctcctgttgcaatacgacgcagagatagacgacatcaccctggaccacctgaccccactccacgtggctgcccactgtggacaccacagggtggctaaggtccttctggataaaggggccaaacccaactccagagccctgaatggctttacccccttacacatcgcctgcaaaaagaaccacgtccgtgtcatggagctgctgctgaagacgggagcctcgatcgacgcggtcaccgagtctggcctgacacctctccacgtggcctccttcatggggcaccttcccatcgtgaagaacctcctgcagcggggggcgtcgcccaacgtctccaacgtgaaagtggagaccccgctacacatggcagccagagccgggcacacggaagtggccaaatatttactccagaacaaagccaaagtcaatgccaaggccaaggatgaccagaccccacttcactgtgcagctcgcatcggccacacaaacatggtgaagctcctgctggaaaataacgccaaccccaacctggccaccaccgccgggcacacccccctgcacattgcagcccgtgagggccatgtggaaacagtcctggcccttctggaaaaggaagcatcccaggcctgcatgaccaagaaaggatttacccctctgcacgtggcggccaagtacgggaaggtgcgggtggcagagctgctgctggagcgggacgcacacccgaatgctgccggaaaaaatggcctgacccccctgcacgtggccgtccatcacaacaacctggacatcgtcaagctgctgcttccccggggcggctccccgcacagccctgcctggaatggctacacccctttgcacatcgctgccaagcagaaccaggtggaggtggcccgtagtctgctgcagtatgggggctcagcaaacgccgagtcggtgcaaggtgtgacgccccttcacctggccgcccaggagggccacgcagagatggtggctctgctgctctcgaaacaagccaatggcaacctggggaacaagagcggactcactcccctccatctggtagcacaagaaggccacgttccagtggcagatgtgctgatcaaacacggcgtcatggtggacgccaccacccggatgggctacactcccctccatgtggccagtcactatggaaacatcaagctggtgaagtttctgctgcagcaccaggcagatgtcaatgccaagaccaagctaggatacagccccctgcaccaggcagcccagcagggacacacagacatcgtgactctgcttctgaaaaacggtgcttccccaaacgaggtcagctcggatggaaccacacctctggccatagccaagcgcttgggctacatttctgtcaccgacgtgctcaaggtcgtcacggatgaaaccagtttcgtgttagtcagtgataagcatcgaatgagtttccctgagacagttgatgagatcctggatgtctcggaagatgaaggggaagaactcatcagcttcaaggctgagaggcgggattccagggatgttgatgaagagaaggagctgctggattttgtgccgaagctagaccaagtggtggaatctccagccatccccaggattccctgtgccatgcctgagacagtggtgatcaggtcagaagagcaggagcaggcatctaaagagtatgatgaggactccctcatccccagcagcccggccaccgagacctcagacaacatcagcccggtggccagcccggtgcatacagggtttctggtgagcttcatggttgacgcccggggtggttccatgagaggaagtcgccacaacggcctgcgagtggtgatcccgccacggacgtgcgcagcgcccacccgcatcacctgccgcctggtcaagccccagaagctcagcacgccgcccccactggccgaggaggagggcctggccagcaggatcatagcactggggcccacgggggcacagttcctgagccctgtaatcgtggagatcccgcactttgcctcccatggccgtggagaccgcgagctcgtggttctgaggagcgaaaacggctccgtgtggaaggagcacaggagccgctatggagagagctacctggatcagatcctcaacgggatggacgaagagctggggagcctggaggagctagagaagaagagggtgtgccgaatcatcaccaccgacttcccgctgtacttcgtgatcatgtcacggctctgccaggactacgacaccatcggtcccgaagggggctccctgaagagcaagctggtgcccctggtacaggcaacgttcccggagaatgccgtcaccaagagagtgaagctggctctgcaggcccagcctgtcccggatgagcttgtcactaagctcctgggcaaccaggccacattcagccccattgtcaccgtggagccccggcgccggaagttccaccgccccattgggcttcggatcccactacctccttcctggaccgacaacccgagggacagcggggagggagacaccaccagcctgcgcctgctttgcagcgtcattggaggaacagaccaagcccagtgggaagacataacaggaaccaccaaacttgtatatgccaacgagtgcgccaacttcaccaccaatgtctctgccaggttttggctgtcggactgtcctcggactgctgaggctgtgaactttgccaccctgctgtacaaagagctcactgcagtgccctacatggccaaattcgtcatctttgccaagatgaatgacccccgagaggggcgcctgcgctgctactgcatgacagatgataaagtggacaagaccctggagcagcatgagaacttcgtggaggtggcccggagcagggacatagaggtgttggaaggaatgtccctgtttgcagaactctctgggaacctggtgcctgtgaagaaagctgcccagcagcggagcttccacttccagtcatttcgggagaaccgtctggccatgcctgtaaaggtgagggacagcagtcgagagccgggagggtccctgtcgtttctgcgcaaggcgatgaagtacgaggacacccagcacattctctgccacctgaacatcaccatgcccccctgcgccaagggaagtggagccgaagataggagaaggaccccgacgcccctggccctgcgatacagcattctcagtgagtccacaccaggttctctcagtgggacagagcaggcagagatgaagatggctgttatctcagagcacctcggtctcagctgggcagagttggcccgggagctgcagttcagtgtggaagacatcaacaggatccgagtggaaaatcccaactccctgttggagcagagtgtggccttgctgaacctctgggtcatccgtgaaggccaaaacgcaaacatggagaatctgtacacagccctgcagagcattgaccgtggcgagatcgtgaacatgctggagggttccggccgacagagccgcaacttgaagccagacaggcggcacaccgaccgcgactactcgctgtcaccctcccagatgaatggttactcctcactgcaggacgagctgctgtcccctgcctccctgggctgtgcactttcctctccgctacgtgcagaccagtactggaatgaggtggccgtcctagacgccatccccttggcggccacggagcatgacaccatgctggagatgtctgacatgcaggtgtggtctgcgggcctcacgccttctctggtcactgctgaggactcctctctggagtgtagcaaggctgaggactctgatgccacaggtcacgagtggaagttggagggggcactctcagaggaaccgcggggccccgagttgggctctctggaacttgtggaggacgacacagtggattcagatgccacaaatggccttatcgatttgcttgaacaggaggaaggtcagaggtcagaagagaagctgccaggttctaagaggcaggatgacgcgacaggtgcagggcaggactcagagaatgaagtgtctcttgtttcaggccatcagagggggcaagcccgaatcacacattcccccaccgtgagtcaggtgacggagaggagtcaggacagactgcaggactgggatgcagacggctcgattgtctcatacctgcaagatgctgcacaaggttcctggcaagaggaggtcacgcaaggtccacactcattccagggaacaagtaccatgactgaagggctagagcccggtggatctcaggagtacgagaaggtcctggtgtctgtaagtgagcacacgtggacagaacagcccgaggctgagagctcccaggccgacagggaccggaggcagcaaggccaagaagagcaggtgcaggaggccaagaacaccttcacccaagtggtgcaggggaatgagtttcagaatattccaggggagcaggtgacagaggagcaattcacggatgagcagggcaacattgtcaccaagaagatcattcgcaaggtggttcgacagatagacttgtccagcgccgatgccgcccaggagcacgaggaggatcacacctcgacacccaacccctgaaccccacacactctgccatgcacacaggaggagagctggacctgagggccaccgcagcggtgcacacattcctctgggctgacggcatgacctctgtaagggactcctgctagtcccctcttggcatgaatgactgactgtagacgcatgacctccaggcttcaatcctgcctcttgcaatgacagctgatctgtcggaaccaggacacaaaagcagcaagaagcggggagagagagggatagaaaacaagcgcaggagagcctgcgaacgcaaaagtgaatgagggctttttgtggctggggatgggttttggttttggggttttttttttaaattgttttgacttcgtacagggtactttttcccaacctcatctgtcagaaatccatgtgggcttcctggaaagaaaaaaaaaaaaaagaaaactaggcatgaaatcagtttaacaccttaatcttaagccatgtcctcatctgcccaccctccccaacccacatacctccattccacttgtgacaccccctcgactccctggtgacgctcctcccagatcgctctacatgacattcaggacacacacacacacacacacacaccactcgcctccactgaatctacacacagattttactgtgacttctgaagctgtatagactctgctgtggataaattggaattttttatgttgtctctctctctgccaatttcaatacgaatcatcttccaatggaaaatcattaccttgaagagtgcattcggggttccttgtgttagggacttaagaatctgaggcgaggacccccaggcttacctgtaggactcaaagggagccaggaccccatctgaaagggtctcctctctcagttgggggacaggccggtggctgacccaggattgcaccagcatgtccatagagaagaggttttctatgtcttcaagcactatatcatagtccgtgttcaaagtgtaaactgtacagtaatcagccttgtgtatatgaaaaacaataaatactatgcaaaccaatagaaacatttagcagtacgtacagagcctgacagcgcagctcctgaggacttctgcggctgcaggagaaggagctgtggcctgtctttcagtgaaagaggaaggaaaggagtagggctagtgaatgtatctgccaggtcttagaagtcaggaccacccagggtctcccagagtgaacttggtgctctaagtccaggcagcctgcaggctggggaccctgggtgcaggtgccaggctcgaggctgttccctgtcctgcctcagtgcctcccctctgcccagcccctgtggcctcttggagaggcgagccagggggctccccggaccgcatggccggtgagagtagagtcggaggcggagagcctggacgcccagaggccggggccaggctctgggtcaaggcaggaaggagacagacagctggcagttcctcgcctcggtgccatcagggaggagccttaagttccactagagcctccggcccagggaggccagaatcagcacaatcccggccccgccctcgcggcgggcgcccccagggccaggagagagagacagggctggctcctctcgcccctggagccgcggtgtggacggcccggccccgtccgccccgccgctctgcgggagtgtcctcgggacacacttaaaccttccaagtagcacagaagccccctccacgtcagaggccccctggccgcggggcctgtgagcggagaggggccctgcttcccacacaaatccgccccggtgcacccccggccaggcaggccccggggcggcctaggcgccttgtcggccgggggtggggctgcttttgcttcctttagaggggcgggcagggagaggaagctctagctccgggcctgagtttccccgaggctgcgtcggaggagctgcagggcgagcccggacggctgccgtctccgccagaggccaccccggcccggcctccagggcgcagaggcgcccccctccatcctcccccatcccgggggccacggcaggggggccgcacagcgcggctgggaccgattcggtgacggcccaaggaagctgggctcagggctcgcctctcccgcctcgatcctgcaccttcctctcccaggtcgctgctgcagccaacccagtagcccccttagcgcccccgcggaccccgcagctccagactccgctttggcacctctgctccggctggcatggctgcacgctccggctgctagtaggagccgttaggggaggagtttggggtctccacacgatgcctagagaatgctgcagtctgcacattagacgctttttagaagttttgaaattaccttgatttttttaattgttatgaaaatggatcttttcttgactctcccacatgctctgttatgggagagaatcccctaccctactctgatgtatagaccattctcccttcaccagccgaaccaatgtcaaaattaataaagaaatggactaatggcaaaaaaaaa

SEQ ID NO: 14375 - DNA, 7754 bp, Homo sapiens
agaggctgcggtgagtccgccagccccagctgctcctcctcaagcccccaaggcccttcggcgggcccctgctgaaagaccggcatgccctattctgtgggcttccgcgaagccgatgctgctaccagctttctgagagcagcaagatcaggtaacttggacaaagctttggatcacctgcggaatggggtagatattaacacctgtaaccagaatgggttgaatggcttgcatctggcttctaaggaaggccatgtgaaaatggtggttgaacttctgcacaaagaaatcattctagaaacgacaaccaagaaggggaacacggccctgcacatcgctgctctagccgggcaggatgaggtggtccgggagcttgtcaactatggagccaacgtcaacgcccagtcacagaaaggttttacacccctgtacatggcagcacaagagaaccacttggaagtggttaagtttttactggaaaatggagctaaccagaatgtagccacagaagacggcttcacgcctctggcggtagccctgcagcagggccatgagaacgtcgtcgcgcacctcatcaactacggcaccaaggggaaggtgcgcctcccggccctgcacatcgcggcccgcaacgacgacacgcgcacggctgcggtgctgctgcagaacgaccccaacccggacgtgctttccaagacgggattcacgcccctgcacattgcggctcactacgagaacctcaacgtggcccagttgctcctcaacagaggagccagcgtcaatttcacaccacagaacggcatcacgccactgcacatcgcctcccgcaggggcaacgtgatcatggtgcggctgctgctggatcggggagcccagatagaaaccaagaccaaggacgaattgacacctctccactgtgcagctcgaaatgggcacgtgcgaatctcagagatcctgctggaccacggggcaccaatccaagccaaaaccaagaacggcctgtccccaattcacatggcggctcagggagaccacctcgactgtgtccggctcctgttgcaatacgacgcagagatagacgacatcaccctggaccacctgaccccactccacgtggctgcccactgtggacaccacagggtggctaaggtccttctggataaaggggccaaacccaactccagagccctgaatggctttacccccttacacatcgcctgcaaaaagaaccacgtccgtgtcatggagctgctgctgaagacgggagcctcgatcgacgcggtcaccgagtctggcctgacacctctccacgtggcctccttcatggggcaccttcccatcgtgaagaacctcctgcagcggggggcgtcgcccaacgtctccaacgtgaaagtggagaccccgctacacatggcagccagagccgggcacacggaagtggccaaatatttactccagaacaaagccaaagtcaatgccaaggccaaggatgaccagaccccacttcactgtgcagctcgcatcggccacacaaacatggtgaagctcctgctggaaaataacgccaaccccaacctggccaccaccgccgggcacacccccctgcacattgcagcccgtgagggccatgtggaaacagtcctggcccttctggaaaaggaagcatcccaggcctgcatgaccaagaaaggatttacccctctgcacgtggcggccaagtacgggaaggtgcgggtggcagagctgctgctggagcgggacgcacacccgaatgctgccggaaaaaatggcctgacccccctgcacgtggccgtccatcacaacaacctggacatcgtcaagctgctgcttccccggggcggctccccgcacagccctgcctggaatggctacacccctttgcacatcgctgccaagcagaaccaggtggaggtggcccgtagtctgctgcagtatgggggctcagcaaacgccgagtcggtgcaaggtgtgacgccccttcacctggccgcccaggagggccacgcagagatggtggctctgctgctctcgaaacaagccaatggcaacctggggaacaagagcggactcactcccctccatctggtagcacaagaaggccacgttccagtggcagatgtgctgatcaaacacggcgtcatggtggacgccaccacccggatgggctacactcccctccatgtggccagtcactatggaaacatcaagctggtgaagtttctgctgcagcaccaggcagatgtcaatgccaagaccaagctaggatacagccccctgcaccaggcagcccagcagggacacacagacatcgtgactctgcttctgaaaaacggtgcttccccaaacgaggtcagctcggatggaaccacacctctggccatagccaagcgcttgggctacatttctgtcaccgacgtgctcaaggtcgtcacggatgaaaccagtttcgtgttagtcagtgataagcatcgaatgagtttccctgagacagttgatgagatcctggatgtctcggaagatgaaggggaagaactcatcagcttcaaggctgagaggcgggattccagggatgttgatgaagagaaggagctgctggattttgtgccgaagctagaccaagtggtggaatctccagccatccccaggattccctgtgccatgcctgagacagtggtgatcaggtcagaagagcaggagcaggcatctaaagagtatgatgaggactccctcatccccagcagcccggccaccgagacctcagacaacatcagcccggtggccagcccggtgcatacagggtttctggtgagcttcatggttgacgcccggggtggttccatgagaggaagtcgccacaacggcctgcgagtggtgatcccgccacggacgtgcgcagcgcccacccgcatcacctgccgcctggtcaagccccagaagctcagcacgccgcccccactggccgaggaggagggcctggccagcaggatcatagcactggggcccacgggggcacagttcctgagccctgtaatcgtggagatcccgcactttgcctcccatggccgtggagaccgcgagctcgtggttctgaggagcgaaaacggctccgtgtggaaggagcacaggagccgctatggagagagctacctggatcagatcctcaacgggatggacgaagagctggggagcctggaggagctagagaagaagagggtgtgccgaatcatcaccaccgacttcccgctgtacttcgtgatcatgtcacggctctgccaggactacgacaccatcggtcccgaagggggctccctgaagagcaagctggtgcccctggtacaggcaacgttcccggagaatgccgtcaccaagagagtgaagctggctctgcaggcccagcctgtcccggatgagcttgtcactaagctcctgggcaaccaggccacattcagccccattgtcaccgtggagccccggcgccggaagttccaccgccccattgggcttcggatcccactacctccttcctggaccgacaacccgagggacagcggggagggagacaccaccagcctgcgcctgctttgcagcgtcattggaggaacagaccaagcccagtgggaagacataacaggaaccaccaaacttgtatatgccaacgagtgcgccaacttcaccaccaatgtctctgccaggttttggctgtcggactgtcctcggactgctgaggctgtgaactttgccaccctgctgtacaaagagctcactgcagtgccctacatggccaaattcgtcatctttgccaagatgaatgacccccgagaggggcgcctgcgctgctactgcatgacagatgataaagtggacaagaccctggagcagcatgagaacttcgtggaggtggcccggagcagggacatagaggtgttggaaggaatgtccctgtttgcagaactctctgggaacctggtgcctgtgaagaaagctgcccagcagcggagcttccacttccagtcatttcgggagaaccgtctggccatgcctgtaaaggtgagggacagcagtcgagagccgggagggtccctgtcgtttctgcgcaaggcgatgaagtacgaggacacccagcacattctctgccacctgaacatcaccatgcccccctgcgccaagggaagtggagccgaagataggagaaggaccccgacgcccctggccctgcgatacagcattctcagtgagtccacaccaggttctctcagtgggacagagcaggcagagatgaagatggctgttatctcagagcacctcggtctcagctgggcagagttggcccgggagctgcagttcagtgtggaagacatcaacaggatccgagtggaaaatcccaactccctgttggagcagagtgtggccttgctgaacctctgggtcatccgtgaaggccaaaacgcaaacatggagaatctgtacacagccctgcagagcattgaccgtggcgagatcgtgaacatgctggagggttccggccgacagagccgcaacttgaagccagacaggcggcacaccgaccgcgactactcgctgtcaccctcccagatgaatggccatcagagggggcaagcccgaatcacacattcccccaccgtgagtcaggtgacggagaggagtcaggacagactgcaggactgggatgcagacggctcgattgtctcatacctgcaagatgctgcacaaggttcctggcaagaggaggtcacgcaaggtccacactcattccagggaacaagtaccatgactgaagggctagagcccggtggatctcaggagtacgagaaggtcctggtgtctgtaagtgagcacacgtggacagaacagcccgaggctgagagctcccaggccgacagggaccggaggcagcaaggccaagaagagcaggtgcaggaggccaagaacaccttcacccaagtggtgcaggggaatgagtttcagaatattccaggggagcaggtgacagaggagcaattcacggatgagcagggcaacattgtcaccaagaagatcattcgcaaggtggttcgacagatagacttgtccagcgccgatgccgcccaggagcacgaggaggtgactgtagaggggcccctggaggatcccagtgagctggaggtcgatattgattactttatgaaacactccaaggatcacacctcgacacccaacccctgaaccccacacactctgccatgcacacaggaggagagctggacctgagggccaccgcagcggtgcacacattcctctgggctgacggcatgacctctgtaagggactcctgctagtcccctcttggcatgaatgactgactgtagacgcatgacctccaggcttcaatcctgcctcttgcaatgacagctgatctgtcggaaccaggacacaaaagcagcaagaagcggggagagagagggatagaaaacaagcgcaggagagcctgcgaacgcaaaagtgaatgagggctttttgtggctggggatgggttttggttttggggttttttttttaaattgttttgacttcgtacagggtactttttcccaacctcatctgtcagaaatccatgtgggcttcctggaaagaaaaaaaaaaaaaagaaaactaggcatgaaatcagtttaacaccttaatcttaagccatgtcctcatctgcccaccctccccaacccacatacctccattccacttgtgacaccccctcgactccctggtgacgctcctcccagatcgctctacatgacattcaggacacacacacacacacacacacaccactcgcctccactgaatctacacacagattttactgtgacttctgaagctgtatagactctgctgtggataaattggaattttttatgttgtctctctctctgccaatttcaatacgaatcatcttccaatggaaaatcattaccttgaagagtgcattcggggttccttgtgttagggacttaagaatctgaggcgaggacccccaggcttacctgtaggactcaaagggagccaggaccccatctgaaagggtctcctctctcagttgggggacaggccggtggctgacccaggattgcaccagcatgtccatagagaagaggttttctatgtcttcaagcactatatcatagtccgtgttcaaagtgtaaactgtacagtaatcagccttgtgtatatgaaaaacaataaatactatgcaaaccaatagaaacatttagcagtacgtacagagcctgacagcgcagctcctgaggacttctgcggctgcaggagaaggagctgtggcctgtctttcagtgaaagaggaaggaaaggagtagggctagtgaatgtatctgccaggtcttagaagtcaggaccacccagggtctcccagagtgaacttggtgctctaagtccaggcagcctgcaggctggggaccctgggtgcaggtgccaggctcgaggctgttccctgtcctgcctcagtgcctcccctctgcccagcccctgtggcctcttggagaggcgagccagggggctccccggaccgcatggccggtgagagtagagtcggaggcggagagcctggacgcccagaggccggggccaggctctgggtcaaggcaggaaggagacagacagctggcagttcctcgcctcggtgccatcagggaggagccttaagttccactagagcctccggcccagggaggccagaatcagcacaatcccggccccgccctcgcggcgggcgcccccagggccaggagagagagacagggctggctcctctcgcccctggagccgcggtgtggacggcccggccccgtccgccccgccgctctgcgggagtgtcctcgggacacacttaaaccttccaagtagcacagaagccccctccacgtcagaggccccctggccgcggggcctgtgagcggagaggggccctgcttcccacacaaatccgccccggtgcacccccggccaggcaggccccggggcggcctaggcgccttgtcggccgggggtggggctgcttttgcttcctttagaggggcgggcagggagaggaagctctagctccgggcctgagtttccccgaggctgcgtcggaggagctgcagggcgagcccggacggctgccgtctccgccagaggccaccccggcccggcctccagggcgcagaggcgcccccctccatcctcccccatcccgggggccacggcaggggggccgcacagcgcggctgggaccgattcggtgacggcccaaggaagctgggctcagggctcgcctctcccgcctcgatcctgcaccttcctctcccaggtcgctgctgcagccaacccagtagcccccttagcgcccccgcggaccccgcagctccagactccgctttggcacctctgctccggctggcatggctgcacgctccggctgctagtaggagccgttaggggaggagtttggggtctccacacgatgcctagagaatgctgcagtctgcacattagacgctttttagaagttttgaaattaccttgatttttttaattgttatgaaaatggatcttttcttgactctcccacatgctctgttatgggagagaatcccctaccctactctgatgtatagaccattctcccttcaccagccgaaccaatgtcaaaattaataaagaaatggactaatggcaaaaaaaaa

SEQ ID NO: 14376 - DNA, 5879 bp, Homo sapiens
cgccagggctgcgtaggcttgtggcgcgcccgcggagaggccggggctctgacgcccgctctgcggcttcggtgtttgaacaggccacagtccaggagcgcttacattcaggagctccgcgtagcacctgcccaaccaaactcagccctccgttaagatcctggttccatgccgcagtaggacagcaggcccaagtctgcacatcccagtgatgcaccatgccaatagtggataagttgaaggaggccctgaaacccggccgcaaggactcggctgatgatggagaactggggaagcttcttgcctcctctgccaagaaggtccttttacagaaaatcgagttcgagccagccagcaagagcttctcctaccagctggaggccttaaagagcaaatatgtgttgctcaaccccaaaacagagggagctagtcgccacaagagtggagatgacccaccggccaggagacagggcagtgagcacacgtatgagagctgtggtgacggagtcccagccccgcagaaagtgcttttccccacggagcgactgtctctgaggtgggagcgggtcttccgcgtgggcgcaggactccacaaccttggcaacacctgctttctcaatgccaccatccagtgcttgacctacacaccacctctagccaactacctgctctccaaggagcatgctcgcagctgccaccagggaagcttctgcatgctgtgtgtcatgcagaaccacattgtccaggccttcgccaacagcggcaacgccatcaagcccgtctccttcatccgagacctgaaaaagatcgcccgacacttccgctttgggaaccaggaggacgcgcatgagttcctgcggtacaccatcgacgccatgcagaaagcctgcctgaatggctgtgccaagttggatcgtcaaacgcaggctactaccttggtccatcaaatttttggagggtatctcagatcacgcgtgaagtgctccgtgtgcaagagcgtctcggacacctacgacccctacttggacgtcgcgctggagatccggcaagctgcgaatattgtgcgtgctctggaactttttgtgaaagcagatgtcctgagtggagagaatgcctacatgtgtgctaaatgcaagaagaaggttccagccagcaagcgcttcaccatccacagaacatccaacgtcttaaccctttccctcaagcgttttgccaacttcagcggggggaagatcaccaaggatgtaggctatccggaattcctcaacatacgtccgtatatgtcccagaataatggtgatcctgtcatgtatggactctatgctgtcctggtgcactcgggctacagctgccatgccgggcactattactgctacgtgaaggcaagcaatggacagtggtaccagatgaatgattccttggtccattccagcaacgtcaaggtggttctgaaccagcaggcctacgtgctgttctatctgcgaattccaggctctaagaaaagtcccgagggcctcatctccaggacaggctcctcctcccttcccggccgcccgagtgtgattccagatcactccaagaagaacatcggcaatgggattatttcctccccactgactggaaagcgacaagactctgggacgatgaagaagccgcacaccactgaagagattggtgtgcccatatccaggaatggctccaccctgggcctgaagtcccagaacggctgcattcctccaaagctgccctcggggtccccttcccccaaactctcccagacacccacacacatgccaaccatcctagacgaccctggaaagaaggtgaagaagccagctcctccacagcacttttcccccagaactgctcaggggctgcctgggaccagcaactcgaatagcagcagatctgggagccaaaggcagggctcctgggacagcagggatgttgtcctctctacctcacctaagctcctggctacagccactgccaacgggcatgggctgaaggggaacgacgagagcgctggcctcgacaggaggggctccagcagctccagcccagagcactcggccagcagcgactccaccaaggccccccagacccccaggagtggagcggcccatctctgcgattctcaggaaacgaactgttccaccgctggccactccaaaacgccgccaagtggagcagattctaagacggtgaagctgaagtcccctgtcctgagcaacaccaccactgagcctgcaagcaccatgtctcctccaccagccaaaaaactggccctttctgccaagaaggccagcaccctgtggagggcgaccggcaatgacctccgtccacctcccccctcaccatcctccgacctcacccaccccatgaaaacctctcaccccgtcgttgcctccacttggcccgtccatagagccagggctgtgtcacctgctccccaatcatccagccgcctgcaaccccccttcagcccccaccccacattgctgtccagtacccccaagcccccagggacgtcagaaccacggagctgctcctccatctcgacggcgctgcctcaggtcaacgaggaccttgtgtcccttccacaccagttgccagaggccagtgagcccccccggagcccctctgagaagaggaaaaagacctttgtgggagagccgcagaggctgggctcagagacgtgcctcccacagcacatcagggaggccactgcggctccccacgggaagaggaagaggaagaagaagaagcgcccggaggacacagctgccagcgccctgcaggaggggcagacacagagacagcctgggagccccatgtacaggagggagggccaggcacagctgcccgctgtcagacggcaggaagatggcacacagccacaggtgaatggccagcaggtgggatgtgttacggacggccaccacgcgagcagcaggaagcggaggaggaaaggagcagaaggtcttggtgaagaaggcggcctgcaccaggacccacttcggcacagctgctctcccatgggtgatggtgatccagaggccatggaagagtctccaaggaaaaagaaaaaaagaaagcaggagacacagcgggcagtagaagaggatgggcatctcaaatgcccaaggagtgccaagccccaagatgctgttgtccccgagtccagcagctgcgcaccatccgcgaatggctggtgtcctggggaccgcatggggctgagccaggcccctcctgtgtcttggaatggagagcgggagtctgatgtggtccaggaactgctcaaatactcatctgataaagcttacgggagaaaagttctgacctgggatggcaagatgtcggcggtcagtcaggatgctattgaagacagcagacaggcccggactgagaccgtggttgatgactgggacgaagagtttgaccgagggaaggaaaagaaaattaaaaaatttaagagagagaagaggagaaacttcaacgccttccagaaacttcagactcgacggaacttctggtctgtgactcacccagcaaaggctgccagcctcagctatcgccgctgactgtgcccctgtggaaggaggtcggttccgagggggtgggtgtaagggtgaggtgggggtgtgtgtgccgtgtatgtgtgtaggggtgtggtggggtgtggcgtgtgtgtatgatgtatgtgggctgtgtatctggcacatgtgtgttgggtggtgtgtgtggtgtgggcgcgtctgtggtgtgtgtcctagtcacttggagaagggtgtgtgtgggatgcgtgtgtataagggggtgtgtgtgggatgcgtgtgtataagggggtgtgtgtagtgtgtgttgggtgtggggtgtgtacacctggcatctgtggcatgtgttctggtcacttggagaagggcatgtgtggggtgtgtgtgggatgtgggttgtgtgtatatctggcatgtgtcccagtcacttgcagaagggtgacttcttgccagccgcatcgagatgccatgcattgggttcctaggttggactcatacccgagggtggcagtgggaagattcgggtctcgtttctctctgtcaggactaccgtggtttgttctgcagcctcctggagacaaggcgtcccttcccgggagctgtcggtctggatctgagggagctctctgtgtgggctctgctgtgctgggagcctgtcacggtaggagctctcccggtaccagtgtccacagaccgcccaacatagaggctttgaggcttctctagatcggaacctctttggtgacattcccgaccagccctgcaagagaaacgacagtgtgtgtgtgagcagaggtggctgcacacctgctggacatctttgccaggctgtgccttctcatgtttcatagacagtggtctgtgctggcagaggctgctgcccctggttggggctatcaggagagtgggggatggtggccacatgtcctccaggtggtctcccggtgcatagctggtggctctgggcaagccatcccttgcttctcggggctgacgccaccgttgtgtccgagcccgccctcccctgcttcctcagcgggaccccttcatctgttggccttacctgtcctcagaaaggaagaggtgaccccacccagccacctctcccttttatggaactcgagagggtggccctactgtgcaccccttccttgtgagtagctctcaactgtcctggagagcagaggctatttggggtcggaggagccctcgatacctgcgaatacatctgctttccaggctgctgtttattctgagacgactgtgctgtagcttcccttgcagctgcaataacccgcaggtcttcactgaggtggaggctttggggtagaattctccatttattttactacttaatacaaaacatttatttttgaccagtcctgtggcttccattagcaatatgtttcctttcccaaatatgcaaatagtggctttgtttgctcaattttgtgagtgctttggaatttaaatgattgtataactcaagaagattacttttctatgttgctcaagctgtgcctgccaacttgtaacttaataaatacaggaaatcctcagagaaggtgatattttcaggaaaaagacaaatgccctcatagtagtgggaagtgtgaaggtgaccgtgaacatccttcctcatcgggtctgtccccgtcatttcctcccggagtcgtcgcaggtggagatggacaacgtggtgttggacttagacctccttcagtgtggctctgctgggccagaggcatcctgctgtcccgggtggctgcctcgctgtctgcaccccctctccctggggcagctttgcttcctgcccctgtgctcggggcctgggtggttactggcgtgtagatggaattgcttttttaatatgggaagatacatttatttttttccatgtgggtgggtgtctctttttggattttcttctgtttttacgtttctcttcttagaagggtgggagagaatcaagctcctgtggccacctgtgtcccagcagcagtgagtggagctgctcagggtgccctctcctgcggaccagtctctgaatgttcaaagatgagggcctggcttccgtgctctggctttgtaacttatctggaagggaaagcacatgccttcacgggcaggatgatcaagcggtgctgattcacgagagtggaagcctccagagcttggggctttctggctgctcttcattgacctgtgtgttcccagcacacgaacagcgcccctaacggagatttgttcagcgactgaatatacacctgtaaacgagtagcatgtatacattgattttgattacaaatggttctgtattat

SEQ ID NO: 14377 - DNA, 2772 bp, Homo sapiens
ttccggcaggcgctgcgctgctggggggcgcgggcgaggatggcggcggagaacgaggccagccaggagagcgccctgggcgcctactcgccagtggactacatgagcatcaccagcttcccgcggctgcccgaggacgagccggcgcccgcggccccgctgaggggccgcaaggacgaggacgcctttctgggagaccccgacaccgacccggactccttcctgaagtctgcacggctgcagcggctgccatcgtcgtcgtcggagatgggcagccaagacgggtcgccgctacgcgagacgcgcaaagacccgttctccgccgcagcggccgagtgctcctgccgccaggatgggctcacggtcatcgtcacggcctgtctcaccttcgctaccggtgtcaccgtggcgctggtcatgcagatctacttcggggacccccagatcttccagcagggtgccgtggtgaccgatgctgcccgctgcacttcactgggcatcgaggtgctcagtaaacagggatcttctgtggacgcagcggtggcagcagccttgtgtttgggtatcgtggctccacacagttctggcctgggcggtgggggcgtgatgctggtacatgacatccgacgaaatgagagccacctaattgatttccgggagtccgcaccaggggccctcagggaagagaccctgcaaagatcctgggagaccaagcctgggctcttggtgggggttcccggaatggtgaaggggctacatgaagctcaccagctctatggcaggctgccatggtcccaagtcctggcctttgcagcagctgtggcccaagatggcttcaacgtgactcatgatctagcccgtgccctggctgaacagctgccacccaacatgtccgagcgcttccgggagacgttcctgccatcgggccgcccgccactacctggctcgttgctgcatcggcccgacctggctgaggtgctggatgtacttggcacctccggcccggctgccttctacgcaggtggcaacctcacactggagatggtggccgaggctcagcacgcagggggtgtcataaccgaagaggacttcagcaattacagcgcccttgtggagaagcctgtgtgtggcgtgtacagaggccacctggttcttagtcccccacctccgcacacgggccctgccctcatcagtgctctcaacatcctggagggcttcaatctcaccagcctggtatcccgagaacaggctcttcactgggtggcagagaccctgaagattgcattagccctggccagcagactgggagatcccgtctatgattctaccatcactgagagcatggatgacatgctcagcaaggtggaggccgcctacctccggggccatatcaatgactcccaggcagcccctgccccactcctgcctgtctatgaactagacggagctcccacggctgcccaggtgctgatcatgggacctgatgacttcattgtggccatggttagctccctgaaccagccctttggcagcggccttatcaccccctcggggatcctgctcaacagccagatgctggacttctcctggcccaaccggacagctaaccactctgcacccagcctggagaattcagtgcagccagggaagcggccactctctttcctgctgcccacagtggtccgacccgcggaggggctctgtggaacctacctcgctctgggggccaatggagctgcgcggggcctcagcggcctgacacagcatctgaatagacaaccagccctctttagggtgggatttgaaaggaagggcctgcttttctccagaacacctcagaatggctccatgaatgtcttgagaacctgatatatatgccaggcacctattttggcaggtggttctgctgaatgtcctgaccttgaaccggaacctgagtgacagcctggcccgcggccgcctacacccggacctgcagtccaacctcctgcaggtggacagtgagttcacagaggaagagattgagttcctggaagccaggggtcaccacgtggagaaagtagatgtcttatcctgggtccatggcagccgaaggaccaacaacttcatcatcgctgttaaggaccctcggagcccagatgcagctggagccaccatcctgtagagcagcggggtggggcggggtctctgctcccccactttgcatgttcccagagtccctccttctcccaggtttggtctcagggggaccccagggatgccccagatcaggggccagaggggatgcttagcaaacccaatcccagagtaactggaaaattctccatcaggaggcctgtggtggtggtggtggtggtggtggtggtggtggtggtggtgagtgtcagcatctacagtacagccaggcaggcaggaccttgaggaatcagactatctgtctgtgtgtcacctctcctccttcagccatgctggccccgagcttagggatgtgcttgcaaacccttctcaagggtctcacaaccccaacatcttcagactggcctgacctgggccttgtcttccagttcctttctcccattcccagcctcatttcttaaatgactaggaattttttaatggaccatcatagggagggggtgctcctcttttcccaccaggttgaggtgggggccttgcatcgggggtccccagggtatggggtaggggtgggggtgggcaccagctcaggggcttccatttgcaaagggaaattaaagaaagaatgttgcttaa

SEQ ID NO: 14378 - DNA, 2194 bp, Homo sapiens
gggtctcgccggctcgccgcgctccccaccttgcctgcgcccgcccggagccagcggttctccaagcacccagcatcctgctagacgcgccgcgcaccgacggaggggacatgggcagagcaatggtggccaggctcgggctggggctgctgctgctggcactgctcctacccacgcagatttattccagtgaaacaacaactggaacttcaagtaactcctcccagagtacttccaactctgggttggccccaaatccaactaatgccaccaccaaggcggctggtggtgccctgcagtcaacagccagtctcttcgtggtctcactctctcttctgcatctctactcttaagagactcaggccaagaaacgtcttctaaatttccccatcttctaaacccaatccaaatggcgtctggaagtccaatgtggcaaggaaaaacaggtcttcatcgaatctactaattccacaccttttattgacacagaaaatgttgagaatcccaaatttgattgatttgaagaacatgtgagaggtttgactagatgatggatgccaatattaaatctgctggagtttcatgtacaagatgaaggagaggcaacatccaaaatagttaagacatgatttccttgaatgtggcttgagaaatatggacacttaatactaccttgaaaataagaatagaaataaaggatgggattgtggaatggagattcagttttcatttggttcattaattctataaggccataaaacaggtaatataaaaagcttccatgattctatttatatgtacatgagaaggaacttccaggtgttactgtaattcctcaacgtattgtttcgacagcactaatttaatgccgatatactctagatgaagttttacattgttgagctattgctgttctcttgggaactgaactcactttcctcctgaggctttggatttgacattgcatttgaccttttatgtagtaattgacatgtgccagggcaatgatgaatgagaatctacccccagatccaagcatcctgagcaactcttgattatccatattgagtcaaatggtaggcatttcctatcacctgtttccattcaacaagagcactacattcatttagctaaacggattccaaagagtagaattgcattgaccacgactaatttcaaaatgctttttattattattattttttagacagtctcactttgtcgcccaggccggagtgcagtggtgcgatctcagatcagtgtaccatttgcctcccgggctcaagcgattctcctgcctcagcctcccaagtagctgggattacaggcacctgccaccatgcccggctaatttttgtaattttagtagagacagggtttcaccatgttgcccaggctggtttcgaactcctgacctcaggtgatccacccgcctcggcctcccaaagtgctgggattacaggcttgagcccccgcgcccagccatcaaaatgctttttatttctgcatatgttgaatactttttacaatttaaaaaaatgatctgttttgaaggcaaaattgcaaatcttgaaattaagaaggcaaaaatgtaaaggagtcaaaactataaatcaagtatttgggaagtgaagactggaagctaatttgcattaaattcacaaacttttatactctttctgtatatacattttttttctttaaaaaacaactatggatcagaatagccacatttagaacactttttgttatcagtcaatatttttagatagttagaacctggtcctaagcctaaaagtgggcttgattctgcagtaaatcttttacaactgcctcgacacacataaacctttttaaaaatagacactccccgaagtcttttgttcgcatggtcacacactgatgcttagatgttccagtaatctaatatggccacagtagtcttgatgaccaaagtcctttttttccatctttagaaaactacatgggaacaaacagatcgaacagttttgaagctactgtgtgtgtgaatgaacactcttgctttattccagaatgctgtacatctattttggattgtatattgtgtttgtgtatttacgctttgattcatagtaacttcttatggaattgatttgcattgaacacaaactgtaaataaaaagaaatggctgaaagagcaaaaaaaaaaaaa

SEQ ID NO: 14379 - DNA, 3392 bp, Homo sapiens
gcggagccagcccctcccctacccggagcagcccgctggggccgtcccgagcggcgacacactaggagtcccggccggccagccagggcagccgcggtcccgggactcggccgtgagtgctgcgggacggatggtggcggcggggcgcgggccagcgcgggcgccgtgagccggagctgcgcgcggggcatgcggctgcggcccccggccctcggcccccgcgctccggccccagccccggccgccggcccccgcggagtgcagcgaccgcgccgccgctgagggaggcgccccaccatgccgcgggccccggcgccgctgtacgcctgcctcctggggctctgcgcgctcctgccccggctcgcaggtctcaacatatgcactagtggaagtgccacctcatgtgaagaatgtctgctaatccacccaaaatgtgcctggtgctccaaagaggacttcggaagcccacggtccatcacctctcggtgtgatctgagggcaaaccttgtcaaaaatggctgtggaggtgagatagagagcccagccagcagcttccatgtcctgaggagcctgcccctcagcagcaagggttcgggctctgcaggctgggacgtcattcagatgacaccacaggagattgccgtgaacctccggcccggtgacaagaccaccttccagctacaggttcgccaggtggaggactatcctgtggacctgtactacctgatggacctctccctgtccatgaaggatgacttggacaatatccggagcctgggcaccaaactcgcggaggagatgaggaagctcaccagcaacttccggttgggatttgggtcttttgttgataaggacatctctcctttctcctacacggcaccgaggtaccagaccaatccgtgcattggttacaagttgtttccaaattgcgtcccctcctttgggttccgccatctgctgcctctcacagacagagtggacagcttcaatgaggaagttcggaaacagagggtgtcccggaaccgagatgcccctgaggggggctttgatgcagtactccaggcagccgtctgcaaggagaagattggctggcgaaaggatgcactgcatttgctggtgttcacaacagatgatgtgccccacatcgcattggatggaaaattgggaggcctggtgcagccacacgatggccagtgccacctgaacgaggccaacgagtacactgcatccaaccagatggactatccatcccttgccttgcttggagagaaattggcagagaacaacatcaacctcatctttgcagtgacaaaaaaccattatatgctgtacaagaattttacagccctgatacctggaacaacggtggagattttagatggagactccaaaaatattattcaactgattattaatgcatacaatagtatccggtctaaagtggagttgtcagtctgggatcagcctgaggatcttaatctcttctttactgctacctgccaagatggggtatcctatcctggtcagaggaagtgtgagggtctgaagattggggacacggcatcttttgaagtatcattggaggcccgaagctgtcccagcagacacacggagcatgtgtttgccctgcggccggtgggattccgggacagcctggaggtgggggtcacctacaactgcacgtgcggctgcagcgtggggctggaacccaacagtgccaggtgcaacgggagcgggacctatgtctgcggcctgtgtgagtgcagccccggctacctgggcaccaggtgcgagtgccaggatggggagaaccagagcgtgtaccagaacctgtgccgggaggcagagggcaagccactgtgcagcgggcgtggggactgcagctgcaaccagtgctcctgcttcgagagcgagttcggcaagatctatgggcctttctgtgagtgcgacaacttctcctgtgccaggaacaagggagtcctctgctcaggccatggcgagtgtcactgcggggaatgcaagtgccatgcaggttacatcggggacaactgtaactgctcgacagacatcagcacatgccggggcagagatggccagatctgcagcgagcgtgggcactgtctctgtgggcagtgccaatgcacggagccgggggcctttggggagatgtgtgagaagtgccccacctgcccggatgcatgcagcaccaagagagattgcgtcgagtgcctgctgctccactctgggaaacctgacaaccagacctgccacagcctatgcagggatgaggtgatcacatgggtggacaccatcgtgaaagatgaccaggaggctgtgctatgtttctacaaaaccgccaaggactgcgtcatgatgttcacctatgtggagctccccagtgggaagtccaacctgaccgtcctcagggagccagagtgtggaaacacccccaacgccatgaccatcctcctggctgtggtcggtagcatcctccttgttgggcttgcactcctggctatctggaagctgcttgtcaccatccacgaccggagggagtttgcaaagtttcagagcgagcgatccagggcccgctatgaaatggcttcaaatccattatacagaaagcctatctccacgcacactgtggacttcaccttcaacaagttcaacaaatcctacaatggcactgtggactgatgtttccttctccgaggggctggagcggggatctgatgaaaaggtcagactgaaacgccttgcacggctgctcggcttgatcacagctccctaggtaggcaccacagagaagaccttctagtgagcctgggccaggagcccacagtgcctgtacaggaaggtgcctggccatgtcacctggctgctaggccagagccatgccaggctgcgtccctccgagcttgggataaagcaaggggaccttggcactctcagctttccctgccacatccagcttgttgtcccaatgaaatactgagatgctgggctgtctctcccttccaggaatgctgggcccccagcctggccagacaagacgactgtcaggaagggtcggagtctgtaaaaccagcatacagtttggcttttttcacattgatcatttttatatgaaataaaaagatcctgcatttatggtgtagttctgagtcctgagacttttccgcgtgatggctatgccttgcacacaggtgttggtgatggggctgttgagatgcctgttgaaggtacatcgtttgcaaatgtcagtttcctctcctgtccgtgtttgtttagtacttttataatgaaaagaaacaagattgtttgggattggaagtaaagattaaaaccaaaagaatttgtgtttgtctgataaaaaaaaaaaaaaaaaaaaa

SEQ ID NO: 14380 - DNA, 5811 bp, Homo sapiens
agctgctacgccacagcccagcggcggccattcgcggaaaaagaggcagagcctgtgccagctacagcctcctccgagccaccgcgggcgggcgggaccggcctctcctcccgcctcgcccccacccccacccacctctatcccagtgtctccgtctgagggtttgtcctgttaatgcgggatgagcgatcagaagaaggaggaggaggaggaggcggcagcggcagcggcgatggctacagaaggagggaaaacctctgagccagagaataacaataaaaaacccaaaacctcaggctcccaggactctcagccctctcctctggctttactggcagctacttgcagcaaaatagggactcctggtgaaaatcaagcaactggacaacaacaaattattatagatccaagtcaaggattggtgcaacttcaaaatcaaccacaacagctagaactggtaacaacgcaacttgctggaaacgcttggcaacttgttgcctccactcctcctgcttcaaaagagaataacgtttctcaaccagcctctagttcgtctagttcttccagcagtaataacgggagtgcatctcctacaaaaactaaatcaggtaattcttccacccctggtcaatttcaagtcatacaagtacaaaatccaagtggtagtgtacagtaccaagtaattccacaacttcagacagtggaaggtcaacaaattcaaatcaatccaactagtagttcatctctacaggatttgcagggtcaaattcagctcatttctgcaggtaataatcaagctatactcacagctgctaacaggacagcttctgggaatattcttgctcaaaacctggcaaatcagacagttccggtccaaattagacctggtgtttcaataccactgcagttacagactcttcctggtactcaggctcaagttgtaacaaccctaccaattaacattggaggagtgactctagctttgccagtgataaacaacgtggctgccggaggagggactgggcaggttggccagcctgctgctactgctgatagtgggacttccaatgggaatcaattagtttccacacccaccaacaccactacttctgccagtactatgccagaatctccctcctcctccactacctgcacaaccactgcttcaacgtctttgacaagcagtgacacattagtgagctcagcagatactggccagtatgcaagcacatcagccagtagttctgaacgcaccattgaagaatctcaaacacctgctgctactgagtctgaagcccagagctccagtcagcttcagcctaatggaatgcagaatgcacaggatcaatcaaattctcttcagcaggtgcaaattgtaggccaacctatcttacagcagatccagatccaacagcctcagcaacagatcattcaggctattccaccacagtcgtttcaactccagtcagggcagacgattcagaccatccagcagcagcctttacagaatgttcaacttcaagcagtaaatccgactcaggtgcttatcagggctccaactttaacaccttcagggcaaatcagttggcaaactgtacaggttcagaatattcagagtctttcaaatttgcaagttcagaatgctgggttatcccaacaattaaccatcaccccagtgtcttcaagtggtggcacaactcttgctcagattgctcctgtggctgttgctggtgccccaataactttgaatactgcccagcttgcatcagtgcctaaccttcagacagtgagcgttgccaacctgggtgctgcaggtgttcaagtgcagggagttcccgttacaatcactagtgttgcaggtcagcagcaaggacaagatggagtaaaagtccagcaagctactatagctcctgtaactgtagcagttggaggaattgctaatgccacgataggtgctgttagtcctgaccaactcacacaagtgcatttgcagcaaggccagcagacttctgatcaagaggtacaacctggcaagaggcttcgaagagttgcctgttcctgtcctaattgtagggaaggagaaggaagaggcagtaatgaaccaggaaaaaagaagcagcatatctgtcatattgaaggatgtggtaaagtttatggcaaaacatctcatttacgagcacatcttcgctggcatactggagaaagaccttttatatgcaactggatgttttgtggcaaaagattcacacggagtgatgagctccagagacatagaagaacccatacaggtgaaaagagatttgaatgcccggaatgttctaaaaggtttatgcggagtgatcatctctccaaacatgtcaaaacgcaccagaataaaaaaggtggtgggacagctcttgccattgttacctcgggagaactggactcatctgttacagaggtgcttggctccccaagaattgtcacagttgcagccatttctcaagattcgaatccagcaactcccaatgtttcaaccaacatggaagaattctgaaaagttatttataacagagacctctagtgctgcacttgtttacacacctttgaaaatctggaaatgggctggtcaagtggattacagagtaggaaattatgttttcattcttggcttctttaagtattccagggtttggggtcaacacgtgaagtgttgaattttaaaaaatacaaaaagcagactgatgtactggaaacagaaaagtatttcctccatactataagttgtagttgtttggaaatatatcacataacctttatacagaatcttcccatctcttaatatcatgtgttaacatgtttaaaaagaccttagtagtttgcaggctggaccttaattggacttattttctttgaaagtactttgttataaattcagtcagtaataatttacgtgtattctttttctctatagcacagaaaacagatagttaactgatgatagggataatactgtatttccttagcttgatttttggaaaatcaaccgaaaatagtttggccgtcttttctaaatgttagaaattcttcaacagttgaattaggtaagttccaaaacagtaatctgagatgcatctcagatctttattaccactacattatagtagtgtgtatgcagacaatcagtgaagtccaattactttctccatttggagacacaagaggaacatagagttaaatcttaggttaaattttaggttgacaccttaggaaaatgctgggaaaaaaatggttaaaacaaaactcatcatagcttcagaaaaataaaatgaggcatcttaacatgcaatgttctaaagttaggattgattatattcctaaccctaggttgaaccacaaaatttcatttaaaatgtttatatttggaaatatttgcatagagtgtaaattgttctgtagtttcatattttgtaaatatgagttatgttgacaatgtgcagaattctttatgctttgatgtggtagccaaagaaagaattacacttttttccaaggccagcagaaaattctcttttaactacattgtaattcttgttttcctctactaaaaattggccagtcccattttatttctagtgctatgtaagaaggtaattaggaattataacacagtaatgtttttatgttacatcaataactgaattttccctaaaaattagcctaatatataatagatatattatgaagcaaaacttttatttttgaaaaggcagaataattttcagtgaagtaagtgactaaagaaaaaaactatattattgtttatgcaagggtcttacaggaaagggtctttttttttttttttttgagatggagtctcgctctcttgcccaggctggagtgcaatggcacgatctcagcttactgcaaccgccgcctcccaggttcaagcgattctcctgtcttagcctcctgagtagctgggattaacaggcgcctgccaccatgcctggctaatttttgtatttttagtagagacagggtttcgccatgttggccaggctggtttcaaactcctgacctcaggtgatctgcccacctcggcctcccagagtgctgggattacaggcatgagccaccatgcccggctaggaaagggtcttactaggaaagatggccaaaagtttcatatgaaaaaaattggattataaaccagtaacttaaatattaataaggatattttatgttttaaaaaagtatttacacagaatcataatcagtgaaattgaccatttgaaaactaaaagtttttacctacctgctcaatttattaacatcattgctttggggactgtttgaatataggtacgtgttttcttgtgcattctctataatttcaggaaaagtactaatgcgaattctcttccaaaattgtgatgtttcttgtatttttgatgaaggagaaatactgtaatgatcactgtttacactatgtacactttaggccagccctttgtagcgttatataaaactgaaggtcttttgtgctttcagtttgtataaaaaagctttgagattaaaggaaaaaaaaaatttttacactgtggttataaatttcaagtttcttaaagcttttgtagacttgtaacagagtctttaaatttaagttggattttgtaaattgttttgtatattttatttaatgtactcttaacaactgatgtatctggctttaaaacatcagaattggtttgttgttttgtttggtacagaggagcatttggtagtgttcattttaattttattatataggagctgaaacatcaaatatatattttatctatcattatgctacacaatcagtgctataaatttttttatgcaaagaaactttcttaatgttttaatcatgtttcctcagagtgacactttttgttgttgttaataccaagtatgaacactctgcatcattattccatgaaccagttctaatgcaaacctatgtatgtccattagaaatggaagttattttttaatcaacaatgaggcctattataaatttatcagatgaatctagatagctttatagcatataaaatatgttaatttgtgttagcaggtgcacatttcaccactgaaattagaaatattttgacagtctgttctgcataccattctgagtctacttttctgtctttagaagaatcgtaaatttcagtgtcctttatttgactcagtgggatatagctgttataagtaatagggcacagatgtgcagtagagtcttgtttaatggcatttcactgttcattccctttaccaccgttataaaacttttctttattgtaattatcagtgcaaagctatgtatttatcatggtaaaactccagtgttagaatagttttttcttacagtatactttctttggttaggtttgtgtatgtgttgctgattacattagaacttgatgttaagtcatttatcacactctcatgagagcagtaataaaagtgtgtaatctaggagaaaaagttaatttgtcaaacttagataagcatgatgtttaggtcctatttttcaattttataactgttttattgcaacaatatttgtatttaagtctccattttaatgccttgtggtgtttttttatgcatgtcactaagttgtcatcccacataaattgatgtgcagcatagggtattaaatctacataatgattttaaaacagaaatagttgatggtaaaatgtaaatgttttgcaaaaattccttataaaaagttttgtagtaacatttcacttgtaaattttttttgtaaaaaaaaaaaaa

SEQ ID NO: 14381 - DNA, 3974 bp, Homo sapiens
tgtgcctggagataccattgtggaccctggagaggcacctgctgcttatgcggtaaaacctctaccaccccaaacctggtcagtttgaggggagccgctgccatagtatccacagagaaggccggagttccagccgtgtggagcagcagaggggagtctgacagggtcacctcctccacagagagaattggcagctgactgcactgccaggagccaaggcctaggtgtgtggagcctggaagaccagggatacctgaggcaggaggtgcagcgtgtggagtgagaaacccgagagggactggggcctgtgctcaggatcagcagagcaggcaggcagagtggagagggagagacggagccccagaaggggagcaggaggagagggaagtagtggcagcagcccaggccaggcgtgtgtcctgcaagtgctaggaccagccacccctccccatggcctccaagccggctgccgggaagagcagaggggagaagcggaagagggtggtgctgacactgaaggagaagattgacatctgcacgcgcctggagaagggcgagagccggaaggcactgatgcaggagtacaatgtgggcatgtccaccctctacgacatcagggcccacaaggcgcagctgctccggttcttcgccagctccgactccaacaaggcgctggagcagcggcgcacgctgcacacgcccaagctggagcacctggaccgcgtcctgtacgagtggttcctggggaagcgctccgagggcgtccccgtgtcaggccccatgctcatcgagaaggccaaggacttctacgagcagatgcagctcactgagccctgcgtgttctccggagggtggctttggcgctttaaggccagacacggcattaaaaagctagatgcatccagtgaaaagcagtcagccgaccaccaggccgcggagcagttctgtgcgtttttcaggagcttggctgctgagcacgggctgtccgccgagcaggtttacaacgctgatgagaccggccttttctggcggtgcctgccaaatcccactccggaaggcggggctgtgcctggccccaagcagggcaaggaccggctgaccgtgctgatgtgtgccaacgccacgggctcccacaggctcaagcccttggccatcgggaagtgcagcggtcccagggctttcaaaggcatccagcacctgcccgtcgcctataaggcccaggggaacgcctgggtggacaaggagattttttccgattggttccatcatatctttgtgccctcggtgagagagcacttcagaaccataggtttgccggaagacagcaaagccgttctcttgctggacagctcccgggctcacccgcaggaggccgagctggtgtccagtaacgttttcaccatcttcctgcctgccagcgtggcctcattggtgcagcccatggagcagggcattcggagagatttcatgaggaacttcattaaccctccggtccccctgcagggcccccacgcccgctacaacatgaacgatgccatattcagcgtggcctgtgcctggaacgcagtccctagccacgtcttcaggcgggcctggaggaagctgtggccgtcggttgcgtttgccgaaggctcctcctctgaggaggagttggaggcagagtgcttcccagtgaagccccacaacaagtcctttgcacacatcctggagcttgtgaaggaaggctcctcctgcccgggccagcttcgccagcgccaggccgccagctggggggtagcgggaagggaggcagaagggggacggccccctgctgccacgtcgccagcagaggttgtgtggagttcagaaaagactccgaaagctgaccaggacggcagaggagatcctggtgagggcgaggaggtggcctgggagcaggcggccgtggcctttgacgcagtcctgcgctttgcggagcggcagccatgcttcagtgcgcaggaagtggggcagctgcgggcgctgcgtgccgtgttccggagccagcagcaggtgaggaggcggcgtggtgccctcggggctgtggtcaaggttgaagccctccaggagggccctggtggctgtggggccacagctcagtctcccttgccctgctcatccacagcaggtgacaactgatggcttctctgccctgccctggccactggccctgtttctccccacaccctggagtggcatggtcctgtgccccgaccccacctgaggcaggagggcatgtgcagacactcaagagcccttccaggagtgggtcgcccacgggtgtggctcgggtgcccaggacggtctgtgcccgaggttcctgtcaatacaggttttattttatcacttgccgtgtcatccgaaagtgaggaaatgttttggaagggtccaccctagcctagaacaagccagagccgcaccctggctggaatgggggccaggctgagccgatctggtctcgtgttcgctggctgatcattgcagtatcagagggtggagatgtcagtctgtccacgtggagagaagttgccctccaggccgacaggaggccatgcccaccgcccctggacaggcttcgtctcagaaggctctatctgctgggctggcggccatccccgtgttgggtggaccccgagcacggttgcctgaggtccgatggcccgagagctgggactcagttcttggcctgctagcggctgaacaggccgcacatctcacttcagttgtggcctcattcagcagaatgactctggaaccatcctctgttacccgcagatcctgtcccatgggctctggccccaagatgttggggggccccacggagagttgacttggtagagttcctttctgggaagaaagtaggagtggctgaccaggccctgctcatcacccggatagaggacacggaccctgtgtggtattttggcattttggctcagagtccaatgtaccatgttgcccagaatttcatacttatggcctttacatgaatacgtcttgatcagacattcagagattagtcttaggtttgcacgtaagtcactgaaaacagtaaaacaggctgcttagatttctagcagtatgtgtgctcttatccccagctgttagcacgttagtaatacttttggggaggagttgtctgtcctggtcagttttcacagaggcggttgtaagaggatgtggttattttctccatgtctgtagttgctttgcggcatctccatttcacgggcaacactcactgcctgcagctgagattccagaacgccctgtgtccacagtgattagcctcgtctttcagcgagcataaaataggtgcattgtccttttcttttcttgaggcagggtctcactctgttgaccaggctggagtgaagtggtgtgatcccagctcactgcagcctcgacctccctggcttgagtgatcctcccgccccagcctcctgagtagctgggactagaggcacgcaccaccgcgcctttttattttttttgtagagacagggtctcactgtgttgcccaggctggtcttgaactcttggcctcaagcgatcctccttcctcatccttctaaagtgctgggattacaggtgtgagccacagcactcggcctaaataggtttttcttgctatgttattttcagtgctttgcccttgaattcttttcctctcttaaattcatatcatttggccgagtcagcacgtagtttgcattccagcgtctgctgttgattccactgaaacctctgttctcatgaaggagaggatttggctcgctgtggtttctcgtactttcacatctctgtagatacaggggcaaaagtcattgctgacagagccctatctatgtcctggaagtgtgtgtttcttgctttgaatgcatgtgtgaagattataaaagccaaatagtttttaaagatctcggtgctgaacgacagtcccagttcccatttgt

SEQ ID NO: 14382 - DNA, 4239 bp, Homo sapiens
gagattcgggcagggagcgggcggaacctttctaccgcgtctctagctaacacgcacggcggggacagtttaggcctccgcgcaccgttcgccgggagtcttgcagtttgcttggtgcagggaaggcgggcgcggaggttctatctgtttcttcctccttcgtgagcagcatggacgtgctagcggaggagtttgggaacctgactccggagcagctggcggcgccgatcccgactgtagaggaaaaatggaggctgcttccagcatttttaaaggtgaaaggccttgtgaaacagcatatagattcatttaactatttcattaatgtagagataaagaagataatgaaagccaatgaaaaggttacaagtgacgctgaccctatgtggtacttaaaatatcttaatatctatgttgggcttcctgatgttgaagaaagcttcaatgtaactagaccagtgtcccctcatgagtgccgtttgagagacatgacatactctgcccctattacagtggatattgaatatacccgaggcagccagaggatcatccgcaatgccttacctatcggcagaatgcccataatgctacgtagttcaaactgtgttcttacaggaaaaacgccagcagaatttgccaaactgaacgaatgtcccttagatccaggtggctacttcattgttaaaggagtagaaaaagttattcttatccaagagcagctgtctaagaacaggatcatcgtggaggctgatagaaaaggggctgttggagcttcagttaccagctctacccatgagaaaaaaagcagaaccaatatggctgtgaaacaaggacgattttatttgaggcataatactttgtcagaagatatacccattgtcatcatatttaaggccatgggtgttgagagtgaccaggaaattgtgcagatgattggaacagaggagcacgtgatggctgcatttgggcccagtctggaagagtgccagaaagctcagattttcacacagatgcaggcattaaaatatatagggaacaaagtaagaaggcaaaggatgtggggaggtggaccaaagaaaaccaaaatagaagaagcaagagagctcctggcttccaccattctgacccatgtcccagttaaggaattcaatttccgagccaaatgtatctatactgcagtgatggtgcgaagagttattctggcccaaggagataataaagttgacgacagagattattatggtaacaagcgactggaattggcaggacagcttttatctcttctttttgaagacttgttcaaaaaatttaattctgaaatgaaaaagattgccgaccaggtgattcctaagcaaagagcagcccagtttgatgttgtcaaacacatgcgccaagaccagatcaccaatggcatggtgaatgctatttctaccggaaattggtctttaaagagatttaaaatggaccgccagggtgtaacccaagtgctgtctcgcttgtcatatatatccgcactgggcatgatgacaagaatctcttcccagtttgaaaaaacgagaaaagtgagtggtcctcgctccctccagccatctcagtggggaatgctgtgtccttcggacactcctgaaggagaggcatgtggtttggttaaaaacttggcccttatgacacacatcacaactgatatggaagatggacccattgttaaattagccagtaacttgggagtagaagatgtgaatttattatgtggggaagagctctcttacccaaatgtgtttcttgtctttcttaatggtaacatcttaggtgtcattcgagaccacaaaaagctagtgaatacatttcgactcatgagaagagcaggatatatcaatgaatttgtttccatctcaacaaatcttacagatcgatgtgtctatatttcttctgatgggggaaggctatgcagaccctacataattgtcaagaaacagaagccagcagtcacaaataaacatatggaagagctggcccaagggtacaggaattttgaagatttcttacatgagagtctggttgaatatttagatgtgaatgaagaaaatgattgtaacattgcactgtacgaacacacaattaataaagacaccacccacttggagattgaacccttcactcttctcggcgtgtgtgctggacttatcccataccctcaccataaccagtcaccgagaaacacttatcagtgtgccatggggaaacaagccatgggtactataggatacaaccagcgaaacagaattgatactctcatgtatctactagcatatccacaaaaacccatggttaagacaaaaaccattgaattgatagaatttgagaaactgccagctggacagaatgcaacagttgctgtgatgagctatagtggctatgatattgaagatgctcttgttttaaacaaggcctctttagacagaggctttgggcgttgccttgtatataaaaatgctaaatgtacgttgaaacgatacaccaatcagacttttgataaagtgatggggcccatgttggatgctgctacaaggaaacctatctggcgacatgaaatcttagatgcagatggtatttgttctccaggtgagaaagtagaaaacaaacaagtgcttgtaaataagtccatgcccacagtgactcagattcctttggaaggaagtaatgtaccacagcaaccacagtacaaagatgtacccataacctacaaaggagcaacagactcatatattgaaaaagtgatgatatcttcaaatgctgaagatgcttttctgatcaaaatgctgctgagacagacaaggcgtccagaaattggagacaaattcagcagtcgtcatgggcaaaaaggtgtttgtggcttgatcgtcccccaggaagacatgccattttgtgattctggcatctgtccggacatcatcatgaacccacacggcttcccatcacgaatgacggtggggaagctcattgagctgctggctggcaaggccggtgtgctggacggcagattccactacggcactgcgtttggaggcagtaaagtgaaggatgtgtgtgaggacctcgttcgccatggttataactacttggggaaagactatgttacatccggcatcacaggtgagcccttcgaagcatacatctattttggccccgtgtactatcagaagctgaaacacatggtgctagataaaatgcatgcccgggcccggggcccacgagccgtccttaccaggcaacccactgaaggacggtctcgtgatggtggcttgcgtctcggggaaatggaacgtgactgtttaatcggttatggagccagtatgcttttgctagagagactaatgatttcaagtgatgcctttgaggttgatgtctgtgggcagtgtggacttctggggtattctggctggtgccattactgcaagtcatcctgccacgtgtcttccctccgtattccgtatgcctgcaagctgctcttccaggaactacagtctatgaacatcatccccaggttaaaactgtccaagtacaatgaatgaggatggaaaaaatgattattaaagagaacaagtgatacatccaatgcaacggaaagcagaagggatttaggactacgtctcctcctgtgaagaattcccttgcgtattctctctctaaaacaaccaaaaaaaaatggagaggctttttatatactctaagactggctaaacaaccttgatcattgagcctcgagccatgggagagatgctgaccatgtggactgcaaggctgcttgattcacagatggatgtgacctaaaggataaataagctattacttatgtgctgatctcttgacattcactcattagaagaccttactccttcaagcaaatgtttggggtcaaatttaccatatcttctggctaaccatattcaagattcttctgaaacttggaggatgtaaagaatccatttgatttggtcagcctggcttttgtcgtggtggctggctcggataaattttcccaacaattaaatcttgcctttacacacccaaactttgtaattttagtcttggtgaaatataatgaatttgttcctaccttgtcaagcaagaatgtcgtcttctcctatggactcaattgctattattttaaacctgcatgattgtaccatgcaatactattcgttaaatatctgaatctagaaaaaaaaaaaaaaaaaa

SEQ ID NO: 14383 - DNA, 3079 bp, Homo sapiens
catgcggcggctctgaacgatgtcctcctcctcctacgccaagaacgggaccgcggacgggccgcactcccccacctcgcaggtggcccgaggcaccacaacccggaggagcaggttgaaaagatccgatggcagcaccacttcgaccagcttcatcctcagacagggttcagcggattcctacacaagcaggccgtctgactccgatgtctctttggaagaggaccgggaagcaattcgacaggagagagaacagcaagcagctatccagcttgagagagcaaagtccaaacctgtagcatttgccgtgaagacaaatgtgagctactgcggcgccctggacgaggatgtgcctgttccaagcacagctatctcctttgatgctaaagactttctacatattaaagagaaatataacaatgattggtggataggaaggctggtgaaagagggctgtgaaattggcttcattccaagtccactcagattggagaacatacggatccagcaagaacaaaaaagaggacgttttcacggagggaaatcaagtggaaattcttcttcaagtcttggagaaatggtatctgggacattccgagcaactcccacatcaacagcaaaacagaagcaaaaagtgacggagcacattcctccttacgatgttgtaccgtcaatgcgtccggtggtgttagtggggccgtcactgaaaggttacgaggtaacagacatgatgcagaaagccctctttgatttcctgaagcacaggtttgatgggaggatttcaataacgagagtgacagctgacatttctcttgctaagaggtctgtcctaaataatcccagcaagagagcaataattgaacgttcgaacacccggtccagcttagcggaagtacaaagtgaaattgaaagaatctttgagttggcaagatctttgcaactggttgttcttgatgcagacaccatcaatcacccagcacaacttataaagacttccttagcaccaattattgttcatgtaaaagtctcatctccaaaggttttacagcggttgattaaatctagaggaaagtcacaaagtaaacacttgaatgttcaactggtggcagctgataaacttgcacaatgccccccagaaatgtttgatgttatattggatgaaaatcagcttgaggatgcatgtgaacatctaggggagtacctggaggcgtactggcgtgccacccacacaaccagtagcacacccatgaccccgctgctgggaaggaatttgggctccacggcactctcaccatatcccacagcaatttctgggttacagagtcagcgaatgaggcacagcaaccactccacagagaactctccaattgaaagacgaagtctaatgacctctgatgaaaattatcacaatgaaagggctcggaagagtaggaaccgcttgtcttccagttctcagcatagccgagatcattaccctcttgtggaagaagattaccctgactcataccaggacacttacaaaccccataggaaccgaggatcacctgggggatatagccatgactcccgacataggctttgagtctaatgaaacaaaaaatattcatctgttgacaatttgccatagcagtgctaggataaaccaatcatcttaacttggctaacatagcacagtatttactgtgctaatgggctgctgtcattttatgctaagtaaggggcaaaaaaaaaaattacattatgcccttgagtctagatggatattagatgcccgatcatatagatatttttaagtgcaacatttacatgataacagtacattttgttttcttcatagatttagacacatcaatttgtaatttagggtacttacaaggcacatataaaataatttcccatgctggaaattccaaatgaccagttccagttggaaccaatttataaaccaattcctgttggaatttgggtgaattgactagaaagtctacttgagcatgttgtaatcaactgaaaaatctggggggaaaaaaaaaaaactaataagaaaatcgaaataccaatagaagccaaatccagctttggtatttatttgctggaagctaaatttacacttaaagttggagtgtataaacattttaatatatgttaatgttgccagaatgacttttcagacttaccaaatgtattgatagtgccaaaaaaaaaatctcagaaatcttaatgcagaaattatatagtctcctcagattttaatatttttatttctttcctggcacagctgttgtattcaaagtgttttgctttttgtttggtcagtactgttagctcatttgaagttggcaaaaacaaatacaaacaagcaaaaaacctcaaatttttttcagcagtgagagagaatagtaaagagaggcccaagcatagctggttatgtgaaatataaaatggggtgttgttctccctttaatcaatctgagcacaactacatacatccaggaatctgaagtcagatagtaaggatgtggtaccaatcctcccgagtgcaatgctaaacacttccaggtgggaattcatctatttcacttaacacaaacgcagggtctgtatttcctgccaacaagattgagtatctttccattgcttctctcagtctctgtctttgaatatctgaatgttctggcccttcaacaaattctttaaatcatgctaaggaatttcgttttatgtggacacactcaactttgatattcaggagatgtttttacaaaatgactaattgaaaaaagttgaaacaaatgattttaaaagcttgcagtaaaaaataaactcatagattcagcaaatatttgttgactaaaattatagcatttttaatgcagaaaattataaagaatttggagattgagctgccttatttctaatgaacactcctcttcatcttattaagtcttcacagtttttccagtggctataattatggaattggtgacctatgttttatattatcaaggaagccttagattcactctgatctaagaaattattgaaattgaccctttttacacaaatgtctttaaaaaaa

SEQ ID NO: 14384 - DNA, 15789 bp, Homo sapiens
atggacagccagaacctggctggtgaggataaagattcacaaccggcagctgatggacctgcagcctctgaggacccaagtgccactgagtcagacctgcccaacccacatgtgggagaggtctctgtccttagttctgggagtcccaggcttcaggagactcctcaggactgcagtgggggtccggtgcggcgttgtgctctctgtaactgcggggagcccgctctacacgggcagcgggagctacggcgctttgagttgccatttgattggccccggtgtccagtggtgtcccctggggggagcccagggcccaatgaggcagtgctgcccagtgaggacctatcacagattggtttccctgagggccttacacctgcccacctaggagaacctggagggtcctgctgggctcaccattggtgtgctgcatggtcggcaggcgtatgggggcaggagggcccacaactatgtggtgtggacaaggccatcttctcagggatctcacagcgctgctcccactgcaccaggctcggtgcctccatcccttgccgctcacctggatgtccacggctttaccacttcccctgcgcgactgccagcggttccttcctatccatgaaaacactgcagctgctatgcccagagcacagtgagggggctgcatatctggaggaggctcgctgtgcagtgtgtgaggggccaggggagctgtgtgacctgttcttctgtaccagctgtgggcatcactatcacggggcctgcctggacactgctctgactgcccgcaaacgtgctggctggcagtgccctgaatgcaaagtgtgccaagcctgcaggaaacctgggaatgactctaagatgttggtttgcgagacgtgtgacaaaggataccatactttctgcctaaaaccacccatggaggaactgcctgctcactcttggaagtgcaaggcgtgccgggtgtgccgggcctgtggggcgggctcagcagaactgaatcccaactcggagtggtttgagaactactctctctgtcaccgctgtcacaaagcccagggaggtcagactatccgctccgttgctgagcagcataccccggtgtgtagcagattttcacccccagagcctggcgatacccccactgacgagcccgatgctctgtacgttgcatgccaagggcagccaaagggtgggcacgtgacctctatgcaacccaaggaaccagggcccctgcaatgtgaagccaaaccactagggaaagcaggggtccaacttgagccccagttggaggcccccctaaacgaggagatgccactgctgcccccacctgaggagtcacccctgtccccaccacctgaggaatcacccacgtccccaccacctgaggcatcacgcctgtcgccaccacctgaggaattgcccgcatccccacttcctgaggcattgcacctgtcccggccgctggaggaatcgcccctctctccgccgcctgaggagtctcctctgtctcccccacctgaatcatcacctttttctccactggaggagtcgcccttgtctccaccggaagagtcacccccatctcctgcacttgagacgcctctatccccaccacctgaagcatcgcccctgtccccaccatttgaagaatctcctttgtccccgccacctgaggaattgcccacttccccgccacctgaagcatctcgcctgtctccaccacctgaggagtcacccatgtcccctccacctgaagagtcacccatgtctccaccaccggaggcatctcgtctgttcccaccatttgaagagtctcctctgtcccctccacctgaggagtctcccctttccccaccacctgaggcatcacgcctgtccccaccacctgaggactcgcctatgtccccaccacctgaagaatcacctatgtcccccccacctgaggtatcgcgcctatcccccctgcctgtggtgtcacgcctgtctccaccgcctgaggaatctcccttgtccccaccggccctgtctcctttgggggagttagagtacccctttggtgccaaaggggacagtgaccctgagtcaccgttggctgcccccatcctggagacacccatcagccctccaccagaagctaactgcactgaccctgagcctgtcccccctatgatccttcccccatctccaggctccccagtggggccggcttctcccatcctgatggagccccttcctcctcagtgttcgccactccttcagcattccctggttccccaaaactcccctccttcccagtgctctcctcctgccctaccactgtccgttccctccccgttgagtcccatagggaaggtagtgggggtctcagatgaggctgagctgcacgagatggagactgagaaagtttcagaacctgaatgcccagccttggaacccagtgccaccagtcctctcccttccccaatgggggacctttcctgccccgcccccagccctgccccagccctggatgacttctctggcctaggggaagacacagcccctctggatgggattgatgctccgggttcacagccagagcctggacagacccctggcagtttggctagtgaacttaaaggctcccctgtgctcctggaccccgaggagctggcccctgtgacccctatggaggtctaccccgaatgcaagcagacagcagggcggggctcaccatgtgaagaacaggaagagccacgtgcaccggtggcccccacaccacccactctcatcaaatccgacatcgttaacgagatctctaatctgagccagggtgatgccagtgccagttttcctggctcagagcccctcctgggctctccagacccggaggggggtggctccctgtccatggagttgggggtctctacggatgttagtccagcccgagatgagggctccctacggctctgtactgactcactgccagagactgatgactcactattgtgcgatgctgggacagctatcagcggaggcaaagctgagggggagaaggggcggcggcgcagctccccagcccgttcccgcatcaaacagggtcgcagcagcagtttcccaggaagacgccggcctcgtggaggagcccatggagggcgtggtagaggacgggcccggctaaagtcaactgcttcttccattgagactctggtagttgctgacattgatagctctcccagtaaggaggaggaggaagaagatgatgacaccatgcagaataccgtggttctcttctccaacacagacaaatttgtcctaatgcaggacatgtgtgtggtatgtggcagctttggccggggggcagagggccacctccttgcctgttcgcagtgctctcagtgctatcacccttactgtgtcaacagcaagatcaccaaggtgatgctgctcaagggctggcgttgtgtggagtgtattgtgtgtgaggtgtgtggccaggcctccgacccctcacgcctgctgctctgtgatgactgtgatattagctaccacacatactgcctggaccccccactgctcaccgtccccaagggcggctggaagtgcaagtggtgtgtgtcctgtatgcagtgtggggctgcttcccctggcttccactgtgaatggcagaatagttacacacactgtgggccctgtgccagcctggtgacctgccctatctgtcatgctccttacgtagaagaggacctactaatccagtgccgccactgtgaacggtggatgcatgcaggctgtgagagcctcttcacagaggacgatgtggaccacgcacccgatgaaggctttgactgtgtctcctgccagccctacgtggtaaagcctgtggcgcctgttgcacctccagagctggtgcccatgaaggtgaaagagccagagccccagtactttcgcttcgaaggcgtgtggctgacagaaactggcatggccttgctgcgtaacctgaccatgtcaccactgcacaagcggcgccaacggcgaggacggcttggcctcccaggcgaggcaggattggagggttctgagccctcagatgcccttggccctgatgacaagaaggatggggacctggacaccgatgagctgctcaagggtgaaggtggtgtggagcacatggagtgcgaaattaaactggagggccccgtcagccctgatgtggagcctggcaaagaggagaccgaggaaagcaaaaaacgcaagcgtaaaccatatcggcctggcattggtggtttcatggtgcgacagcggaaatcccacacacgcacgaaaaaggggcctgctgcacaggcggaggtgttgagtggggatgggcagcccgacgaggtgatacctgctgacctgcctgcagagggcgccgtggagcagagcttagctgaaggggatgagaagaagaagcaacagcggcgagggcgcaagaggagcaaactggagggcatgttccctgcttacttgcaggaagccttctttgggaaggagctgctggacctgagccgtaaggccctttttgcagttggggtgggccggccaagctttggactagggaccccaaaagccaagggagatggaggctcagaaaggaaggaactccccacatcgcagaaaggagatgatggtccagatattgcagatgaagaatcccgtggcctcgagggcaaagccgatacaccaggacctgaggatgggggcgtgaaggcatccccagtgcccagtgaccctgagaagccaggcaccccaggtgaagggatgcttagctctgacttagacaggatttccacagaagaactgcccaagatggaatccaaggacctgcagcagctcttcaaggatgttctgggctctgaacgagaacagcatctgggttgtggaacccctggcctagaaggcagccgtacgccactgcagaggccctttcttcaaggtggactccctttgggcaatctgccctccagcagcccaatggactcctacccaggcctctgccagtccccgttcctggattctagggagcgcgggggcttctttagcccggaacccggtgagcccgacagcccctggacgggctcaggtggcaccacgccctccacccccacaacccccaccacggagggtgagggcgacggactctcctataaccagcggagtcttcagcgctgggagaaggatgaggagttgggccagctgtccaccatctcgcctgtgctctatgccaacattaattttcctaatctcaagcaagactacccagactggtcaagccgttgcaaacaaatcatgaagctctggagaaaggttccagcagctgacaaagccccctacctgcaaaaggccaaagataaccgggcagctcaccgcatcaacaaggtgcagaagcaggctgagagccagatcaacaagcagaccaaggtgggcgacatagcccgtaagactgaccgaccggccctacatctccgcattcccccgcagccaggggcactgggcagcccgccccccgctgctgcccccaccattttcattggcagccccactacccccgccggcttgtctacctctgcggacgggttcctgaagccgccggcgggctcggtgcctggccctgactcgcctggtgagctcttcctcaagctcccaccccaggtgcccgcccaagcgccttcgcaggacccctttggactggcccctgcctatcccctggagccccgcttccccacggcaccgcccacctatcccccctatcctagtcctacgggggcccctgcgcagcccccgatgctgggcgcctcatctcgtcctggggctggccagccaggggaattccacactaccccacctggcacccccagacaccagccctccacacctgacccgttcctcaaaccccgctgcccctcgctggataacttggctgtgcctgagagccctggggtagggggaggcaaagcttccgagcccctgctctcgcccccaccttttggggagtcccggaaggccctagaggtgaagaaggaagagcttggggcatcctctcctagctatgggcccccaaacctgggctttgttgactcaccctcctcaggcacccacctgggtggcctggagttaaagacacctgatgtcttcaaagcccccctgacccctcgggcatctcaggtagagccccagagcccgggcttgggcctaaggccccaggagccaccccctgcccaggctttggcaccttctcctccaagtcacccagacatctttcgccctggctcctacactgacccatatgctcagcccccattgactcctcggccccaacctccgccccctgagagctgctgtgctctgccccctcgctcactgccctccgaccctttctcccgagtgcctgtcagtcctcagtcccagtccagctcccagtctccactgacaccccggcctctgtctgctgaagctttttgcccatcacccgttacccctcgcttccagtcccctgacccttattctcgcccaccctcacgccctcagtcccgtgacccatttgccccattgcataagccaccccgaccccagccccctgaagttgcctttaaggctgggtctctagcccacacttcgctgggggctggggggttcccagcagccctgcccgcggggccagcaggtgagctccatgccaaggtcccaagtgggcagccccccaattttgtccggtcccctgggacgggtgcatttgtgggcaccccctctcccatgcgtttcactttccctcaggcagtaggggagccttccctaaagccccctgtccctcagcctggtctcccgccaccccatgggatcaacagccattttgggcccggccccaccttgggcaagcctcaaagcacaaactacacagtagccacagggaacttccacccatcgggcagccccctggggcccagcagcgggtccacaggggagagctatgggctgtccccactacgccctccgtcggttctgccaccacctgcacccgacggatccctcccctacctgtcccatggagcctcacagcgatcaggcatcacctctcctgtcgaaaagcgagaagacccagggactggaatgggtagctctttggcgacagctgaactcccaggtacccaggacccaggcatgtccggccttagccaaacagagctggagaagcaacggcagcgccagcggctacgagagctgctgattcggcagcagatccagcgcaacaccctgcggcaggagaaggaaacagctgcagcagctgcgggagcagtggggcctccaggcagctggggtgctgagcccagcagccctgcctttgagcagctgagtcgaggccagaccccctttgctgggacacaggacaagagcagccttgtggggttgcccccaagcaagctgagtggccccatcctggggccagggtccttccctagcgatgaccgactctcccggccacctccaccagccacgccttcctctatggatgtgaacagccggcaactggtaggaggctcccaagctttctatcagcgagcaccctatcctgggtccctgcccttacagcagcaacagcaacaactgtggcagcaacaacaggcaacagcagcaacctccatgcgatttgccatgtcagctcgctttccatcaactcctggacctgaacttggccgccaagccctaggttccccgttggcgggaatttccacccgtctgccaggccctggtgagccagtgcctggtccagctggtcctgcccagttcattgagctgcggcacaatgtacagaaaggactgggacctgggggcactccgtttcctggtcagggcccacctcagagaccccgtttttaccctgtaagtgaggacccccaccgactggctcctgaagggcttcggggcctggcggtatcaggtcttcccccacagaaaccctcagccccaccggcccctgaattgaacaacagtcttcatccaacaccccacaccaagggtcctaccctgccaactggtttggagctggtcaaccggcccccgtcgagcactgagcttggccgccccaatcctctggccctggaagctgggaagttgccctgtgaggatcccgagctggatgacgattttgatgcccacaaggccctagaggatgatgaagagcttgctcacctgggtctgggtgtggatgtggccaagggtgatgatgaacttggcaccttagaaaacctggagaccaatgacccccacttggatgacctgctcaatggagacgagtttgacctgctggcatatactgatcctgagctggacactggggacaagaaggatatcttcaatgagcacctgaggctggtagaatcggctaatgaggaggctgaacgggaggccctgctgcggggggtggagccaggacccttgggccctgaggagcgccctccccctgctgctgatgcctctgaaccccgcctggcatctgtgctccctgaggtgaagcccaaggtggaggagggtggacgccacccttctccttgccaattcaccattgctacccccaaggtagagcccgcacctgctgccaattcccttggcctggggctaaagccaggacagagcatgatgggcagccgggatacccggatgggcacagggccattttctagcagtgggcacacagctgagaaggcctcctttggggccacgggagggccaccagctcacctgctgacccccagcccactgagtggcccaggaggatcctccctgctggaaaagtttgagctcgagagtggggctttgaccttgcctggtggacctgcagcatctggggatgagctagacaagatggagagctcactggtagccagcgagttacccctgctcattgaggacctgttggagcatgagaagaaggagctgcagaagaagcagcagctttcagcacagttgcagcctgcccagcagcagcagcaacagcagcagcagcattccctactgcctgcaccaggccctgcccaggccatgtctttgccacatgagggctcttctcccagtttggctgggtcccaacagcagctttccctgggtcttgcagttgcccgacagccaggtttgccccagccactgatgcccacccagccaccagctcatgccctccagcaacgcctggctccatccatggctatggtgtccaatcaagggcatatgctaagtgggcagcatggagggcaggcaggcttggtaccccagcagagctcacagccagtgctatcacagaagcccatgggcaccatgccaccttccatgtgcatgaagccgcagcaattggcaatgcagcagcagctggcaaacagcttcttcccagatacagacctggacaaatttgctgcagaagatatcattggtcccattgcaaaggccaagatggtggctttgaaaggcatcaagaaagtgatggctcagggcagcattggggtggcacctggtatgaacagacagcaagtgtctctgctagcccagaggctctcggggggacctagcagtgatctgcagaaccatgtggcagctgggagtggccaggagcggagtgctggtgatccctcccagcctcgtcccaacccgcccacttttgctcagggagtgatcaatgaagctgaccagcggcagtatgaggagtggctgttccatacccagcagctcctacagatgcagctgaaggtgctagaggagcagattggtgtacaccgcaagtcccggaaggctctgtgtgccaagcagcgcactgccaaaaaagctggccgtgagttcccagaagctgatgctgagaagctcaagctggttacagagcagcagagcaagatccagaaacaactggatcaggtccggaaacagcagaaggagcacactaatctcatggcagaatatcggaacaagcagcagcaacaacagcagcagcagcagcaacaacagcaacagcactcagctgtgctggctctcagcccttcccagagtccccggctgctcaccaagctccctggtcagctgctccctggccatgggctgcagccaccacaggggcctccgggtgggcaagccggaggtcttcgcctgacccctgggggtatggcactacctggacagcctggtggccccttccttaatacagctctggcccaacagcagcaacagcaacattctggtggggctggatccctggctggcccttcagggggcttcttccctggcaaccttgctcttcgaagcctcggacctgattcaaggcttttacaggaaaggcagctgcagctgcagcagcaacgtatgcagctggcccagaaactgcagcagcagcagcagcagcaacagcagcagcagcaccttctaggacaggtggcaatccagcagcaacagcagcagggtcctggagtacagacaaaccaagctctgggtcccaagccccagggccttatgcctcccagcagccaccaaggcctcctggtccagcagctgtcccctcaaccaccccaggggccccagggcatgctgggccctgcccaggtggctgtgttgcagcagcagcaccctggagctttgggcccccagggccctcacagacaggtgcttatgacccagtcccgggtgctcagttccccccagctggcacagcagggtcagggccttatgggacacaggctggtcacagcccagcagcagcagcagcaacaacagcaccaacagcaagggtccatggcagggctgtcccatcttcagcaaagtctgatgtcacacagtgggcagcccaaactgagcgctcagcccatgggctctttacagcagcttcagcagcagcagcagctgcaacagcaacagcaacttcagcagcagcagcagcagcagctacaacagcaacagcaacttcagcagcaacagcttcaacagcagcaacagcagcagcagcttcaacaacagcagcagcaacagcttcaacagcagcaacagcagctacaacagcaacagcaacaacaacagcagcagtttcaacagcagcagcaacagcagcagatgggccttttaaaccagagtcgaactttactgtcccctcagcaacaacagcagcagcaagtggcacttggccctggcatgccagcaaagcctcttcaacacttttctagccctggagccctgggtccaaccctcctcctgacgggcaaggaacaaaacaccgtagacccagccgtttcttcagaggccactgaggggccctctacacatcagggagggccgttagcaataggaactacccctgagtcaatggccactgaaccaggagaggtaaagccctcactctctggggactcacaactcctgcttgtccaaccccagccccagcctcagcccagctctctgcagctgcagccacctctgaggcttccaggacaacagcagcagcaagttagcctgctccacacagcaggtggaggaagccatgggcagctaggcagtggatcatcttctgaggcctcatctgtgccccacctgctggctcagccctctgtttccttaggggatcagcctgggtccatgacccagaaccttctgggcccccaacagcccatgctagagcggcccatgcaaaataatacagggccacaacctcccaaaccaggacctgtcctccagtctgggcagggtctgcctggggttggaatcatgcctacggtgggtcagcttcgagcacagctccaaggagtcctggccaaaaacccacagctgcggcacttaagtcctcagcagcagcagcagctacaggcactcctcatgcagcggcagctgcagcagagtcaggcagtacgccagaccccaccctaccaggagcctgggacccagacctctcccctccagggcctcctgggctgccaacctcaacttgggggcttccctggaccacagacaggccccctccaggagctaggggcagggcctcgacctcagggcccaccccggctccctgccccaccaggagccttatctacaggaccagtccttggccctgtccatcccacacctccaccatccagccctcaagagccaaagagaccttcacaattaccttcccccagctcccagcttcccactgaggcccagctccctcccacccatccagggacccccaaacctcaggggccaaccttggagccgcctcctgggagggtctcacctgctgctgcccagcttgcagataccttgtttagcaagggtctgggaccttgggatcccccagacaacctagcagaaacccagaagccagagcagagcagcctggtacctgggcatctggaccaggtgaatggacaggtggtgcctgaggcatcccaactcagcatcaagcaggaacctcgggaagagccatgtgccctgggagcccagtcagtgaagagggaggccaatggggagccaataggggcaccaggaaccagcaaccacctcctgctggcaggccctcgctcagaagctgggcatctgctcttgcagaagctactccgggcaaagaatgtgcaactcagcactgggcaggggtccgaggggctgcgagctgagatcaacgggcacattgacagcaagctggctgggctggagcagaaactacagggtacccccagcaacaaggaggatgcagcagcaaggaagcctttgacaccgaagcccaagcgggtacagaaggcaagcgacaggttggtgagctcccgaaagaagctgcggaaggaggacggcgtcagggccagcgaggccttgctgaaacagctgaaacaggagctgtccctgctgcccctaacggagcctgctatcaccgccaattttagcctctttgccccctttggcagtggctgcccagtcaatgggcagagccagctgaggggggcctttggaagtggggcgctgcccactggccctgactactattcccagctgcttaccaagaataacctgagtaacccgccgacaccaccctcgtcgctgccccccaccccacccccatcggtgcagcagaagatggtgaatggcgtcaccccatctgaagagctgggggagcaccccaaggatgctgcctctgcccgggatagtgaaagggcactgagggatacttcagaggtgaagagtctagacctgctggctgccttgcctacaccccctcacaatcagactgaggatgtcaggatggagagtgatgaggatagcgattctcctgacagcattgtgccagcttcatcccctgagagcatcttgggggaggaggcccctcgtttccctcatctgggctcaggccggtgggagcaagaggaccgggccctctcccctgtcatccccctcattcctcgggacagcatcccagtcttcccagataccaaaccttatggggcccttggcctggaggtccctggaaagctgcctgtcacaacttgggaaaagggcaaaggaagtgaggtgtcagtcatgctcacagtctctgctgctgcagacaagaacctgaatggcgtgatggtggcagtggcggagctgctgagcatgaagatccccaactcctatgaggtgctgttcccagagagccccgcccggggaggcactgagccaaagaagggggaagctgagggtcctggtgggaaggaaaagggtctggaaggcaagagcccagacactggccctgattggctgaagcagtttgatgcagtgttggctggctataccctgaagaggcaactagacatcttgagcctcctgaaacaggagagccccgccccagagccacccactcagcacaggtatacctacaatgtctccaatctggatgtgcgacagctctcggccccacctcctgaagaaccctccccgcccccttcccccttggcaccttctcctgccagtccccctactgagcccttggttgaacttcccaccgaacccttggctgagccacccgtcccctcacctctgccactggcctcatcccctgaatcagcccgacccaagccccgtgcccggccccctgaagaaggtgaagatacccgtcctcctcgcctcaagaaatggaaaggagtgcgctggaagcggcttcggctgctgctgaccatccagaagggcagtggacggcaggaggatgagcgggaagtggcagagtttatggagcagcttggcacagccttgcgacctgacaaggtaccgcgagacatgcgtcgctgctgtttctgtcatgaggagggtgacggggccactgatgggcctgcccgtctgctgaacctggacctggacctgtgggtgcacctcaactgtgccctttggtccacggaggtgtatgagacccagggcggagcactgatgaatgtggaggttgccctgcaccgaggactgctaaccaagtgctccctgtgccagcgaactggtgccaccagcagctgcaatcgcatgcgttgccccaatgtctaccattttggttgtgccatccgcgccaagtgcatgttcttcaaggacaagaccatgctgtgtccaatgcataagatcaaggggccctgtgagcaagagctgagctcttttgctgtcttccggcgggtctacattgagcgggacgaggtgaagcaaatcgctagcatcattcagcggggagaacggctgcacatgttccgtgtgggggggcttgtgttccacgccatcggacagctgctgcctcaccagatggctgactttcatagtgccactgccctctatcccgtgggctacgaggccacgcgcatctattggagcctccgcaccaacaatcgtcgctgctgctatcgctgttctattggtgagaacaacgggcggccggagtttgtaatcaaagtcatcgagcagggcctggaggacctggtcttcactgacgcctctccccaggccgtgtggaatcgcatcattgagcctgtggctgccatgagaaaagaggctgacatgctgcgactcttccctgagtatctgaagggcgaggagctctttgggctgacggtgcatgccgtgcttcgcatagctgaatcactgcccggggtggagagctgtcaaaactatttattccgctatgggcgccacccccttatggagctgccactcatgatcaaccccactggctgtgcccgatcagagcctaaaatcctcacacactacaaacggccccataccctgaacagcaccagcatgtctaaggcatatcagagcaccttcacaggcgagaccaacaccccctacagcaagcagtttgtgcactccaagtcatctcagtaccggcggctgcgcaccgaatggaagaacaacgtgtacctggctcgctcccgtatccagggcctggggctctatgcagccaaggacctagaaaagcacacaatggttatcgagtacattggcaccatcattcggaacgaggtggccaaccggcgggagaaaatctacgaagagcagaatcgaggcatctacatgttccgaataaacaatgaacatgtgattgatgctacgttgaccggcggccctgccaggtacattaaccattcctgtgcccctaactgtgtggccgaagtcgtgacatttgacaaagaggacaaaatcatcatcatctccagccggcgaatccccaaaggagaggagctaacctatgactatcagtttgattttgaggacgatcagcacgagatcccctgccactgtggagcctggaattgtcggaaatggatgaactaa

SEQ ID NO: 14385 - DNA, 2069 bp, Homo sapiens
ggggtcggtgctggccgagggggcgccggctgccggagtggacatggcggccggccccattagggtggtgttggtccttctaggggtgctcagtgtctgtgcagccagcggccatgggtccgtagcggagagggaggccggcggggaggcggagtgggcggaaccgtgggatggcgcggttttccggccgcccgcggcgctgggcgcagtgggggtgacgcgcagctctgggacgccgcggccagggagggaggaggcgggggacttgccggtactgctgtggtggagcccagggctattcccccacttcccgggagactcggagcgcatcgagtgtgcgcgcggcgcgtgcgtggcgtcccggaaccgccgagcgctgagggactcgcggacgcgcgcgctgctcttctacggcacagacttccgcgcgtcggccgccccgctgccgcgcctggcgcaccagagctgggcgctcctccacgaggagtcgcccctcaacaacttcttgctgagccacggcccgggcatccgcctcttcaatcttacctccaccttcagtcgccactcggattacccgctgtcgctgcagtggctgcccgggaccgcctatctgcgccgcccggtgcctccgcccatggaacgcgcggagtggcgccgccgcggctacgcgccgctgctctatctgcagtcacactgcgacgtgccagcggaccgggaccgctacgtgcgcgagctcatgcgccacatcccggtagactcctacgggaaatgcctgcagaatcgggagctgcctaccgcgcggctacaggacacagccacggccaccaccgaggatccagagctcttggctttcttgtcccgctataagttccacttggccctggaaaatgccatctgtaacgactacatgacagaaaaactgtggcgtcccatgcacctgggcgctgtgcccgtgtaccgcggttctccctctgtgagggactggatgccgaacaatcactccgtcatcctgattgatgattttgagtctcctcagaagctggcagagtttattgactttctggacaagaatgatgaggagtatatgaaatacctggcatacaagcaacctgggggcatcaccaaccaatttcttctggatagtctgaagcatcgggagtggggagtgaatgatcctttgctgcctaactacctcaacggcttcgagtgtttcgtctgtgactacgaactggctcggctggatgccgagaaagcccacgcggcctctcccggggacagccccgtctttgagccccacattgcccagccctcacacatggactgcccagtgcccacacctggctttggcaatgtggaagagattcctgagaatgacagttggaaagagatgtggctgcaagattattggcaaggtctggaccagggggaagctctcactgccatgatccacaacaatgaaacagagcagacgaaattttgggattacctacatgaaatcttcatgaagaggcaacatctctaagtgcccttgcaagagcctttaacttggcggagctaaggagatcttattctaccatgggacataaggagcatccactgcacaaacccttaatgaacactgtcttttcatggattcaaggaattccagttttatctattaagattttatcttaatgatgagtagccaaggtctaacatagggcctctcctcaaggagagatggagggatacaattcttggttcagtgggaaacagaaccctaaaacatccatttgattcaaggtgctggtccaacagagtttttaaactactcacttctttatttcatcctttcgactgtacttgattaccagtgaagtaagatgggtcaggttacgacttacaacttttgttctattccccagactcctcattattcagtacatttcccaataatctctttttctcatctcttgctttataaattgttacgttggtggagaagcaaaacatttggtgagttgtattctggttttccggagttggatttttttatattatatactttcatgtcaaaaaaaaaaaaaaaa

SEQ ID NO: 14386 - DNA, 6089 bp, Homo sapiens
aaaagtgaatacatgattttatttaactcattaataaggaaattggtaaggtgttaaaaccaattcaaaggacaatccaaagaacagatcaggaatactaaaataaatatgcaagcggaggtgaaactgttttccttggtagtggtggaggggaaggattgctactccgctggataaagttcatttgtgtatatataaataagaattattttccattgttatttatctataacttataaagttgtaaacaacttccacggaatcagactcaacctggaagggtatggtctctaggcaatgcaaaaattttcccctacacctgttaacaactataatatctccagacagagtagacagaaagtctggatggcaacgggaatctactggtcatacggctaacttcctaattcaataagcacgtgactaaaggattttttccttccactcagatatttcaggctaactagatactgtgtgcttcttagtgtcactgcttagtgggggagccagctctgagtggggtcatatccggacaagcgaatgagctatttattcaatgaccacgcaacactccaaatcctcccagggcaacttgaaagtaaccgcaccttccaaagggcaccgtgcaatcagactgtgtgtttggcctcctgtttgctagtggggaggaagcggcttcatgggtgtacactacgcataaatgaatgtgaaaggctatttagacctctgccttttcaccgtcctcccacctgccacaggctgggctcttgtgctagaaatgacttgctagctagacatcatggttcaggatctgagtcagaggtttaaccatttataagcttttttcttatgaaaaattggcactaattataatgtctaactgtcagagttgttgcaggctttacaggagacgcgggctgtgaagatgctttgtaaattgtgaagcgttattaaagaacacatcttttttttttaggaaaccacggtgcaaatttaattgccggggaagataacgggccttggtgccctccaagcgtcagctgagtttccaagaagccgggcagcgggcgcccgcgggttcgtctctggctcctcctccgccacagcagccgggggcccgggtcggaggcggcgggggccgagcgcccggcctcgcaagcccacggcccgctgggggtgccgtcccgcgccggggcggagcaggccccggcagcccagttcctcattctatcagcggtacaaggggctggtggcgccacaggcgctgggaccgcgggcggacaaggatgggtccgcgcggcgcggcgagcttgccccgaggccccggacctcggcggctgctcctccccgtcgtcctcccgctgctgctgctgctgttgttggcgccgccgggctcgggcgccggggccagccggccgccccacctggtcttcttgctggcagacgacctaggctggaacgacgtcggcttccacggctcccgcatccgcacgccgcacctggacgcgctggcggccggcggggtgctcctggacaactactacacgcagccgctgtgcacgccgtcgcggagccagctgctcactggccgctaccagatccgtacaggtttacagcaccaaataatctggccctgtcagcccagctgtgttcctctggatgaaaaactcctgccccagctcctaaaagaagcaggttatactacccatatggtcggaaaatggcacctgggaatgtaccggaaagaatgccttccaacccgccgaggatttgatacctactttggatatctcctgggtagtgaagattattattcccatgaacgctgtacattaattgacgctctgaatgtcacacgatgtgctcttgattttcgagatggcgaagaagttgcaacaggatataaaaatatgtattcaacaaacatattcaccaaaagggctatagccctcataactaaccatccaccagagaagcctctgtttctctaccttgctctccagtctgtgcatgagccccttcaggtccctgaggaatacttgaagccatatgactttatccaagacaagaacaggcatcactatgcaggaatggtgtcccttatggatgaagcagtaggaaatgtcactgcagctttaaaaagcagtgggctctggaacaacacggtgttcatcttttctacagataacggagggcagactttggcagggggtaataactggccccttcgaggaagaaaatggagcctgtgggaaggaggcgtccgaggggtgggctttgtggcaagccccttgctgaagcagaagggcgtgaagaaccgggagctcatccacatctctgactggctgccaacactcgtgaagctggccaggggacacaccaatggcacaaagcctctggatggcttcgacgtgtggaaaaccatcagtgaaggaagcccatcccccagaattgagctgctgcataatattgacccgaacttcgtggactcttcaccgtgtcccaggaacagcatggctccagcaaaggatgactcttctcttccagaatattcagcctttaacacatctgtccatgctgcaattagacatggaaattggaaactcctcacgggctacccaggctgtggttactggttccctccaccgtctcaatacaatgtttctgagataccctcatcagacccaccaaccaagaccctctggctctttgatattgatcgggaccctgaagaaagacatgacctgtccagagaatatcctcacatcgtcacaaagctcctgtcccgcctacagttctaccataaacactcagtccccgtgtacttccctgcacaggacccccgctgtgatcccaaggccactggggtgtggggcccttggatgtaggatttcagggaggctagaaaacctttcaattggaagttggacctcaggccttttctcacgactcttgtctcatttgttatcccaacctgggttcacttggcccttctcttgctcttaaaccacaccgaggtgtctaatttcaacccctaatgcatttaagaagctgataaaatctgcaacactcctgctgttggctggagcatgtgtctagaggtgggggtggctgggtttatccccctttcctaagccttgggacagctgggaacttaacttgaaataggaagttctcactgaatcctggaggctggaacagctggctcttttagactcacaagtcagacgttcgattcccctctgccaatagccagttttattggagtgaatcacatttcttacgcaaatgaagggagcagacagtgattaatggttctgttggccaaggcttctccctgtcggtgaaggatcatgttcaggcactccaagtgaaccacccctcttggttcaccccttactcacttatctcatcacagagcataaggcccattttgttgttcaggtcaacagcaaaatgcctgcaccatgactgtggcttttaaaataaagaaatgtgtttttatcgtaatttatttccccccagccattgctcactctgtctagacttcctgccacttccaattcttctgtggcttttcctgcctttccttttgacctcagtagtcctatccctgggaaggccactttgcttctctacctgagcacccctgatttctggaacgctgctgagccctgccttacttttgcccctagggctgaagctagaggcctccccgtaataggcggtggagttgctctgtgaggatgttcatggtagacactaagagggctgggtgggagatgcttggctctgtggcatctgttcagcgaggcttttcctatattgcatggagttagtcattgtgattgtagctttatttcataatatattaagacttgcactgctatttactagcagtgagaagaaacctcaggaaaggatatgaaaaagcaagtggccagtgtctgggatactgggccttggtaaagcagaggagggcacacccacagtcctcttattctctgttttactgcttgttttgaggttctggggtctggcaaagaggatgcagtttgacacctgcagccctttctcaatcccactaatgtcttactaatgtggaacagtccatattagctccagagagtgtcaaacccagagaaatgtgtgcaaaaatgatactcttttctgcattagccccaccattgtgttcaccaatgcttggaacactgcctgaaggcactcattttttaatttttattttatttttaattttttatatctttatgagacgatctcactctgtcaccaggttggagtacagtggtacaatcacaactcaccgtagcctcaaactcctgggctcaagtgattctcccacctcaggcacccaaatagctggaactacaggcatataccgccacacccagctaattttattttttgaaaagacaaggttccctatgttgcccagctggtcttaaactcctgggctccagcaattatcccagcttgggctccaaaagtgctgggattacaggcatgagtcaccatgcctggcctcattttttaaaacaaatgaataaatggacaaatgagtaaatgagaaagtctcacaccatgaaagatgctagtccaatgagctgaatacagaggtaatataaatgtcttccagctgttgcttttctgttctcaagctgcccctcctggggtaggagcataatctacatcactgggcagtcacaggacactctatagcaaggttgtagcgtcctctccagtggggggagaaaaggaactgtgcctaccaaaggtactctcttgtcagcaatttccatttctatactttatgggacactagaaactaaaagcaacaaataatctgatataagtccttgtatagtcatccttcaattcagtagcaatattttctggtcactactaacctgtattgtattaaaatgagactattggaaggaaatggtgctaaaactaataacatctcttaccaacctttacccaactcctgggttggcaaacagctgaccaaactgccatcacctcccacttggaagtgtatggccgacagcatgaaatagctgagcccagatgttccttctgcatcctccgaatcccagggctgggtgtaggtagccgttggaggccatcgctacagggcacctatctgttatcgctgctgtcctcccaacagctgtctccagttctagttccttggttttcaggcacagtgggggatgttctgcacccagtggacttcaaaagagttttgaagacttaattttttgtaaaacaagtacttgagattttggtttatccataatagaatgtatttcattagattctctgattctatataagaatgtgaaaagattgatatattgttgttagaaataatgttatttctttccaattttttttttttttttttttgagatggagtctcgctctgtcacccaggctggagtgcagtggtgtgatctcggctcactgcagcctctaactcccaggttcaagctattctcctgcctcagcctcccaagtagctggattacaggcatacaccaccacgcctggctatgttttgtatttttcgtagagatagggtttcaccatgttggccaggctggtctcaaactcctgacctcaagtgatccacccacttcagcttcccaaagcactgggattacaggtgtgagccactgtgcccggcaaatttttttacctttacagaaggttttgcttatttaattgtgagctcatttttctttgttacttttgtccccccagatttgggggacaaaataaaattaatcttttaaaatgtgtcagccatatgtatggggcttccatttggggtgatgagaaagttctggaactagatagtggtcatggttatacaacatcataaatgcaattactgccactgaattgtatgttttaaagtggttaaaatgttaagttttatgttttattacaatttttaaatgtgtcaaccaactttatagtacataaattatatctcagtaaagctgttaaataaataaatatagtaaaaattttagaactaaaaaaaaaaaaaaaaaaaa

SEQ ID NO: 14387 - DNA, 1983 bp, Homo sapiens
cttgaaagtaaccgcaccttccaaagggcaccgtgcaatcagactgaaaccacggtgcaaatttaattgccggggaagataacgggccttggtgccctccaagcgtcagctgagtttccaagaagccgggcagcgggcgcccgcgggttcgtctctggctcctcctccgccacagcagccgggggcccgggtcggaggcggcgggggccgagcgcccggcctcgcaagcccacggcccgctgggggtgccgtcccgcgccggggcggagcaggccccggcagcccagttcctcattctatcagcggtacaaggggctggtggcgccacaggcgctgggaccgcgggcggacaaggatgggtccgcgcggcgcggcgagcttgccccgaggccccggacctcggcggctgctcctccccgtcgtcctcccgctgctgctgctgctgttgttggcgccgccgggctcgggcgccggggccagccggccgccccacctggtcttcttgctggcagacgacctaggctggaacgacgtcggcttccacggctcccgcatccgcacgccgcacctggacgcgctggcggccggcggggtgctcctggacaactactacacgcagccgctgtgcacgccgtcgcggagccagctgctcactggccgctaccagatccgtacaggtttacagcaccaaataatctggccctgtcagcccagctgtgttcctctggatgaaaaactcctgccccagctcctaaaagaagcaggttatactacccatatggtcggaaaatggcacctgggaatgtaccggaaagaatgccttccaacccgccgaggatttgatacctactttggatatctcctgggtagtgaagattattattcccatgaacgctgtacattaattgacgctctgaatgtcacacgatgtgctcttgattttcgagatggcgaagaagttgcaacaggatataaaaatatgtattcaacaaacatattcaccaaaagggctatagccctcataactaaccatccaccagagaagcctctgtttctctaccttgctctccagtctgtgcatgagccccttcaggtccctgaggaatacttgaagccatatgactttatccaagacaagaacaggcatcactatgcaggaatggtgtcccttatggatgaagcagtaggaaatgtcactgcagctttaaaaagcagtgggctctggaacaacacggtgttcatcttttctacagataacggagggcagactttggcagggggtaataactggccccttcgaggaagaaaatggagcctgtgggaaggaggcgtccgaggggtgggctttgtggcaagccccttgctgaagcagaagggcgtgaagaaccgggagctcatccacatctctgactggctgccaacactcgtgaagctggccaggggacacaccaatggcacaaagcctctggatggcttcgacgtgtggaaaaccatcagtgaaggaagcccatcccccagaattgagctgctgcataatattgacccgaacttcgtggactcttcaccgtactggcctgagtgctcgctgctgttgtagctaccaccaactttctactgaagatgataacccagggcataagaaatgacttcagacccaaggttctgaaagggcccctcaaggcctcgggtggctcctgcagaagtggcagaagaggcgggaactaggaacctggcatcataggaaaagtgccttctccaagaaagaaggggccccaggaggctgtcttacttagatcaaccataaactaccacagatgggtcatttcttatattatttcaaaatatctttgaagatgagaattcatttgtgtccttcatagaccaaagttctttgtgttaccttttcccaaaagtaaattcctttccctttattcattccttgtggaaataaaatgcaagccctttaaaaaaaaaaaaaaaaaa

SEQ ID NO: 14388 - DNA, 2098 bp, Homo sapiens
cgcggcgcggcatactcagcggcagagacggaagaacagcgctcccgaggccgcgggagcctgcagagaggacagccggcctgcgccgggacatgcggccccaggagctccccaggctcgcgttcccgttgctgctgttgctgttgctgctgctgccgccgccgccgtgccctgcccacagcgccacgcgcttcgaccccacctgggagtccctggacgcccgccagctgcccgcgtggtttgaccaggccaagttcggcatcttcatccactggggagtgttttccgtgcccagcttcggtagcgagtggttctggtggtattggcaaaaggaaaagataccgaagtatgtggaatttatgaaagataattaccctcctagtttcaaatatgaagattttggaccactatttacagcaaaattttttaatgccaaccagtgggcagatatttttcaggcctctggtgccaaatacattgtcttaacttccaaacatcatgaaggctttaccttgtgggggtcagaatattcgtggaactggaatgccatagatgaggggcccaagagggacattgtcaaggaacttgaggtagccattaggaacagaactgacctgcgttttggactgtactattccctttttgaatggtttcatccgctcttccttgaggatgaatccagttcattccataagcggcaatttccagtttctaagacattgccagagctctatgagttagtgaacaactatcagcctgaggttctgtggtcggatggtgacggaggagcaccggatcaatactggaacagcacaggcttcttggcctggttatataatgaaagcccagttcggggcacagtagtcaccaatgatcgttggggagctggtagcatctgtaagcatggtggcttctatacctgcagtgatcgttataacccaggacatcttttgccacataaatgggaaaactgcatgacaatagacaaactgtcctggggctataggagggaagctggaatctctgactatcttacaattgaagaattggtgaagcaacttgtagagacagtttcatgtggaggaaatcttttgatgaatattgggcccacactagatggcaccatttctgtagtttttgaggagcgactgaggcaaatggggtcctggctaaaagtcaatggagaagctatttatgaaacccatacctggcgatcccagaatgacactgtcaccccagatgtgtggtacacatccaagcctaaagaaaaattagtctatgccatttttcttaaatggcccacatcaggacagctgttccttggccatcccaaagctattctgggggcaacagaggtgaaactactgggccatggacagccacttaactggatttctttggagcaaaatggcattatggtagaactgccacagctaaccattcatcagatgccgtgtaaatggggctgggctctagccctgactaatgtgatctaaagtgcagcagagtggctgatgctgcaagttatgtctaaggctaggaactatcaggtgtctataattgtagcacatggagaaagcaaatgtaaaactggataagaaaattattttggcagttcagccctttccctttttcccactaaattttttcttaaattacccatgtaaccattttaactctccagtgcactttgccattaaagtctcttcacattgatttgtttccatgtgtgactcagaggtgagaattttttcacattatagtagcaaggaattggtggtattatggaccgaactgaaaattttatgttgaagccatatcccccatgattatatagttatgcatcacttaatatggggatattttctgggaaatgcattgctagtcaatttttttttgtgccaacatcatagagtgtatttacaaaatcctagatggcatagcctactacacacctaatgtgtatggtatagactgttgctcctaggctacagacatatacagcatgttactgaatactgtaggcaatagtaacagtggtatttgtatatcgaaacatatggaaacatagagaaggtacagtaaaaatactgtaaaa

SEQ ID NO: 14389 - DNA, 3935 bp, Homo sapiens
cccacgcgtccgggctagggcgccggagccgcacgcagccgcggggctccgagaggcgcgcactggggctgggactgcgcggcgccgccgctgcgagcgccactgagcggtcgcgcaacttcggaggcacagcgccggagccaggcgagcgctcagagacccggagccagaggggcgcgccggagcctcgttcgagagccggcgccaggcacccaccgcgctccgagtgccaggcggccctccgcgcagcgtggcttccgctgcccccacggaaggcacgggctggcgctgccgggcgccggggaggacggcgaggaggaggcggcggcggcggagacggcggcggcgagactggggccagggagacagccctgggggagaggcgcccgaaccaggccgcgggagcatgggggcccggagcggagctcggggcgcgctgctgctggcactgctgctctgctgggacccgaggctgagccaagcaggcactgattctggcagcgaggtgctccctgactccttcccgtcagcgccagcagagccgctgccctacttcctgcaggagccacaggacgcctacattgtgaagaacaagcctgtggagctccgctgccgcgccttccccgccacacagatctacttcaagtgcaacggcgagtgggtcagccagaacgaccacgtcacacaggaaggcctggatgaggccaccggcctgcgggtgcgcgaggtgcagatcgaggtgtcgcggcagcaggtggaggagctctttgggctggaggattactggtgccagtgcgtggcctggagctccgcgggcaccaccaagagtcgccgagcctacgtccgcatcgcctacctgcgcaagaacttcgatcaggagcctctgggcaaggaggtgcccctggaccatgaggttctcctgcagtgccgcccgccggagggggtgcctgtggccgaggtggaatggctcaagaatgaggatgtcatcgaccccacccaggacaccaacttcctgctcaccatcgaccacaacctcatcatccgccaggcccgcctgtcggacactgccaactatacctgcgtggccaagaacatcgtggccaaacgccggagcaccactgccaccgtcatcgtctacgtgaatggcggctggtccagctgggcagagtggtcaccctgctccaaccgctgtggccgaggctggcagaagcgcacccggacctgcaccaaccccgctccactcaacggaggggccttctgcgagggccaggcattccagaagaccgcctgcaccaccatctgcccagtcgatggggcgtggacggagtggagcaagtggtcagcctgcagcactgagtgtgcccactggcgtagccgcgagtgcatggcgcccccaccccagaacggaggccgtgactgcagcgggacgctgctcgactctaagaactgcacagatgggctgtgcatgcaaaataagaaaactctaagcgaccccaacagccacctgctggaggcctcaggggatgcggcgctgtatgcggggctcgtggtggccatcttcgtggtcgtggcaatcctcatggcggtgggggtggtggtgtaccgccgcaactgccgtgacttcgacacagacatcactgactcatctgctgccctgactggtggtttccaccccgtcaactttaagacggcaaggcccagcaacccgcagctcctacacccctctgtgcctcctgacctgacagccagcgccggcatctaccgcggacccgtgtatgccctgcaggactccaccgacaaaatccccatgaccaactctcctctgctggaccccttacccagccttaaggtcaaggtctacagctccagcaccacgggctctgggccaggcctggcagacggggctgacctgctgggggtcttgccgcctggcacataccctagcgatttcgcccgggacacccacttcctgcacctgcgcagcgccagcctcggttcccagcagctcttgggcctgccccgagacccagggagcagcgtcagcggcacctttggctgcctgggtgggaggctcagcatccccggcacaggggtcagcttgctggtgcccaatggagccattccccagggcaagttctacgagatgtatctactcatcaacaaggcagaaagtaccctcccgctttcagaagggacccagacagtattgagcccctcggtgacctgtggacccacaggcctcctgctgtgccgccccgtcatcctcaccatgccccactgtgccgaagtcagtgcccgtgactggatctttcagctcaagacccaggcccaccagggccactgggaggaggtggtgaccctggatgaggagaccctgaacacaccctgctactgccagctggagcccagggcctgtcacatcctgctggaccagctgggcacctacgtgttcacgggcgagtcctattcccgctcagcagtcaagcggctccagctggccgtcttcgcccccgccctctgcacctccctggagtacagcctccgggtctactgcctggaggacacgcctgtagcactgaaggaggtgctggagctggagcggactctgggcggatacttggtggaggagccgaaaccgctaatgttcaaggacagttaccacaacctgcgcctctccctccatgacctcccccatgcccattggaggagcaagctgctggccaaataccaggagatccccttctatcacatttggagtggcagccagaaggccctccactgcactttcaccctggagaggcacagcttggcctccacagagctcacctgcaagatctgcgtgcggcaagtggaaggggagggccagatattccagctgcataccactctggcagagacacctgctggctccctggacactctctgctctgcccctggcagcactgtcaccacccagctgggaccttatgccttcaagatcccactgtccatccgccagaagatatgcaacagcctagatgcccccaactcacggggcaatgactggcggatgttagcacagaagctctctatggaccggtacctgaattactttgccaccaaagcgagccccacgggtgtgatcctggacctctgggaagctctgcagcaggacgatggggacctcaacagcctggcgagtgccttggaggagatgggcaagagtgagatgctggtggctgtggccaccgacggggactgctgagcctcctgggacagcgggctggcagggactggcaggaggcaggtgcagggaggcctggggcagcctcctgatggggatgtttggcctctgcttcctcccagttcacagccagagttgcctctcctcctcctcttccccaacccccagaccatgaccagccttagaaaatccatgtactctgttgttagagggcccagagttccttctccacccccgctctctctctcttggcctgagatctctgtgcaggaaccaagatggggctgaagcctctggaggcagttggttgggggcgggcaggcaggaggccctccctccacccccccaccctcagcccggcaacttctgggttccatgggttttagttccgttctcgttttcttcctccgttattgatttctcctttctccctaagcccccttctgcttccacgcccttttcctctttgaagagtcaagtacaattcagacaaactgctttctcctgtccaaaagcaaaaaggcaaaggaaagaaagaaagcttcagaccgctagtaaggctcaaagaagaagaaaaacaccaaaaccacaagggaaaagaaaaacccagtttcttaggaaacgcaaacgatttattatccagattatttggataagtcctttttaagaaaaaaaaaagaaaatgaaaaacaacacaaaaaaaaaaaaaaaa

SEQ ID NO: 14390 - DNA, 3646 bp, Homo sapiens
ctgcctttggagaaagtggagtgtggcgcttggttgtcgttatttcttcggactgcttcgcggtgcacggattcagcttctgcccagtggggctttcagctgtttgcgcgtctctctgtccccctcccctccccccggcacacctctgtctacgatgaggaaaggtctgcgggcgacagcggcccgctgcggactgggactgggatacttgctgcaaatgctcgtgctacctgccctggccctgctcagcgccagcggcactggctccgccgcccaagatgatgacttttttcatgaactcccagaaacttttccttctgatccacctgagcctctgccacatttccttattgagcctgaagaagcttatattgtgaagaataagcctgtgaacctgtactgtaaagcaagccctgccacccagatctatttcaagtgtaatagtgaatgggttcatcagaaggaccacatagtagatgaaagagtagatgaaacttccggtctcattgtccgggaagtgagcattgagatttcgcgccagcaagtggaagaactctttggacctgaagattactggtgccagtgtgtggcctggagctccgcgggtaccacaaagagccggaaggcgtatgtgcgcattgcatatctacggaagacatttgagcaggaacccctaggaaaggaagtgtctttggaacaggaagtcttactccagtgtcgaccacctgaagggatcccagtggctgaggtggaatggttgaaaaatgaagacataattgatcccgttgaagatcggaatttttatattactattgatcacaacctcatcataaagcaggcccgactctctgatactgcaaattacacctgtgttgccaaaaacattgttgccaagaggaaaagtacaactgccactgtcatagtctatgtcaacggtggctggtccacctggacggagtggtctgtgtgtaacagccgctgtggacgagggtatcagaaacgtacaaggacttgtaccaacccggcaccactcaatgggggtgccttctgtgaagggcagagtgtgcagaaaatagcctgtactacgttatgcccagtggatggcaggtggacgccatggagcaagtggtctacttgtggaactgagtgcacccactggcgcaggagggagtgcacggcgccagcccccaagaatggaggcaaggactgcgacggcctcgtcttgcaatccaagaactgcactgatgggctttgcatgcagactgctcctgattcagatgatgttgctctctatgttgggattgtgatagcagtgatcgtttgcctggcgatctctgtagttgtggccttgtttgtgtatcggaagaatcatcgtgactttgagtcagatattattgactcttcggcactcaatgggggctttcagcctgtgaacatcaaggcagcaagacaagatctgctggctgtacccccagacctcacgtcagctgcagccatgtacagaggacctgtctatgccctgcatgacgtctcagacaaaatcccaatgaccaactctccaattctggatccactgcccaacctgaaaatcaaagtgtacaacacctcaggtgctgtcaccccccaagatgacctctctgagtttacgtccaagctgtcccctcagatgacccagtcgttgttggagaatgaagccctcagcctgaagaaccagagtctagcaaggcagactgatccatcctgtaccgcatttggcagcttcaactcgctgggaggtcaccttattgttcccaattcaggagtcagcttgctgattcccgctggggccattccccaagggagagtctacgaaatgtatgtgactgtacacaggaaagaaactatgaggccacccatggatgactctcagacacttttgacccctgtggtgagctgtgggcccccaggagctctgctcacccgccccgtcgtcctcactatgcatcactgcgcagaccccaataccgaggactggaaaatactgctcaagaaccaggcagcacagggacagtgggaggatgtggtggtggtcggggaggaaaacttcaccaccccctgctacattaagctggatgcagaggcctgccacatcctcacagagaacctcagcacctacgccctggtaggacattccaccaccaaagcggctgcaaagcgcctcaagctggccatctttgggcccctgtgctgctcctcgctggagtacagcatccgagtctactgtctggatgacacccaggatgccctgaaggaaattttacatcttgagagacagacgggaggacagctcctagaagaacctaaggctcttcattttaaaggcagcacccacaacctgcgcctgtcaattcacgatatcgcccattccctctggaagagcaaattgctggctaaatatcaggaaattccattttaccatgtttggagtggatctcaaagaaacctgcactgcaccttcactctggaaagatttagcctgaacacagtggagctggtttgcaaactctgtgtgcggcaggtggaaggagaagggcagatcttccagctcaactgcaccgtgtcagaggaacctactggcatcgatttgccgctgctggatcctgcgaacaccatcaccacggtcacggggcccagtgctttcagcatccctctccctatccggcagaagctctgtagcagcctggatgccccccagacgagaggccatgactggaggatgctggcccataagctgaacctggacaggtacttgaattactttgccaccaaatccagcccaactggcgtaatcctggatctttgggaagcacagaacttcccagatggaaacctgagcatgctggcagctgtcttggaagaaatgggaagacatgaaacggtggtgtccttagcagcagaagggcagtattaaccaccatgctggaaggggaaatgaaggacaaaaatgcacagggagtctgtggccgtccaggtgaatcacagctgaggaggaaatccagatgagaccaatgcacttcacaggcaagaatgcagcaggagccagaaggaaaacagatacaactgcccatgtacatgcccactttactcggagatcatcacgggagttaagaaaaattgtgtaaatttgtaccttgaatttagctatcaacctaattttcctcttagttgggctgtatgctgtgtggtacaggatcttacagtttcctaggaaacgctttttattgctatccagatatatggataaactttcttaacaaacccaatttctacaaatgttgtttacatcaaattggacagggatgcagacactgtccatggctcgttctatttttgttcaaatcatttgaagttgaagctgtggacggtttgttgtgtctatttcagattagtaatttacagagaaatcacagacttttgctacaaatcgtgtgcatcaagtgtctcagataatcctcccatcagtgttctgtttctagaacttgtagaaccagtgttactgtttgtatcagggaagtggagaatctaagtgtaaaaaagaaataactaagactcctattccttggagggacccttctggtgccctttgggaataaagctgtagcactgc

SEQ ID NO: 14391 - DNA, 6314 bp, Homo sapiens
gtcggcgaggagggtccggccggagttgaaggattgaactttccggctcagtcgcggcggctgcctggtcctcagcagtgcagccccggcgcggagcagggagcctcggcccgcgcccggcgccctcgccctcgccctcgacccgcagccatggtgcccggggtgcccggcgcggtcctgaccctctgcctctggctggcggcctccagcggctgcctggcggccggccccggcgcggctgctgcgcggcggctggacgagtcgctgtctgccgggagcgtccagcgcgctccgtgcgcctccaggtgcctgagcctgcagatcactcgcatctccgccttcttccagcacttccagaacaatggttccctggtttggtgccagaatcacaagcaatgttctaagtgcctggagccctgcaaggaatcaggggacctgaggaaacaccagtgccaaagcttttgtgagcctctcttccccaagaagagctacgaatgcttgaccagctgtgagttcctcaaatacatcctgttggtgaagcagggggactgtccggctcctgagaaagccagtggatttgcggccgcctgtgttgaaagctgcgaagttgacaatgagtgctctggggtgaagaaatgttgttcgaatgggtgtggacacacctgtcaagtacccaagactctgtacaaaggtgtccccctgaagcccagaaaagagttacgatttacagaactgcagtctggacagctggaggttaagtggtcctcgaaattcaatatttctattgagcctgtgatctatgtggtacaaagaagatggaattatggaatccatcctagcgaagatgacgccactcactggcagacagtggcccagaccacagacgagcgagttcaactgactgacataagacccagccgatggtaccagtttcgagtggctgctgtgaatgtgcatggaactcgaggcttcactgcccccagcaaacacttccgttcttccaaagatccatctgccccaccagcaccggctaacctccggctggccaactccaccgtcaacagtgatgggagtgtgaccgtcactatagtttgggatctccccgaggagccggacatccctgtgcatcattacaaggtcttttggagctggatggtcagcagtaagtctcttgtcccaacaaagaagaagcggagaaagactacggatgggtttcaaaattctgtgatcctggagaaactccagccagactgtgactatgttgtggaattgcaagccataacgtactggggacagacacggctgaagagtgcaaaggtgtcccttcacttcacatcgacacatgcaaccaacaacaaagaacagcttgtgaaaactagaaaaggtggaattcaaacacaactcccttttcaaagacgacgacccactcgcccgctggaagtcggagctcccttctatcaggatggccaactgcaagttaaagtctactggaagaagacagaagatcccactgtcaaccgatatcatgtgcggtggtttcctgaagcgtgtgcccacaacagaacaaccggatcagaggcatcatctggcatgacccacgaaaattacataattcttcaagatctgtcattttcctgcaagtataaggtgactgtccaaccaatacggccaaaaagtcactccaaggcagaagctgttttcttcactactccaccatgctctgctcttaaggggaagagccacaagcctattggctgcctgggcgaagcaggtcatgttctttctaaggtgctagctaagcctgagaacctttctgcttcattcatcgtccaggatgtgaacatcaccggtcacttttcttggaagatggccaaggccaatctctatcagcccatgactgggtttcaagtgacttgggctgaggtcactacggaaagcagacagaacagcctacccaacagcattatttcacagtcccagattctgccttccgatcattatgtcctaacagtgcccaatctgagaccatctactctttaccgactggaagtgcaagtgctgaccccaggaggggaggggccggccaccatcaagacgttccggacgccggagctcccaccctcttcagcacacagatctcatcttaagcatcgtcatccacatcattacaagccttctccagaaagatactaaactgttcaaaaagattttgtgaaattgcacagatgtgtaagcttgttgaacttcggccacgagacatgcacacttccagaggcagtgggaactgctcagaggcccggactctcctatgtgactttagtgcaggaagaacttctgtcaatcatggacgcatctggagacaagtgagaaacagtagattggtgaagacagacaccagttccctacaagcatggagaaaatgaagaataggcctgtttaatgctaaattttgttttcatgtatggtgtcgctcatttctattgaattacaacagaactcagttttccctgaatttggagcaccaaactccgccccaaaaaggagagtaacaaatacacaattcacacataacactaagcgtaaatctaatcaataaaatatatttttgactaaattattgattcgatatgaaaaatcaactaagattacacagctttgtttttttgaatctttcctaagatcatttttatcctaggtgatttttaaatgaaaatgtgtaatctaaaatataccagcgaatttaaatctaaaaatgctcctactttaagtaccttgtgctgctctttatgcaaaggtaaatcaaagttccctctataaattatgatttacaaaagacacccaagccagaggaactcaatgaaataagctgctaatcagattttaccttggagaaatgaaaattatttcttggggatgccttttaatatttgatcctattatgtgagagattttcctgatatgttatcttatttatattttcccttattttcctcaatgcagataatagcttttggtgcacttttgtttcaccatctgaaaattcacaaaacttcttgcttcaaatgaaaaaatcccaactattgagcatgtttaaatctttgcagagatttgccttttcttaatcaaagaaaggtctttgtgtgctagaatattattggtaatgttttaaaaattcctttgattgatagagaaggacagttatttgcatttaattcacccatatgctttcaaatctagtatatcttactttttggaaatgttttatgctacaaattagtgccttgtagcatgaacttaagtcaaaacgtgttatcaatatagagtgttgcagtgtatattgtaacaacctaaaacgcagagaagtttaatttaatactgttttttttcttgaaggaatactcacatacatggtttgaaatgtgcatagatatgcatgtctatataattataaatgcatgtgtatatatatgcaaatatatgtacatatacatgtatatacacacagacacatgcatatacatgaatataccttgagcatgaatccctggagaaatcgttttcgtaggctcaccaatggtgagtaaagatacagctcttttaaaggtcataaggataatatattttccccatcaatgctgattctgagaaaagagcaatttatcaaaattaaacactgtaaaagaaaggtgtccatatgtctttacctacctaagtaaaacaggaagaaaatcagtaacattatccttaggttttgacaatggtacttgcttcttgttgttttattgtttcctgaattcatgcagatgcctggccattcctgggaagagtggataactcagaagtcactgtactccacagagcctcactgcagtgtctaaaggtagatgcaaattaaaatgcagggaaaataacttttctgatgttgatgcatgtctttgggaaacacatttataaacatggatacctgataatagatattgaaacccatttcctgtgtgttaaaatatttaaaaagtggatattccaggaatgttttgcagctttgtacaagtaacataaattggacacctcagaatgaaagttcatgttggttctgaatggttcactgcagctcctgtcacaagctgggatggatttatcacattgagttatgaaattacctggttctaagaatttttgagtggcaaaaatagaaaacaatcttcatttgaaaacatccctaagcttgaataaatggataccatagatagcttctcttttttattctggtgtcattaccagcatctgaatttcaagttcttaaaatttcaaaaattaaaatttttcattattagctatccatttatcttttacatgaacttgtcatgaacaaattcaaatgtttatgccagcaaatttttgtactgttgcatagttaaaaatgctgggagtctctgcatagatacaaaatattattaaattattacataaatttaattttataaaatttaatcatgcttcttttgtctggtaatagacattggacagatatttttagttcagatggtgattctgaagcttacatctcccttaaaaaaatctaaagcagctcttatgggcttctaattttaatataaataaataatttaaattttattggtgttattggaagaaaaatgctattaatgggctaataaaaaacatgtgtttctcttatggattttaataagctccagtattattcaaatgatcaaaaatatagttataattttttgaattttaaaaatgtgattgctctaataaagaataaaatctatgctttttaacaaacatagttttggtgcctaattctgtaatatgttttattgaaattagattcatttctctaatgtgagaaaaatatatccagtaatagtattgactgtttaaaaaattgagctcatcaaaaatattgtcatcaaatacaggtggttaatctgacatacattgcagttacatgcattatttttatttacaacatttgctccttaatgatgaatttatctgtgttaccctgtttttctacctggaactccatagaatgatgtttgcaaaccaacatgtgctcttttcagtcattcactgttttaatatgacatggtagagaagataaggtttatggcaggtaattttttgtaatgtgtattaaacgaagttcaaagattagaaatacatctgtgtcctgaaaaccttagatacatagccgactgtatacagaggttcatctcaacctcaacactattgacttttggggctggatagttctctgttgtgggggtttgtcttgtgcactgtaggtttttagtagcatccacactttctcctcaccagatgccagttgcaccctcccccaagttgagacaaccaaaaatgtctccagatattgccagctaccccttgagggatggtacctctggttgagaaccattgctagagaatgatctttactgaatttgccctttataagaaacccagtgaatttctagagcaagtcccaaaaactaagggacagctaagaagttattatggttgacttcaaaggcctaaactgtgttttttatgtccactaaacaacttgattaaaagacggaattttgactcgtgtctgtatcatacaagtacaaatactaattttgccctatgtatccgtaaatgtcatttgtgattttgacttatttatttaatgccctttcttatgccgtgggttttcaagtttactcatttctatggttgcaaataactctaaaacttattatataaactttcatattataggcagaacacaatggctaaatatctgttgcatgtactttaaagtttattataaaatataaacagatatataaagatgttgactcttacctgtgattttgcatggtcagactcggtgtcaggtacggagaggattctcatgactgtcttacctctactgaatattctagtgagttatatgatttacggagtgattaacagaggtctatataaagttacttttcccctttacttaattatattgtagtgtgcagataacaaaactgctaccttctcatccaagtggtctgtagaattcatgtcccttacagtggtcatttaaagtcaatatttatttatgtatgtaataaaaaaagttggatttttgtgtatgtctgtcacattatttagagagaagtaatcttgtaaaaatgttttgtaaaaaacaaaaaagtattgtaaatagtcttgatattctgtgactcattattttcatgttagagtttgtacatactggttcaataataaagtatccttaaaccaga

SEQ ID NO: 14392 - DNA, 3699 bp, Homo sapiens
gttctgaatgatgactgacgcgggtttgggtgatacccctcacagcccctgtcattccggagtcataaggcacccgcgcgtctagccccagcgccagggcacgcgagcggcgctggagggaggaaagcttccgcctgcgggccggacaaaagtcccgcctgcccacggctttttgcccgccgctcgtgaccgagacgcctcgccgcggccagctcgctgctctcgctggcggatggtgtgtggccgccgcaggacgcccgccgtgcccgggccatgaagtagcggctgctggcggcgccgctgcccaaccgccagccccagccccgcgctgcgctgcccggtcctctcccggcggggtcgtatcggcgtggacatggctggccgcgtccctagcctgctagttctccttgtttttccaagcagctgtttggctttccgaagcccactttctgtctttaagaggtttaaagaaactaccagaccattttccaatgaatgtcttggtaccaccagacccgtagttcctattgattcatcagattttgcattggatattcgcatgcctggggttacacctaaacagtccgatacatacttctgcatgtctatgcgaataccagtggatgaggaagccttcgtgattgacttcaagcctcgagccagcatggatactgtccatcacatgttactttttggatgcaatatgccttcatccactggaagttactggttttgtgatgaaggaacctgtacagataaagccaatattctgtatgcctgggcgagaaatgctccccctacccggctccccaaaggtgttggattcagagttggaggagagactggaagtaaatactttgtactacaggtacactatggggatattagtgcttttagagataataacaaggactgttctggtgtgtccttacacctcacacgtctgccacagcctttaattgctggcatgtaccttatgatgtctgttgacactgttatcccagcaggagaaaaagtggtgaattctgacatttcatgccattataaaaattatccaatgcatgtctttgcctatagagttcacactcaccatttaggtaaggtagtaagtggatacagagtaagaaatggacagtggacactgattggacggcagagccctcagctgccacaggctttctaccctgtggggcatccagttgatgtaagttttggtgacctactggctgcaagatgtgtattcactggtgaaggaaggacagaagccacacacattggtggcacgtctagtgatgaaatgtgcaacttatacattatgtattacatggaagccaagcatgcagtttctttcatgacctgtacccagaatgtagctccagatatgttcagaaccataccaccagaggccaacattccaattcccgtgaagtctgatatggttatgatgcatgaacatcataaagaaacagaatataaagataagattcctttactacagcagccaaaacgagaagaagaagaagtgttagaccagggtgatttctattcactactttccaagctgctaggagaaagggaagatgttgttcatgtgcacaaatataatcctacagaaaaggcagaatcagagtcagacctggtagctgagattgcaaatgtagtccaaaaaaaggatcttggtcgatctgatgccagagagggtgcagaacatgagaggggtaatgctattcttgtcagagacagaattcacaaattccacagactagtatctaccttgaggccaccagagagcagagttttctcattacagcagcccccacctggtgaaggcacctgggaaccagaacacacaggagatttccacatggaagaggcactggattggcctggagtatacttgttaccaggccaggtttctggggtggctctagaccctaagaataacctggtgattttccacagaggtgaccatgtctgggatggaaactcgtttgacagcaagtttgtttaccagcaaataggactcggaccaattgaagaagacactattcttgtcatagatccaaataatgctgcagtactccagtccagtggaaaaaatctgttttacttgccacatggcttgagtatagataaagatgggaattattgggtcacagacgtggctctccatcaggtgttcaaactggatccaaacaataaagaaggccctgtattaatcctgggaaggagcatgcaaccaggcagtgaccagaatcacttctgtcaacccactgatgtggctgtggatccaggcactggagccatttatgtatcagatggttactgcaacagcaggattgtgcagttttcaccaagtggaaagttcatcacacagtggggagaagagtcttcagggagcagtcctctgccaggccagttcactgttcctcacagcttggctcttgtgcctcttttgggccaattatgtgtggcagaccgggaaaatggtcggatccagtgttttaaaactgacaccaaagaatttgtgagagagattaagcattcatcatttggaagaaatgtatttgcaatttcatatataccaggcttgctctttgcagtgaatgggaagcctcattttggggaccaagaacctgtacaaggatttgtgatgaacttttccaatggggaaattatagacatcttcaagccagtgcgcaagcactttgatatgcctcatgatattgttgcatctgaagatgggactgtgtacattggagatgctcataccaacaccgtgtggaagttcaccttgactgagaaattggaacatcgatcagttaaaaaggctggcattgaggtccaggaaatcaaaggaaagggaagtggaggcttaaaccttggtaatttctttgcaagccgtaagggctacagtcgaaaagggtttgaccggcttagcactgagggcagtgaccaagagaaagaggatgatggaagtgaatcagaagaggagtattcagcacctctgcctgcgctcgcaccttcctcctcctgaaaaccaagctttgatttagattgagtaagatttacccagaatgtcagattcctttccctttagcacgtttaaagttctgtgtatttaattgtaaactgtactagtctgtgtgggactgtacacactttatttacttcgttttggttaagttggcttctgtttctagttgaggagtttcctaaaagttcataacagtgccattgtctttatatgaacatagactagagaaaccgtcctctttttccatcataattctaatctaacaatggaagatttgcccatttacacttttgagactttttggtggatgtaaataaccccattctttgcttgaacacagtattttcccaatagcactttcattgccagtgtctttctttggtgcctttcctgttcagcattcttagcctgtggcagtaaagagaaactttgtgctacatgacgacaaagctgctaaatctcctatttttttaaaatcactaacattatattgcaatgaaggaaataaaaaagtctctatttaaattcttttttaaattttcttcagttggtgtgtttttgggatgtcttatttttagatggttacactgttagaacactattttcagaatctgaatgtaatttgtgtaataaagtgttttcagagcaaaaaaaaaaaaaaa

SEQ ID NO: 14393 - DNA, 3636 bp, Homo sapiens
gttctgaatgatgactgacgcgggtttgggtgatacccctcacagcccctgtcattccggagtcataaggcacccgcgcgtctagccccagcgccagggcacgcgagcggcgctggagggaggaaagcttccgcctgcgggccggacaaaagtcccgcctgcccacggctttttgcccgccgctcgtgaccgagacgcctcgccgcggccagctcgctgctctcgctggcggatggtgtgtggccgccgcaggacgcccgccgtgcccgggccatgaagtagcggctgctggcggcgccgctgcccaaccgccagccccagccccgcgctgcgctgcccggtcctctcccggcggggtcgtatcggcgtggacatggctggccgcgtccctagcctgctagttctccttgtttttccaagcagctgtttggctttccgaagcccactttctgtctttaagaggtttaaagaaactaccagaccattttccaatgaatgtcttggtaccaccagacccgtagttcctattgattcatcagattttgcattggatattcgcatgcctggggttacacctaaacagtccgatacatacttctgcatgtctatgcgaataccagtggatgaggaagccttcgtgattgacttcaagcctcgagccagcatggatactgtccatcacatgttactttttggatgcaatatgccttcatccactggaagttactggttttgtgatgaaggaacctgtacagataaagccaatattctgtatgcctgggcgagaaatgctccccctacccggctccccaaaggtgttggattcagagttggaggagagactggaagtaaatactttgtactacaggtacactatggggatattagtgcttttagagataataacaaggactgttctggtgtgtccttacacctcacacgtctgccacagcctttaattgctggcatgtaccttatgatgtctgttgacactgttatcccagcaggagaaaaagtggtgaattctgacatttcatgccattataaaaattatccaatgcatgtctttgcctatagagttcacactcaccatttaggtaaggtagtaagtggatacagagtaagaaatggacagtggacactgattggacggcagagccctcagctgccacaggctttctaccctgtggggcatccagttgatgtaagttttggtgacctactggctgcaagatgtgtattcactggtgaaggaaggacagaagccacacacattggtggcacgtctagtgatgaaatgtgcaacttatacattatgtattacatggaagccaagcatgcagtttctttcatgacctgtacccagaatgtagctccagatatgttcagaaccataccaccagaggccaacattccaattcccgtgaagtctgatatggttatgatgcatgaacatcataaagaaacagaatataaagataagattcctttactacagcagccaaaacgagaagaagaagaagtgttagaccaggatttccacatggaagaggcactggattggcctggagtatacttgttaccaggccaggtttctggggtggctctagaccctaagaataacctggtgattttccacagaggtgaccatgtctgggatggaaactcgtttgacagcaagtttgtttaccagcaaataggactcggaccaattgaagaagacactattcttgtcatagatccaaataatgctgcagtactccagtccagtggaaaaaatctgttttacttgccacatggcttgagtatagataaagatgggaattattgggtcacagacgtggctctccatcaggtgttcaaactggatccaaacaataaagaaggccctgtattaatcctgggaaggagcatgcaaccaggcagtgaccagaatcacttctgtcaacccactgatgtggctgtggatccaggcactggagccatttatgtatcagatggttactgcaacagcaggattgtgcagttttcaccaagtggaaagttcatcacacagtggggagaagagtcttcagggagcagtcctctgccaggccagttcactgttcctcacagcttggctcttgtgcctcttttgggccaattatgtgtggcagaccgggaaaatggtcggatccagtgttttaaaactgacaccaaagaatttgtgagagagattaagcattcatcatttggaagaaatgtatttgcaatttcatatataccaggcttgctctttgcagtgaatgggaagcctcattttggggaccaagaacctgtacaaggatttgtgatgaacttttccaatggggaaattatagacatcttcaagccagtgcgcaagcactttgatatgcctcatgatattgttgcatctgaagatgggactgtgtacattggagatgctcataccaacaccgtgtggaagttcaccttgactgagaaattggaacatcgatcagttaaaaaggctggcattgaggtccaggaaatcaaagaagccgaggcagttgttgaaaccaaaatggagaacaaacccacctcctcagaattgcagaagatgcaagagaaacagaaactgatcaaagagccaggctcgggagtgcctgttgttctcattacaacccttctggttattccggtggttgtcctgctggccattgccatatttattcggtggaaaaaatcaagggcctttggagattctgaacacaaactcgagacgagttcaggaagagtactgggaagatttagaggaaagggaagtggaggcttaaaccttggtaatttctttgcaagccgtaagggctacagtcgaaaagggtttgaccggcttagcactgagggcagtgaccaagagaaagaggatgatggaagtgaatcagaagaggagtattcagcacctctgcctgcgctcgcaccttcctcctcctgaaaaccaagctttgatttagattgagtaagatttacccagaatgtcagattcctttccctttagcacgtttaaagttctgtgtatttaattgtaaactgtactagtctgtgtgggactgtacacactttatttacttcgttttggttaagttggcttctgtttctagttgaggagtttcctaaaagttcataacagtgccattgtctttatatgaacatagactagagaaaccgtcctctttttccatcataattctaatctaacaatggaagatttgcccatttacacttttgagactttttggtggatgtaaataaccccattctttgcttgaacacagtattttcccaatagcactttcattgccagtgtctttctttggtgcctttcctgttcagcattcttagcctgtggcagtaaagagaaactttgtgctacatgacgacaaagctgctaaatctcctatttttttaaaatcactaacattatattgcaatgaaggaaataaaaaagtctctatttaaattcttttttaaattttcttcagttggtgtgtttttgggatgtcttatttttagatggttacactgttagaacactattttcagaatctgaatgtaatttgtgtaataaagtgttttcagagcaaaaaaaaaaaaaaa

SEQ ID NO: 14394 - DNA, 3960 bp, Homo sapiens
gttctgaatgatgactgacgcgggtttgggtgatacccctcacagcccctgtcattccggagtcataaggcacccgcgcgtctagccccagcgccagggcacgcgagcggcgctggagggaggaaagcttccgcctgcgggccggacaaaagtcccgcctgcccacggctttttgcccgccgctcgtgaccgagacgcctcgccgcggccagctcgctgctctcgctggcggatggtgtgtggccgccgcaggacgcccgccgtgcccgggccatgaagtagcggctgctggcggcgccgctgcccaaccgccagccccagccccgcgctgcgctgcccggtcctctcccggcggggtcgtatcggcgtggacatggctggccgcgtccctagcctgctagttctccttgtttttccaagcagctgtttggctttccgaagcccactttctgtctttaagaggtttaaagaaactaccagaccattttccaatgaatgtcttggtaccaccagacccgtagttcctattgattcatcagattttgcattggatattcgcatgcctggggttacacctaaacagtccgatacatacttctgcatgtctatgcgaataccagtggatgaggaagccttcgtgattgacttcaagcctcgagccagcatggatactgtccatcacatgttactttttggatgcaatatgccttcatccactggaagttactggttttgtgatgaaggaacctgtacagataaagccaatattctgtatgcctgggcgagaaatgctccccctacccggctccccaaaggtgttggattcagagttggaggagagactggaagtaaatactttgtactacaggtacactatggggatattagtgcttttagagataataacaaggactgttctggtgtgtccttacacctcacacgtctgccacagcctttaattgctggcatgtaccttatgatgtctgttgacactgttatcccagcaggagaaaaagtggtgaattctgacatttcatgccattataaaaattatccaatgcatgtctttgcctatagagttcacactcaccatttaggtaaggtagtaagtggatacagagtaagaaatggacagtggacactgattggacggcagagccctcagctgccacaggctttctaccctgtggggcatccagttgatgtaagttttggtgacctactggctgcaagatgtgtattcactggtgaaggaaggacagaagccacacacattggtggcacgtctagtgatgaaatgtgcaacttatacattatgtattacatggaagccaagcatgcagtttctttcatgacctgtacccagaatgtagctccagatatgttcagaaccataccaccagaggccaacattccaattcccgtgaagtctgatatggttatgatgcatgaacatcataaagaaacagaatataaagataagattcctttactacagcagccaaaacgagaagaagaagaagtgttagaccagggtgatttctattcactactttccaagctgctaggagaaagggaagatgttgttcatgtgcacaaatataatcctacagaaaaggcagaatcagagtcagacctggtagctgagattgcaaatgtagtccaaaaaaaggatcttggtcgatctgatgccagagagggtgcagaacatgagaggggtaatgctattcttgtcagagacagaattcacaaattccacagactagtatctaccttgaggccaccagagagcagagttttctcattacagcagcccccacctggtgaaggcacctgggaaccagaacacacaggagatttccacatggaagaggcactggattggcctggagtatacttgttaccaggccaggtttctggggtggctctagaccctaagaataacctggtgattttccacagaggtgaccatgtctgggatggaaactcgtttgacagcaagtttgtttaccagcaaataggactcggaccaattgaagaagacactattcttgtcatagatccaaataatgctgcagtactccagtccagtggaaaaaatctgttttacttgccacatggcttgagtatagataaagatgggaattattgggtcacagacgtggctctccatcaggtgttcaaactggatccaaacaataaagaaggccctgtattaatcctgggaaggagcatgcaaccaggcagtgaccagaatcacttctgtcaacccactgatgtggctgtggatccaggcactggagccatttatgtatcagatggttactgcaacagcaggattgtgcagttttcaccaagtggaaagttcatcacacagtggggagaagagtcttcagggagcagtcctctgccaggccagttcactgttcctcacagcttggctcttgtgcctcttttgggccaattatgtgtggcagaccgggaaaatggtcggatccagtgttttaaaactgacaccaaagaatttgtgagagagattaagcattcatcatttggaagaaatgtatttgcaatttcatatataccaggcttgctctttgcagtgaatgggaagcctcattttggggaccaagaacctgtacaaggatttgtgatgaacttttccaatggggaaattatagacatcttcaagccagtgcgcaagcactttgatatgcctcatgatattgttgcatctgaagatgggactgtgtacattggagatgctcataccaacaccgtgtggaagttcaccttgactgagaaattggaacatcgatcagttaaaaaggctggcattgaggtccaggaaatcaaagaagccgaggcagttgttgaaaccaaaatggagaacaaacccacctcctcagaattgcagaagatgcaagagaaacagaaactgatcaaagagccaggctcgggagtgcctgttgttctcattacaacccttctggttattccggtggttgtcctgctggccattgccatatttattcggtggaaaaaatcaagggcctttggagcagattctgaacacaaactcgagacgagttcaggaagagtactgggaagatttagaggaaagggaagtggaggcttaaaccttggtaatttctttgcaagccgtaagggctacagtcgaaaagggtttgaccggcttagcactgagggcagtgaccaagagaaagaggatgatggaagtgaatcagaagaggagtattcagcacctctgcctgcgctcgcaccttcctcctcctgaaaaccaagctttgatttagattgagtaagatttacccagaatgtcagattcctttccctttagcacgtttaaagttctgtgtatttaattgtaaactgtactagtctgtgtgggactgtacacactttatttacttcgttttggttaagttggcttctgtttctagttgaggagtttcctaaaagttcataacagtgccattgtctttatatgaacatagactagagaaaccgtcctctttttccatcataattctaatctaacaatggaagatttgcccatttacacttttgagactttttggtggatgtaaataaccccattctttgcttgaacacagtattttcccaatagcactttcattgccagtgtctttctttggtgcctttcctgttcagcattcttagcctgtggcagtaaagagaaactttgtgctacatgacgacaaagctgctaaatctcctatttttttaaaatcactaacattatattgcaatgaaggaaataaaaaagtctctatttaaattcttttttaaattttcttcagttggtgtgtttttgggatgtcttatttttagatggttacactgttagaacactattttcagaatctgaatgtaatttgtgtaataaagtgttttcagagcaaaaaaaaaaaaaaa

SEQ ID NO: 14395 - DNA, 3753 bp, Homo sapiens
gttctgaatgatgactgacgcgggtttgggtgatacccctcacagcccctgtcattccggagtcataaggcacccgcgcgtctagccccagcgccagggcacgcgagcggcgctggagggaggaaagcttccgcctgcgggccggacaaaagtcccgcctgcccacggctttttgcccgccgctcgtgaccgagacgcctcgccgcggccagctcgctgctctcgctggcggatggtgtgtggccgccgcaggacgcccgccgtgcccgggccatgaagtagcggctgctggcggcgccgctgcccaaccgccagccccagccccgcgctgcgctgcccggtcctctcccggcggggtcgtatcggcgtggacatggctggccgcgtccctagcctgctagttctccttgtttttccaagcagctgtttggctttccgaagcccactttctgtctttaagaggtttaaagaaactaccagaccattttccaatgaatgtcttggtaccaccagacccgtagttcctattgattcatcagattttgcattggatattcgcatgcctggggttacacctaaacagtccgatacatacttctgcatgtctatgcgaataccagtggatgaggaagccttcgtgattgacttcaagcctcgagccagcatggatactgtccatcacatgttactttttggatgcaatatgccttcatccactggaagttactggttttgtgatgaaggaacctgtacagataaagccaatattctgtatgcctgggcgagaaatgctccccctacccggctccccaaaggtgttggattcagagttggaggagagactggaagtaaatactttgtactacaggtacactatggggatattagtgcttttagagataataacaaggactgttctggtgtgtccttacacctcacacgtctgccacagcctttaattgctggcatgtaccttatgatgtctgttgacactgttatcccagcaggagaaaaagtggtgaattctgacatttcatgccattataaaaattatccaatgcatgtctttgcctatagagttcacactcaccatttaggtaaggtagtaagtggatacagagtaagaaatggacagtggacactgattggacggcagagccctcagctgccacaggctttctaccctgtggggcatccagttgatgtaagttttggtgacctactggctgcaagatgtgtattcactggtgaaggaaggacagaagccacacacattggtggcacgtctagtgatgaaatgtgcaacttatacattatgtattacatggaagccaagcatgcagtttctttcatgacctgtacccagaatgtagctccagatatgttcagaaccataccaccagaggccaacattccaattcccgtgaagtctgatatggttatgatgcatgaacatcataaagaaacagaatataaagataagattcctttactacagcagccaaaacgagaagaagaagaagtgttagaccagggtgatttctattcactactttccaagctgctaggagaaagggaagatgttgttcatgtgcacaaatataatcctacagaaaaggcagaatcagagtcagacctggtagctgagattgcaaatgtagtccaaaaaaaggatcttggtcgatctgatgccagagagggtgcagaacatgagaggggtaatgctattcttgtcagagacagaattcacaaattccacagactagtatctaccttgaggccaccagagagcagagttttctcattacagcagcccccacctggtgaaggcacctgggaaccagaacacacaggagatttccacatggaagaggcactggattggcctggagtatacttgttaccaggccaggtttctggggtggctctagaccctaagaataacctggtgattttccacagaggtgaccatgtctgggatggaaactcgtttgacagcaagtttgtttaccagcaaataggactcggaccaattgaagaagacactattcttgtcatagatccaaataatgctgcagtactccagtccagtggaaaaaatctgttttacttgccacatggcttgagtatagataaagatgggaattattgggtcacagacgtggctctccatcaggtgttcaaactggatccaaacaataaagaaggccctgtattaatcctgggaaggagcatgcaaccaggcagtgaccagaatcacttctgtcaacccactgatgtggctgtggatccaggcactggagccatttatgtatcagatggttactgcaacagcaggattgtgcagttttcaccaagtggaaagttcatcacacagtggggagaagagtcttcagggagcagtcctctgccaggccagttcactgttcctcacagcttggctcttgtgcctcttttgggccaattatgtgtggcagaccgggaaaatggtcggatccagtgttttaaaactgacaccaaagaatttgtgagagagattaagcattcatcatttggaagaaatgtatttgcaatttcatatataccaggcttgctctttgcagtgaatgggaagcctcattttggggaccaagaacctgtacaaggatttgtgatgaacttttccaatggggaaattatagacatcttcaagccagtgcgcaagcactttgatatgcctcatgatattgttgcatctgaagatgggactgtgtacattggagatgctcataccaacaccgtgtggaagttcaccttgactgagaaattggaacatcgatcagttaaaaaggctggcattgaggtccaggaaatcaaagattctgaacacaaactcgagacgagttcaggaagagtactgggaagatttagaggaaagggaagtggaggcttaaaccttggtaatttctttgcaagccgtaagggctacagtcgaaaagggtttgaccggcttagcactgagggcagtgaccaagagaaagaggatgatggaagtgaatcagaagaggagtattcagcacctctgcctgcgctcgcaccttcctcctcctgaaaaccaagctttgatttagattgagtaagatttacccagaatgtcagattcctttccctttagcacgtttaaagttctgtgtatttaattgtaaactgtactagtctgtgtgggactgtacacactttatttacttcgttttggttaagttggcttctgtttctagttgaggagtttcctaaaagttcataacagtgccattgtctttatatgaacatagactagagaaaccgtcctctttttccatcataattctaatctaacaatggaagatttgcccatttacacttttgagactttttggtggatgtaaataaccccattctttgcttgaacacagtattttcccaatagcactttcattgccagtgtctttctttggtgcctttcctgttcagcattcttagcctgtggcagtaaagagaaactttgtgctacatgacgacaaagctgctaaatctcctatttttttaaaatcactaacattatattgcaatgaaggaaataaaaaagtctctatttaaattcttttttaaattttcttcagttggtgtgtttttgggatgtcttatttttagatggttacactgttagaacactattttcagaatctgaatgtaatttgtgtaataaagtgttttcagagcaaaaaaaaaaaaaaa

SEQ ID NO: 14396 - DNA, 6366 bp, Homo sapiens
acagtgctgttggccaagcctccagcagctgacgggacccagctgtagtgaggttgcagtgattgagtaggattggcctgcttcaaagcagaggtttctcatgggaatatgcttattaaactcccactggtgcagaaaccatgaacagaggatgaacaagtgaagttgcaatctcctccatcacagctcagttccccaacaacaggatcacaagctggagatgcctttaaggaagatgaagatccctttcctcctactgttctttctgtgggaagccgagagccacgcagcatcaaggccgaacatcatcctggtgatggctgacgacctcggcattggagatcctgggtgctatgggaacaaaactatcaggactcccaatatcgaccggttggccagtgggggagtgaaactcactcagcacctggcagcatcaccgctgtgcacaccaagcagggcagccttcatgactggccggtaccctgtccgatcaggaatggcatcttggtcccgcactggagttttcctcttcacagcctcttcgggaggacttcccaccgatgagattacctttgctaagcttctgaaggatcaaggttattcaacagcactgatagggaaatggcaccttgggatgagctgtcacagcaagactgacttctgtcaccaccctttacatcacggcttcaattatttctatgggatctctttgaccaatctgagagactgcaagcccggagagggcagtgtcttcaccacgggcttcaagaggctggtcttcctccccctgcagatcgtcggggtcaccctccttacccttgctgcactcaattgtctggggctactccacgtgcctctaggcgtttttttcagccttctcttcctagcagccctaatcctgacccttttcttgggcttccttcattacttccggcccctgaactgcttcatgatgaggaactacgagatcattcagcagcccatgtcctatgacaatctcacccagaggctaacggtggaggcggcccagttcatacagcggaacactgagactccgttcctgcttgtcttgtcctacctccacgtgcacacagccctgttctccagcaaagactttgctggcaaaagtcaacacggagtctacggggatgctgttgaggaaatggactggagtgtggggcagatcttgaaccttctggatgagctgagattggctaatgataccctcatctacttcacatcggaccagggagcacatgtagaagaagtgtcttccaaaggagaaattcatggcggaagtaatgggatctataaaggaggaaaagcaaacaactgggaaggaggtatccgggttccaggcatccttcgttggcccagggtgatacaggctggccagaagattgatgagcccactagcaacatggacatatttcctacagtagccaagctggctggagctcccttgcctgaggacaggatcattgatggacgtgatctgatgcccctgcttgaaggaaaaagccaacgctccgatcatgagtttctcttccattactgcaacgcctacttaaatgctgtgcgctggcaccctcagaacagcacatccatctggaaggcctttttcttcacccccaacttcaaccccgtgggttccaacggatgctttgccacacacgtgtgcttctgtttcgggagttatgtcacccatcacgacccacctttactctttgatatttccaaagatcccagagagagaaacccactaactccagcatccgagccccggttttatgaaatcctcaaagtcatgcaggaagctgcggacagacacacccagaccctgccagaggtgcccgatcagttttcatggaacaactttctttggaagccctggcttcagctgtgctgtccttccaccggcctgtcttgccagtgtgatagagaaaaacaggataagagactgagccgctagcagcgcctggggaccagacagacgcatgtggcaaagctcaccatcttcactacaaacacgcctgagagtggcactggggaaacataactccatctacaccttggatttggactgattctccattttatcacctgaaggcttgggccagagctcaacagctactcaactggaggggtgagggggataaggtctgtagtatacagacaggaagatggtaggtttatgccttctgtggccagagtcttggactcatggaaatagaatgaatagaggggcattcacaaggcacaccagtgcaagcagatgacaaaaaggtgcagaaggcaatcttaaaacagaaaggtgcaggaggtaccttaactcacccctcagcaaatacctatgtcaacagtataagttaccatttactctataatctgcagtgatgcaataaccagcataataaaaaggcaatcacataaaaaagagtttagtcgtctaaacataagtaactttaaggtgaatgaaagatcttctttaggaataatagatgatggtaagttccactttggttattggaaggcaagtcattattactggtattagttaaaacacatatcaaatgcttgctcttcatcatatatatagttatgcatacatacacacacacacatacagtatattctttcctcaaaagggttaagatgtctaaaatagggacctagaagcttaacactatttaagtaaatacagtagaagctcacaaatagatttctttgcacaatgattttttgcaaaattttacagtaataataatcccaaggcaaatctctcctgaactgctttccattccataatttgtagtataattcttggattccactgttttctttggggaatggaagttctgaattaaaagcccactgtggagatgctgtggttcatggaatctcttccagtgtaattcagaatcattggcctagaaagtctctgatatttggaggggaacaaaaatcactcacaagcaatccatgatctatacacataagcataatttcctttagttctagttagtcatcagagaacagtcatgtatgcaagttttgtgactgagaaatttctgtgcttccaatccacaatgagatgcatgattttgttttcatcccatttcccccaagcccctgtaaatcagggaaaatgcgcaactgatcgcctaggagagggcctcgtagtggcacagctggagatagtttcaaagtctaaaccaccagcccatcctgaggaaagcctcctatggaatgtaaagtgcaatcatttcttcagatataagactttccccaacaatgtgattggattcctttatggcaaaatcgagagaagctgccatccacctgcttatgcatttatctcttttgtggacttgtctgaccaccttctatttgcccagagtttgctcaattccaagacagtgcccatgaatgggacacctgtaatgtaacccacacagcggtttgcagagaatgttagccatgacttgggctttctgaaagttggctataatttctctatccctacccacaaccctgggaagttggagcaagaggggcatactattgggctgggaggatttgacagcatttccccagttgccctttaagttcttctatttcaaacgttaattttgcttctctttctaaaaaaaaaaaaaaaaaagaaagagaagaaagaagtgattcctaccccctacctccagagttgttgaaagctgaaaagcatacaagattcttccttttaacttggatttctcgttccagaaattgtgggataatctgtattcttgctttagaaaacattcttagagagggtactagcttactgatgatgtgttaggattgctactgatgctgtcatgtggaaactatttaaaggcactattataaatttatcctataagatgacaatgtttactcaaagtctaacatattcaatgcaagtaagactttctgaaaacacttgatgatgtggaaatgctgcaggattaaataacttgaagagcctttatagattatatgaatgcctatttgtgtctagaaccagttatttaacctgtaaaatgtcaatagcaaatgaaggatgaagtatatctctagatgcaaatacattgagtttaaaagtgcctcaaaataattgagatcacatttcaggacatttggaaatcaggtcgatttgtggtaactgtagtcatcttaaatttcaaaccatttaccatctgaaagttttgatttgaatgtaaaacaggaaattggaattcctttgtccaggagaaacctcacaaaccttctttaaggcatagttttgttgtttgtttgcttgtttgttgcaggctgtaaggcatggctgcttgtttacaaagcatctcattcatattacctgtggagttgcatatccaaaccttagtgagttttgaagctttaagcaaattcttttaaaaaattcttgtatttctagcattactagatattaaaagttaagcaaatagattaatgacgtatacataggcatcatttcacaaggtcagtaatgctgcaggaaaagcaaaattgcaatctacgtatctatggtactaaggaagtcctgtttttcaaaaatggaagcccacttctcagatttttctgaagggcatacaatgaaaagtgaaggggaaacacacacacacaaaaaaacaagtatttggcttgtcacaggaatctgattgcattaagtgaaaggattatttagaatatgttaatgcaaagctaaaataaaattttccttggcaattaaaaatgctgtgcgctaataccctgctttctatcgtgactcaattcaacaatgtggggaatgtttactacatttccaacttgatgtcaagcaatggggaatacaagttccagttctgcaaagattcgtcaactttcttagctcaagagagaggctgagaaatgcagagaagaataagacataaaatagctccgacctccatgatccgagagtgggaaaaggcccgattattacccataaggcacactctctaaggccttttaaggggcctacaaaaatgttttattttataatcagaagaaaaggaaatgaacattggggattgaaaatcatattggtatttgcaccaacatagtcataaaatagtatgttaatatgtttttactttatatatttatatattaaaatatatttaatatgttttgcctttgtggcccatgaaagtcttactgggccctggggaaggtatcctaccctggtgaagcagctgctttgctctacaaatacctggggcagaaatttgatttgaaaagtattattctctcttctctttgtttcaactggattcctttggaaaaccaaactagtatcagaacaaaccccgaaacagtaagaaattggagtgagaagggcatggtattgggactaggatcggctctcattcgatcgagctattctcttaaaatgacaaaaagtgtccataaagaggctgctggagagtgcgtggccatagggagccgacatgcccgggaggaaaggtgttgattacatggatacttctaaaagctaaagccttgttgccttctctttaatgcctagagaatgggatgtgtgatgcaaatgctcaaaacctcttaaatcatagctgtctgacctctacggacctcacatccatctgaggcttcatggacaaagattctccacttggccaaactttagccaagctcctcaaccttctcccaggcccaatctgggcacttccttgtaaaatctagttttggcaagaagtctattaggtcagtttagcaagaacacctaacccccccatatctgttcaacctcagtatctgatcaggctcctcagcctccaccatcccccaggtgatgtctggtcaactggcctgccttcagctagaatcctgttaggtcggtttagatgaatgctccctgatatttcctcttggtaatcttccatccactgcccctgaccctgttccctgtctataaatccccagttttccatggtgtattcagagctgagtccagtctctctcccctactacaagtccccattgctgtggtccccgtacctgtcatgatggtcctaaataaagtcttactgtgctttaataggtagcattgaaaaatttttttctttgacatcattcatgacaacatgaaacctattgggacagcatgactgtgcagggtctttagagctcagctttctgaggccctgagcattcttggttttccgacatcgtgaacctgttctgtgttgcaagatatcactcaagccagtgttgcttaataccatctctttgtgtaatagatctgaataaagtaattgtaatacaccaaaaaaaaaaaaaaaa

SEQ ID NO: 14397 - DNA, 2550 bp, Homo sapiens
ggttcctcccttcccaggcagagactgataaactcagcacttgccggagtggctcattgttaagacaaagggtgtgcacttcctggccaggaaacctgagcggtgagactcccagctgcctacatcaaggccccaggacatgcagaaccttcctctagaacccgacccaccaccatgaggtcctgcctgtggagatgcaggcacctgagccaaggcgtccagtggtccttgcttctggctgtcctggtcttctttctcttcgccttgccctcttttattaaggagcctcaaacaaagccttccaggcatcaacgcacagagaacattaaagaaaggtctctacagtccctggcaaagcctaagtcccaggcacccacaagggcaaggaggacaaccatctatgcagagccagtgccagagaacaatgccctcaacacacaaacccagcccaaggcccacaccaccggagacagaggaaaggaggccaaccaggcaccgccggaggagcaggacaaggtgccccacacagcacagagggcagcatggaagagcccagaaaaagagaaaaccatggtgaacacactgtcacccagagggcaagatgcagggatggcctctggcaggacagaggcacaatcatggaagagccaggacacaaagacgacccaaggaaatgggggccagaccaggaagctgacggcctccaggacggtgtcagagaagcaccagggcaaagcggcaaccacagccaagacgctcattcccaaaagtcagcacagaatgctggctcccacaggagcagtgtcaacaaggacgagacagaaaggagtgaccacagcagtcatcccacctaaggagaagaaacctcaggccaccccaccccctgcccctttccagagccccacgacgcagagaaaccaaagactgaaggccgccaacttcaaatctgagcctcggtgggattttgaggaaaaatacagcttcgaaataggaggccttcagacgacttgccctgactctgtgaagatcaaagcctccaagtcgctgtggctccagaaactctttctgcccaacctcactctcttcctggactccagacacttcaaccagagtgagtgggaccgcctggaacactttgcaccaccctttggcttcatggagctcaactactccttggtgcagaaggtcgtgacacgcttccctccagtgccccagcagcagctgctcctggccagcctccccgctgggagcctccggtgcatcacctgtgccgtggtgggcaacgggggcatcctgaacaactcccacatgggccaggagatagacagtcacgactacgtgttccgattgagcggagctctcattaaaggctacgaacaggatgtggggactcggacatccttctacggctttaccgccttctccctgacccagtcactccttatattgggcaatcggggtttcaagaacgtgcctcttgggaaggacgtccgctacttgcacttcctggaaggcacccgggactatgagtggctggaagcactgcttatgaatcagacggtgatgtcaaaaaaccttttctggttcaggcacagaccccaggaagcttttcgggaagccctgcacatggacaggtacctgttgctgcacccagactttctccgatacatgaagaacaggtttctgaggtctaagaccctggatggtgcccactggaggatataccgccccaccactggggccctcctgctgctcactgcccttcagctctgtgaccaggtgagtgcttatggcttcatcactgagggccatgagcgcttttctgatcactactatgatacatcatggaagcggctgatcttttacataaaccatgacttcaagctggagagagaagtctggaagcggctacacgatgaagggataatccggctgtaccagcgtcctggtcccggaactgccaaagccaagaactgaccggggccagggctgccatggtctccttgcctgctccaaggcacaggatacagtgggaatcttgagactctttggccatttcccatggctcagactaagctccaagcccttcaggagttccaagggaacacttgaaccatggacaagactctctcaagatggcaaatggctaattgaggttctgaagttcttcagtacattgctgtaggtcctgaggccagggatttttaattaaatggggtgatgggtggccaataccacaattcctgctgaaaaacactcttccagtccaaaagcttcttgatacagaaaaaagagcctggatttacagaaacatatagatctggtttgaattccagatcgagtttacagttgtgaaatcttgaaggtattacttaacttcactacagattgtctagaagacctttctaggagttatctgattctagaagggtctatacttgtccttgtctttaagctatttgacaactctacgtgttgtagaaaactgataataatacaaatgattgttgtccatggaaaggcaaataaattttctacagtgaaaaaaaa

SEQ ID NO: 14398 - DNA, 4681 bp, Homo sapiens
gggggcggaaccggaaccggcagtggcttgggggcgggacctcgcggactgctgtggcggcagctggagcggcggccgcggtggcagaaccgggggcggccgctgcagtctggagccccatagtgcggggccgcggccaggccacaggaagagctcgaggcccgggccgcaccggctgagtgtgcgggcccgcgcggctcggagccgccgccgcccatcgagcccctccgggcgcgggtcggcccgccatggggtccctgttccggagcgagaccatgtgcctggcgcagctcttcctgcagtcgggcacggcctacgagtgcctcagcgccctgggcgagaaaggcctggtccagttccgagacctcaaccagaacgtaagttctttccaaagaaaatttgttggtgaggtgaagaggtgtgaagagctagagcgaatattggtgtatttggtacaggaaattaatagagctgatattccccttcctgaaggagaggccagccctcctgcgccacccctgaaacaggttctagaaatgcaggagcagttgcagaagctcgaggttgaactgagagaagtcactaagaacaaggagaaactgaggaaaaacttgctggaactgatagagtacactcacatgctgagagtgacaaagacctttgtgaaacgcaatgttgagtttgaacccacttatgaagaattcccttccttagagagtgattctttgttggattacagctgtatgcagaggctgggagcaaaactgggatttgtgtctggcctaattaaccaaggaaaagtggaagcatttgaaaaaatgttgtggagagtctgcaaagggtacaccatcgtgtcctatgcagaactggatgaatcccttgaagaccctgaaacaggggaagtcataaaatggtatgtctttttaatatccttttggggagagcagattggccacaaggttaagaagatatgtgattgctaccactgccacgtgtacccctatccaaacacagccgaggagcggagggagatccaggaggggctgaacacccgcatccaggatctctacactgtactgcacaaaaccgaggactatttgaggcaagtgctatgtaaagccgccgagtctgtctacagccgtgtgatccaggtgaagaaaatgaaggccatctatcacatgctgaacatgtgcagctttgacgtgaccaacaagtgcctcattgctgaggtctggtgtcccgaggcggatctgcaggacctgcgccgggcactggaggagggctcgagagagagtggtgctacaatcccctcattcatgaatataatccccacaaaagaaacaccccccactcggatccgcaccaacaaattcaccgagggatttcagaacatcgtggatgcttatggagtcggaagctacagagaagtcaatccagctctctttaccatcatcaccttcccgtttttatttgctgtgatgtttggagacttcggacatggctttgtgatgtttttatttgccctcttgttggtgttaaatgaaaatcatcccagactaaatcagtcacaagagatcatgaggatgttttttaatggccggtacatcctcctgctgatggggctgttctcagtgtacactggcctcatctacaacgactgcttttcaaagtcagtcaacctgttcggctctgggtggaacgtgtcggccatgtacagctccagccacccacccgcagagcataagaagatggtgctttggaatgacagcgtcgttagacacaacagcattttgcagctggatccaagcattcctggagtgttccgaggcccttatccccttggcattgatcctatttggaacttggccacaaatcgcctcacttttctaaactctttcaaaatgaaaatgtccgtgattttaggaatcattcatatgacttttggagtcattctgggaatatttaaccacttgcacttcaggaagaagttcaacatttacctggtttccatcccggaacttctcttcatgctctgtatctttggataccttatatttatgattttctacaagtggctggttttttcagcagaaacctccagagttgctcccagcattctgattgaatttattaacatgtttttattcccagccagtaaaacaagtggcctttacacagggcaggagtatgtccagagagtgctgctggttgtcacagcattgtctgtccctgtcctcttcttgggaaagccactgtttttgttgtggcttcacaatgggcgtagttgcttcggggtgaaccggagtggctacacacttataaggaaagatagtgaggaagaagtttcattgctgggaagccaagatatagaagagggaaatcaccaggtggaagatggatgtagagaaatggcgtgtgaagagtttaattttggagaaatattaatgacccaagtaatccattccatcgagtactgtctgggatgcatctccaacaccgcctcctacctgaggctctgggcgcttagcctggctcacgcacagttgtctgatgtcctgtgggccatgctgatgcgcgtgggcctccgcgttgacaccacctatggcgtcttgctactgctcccggttatcgcgctctttgcagttttgaccattttcatccttctgatcatggaagggctttctgcgtttcttcacgccatacgcctccactgggtagaatttcagaacaaattctacgttggtgcaggcaccaaatttgttcctttctcattcagtctactttcatcaaagttcaataacgacgacagtgtggcatgatcatattgctgtaaccaacaagctttcagatttatggagaatgaccatgttatagactttcacttatgtcagatttatgataggaaaaattccatcttcattactgccttatgacatagccaaataattctgtaagatatacctcttcctcatatgttaaatattttgtaaagtttaccaatttgagatataaaaatttcttttggttttttatgatgagcaaatataagttaatgccaaacgttatgttaaagttattttttcaaatacaggatttggggagagaagccaattttgcatggctagttgaaaatggtattagatacttatttcctttaaactttatttaaaacaaacaacagagttaatctgtcacctgaagttgccagataatattttccaacagctgaagtagggatagttttttaaaaaatttaatgatgggtaatcaaaacattcacatttattctgctggatttaaaaatatgtactttttttttttttttgagatgaagtcttgctgtgtcacgtaggctggagtgcaatggcacgatcgtgtctcattgcaacttccgcctcctggattcaggtgattctcctgtctcagcctcccgagtaactgggattacaggcatgcgccaccgtgaccagctaatttttttgtatttttgtagagatggggtttcaccatgttggccaggctggtctcgaacttctgacctcaagtgatccacctgcctcggcctccctaagtgctgggattacaggcgtgagccaccatgcctggccaaaatatgcaaatattttttatcctgtgctacctagaattacaagtagaggattgtttttacaattttgtcttgttttagtaattggggacaatgggataaaatgacatacaacaaatggttatcccacttgtatatttttttaaagactcttatcctgttacccttacataaaaccagttatgataattgtatgtttggaagataaattgtatgctgagccttaaaacccagtgtgactgtagaagatataatgcggacatgatttgaatttagtgacagcttggctgatgtcactgaaccagaagggtttatactgagtgaaggaaaggtaaaaagtagtattttgtatatttttgtaacaaaatataaatgaagatattttaccatgaagagattgcacttatccttgagaacagtctaaatataaatgaagatattttaccatgaagagattgcacttatccttgagaacagtctaatgatactttttttactttcagactgtttctagctaaagttctgataaaagtattgagttaatttaaactttcaaacactgtttagatcagttgaaaactaattcttaatagccattgttttataatctttagtttaaattcatctgtttgacatttggttttttgtgaacttgagtcagtcctattgaacattttgacctatattcttgcaaattatgttaatttttcatattttagtttgattttagacaattattttcaaaaagaaacctgactttttttcaccttcttgacattgtgagtgatacacgttaaaaggctatttgcccgcatcctcctctatcctgtttcgaggtagagagcttggcacttctgttacaagctgagagtctggaggtgctgagtttaacgtggctgtgcagctgatttcaaggcatgagctgaacagcgttgacacagccgtgacttacaattaaaccctttcaattacagtacagattctgtgtgctacttgatgagatgttacccaaggccagtttggacttactgctttttgtccctcatattaaattatcaaatgatgccgatgaaa

SEQ ID NO: 14399 - DNA, 1040 bp, Homo sapiens
cgacgagccatggttgctgggagcgacgcggggcgggccctgggggtcctcagcgtggtctgcctgctgcactgctttggtttcatcagctgtttttcccaacaaatatatggtgttgtgtatgggaatgtaactttccatgtaccaagcaatgtgcctttaaaagaggtcctatggaaaaaacaaaaggataaagttgcagaactggaaaattctgaattcagagctttctcatcttttaaaaatagggtttatttagacactgtgtcaggtagcctcactatctacaacttaacatcatcagatgaagatgagtatgaaatggaatcgccaaatattactgataccatgaagttctttctttatgtgcttgagtctcttccatctcccacactaacttgtgcattgactaatggaagcattgaagtccaatgcatgataccagagcattacaacagccatcgaggacttataatgtactcatgggattgtcctatggagcaatgtaaacgtaactcaaccagtatatattttaagatggaaaatgatcttccacaaaaaatacagtgtactcttagcaatccattatttaatacaacatcatcaatcattttgacaacctgtatcccaagcagcggtcattcaagacacagatatgcacttatacccataccattagcagtaattacaacatgtattgtgctgtatatgaatggtattctgaaatgtgacagaaaaccagacagaaccaactccaattgattggtaacagaagatgaagacaacagcataactaaattattttaaaaactaaaaagccatctgatttctcatttgagtattacaatttttgaacaactgttggaaatgtaacttgaagcagctgctttaagaagaaatacccactaacaaagaacaagcattagttttggctgtcatcaacttattatatgactaggtgcttgctttttttgtcagtaaattgtttttactgatgatgtagatacttttgtaaataaatgtaaatatgtacacaagtg

SEQ ID NO: 14400 - DNA, 1874 bp, Homo sapiens
gaaatgccttggcagagtctggggtccctggactgagccatcagctgggtcactgagacccatggcaaggaaacaaaataggaattccaaggaactgggcctagttcccctcacagatgacaccagccacgccgggcctccagggccagggagggcactgctggagtgtgaccacctgaggagtggggtgccaggtggaaggagaagaaaggactggtcctgctcgctcctcgtggcctccctcgcgggcgccttcggctcctccttcctctacggctacaacctgtcggtggtgaatgcccccaccccgtacatcaaggccttttacaatgagtcatgggaaagaaggcatggacgtccaatagacccagacactctgactttgctctggtctgtgactgtgtccatattcgccatcggtggacttgtggggacgttaattgtgaagatgattggaaaggttcttgggaggaagcacactttgctggccaataatgggtttgcaatttctgctgcattgctgatggcctgctcgctccaggcaggagcctttgaaatgctcatcgtgggacgcttcatcatgggcatagatggaggcgtcgccctcagtgtgctccccatgtaccttagtgagatctcacccaaggagatccgtggctctctggggcaggtgactgccatctttatctgcattggcgtgttcactgggcagcttctgggcctgcccgagctgctgggaaaggagagtacctggccatacctgtttggagtgattgtggtccctgccgttgtccagctgctgagccttccctttctcccggacagcccacgctacctgctcttggagaagcacaacgaggcaagagctgtgaaagccttccaaacgttcttgggtaaagcagacgtttcccaagaggtagaggaggtcctggctgagagccgcgtgcagaggagcatccgcctggtgtccgtgctggagctgctgagagctccctacgtccgctggcaggtggtcaccgtgattgtcaccatggcctgctaccagctctgtggcctcaatgcaatttggttctataccaacagcatctttggaaaagctgggatccctccggcaaagatcccatacgtcaccttgagtacagggggcatcgagactttggctgccgtcttctctggtttggtcattgagcacctgggacggagacccctcctcattggtggctttgggctcatgggcctcttctttgggaccctcaccatcacgctgaccctgcaggaccacgccccctgggtcccctacctgagtatcgtgggcattctggccatcatcgcctctttctgcagtgggccaggtggcatcccgttcatcttgactggtgagttcttccagcaatctcagcggccggctgccttcatcattgcaggcaccgtcaactggctctccaactttgctgttgggctcctcttcccattcattcagaaaagtctggacacctactgtttcctagtctttgctacaatttgtatcacaggtgctatctacctgtattttgtgctgcctgagaccaaaaacagaacctatgcagaaatcagccaggcattttccaaaaggaacaaagcatacccaccagaagagaaaatcgactcagctgtcactgatggtaagataaatggaaggccttaacaagtttcctcctccacgttggacaattatgtcaaaaacaggattgtctacatggatgatctcacttttcaggaaacttaaaatttacccattattgggaagcttaaatgaattgaagctatgcaagtcttttatattattaaatatttaaaagtaaacctgtactaatctaaaaaaaaaaaaaaaaaaa

SEQ ID NO: 14401 - DNA, 2162 bp, Homo sapiens
gggctgcgctgtccagctgtggctatggccccagccccgagatgaggagggagagaactaggggcccgcaggcctgggaatttccgtcccccaccaagtccggatgctcactccaaagtctcagcaggcccctgagggagggagctgtcagccagggaaaaccgagaacaccatcaccatgacaaccagtcaccagcctcaggacagatacaaagctgtctggcttatcttcttcatgctgggtctgggaacgctgctcccgtggaattttttcatgacggccactcagtatttcacaaaccgcctggacatgtcccagaatgtgtccttggtcactgctgaactgagcaaggacgcccaggcgtcagccgcccctgcagcacccttgcctgagcggaactctctcagtgccatcttcaacaatgtcatgaccctatgtgccatgctgcccctgctgttattcacctacctcaactccttcctgcatcagaggatcccccagtccgtacggatcctgggcagcctggtggccatcctgctggtgtttctgatcactgccatcctggtgaaggtgcagctggatgctctgcccttctttgtcatcaccatgatcaagatcgtgctcattaattcatttggtgccatcctgcagggcagcctgtttggtctggctggccttctgcctgccagctacacggcccccatcatgagtggccagggcctagcaggcttctttgcctccgtggccatgatctgcgctattgccagtggctcggaactatcagaaagtgccttcggctactttatcacagcctgtgctgttatcattttgaccatcatctgttacctgggcctgccccgcctggaattctaccgctactaccagcagctcaagcttgaaggacccggggagcaggagaccaagttggacctcattagcaaaggagaggagccaagagcaggcaaagaggaatctggagtttcagtctccaactctcagcccaccaatgaaagccactctatcaaagccatcctgaaaaatatctcagtcctggctttctctgtctgcttcatcttcactatcaccattgggatgtttccagccgtgactgttgaggtcaagtccagcatcgcaggcagcagcacctgggaacgttacttcattcctgtgtcctgtttcttgactttcaatatctttgactggttgggccggagcctcacagctgtattcatgtggcctgggaaggacagccgctggctgccaagcctggtgctggcccggctggtgtttgtgccactgctgctgctgtgcaacattaagccccgccgctacctgactgtggtcttcgagcacgatgcctggttcatcttcttcatggctgcctttgccttctccaacggctacctcgccagcctctgcatgtgcttcgggcccaagaaagtgaagccagctgaggcagagaccgcaggagccatcatggccttcttcctgtgtctgggtctggcactgggggctgttttctccttcctgttccgggcaattgtgtgacaaaggatggacagaaggactgcctgcctccctccctgtctgcctcctgccccttccttctgccaggggtgatcctgagtggtctggcggttttttcttctaactgacttctgctttccacggcgtgtgctgggcccggatctccaggccctggggagggagcctctggacggacagtggggacattgtgggtttggggctcagagtcgagggacggggtgtagcctcggcatttgcttgagtttctccactcttggctctgactgatccctgcttgtgcaggccagtggaggctcttgggcttggagaacacgtgtgtctctgtgtatgtgtctgtgtgtctgcgtccgtgtctgtcagactgtctgcctgtcctggggtggctaggagctgggtctgaccgttgtatggtttgacctgatatactccattctcccctgcgcctcctcctctgtgttttttccatgtccccctcccaactccccatgcccagtttttacccatcatgcaccctgtacagttgccacgttactgccttttttaaaaatatatttgacagaaaccaggtgccttcagaggctctctgatttaaataaacctttcttgttttttt

SEQ ID NO: 14402 - DNA, 2475 bp, Homo sapiens
acgcctggtctctgggacgcccctccggacccgtttcgcctcgcggagccggtaggtccaggtgcagcggccgcagtgctgcgtccgtgcgccgcgggctggggcggtctcaggtgtgccgaagctctggtcagtgccatgatccggcaggagcgctccacatcctaccaggagctgagtgaggagttggtccaggtggttgagagctcagagctggcagacgagcaggacaaggagacggtcagagtccaaggtccgggtatcttaccaggcctggacagcgagtccgcctccagcagcatccgcttcagcaaggcctgcctgaagaacgtcttctcggtcctactcatcttcatctacctgctgctcatggctgtggccgtcttcctggtctaccggaccatcacagactttcgtgagaaactcaagcaccctgtcatgtctgtgtcttacaaggaagtggatcgctatgatgccccaggtattgccttgtaccccggtcaggcccagttgctcagctgtaagcaccattacgaggtcattcctcctctgacaagccctggccagccgggtgacatgaattgcaccacccagaggatcaactacacggaccccttctccaatcagactgtgaaatctgccctgattgtccaggggccccgggaagtgaaaaagcgggagctggtcttcctccagttccgcctgaacaagagtagtgaggacttcagcgccattgattacctcctcttctcttctttccaggagttcctgcaaagcccaaacagggtaggcttcatgcaggcctgtgagagtgcctgttccagctggaagttctctgggggcttccgcacctgggtcaagatgtcactggtaaagaccaaggaggaggatgggcgggaagcagtggagttccggcaggagacaagtgtggttaactacattgaccagaggccagctgccaaaaaaagtgctcaattgttttttgtggtctttgaatggaaagatcctttcatccagaaagtccaagatatagtcactgccaatccttggaacacaattgctcttctctgtggcgccttcttggcattatttaaagcagcagagtttgccaaactgagtataaaatggatgatcaaaattagaaagagataccttaaaagaagaggtcaggcaacgagccacataagctgaagtcacctcgcgttgtttagagaactgtccacatcaatgggagctgtcatcacttccactttgtaaacggagctatcaacaatcctgtactcacttgaagaaatggggccttgctgggaggaacagcatgtaaaactggaacttctaaccccgtcccaaaagaggcggtgtagagcctaatagaagagactaatggataaacctacaagttatttaaatatttaaattattaataaactttttaaagagctggccaatgacttttgaatagggtttgtagaagatgcctttcttcctgtttggttcattgtattgtattaggttaagctctactagggtaatgaaggctctacttttcactttttaaaagtggacaaaagagtgtgattttctttttccaaaaattcctgagtatcaagacgtgcaggtcatgctttggagcctatgcactgtacacaatggcaaaaccctatgactttggcatcatctgccattgatgtccagcctctgacatgctctttgatttgttaaatgttaaatgagactttaaggctactagaaactagtaattaagtttcttaatggactgagtagccacctacttgtccggctagaatgtttgttgatgtatgagtttagattaacactcaaaagcactaggacagatgtacatagaaggtgcctactcattgtattttgatgatttcattaacaggtaaataaaagttaatacaaaaggaacgagtgtgacaatatgaatatctgctcaatcatcgggcacaattactttcatttggtgacttccaaggacaaaaaggtagtatgagtctggactcccaagatggatctaactctcaaggtatgttctaactgcttccagggaagggtttgttaggcatggcaactgatggcaggtgtccagaaagagtgacctggtgtccccgaggaagctgggttaactctttactgtgtccacaaaactacccatcatatgaggaaggggtatacgcagtgtgaccctcaaaaagcttttagcctagcctttgacagaaatgagtatgcattaaaaaaaagtctatttttcacattaaggttctaaaaattgtttccagagttttaaattatttatgtgcctgttgcttcaaagaggacttggtagcatttcctaaattttgtaatctggcttccgataatccaaagggaataactcaaatgtatgaataggcattttaaatgggaagaaactgttttttggatgaatgattaaaagtgaactgtataaag

SEQ ID NO: 14403 - DNA, 1361 bp, Homo sapiens
tttctgcccgtggacgccgccgaagaagcatcgttaaagtctctcttctccctgccgtcatgtctaagtcagagtctcctaaagagcccaaacagctgaggaagctcttcattggagggttgagctttgaaacaaccaatgagagtctgaggagccattttgagcaatggggaacgctcatggactgtgtggtaatgagagatccaaacaccaagtgctccaggggctttgggtttgtcacatatgccactgtggaggaggtggatgcagctatgaatgcaaggccacacaaggtggatggaagagttgtggaatcaaagagagctgtttcaagagaagattctcaaagaccaggtgcccacttaactgtgaaaaagatatttgttggtggcattaaagaagacaccaaagaacatcacctaagagattattttgaacagtatggaaaaattgaagtgattgaaatcatgactgaccgaggcagtggcaagaaaaggggctttgcctttgtaacctttgacgaccatgactctgtggataagattgtcattcagaaataccatactgtgaatggccacatctgtgaagttaggaaagccctgtcaaagcaagagatggcgagtacttcatccagccaaagaggtcaaagtggttctggaaactttagtggtggtcgtggaggtggtttcagtgggaatgacaactttggtcatggaggaaacttcagtggtcgtggtggctttggtggcagccgtggtgctggtggatatggtggcagtggggatggctataatggatttggtaatgatggaagcaattttggaggtggtggaagctacaatgattttggcaattacaacaatcagtcttcaaattttagacccatgaagggaggaaattttggaggcagaagctctggcccctatggcggtggaggcaatactttgcaaaaccaaggtggctatggcagttccagcagcagcagtagctatggcagtggcagaagattttaattaggaaacaaagcttagcaggagaggagagccagagaagtgacagggaagctacaggttacaagagatttgtgaactcagccaagcacagtggtggcagggcctagctgctacaaagaagacgtgttttagacacatactcatgtgtatgggcaaaaaactcgaggactgtatttgtgactagctgtataacaggttattttaatttctattctgcggaaagtgtaaagcattccaacaaagggttttaatgtagttttttttttgcacccatgctgttgattattaaatgtaatagtctgattgtgacactgaataaatgtcttttttaaaaaaaataaaataaaa

SEQ ID NO: 14404 - DNA, 3346 bp, Homo sapiens
gagtagacagcacagcggcagcggagggagtctatgcgagctggacagcagtgggaggtttgtgaggctcgcactggccgcagaccctcgggctcgatcgcccgggagccaggactcggcgacgcgaggctgccgggctacccggccgaggcttcgggggcgcaaactaatgggactggctcgctcggcagcatctccccgctcttctaagtacactgagcagggcccgcgctgaagtagaagctgtccgggggcgcgtagcccggagtcccagtgtggcccggaggaacggagcccgtgccagggcggcccagtcgggagcccggggaccgagcttgtgctgtggggaaacccccacttcttccaagggacagcgatcccgggacggtcgaggcgtcggggcggtcaccgagacctctgcgggaagaccccgtcggggagagggcgcgcagccccgaagcgtctcgggaagtcgagcggaatcgggcgggatcacccgggggcgcagagcccccgtcgcgcctcgtgcggcagcggagagcccaggagaacgagccctcgggggccgaagcccatgcccgggttgggggcggctgcccagtgagtcctcctggccggccgggcggagaagagcgacaccgaagccggcgggaggggagcacttcaaggccggcggctgcggaggatgggcgcctgagcggctccgagcgcagcgcggcagaggaaggcgaggcgagctttggtgaggaggcgccaagggatcccgaagtgcagtctgcccccgggaagatggctcggcctgggcagcgttggctcggcaagtggcttgtggcgatggtcgtgtgggcgctgtgccggctcgccacaccgctggccaagaacctggagcccgtatcctggagctccctcaaccccaagttcctgagtgggaagggcttggtgatctatccgaaaattggagacaagctggacatcatctgcccccgagcagaagcagggcggccctatgagtactacaagctgtacctggtgcggcctgagcaggcagctgcctgtagcacagttctcgaccccaacgtgttggtcacctgcaataggccagagcaggaaatacgctttaccatcaagttccaggagttcagccccaactacatgggcctggagttcaagaagcaccatgattactacattacctcaacatccaatggaagcctggaggggctggaaaaccgggagggcggtgtgtgccgcacacgcaccatgaagatcatcatgaaggttgggcaagatcccaatgctgtgacgcctgagcagctgactaccagcaggcccagcaaggaggcagacaacactgtcaagatggccacacaggcccctggtagtcggggctccctgggtgactctgatggcaagcatgagactgtgaaccaggaagagaagagtggcccaggtgcaagtgggggcagcagcggggaccctgatggcttcttcaactccaaggtggcattgttcgcggctgtcggtgccggttgcgtcatcttcctgctcatcatcatcttcctgacggtcctactactgaagctacgcaagcggcaccgcaagcacacacagcagcgggcggctgccctctcgctcagtaccctggccagtcccaaggggggcagtggcacagcgggcaccgagcccagcgacatcatcattcccttacggactacagagaacaactactgcccccactatgagaaggtgagtggggactacgggcaccctgtctacatcgtccaagagatgccgccccagagcccggcgaacatctactacaaggtctgagtgcccggcacggcctcaggcccccgagggacagtcggcctggaccggacctctcctttcgcccccacaccccctccccttgccagctgtgcccacctttgtatttagttttgtagtttcttggcttttataatccccctttttccctgccccctgggcttcggaggggggtgcttgtgcccctaacccccatgctcttgtgccttccccctctggccaggcctctgggctccgtgggggcgccccttcttggaaggcagggctggacactgatggacagcaggcagggagacagtcccctggccctgcccctccctcgccccccttgccaccttcccaggactgcttgtccgctatcatcactgtttttaatgcttttgtgttcattttttagctgtcaactcattttcatctgttttttgaagaaaaatggaaaaatgtaaaaggcagcccctccccaggctttgtgagcctggcccaagccagtacaagagggcctggggcacgatgtggtcagccaggaagcataggatgccatttcttttatagattccttggtatttctggtggggtaaggggcaggccagggctgttcacgcccatgagggaagaggaaagtgccactgggcaaggtgtcccaccctcccctcctgaccctcctacgaggcttatcctggcaatggggtagtcactgccacccttccacacacacacacacacacacacacacaaaaaaaaatcccttccttgtgggattcttgggcatctcctgcctccctcactctcacggtaattaatgtcttaattggctgttgcctggggaacaggagagctgctgcaggcagatgacctcatggggggtggagggaggtgaggtgcccaggtggctatttgccctgcagagctgggagtttcacccccaccccccaccctgttctctccttacctttggcatcctttggcctggtggggaaacagaggcccagggtggagacctaagcgggtataagaccaggtggcctgctccttttctgggccctagcacaggtgggtaacccccacccaacccagctcctgctgctgtcccagtcttgggctggggcctggaaagaggaagaggctgcctggggctgggccagcccgctgtgcactttgaccccagttccttgccagcacggctgctaacagactgccacttgagtgcgccttgcaggcactcccagagcagccatggaaggagctggccctcacaccatccacctccacactgcctcctggccagctgcccaccccagtgccaggtgggagagggagcagaacagccagccccttccaggtggcagtcggaagggtttttgtttttgtttctgttgccatttgtgtaaatactagtctttttggaaaaaaaataatgtaaagatgttttgtataaactctgaattattttcttgttgcttttttcttagaaaaaaatgagaactaaaaaaaaaaaattaaccacatggaaaaaaaaaaa

SEQ ID NO: 14405 - DNA, 4410 bp, Homo sapiens
cggacgcgtggggctggcggtggcgctggtggctgcggcggcggcggcggcagcggcgctcgagcggttcctgtcagggtcagccggcgggccccctgggtggtccacctgcaaatcgcggagcggcgccccagggatcgatggcgatgaactataacgcgaaggatgaagtggacggtgggcccccgtgtgctccggggggcaccgcgaagactcggagaccggataacacggccttcaaacagcaacggctgccagcttggcagcccatccttacggctggcacggtgctacctattttcttcatcatcggtctcatcttcattcccatcggcattggcatttttgtcacctccaacaacatccgcgagatcgagattgattataccggaacagagccttccagtccctgtaataaatgtttatctccggatgtgacaccttgcttttgtaccattaacttcacactggaaaagtcatttgagggcaacgtgtttatgtattatggactgtctaatttctatcaaaaccatcgtcgttacgtgaaatctcgagatgatagtcaactaaatggagattctagtgctttgcttaatcccagtaaggaatgtgaaccttatcgaagaaatgaagacaaaccaattgctccttgtggagctattgccaacagcatgtttaatgatacattagaattgtttctcattggcaatgattcttatcctatacctatcgctttgaaaaagaaaggtattgcttggtggacagataaaaatgtgaaattcagaaatccccctggaggagacaacctggaagaacgatttaaaggtacaacaaagcctgtgaactggcttaaaccagtttacatgctggattctgacccagataataatggattcataaatgaggattttattgtttggatgcgtactgcagcattacctacttttcgcaagttgtatcgtcttatagaaaggaaaagtgatttacatccaacattaccagctggccgatactctttgaatgtcacatacaattaccctgtacattattttgatggacgaaaacggatgatcttgagcactatttcatggatgggaggaaaaaatccatttttggggattgcttacatcgctgttggatccatctccttccttctgggagttgtactgctagtaattaatcataaatatagaaacagtagtaatacagctgacattaccatttaattttatattatgaaagcaaatcatctgcatgtgcatcaaggccagtcctattcaacctagctttcgaatgctgatatctggttagtatgtcattttgaagttggcacataacttttctaaaaaaaagcagtctttgttgtttgcttcttccctacggatgacttctaaaaatatatgacgggtataaaaaaattagctatattgatcatatcaacactgtaactgctgaaatggcattctaatgtttgctttttattcggacaggccacatgatgcatagagcctctttcatgtgacttgtgtctactgcttaaatctttatgctgtgttgatgatattatattgacatatgaagctgtatatgtgtatgtattttgtggagaaagggattacaagatgtatgagtataatgacttgctaacctttcaggattcagagaaagatgaagaaagaccatatctaaataatacacttcatcattttcatgtgtataaatgcttaaagtaccatctttgttgaggtggttcatgtatccagtttatccagtacagttatttgtcaagcttagctttgatttcaaaggacacgcttaccttgtctggcataagaattaatgctcatgtctgcagtggttgggtaggtcctgcttaggagaattaaaaaattcctctttccgtttggttgaatgttgcagtcaggaaccccaactcacttggaatgtttttatatgtaatcatttcccttgaagcttatactttataagggaagaaagaattcaggtgatatgggaaaactgcttggcagaccttcatcttctgcctcaactgtaaaccacatgtaaatgcttaatggagactgttttcattcttgtgatatttaacattcagaaaattacttcagctttggaaatactcaggctgtttttattctgcaggtaagtgttttgacttaagtactaatattccagaaatttttgaaagcagtaaccttaatttcctatgtatttcattccacttttgcatataggtcaaatagcaatgtgtatgcacattctctttagttaaggcaccaattgttttggttggttttcctaagacatactttaaaaagatgttctataaatttcctagttaaattatggggattttggagtatgtacatgataaattataatacgtatatggttgaagttattttattttttactaatgaattattttaatattccttattgaataaatgctgtaacttgtttgctatggaacttattcttaaagttctagttaaaaataatttttccacatgcatgaaaatatgtattaatcagaggtggcttaattacattgaaattgcttttttgttgttgtttttttactgaaataactcatgtttgtgtagaagaatgcctgtttactcagagtttatattttccttcagttatattttaaatcaaaaggtctgggtaatgtatacttttgattaatatatactttttttaaaaaacaaaaaacaatgtaatggttaatagtagaaatgtgccacacttttcaagttttatataacatatgaaattcagttaaaagaatgtgtgtttcataatgacttttaactggtaaaaatattacttgcacgaagtacttgatgtatggttatcctgaaatttcggagtatttggtgtgttctttgtctaaaaatagtctgttttgtcagtccttcagaatattatttattctgaagattgtccctcttgcacttggcagtttatttttggggatacattgttgggggagaggggtttctgccactctttccagattgagtctgtgctgtttaaggaggactaccatcctgcaactctttttctaattggggcacagaggatgtcgctaaagaaaagttgaagagaccctttcagcactttctcatctgtggagaagatggaatcttaaaatacatttggagttttatctgttttacaagtccattgatggcctaagttcctcctgttttctgctgtttgatctctaaggaactcctgttgctaaatatgaagagtatggaacattcatatagtctctgtgaagcatggggggagggaagacatttctttttcttataggctttatgctcaaatgtcatagtctcctttcaaagaattgtgttgcattttaaatgcacccagcttaagtagaagacattgaaggatgcattaattttcaggaactattttgaattatgaaaagattcccaattgaaaaaattattcaacaagtaaaagctaagaaatttcattgaaatcataaggcagtttaagcataaattgataaaaatagctgtgtactactaattaatagaaaatcattcaaccaagagaagagtcaagtgaatatcgtttgtttatttgctagtgagtttctttgtaacgttgattttattaaatgataatatttggttagtatgtcctatgttaataaaaatgaacaaaattaattttgctatgttcaggtgtcttgataaaataacaatgctccagtgttgttgcttacatttagcactaaattttaacacagggtcagtgagtccaggttttaacttcttcatgcctggatgggataaaatgtaattcattgttaaattaattcatatttgtatttattaatcactgtgacaacattaaccatttgttcttaccaggaagtggtcagattatcatctgagttacagttagactggctaagtttggtattagatcaaggggaatgtccagtaaacagagaggtaagcatgatggaaataatgaagtggggtacacaggaaaaacctgactagtgaggaggagcagctgagagatagggtcagtgaatgcggttcagcctgctacctctcctgtcttcatagaaccattgccttagaattattgtatgacacgttttttgttggttaagctgtaaggttttgttctttgtgaacatgggtattttgaggggagggtggagggagtagggaagtggtccttttacaagaattttgatgcataagtgtctattgtagggtttggatgatctagtaaagtgttttagaacccctttttatcccatgcaccattcagtaaacataaaaatcacaattctgctaatgtcatttggaacttcaaaataaatatcttgtctaaaaacaaaaaaaa

SEQ ID NO: 14406 - DNA, 10531 bp, Homo sapiens
taggagccggaggaggagccgccgccgccgttgacccggccgccggccgggagctgggagagatgcggagcccggccaccggcgtccccctcccaacgccgccgccgccgctgctgctgctgttgctgctgctgctgccgccgccactattgggagaccaagtggggccctgtcgttccttggggtccaggggacgaggctcttcgggggcctgcgcccccatgggctggctctgtccatcctcagcgtcgaacctctggctctacaccagccgctgcagggatgcgggcactgagctgactggccacctggtaccccaccacgatggcctgagggtttggtgtccagaatccgaggcccatattcccctaccaccagctcctgaaggctgcccctggagctgtcgcctcctgggcattggaggccacctttccccacagggcaagctcacactgcccgaggagcacccgtgcttaaaggctccacggctcagatgccagtcctgcaagctggcacaggcccccgggctcagggcaggggaaaggtcaccagaagagtccctgggtgggcgtcggaaaaggaatgtaaatacagccccccagttccagccccccagctaccaggccacagtgccggagaaccagccagcaggcacccctgttgcatccctgagggccatcgacccggacgagggtgaggcaggtcgactggagtacaccatggatgccctctttgatagccgctccaaccagttcttctccctggacccagtcactggtgcagtaaccacagccgaggagctggatcgtgagaccaagagcacccacgtcttcagggtcacggcgcaggaccacggcatgccccgacgaagtgccctggctacactcaccatcttggttactgacaccaatgaccatgaccctgtgttcgagcagcaggagtacaaggagagcctcagggagaacctggaggttggctatgaggtgctcactgtcagggccacggatggtgatgcccctcccaatgccaatattctgtaccgcctgctggaggggtctgggggcagcccctctgaagtctttgagatcgaccctcgctctggggtgatccgaacccgtggccctgtggatcgggaagaggtggaatcctaccagctgacggtagaggcaagtgaccagggtcgggacccgggtcctcggagtaccacagccgctgttttcctttctgtggaggatgacaatgataatgccccccagtttagtgagaagcgctatgtggtccaggtgagggaggatgtgactccaggggccccagtactccgagtcacagcctcggatcgagacaaggggagcaatgccgtggtgcactatagcatcatgagtggcaatgctcggggacagttttatctggatgcccagactggagctctggatgtggtgagccctcttgactatgagacgaccaaggagtacaccctacgggtgcgagcacaggatggtggccgtcccccactctctaatgtctctggcttggtgacagtacaggtcctggatatcaacgacaatgcccccatcttcgtcagcacccctttccaggctactgtcctggagagcgtccccttaggctacctggttctccatgtccaggctatcgacgctgatgctggtgacaatgcccgcctggaataccgccttgctggggtgggacatgacttccccttcaccatcaacaatggcacaggctggatctctgtggctgctgaactggaccgggaggaagttgatttctacagctttggggtagaagctcgagaccatggcactccagcactcactgcctcggccagtgtcagcgtgactgtcctggatgtcaacgacaacaatccaacctttacccaaccagagtacacagtgcggctcaatgaggatgcagctgtgggcaccagcgtggtgacggtgtcagctgtggaccgtgatgctcatagtgtcatcacctaccagatcaccagtggcaatactcgaaaccgcttctccatcaccagccaaagtggtggtgggctggtatcccttgccctgccactggactacaaacttgagcggcagtatgtgttggctgttaccgcctccgatggcactcggcaggacacggcacagattgtggtgaatgtcaccgacgccaacacccatcgtcctgtctttcagagctcccactatacagtgaatgttaatgaggaccggccggcaggcaccacggtggtgctgatcagcgccacggatgaggacacaggtgagaatgcccgcatcacctacttcatggaggacagcatcccccagttccgcatcgatgcagacacgggggctgtcaccacccaggctgagctggactacgaagaccaagtgtcttacaccctggccattactgctcgggacaatggcattccccagaagtccgacaccacctacctggagatcctggtgaacgacgtgaatgacaatgcccctcagttcctgcgagactcctaccagggcagtgtctatgaggatgtgccacccttcactagcgtcctgcagatctcagccactgatcgtgattctggacttaatggcagggtcttctacaccttccaaggaggcgacgatggagacggtgactttattgttgagtccacgtcaggcatcgtgcgaacgctacggaggctggatcgagagaacgtggcccagtatgtcttgcgggcatatgcagtggacaaggggatgcccccagcccgcacacctatggaagtgacagtcactgtgttggatgtgaatgacaatccccctgtctttgagcaggatgagtttgatgtgtttgtggaagagaacagccccattgggctagccgtggcccgggtcacagccactgaccccgatgaaggcaccaatgcccagattatgtaccagattgtggagggcaacatccctgaggtcttccagctggacatcttctccggggagctgacagccctggtagacttagactacgaggaccggcctgagtacgtcctggtcatccaggccacgtcagctcctctggtgagccgggctacagtccacgtccgcctccttgaccgcaatgacaacccaccagtgctgggcaactttgagatccttttcaacaactatgtcaccaatcgctcaagcagcttccctgggggtgccattggccgagtacctgcccatgaccctgatatctcagatagtctgacttacagctttgagcggggaaatgaactcagcctggtcctgctcaatgcctccacgggtgagctgaagctaagccgcgcactggacaacaaccggcctctggaggccatcatgagcgtgctggtgtcagacggcgtacacagcgtgaccgcccagtgcgcgctgcgtgtgaccatcatcaccgatgagatgctcacccacagcatcacgctgcgcctggaggacatgtcacccgagcgcttcctgtcaccactgctaggcctcttcatccaggcggtggccgccacgctggccacgccaccggaccacgtggtggtcttcaacgtacagcgggacaccgacgcccccgggggccacatcctcaacgtgagcctgtcggtgggccagccgccagggcccgggggcgggccgcccttcctgccctctgaggacctgcaggagcgcctatacctcaaccgcagcctgctgacggccatctcggcacagcgcgtgctgcccttcgacgacaacatctgcctgcgggagccctgcgagaactacatgcgctgcgtgtcggtgctgcgcttcgactcctccgcgcccttcatcgcctcctcctccgtgctcttccggcccatccaccccgtcggagggctgcgctgccgctgcccgcccggcttcacgggtgactactgcgagaccgaggtggacctctgctactcgcggccctgtggcccccacgggcgctgccgcagccgcgagggcggctacacctgcctctgtcgtgatggctacacgggtgagcactgtgaggtgagtgctcgctcaggccgttgcaccccgggtgtctgcaagaatgggggcacctgtgtcaacctgctggtgggcggtttcaagtgcgattgcccatctggagacttcgagaagccctactgccaggtgaccacgcgcagcttccccgcccactccttcatcacctttcgcggcctgcgccagcgtttccacttcaccctggccctctcgtttgccacaaaggagcgcgacgggttgctgttgtacaatgggcgtttcaatgagaagcatgactttgtggccctcgaggtgatccaggagcaggtccagctcaccttctctgcaggggagtcaaccaccacggtgtccccattcgtgcccggaggagtcagtgatggccagtggcatacggtgcagctgaaatactacaataagccactgttgggtcagacagggctcccacagggcccatcagagcagaaggtggctgtggtgaccgtggatggctgtgacacaggagtggccttgcgcttcggatctgtcctgggcaactactcctgtgctgcccagggcacccagggtggcagcaagaagtctctggatctgacggggcccctgctactaggcggggtgcctgacctgcccgagagcttcccagtccgaatgcggcagttcgtgggctgcatgcggaacctgcaggtggacagccggcacatagacatggctgacttcattgccaacaatggcaccgtgcctggctgccctgccaagaagaacgtgtgtgacagcaacacttgccacaatgggggcacttgcgtgaaccagtgggacgcgttcagctgcgagtgccccctgggctttgggggcaagagctgcgcccaggaaatggccaatccacagcacttcctgggcagcagcctggtggcctggcatggcctctcgctgcccatctcccaaccctggtacctcagcctcatgttccgcacgcgccaggccgacggtgtcctgctgcaggccatcaccagggggcgcagcaccatcaccctacagctacgagagggccacgtgatgctgagcgtggagggcacagggcttcaggcctcctctctccgtctggagccaggccgggccaatgacggtgactggcaccatgcacagctggcactgggagccagcggggggcctggccatgccattctgtccttcgattatgggcagcagagagcagagggcaacctgggcccccggctgcatggtctgcacctgagcaacataacagtgggcggaatacctgggccagccggcggtgtggcccgtggctttcggggctgtttgcagggtgtgcgggtgagcgatacgccagagggggttaacagcctggatcccagccatggggagagcatcaacgtggagcaaggctgtagcctgcctgacccttgtgactcaaacccgtgtcctgctaacagctattgcagcaacgactgggacagctattcctgcagctgtgatccaggttactatggtgacaactgtactaatgtgtgtgacctgaacccgtgtgagcaccagtctgtgtgtacccgcaagcccagtgccccccatggctatacctgcgagtgtcccccaaattaccttgggccatactgtgagaccaggattgaccagccttgtccccgtggctggtggggacatcccacatgtggcccatgcaactgtgatgtcagcaaaggctttgacccagactgcaacaagacaagcggcgagtgccactgcaaggagaaccactaccggcccccaggcagccccacctgcctcttgtgtgactgctaccccacaggctccttgtccagagtctgtgaccctgaggatggccagtgtccatgcaagccaggtgtcatcgggcgtcagtgtgaccgctgtgacaacccttttgctgaggtcaccaccaatggctgtgaagtgaattatgacagctgcccacgagcgattgaggctgggatctggtggccccgtacccgcttcgggctgcctgctgctgctccctgtcccaaaggctcctttgggactgctgtgcgccactgtgatgagcacagggggtggctccccccaaacctcttcaactgcacgtccatcaccttctcagaactgaagggcttcgctgagcggctacagcggaatgagtcaggcctagactcagggcgctcccagcagctagccctgctcctgcgcaacgccacgcagcacacagctggctacttcggcagcgacgtcaaggtggcctaccagctggccacgcggctgctggcccacgagagcacccagcggggctttgggctgtctgccacacaggacgtgcacttcactgagaatctgctgcgggtgggcagcgccctcctggacacagccaacaagcggcactgggagctgatccagcagacagagggtggcaccgcctggctgctccagcactatgaggcctacgccagtgccctggcccagaacatgcggcacacctacctaagccccttcaccatcgtcacgcccaacattgtcatctccgtagtgcgcttggacaaagggaactttgctggggccaagctgccccgctacgaggccctgcgtggggagcagcccccggaccttgagacaacagtcattctgcctgagtctgtcttcagagagacgccccccgtggtcaggcccgcaggccccggagaggcccaggagccagaggagctggcacggcgacagcgacggcacccggagctgagccagggtgaggctgtggccagcgtcatcatctaccgcaccctggccgggctactgcctcataactatgaccctgacaagcgcagcttgagagtccccaaacgcccgatcatcaacacacccgtggtgagcatcagcgtccatgatgatgaggagcttctgccccgggccctggacaaacccgtcacggtgcagttccgcctgctggagacagaggagcggaccaagcccatctgtgtcttctggaaccattcaatcctggtcagtggcacaggtggctggtcggccagaggctgtgaagtcgtcttccgcaatgagagccacgtcagctgccagtgcaaccacatgacgagcttcgctgtgctcatggacgtttctcggcgggagaatggggagatcctgccactgaagacactgacatacgtggctctaggtgtcaccttggctgcccttctgctcaccttcttcttcctcactctcttgcgtatcctgcgctccaaccaacacggcatccgacgtaacctgacagctgccctgggcctggctcagctggtcttcctcctgggaatcaaccaggctgacctcccttttgcctgcacagtcattgccatcctgctgcacttcctgtacctctgcaccttttcctgggctctgctggaggccttgcacctgtaccgggcactcactgaggtgcgcgatgtcaacaccggccccatgcgcttctactacatgctgggctggggcgtgcctgccttcatcacagggctagccgtgggcctggaccccgagggctacgggaaccctgacttctgctggctctccatctatgacacgctcatctggagttttgctggcccggtggcctttgccgtctcgatgagtgtcttcctgtacatcctggcggcccgggcctcctgtgctgcccagcggcagggctttgagaagaaaggtcctgtctcgggcctgcagccctccttcgccgtcctcctgctgctgagcgccacgtggctgctggcactgctctctgtcaacagcgacaccctcctcttccactacctctttgctacctgcaattgcatccagggccccttcatcttcctctcctatgtggtgcttagcaaggaggtccggaaagcactcaagcttgcctgcagccgcaagcccagccctgaccctgctctgaccaccaagtccaccctgacctcgtcctacaactgccccagcccctacgcagatgggcggctgtaccagccctacggagactcggccggctctctgcacagcaccagtcgctcgggcaagagtcagcccagctacatccccttcttgctgagggaggagtccgcactgaaccctggccaagggccccctggcctgggggatccaggcagcctgttcctggaaggtcaagaccagcagcatgatcctgacacggactccgacagtgacctgtccttagaagacgaccagagtggctcctatgcctctacccactcatcagacagtgaggaggaagaagaggaggaggaagaggaggccgccttccctggagagcagggctgggatagcctgctggggcctggagcagagagactgcccctgcacagtactcccaaggatgggggcccagggcctggcaaggccccctggccaggagactttgggaccacagcaaaagagagtagtggcaacggggcccctgaggagcggctgcgggagaatggagatgccctgtctcgagaggggtccctaggcccccttccaggctcttctgcccagcctcacaaaggcatccttaagaagaagtgtctgcccaccatcagcgagaagagcagcctcctgcggctccccctggagcaatgcacagggtcttcccggggctcctccgctagtgagggcagccggggcggcccccctccccgcccaccgccccggcagagcctccaggagcagctgaacggggtcatgcccatcgccatgagcatcaaggcaggcacggtggatgaggactcgtcaggctccgaatttctcttctttaacttcctgcattaaccctgggccgtggttcctacgcccgaggctcccttcccttccccagccgcactcatgccctgctcctgtcttgtgctttatcctgccccgctccccatcgcctgcccgcagcagcgacgaaacgtccatctgaggagcctgggccttgccgggaggggtactcaccccacctaaggccatctagtgccaactccccccccaccattcccctcactgcactttggacccctggggccaacatctccaagacaaagtttttcagaaaagaggaaaaaaagaatttaaaaaaggatctccactcttcatgacttcagggattcattttttttatacgctggaaattgactcccctttcccttcccaaagaggataggacctcccaggatgcttcccagcctctcctcagtttcccatctgctgtgcctctgggaggagagggactcctggggggcctgcccctcatacgccatcaccaaaaggaaaggacaaagccacacgcagccagggcttcacacccttcaggctgcacccgggcaggcctcagaacggtgaggggccagggcaaagggtgtgtctcgtcctgcccgcactgcctctcccaggaactggaaaagccctgtccggtgagggggcagaaggactcagcgcccctggacccccaaatgctgcatgaacacattttcaggggagcctgtgcccccaggcgggggtcgggcagccccagcccctctccttttcctggactctggccgtgcgcggcagcccaggtgtttgctcagttgctgacccaaaagtgcttcatttttcgtgcccgccccgcgccccgggcaggccagtcatgtgttaagttgcgcttctttgctgtgatgtgggtgggggaggaagagtaaacacagtgctggctcggctgccctgagggtgctcaatcaagcacaggtttcaagtctgggttctggtgtccactcacccaccccaccccccaaaatcagacaaatgctactttgtctaacctgctgtggcctctgagacatgttctatttttaaccccttcttggaattggctctcttcttcaaaggaccaggtcctgttcctctttctccccgactccaccccagctccctgtgaagagagagttaatatatttgttttatttatttgctttttgcgttgggatgggttcgtgtccagtcccgggggtctgatatggccatcacaggctgggtgttcccagcagccctggcttgggggcttgacgcccttccccttgccccaggccatcatctccccacctctcctcccctctcctcagttttgccgactgcttttcatctgagtcaccatttactccaagcatgtattccagacttgtcactgactttccttctggagcaggtggctagaaaaagaggctgtgggcaggaaagaaaggctcctgtttctcatttgtgaggccagcctctggcttttctgccgtggattctccccctgtcttctcccctcagcaattcctgcaaagggttaaaaatttaactggtttttactactgatgacttaaaaaaaatacaaagatgctggatgctaacttgatactaaccatcagattgtacagtttggttgttgctgtaaatatggtagcgttttgttgttgttgttttttcatgccccatactactgaataaactagttctgtgcgggt

SEQ ID NO: 14407 - DNA, 2385 bp, Homo sapiens
gggccatggggctgggccgggtcctgctgtttctggccgtcgccttcccttttgcacccccggcagccgccgctgagccccacagtcttcgttacaacctcatggtgctgtcccaggatggatctgtgcagtcagggtttctcgctgagggacatctggatggtcagcccttcctgcgctatgacaggcagaaacgcagggcaaagccccagggacagtgggcagaagatgtcctgggagctgagacctgggacacagagaccgaggacttgacagagaatgggcaagacctcaggaggaccctgactcatatcaaggaccagaaaggaggcttgcattccctccaggagattagggtctgtgagatccatgaagacagcagcaccaggggctcccggcatttctactacaatggggagctcttcctctcccaaaacctggagactcaagaatcgacagtgccccagtcctccagagctcagaccttggctatgaacgtcacaaatttctggaaggaagatgccatgaagaccaagacacactatcgcgctatgcaggcagactgcctgcagaaactacagcgatatctgaaatccggggtggccatcaggagaacagtgccccccatggtgaatgtcacctgcagcgaggtctcagagggcaacatcaccgtgacatgcagggcttccagcttctatccccggaatatcacactgacctggcgtcaggatggggtatctttgagccacaacacccagcagtggggggatgtcctgcctgatgggaatggaacctaccagacctgggtggccaccaggattcgccaaggagaggagcagaggttcacctgctacatggaacacagcgggaatcacggcactcaccctgtgccctctgggaaggcgctggtgcttcagagtcaacggacagactttccatatgtttctgctgctatgccatgttttgttattattattattctctgtgtcccttgttgcaagaagaaaacatcagcggcagagggtccagagcttgtgagcctgcaggtcctggatcaacacccagttgggacaggagaccacagggatgcagcacagctgggatttcagcctctgatgtcagctactgggtccactggttccactgagggcgcctagactctacagccaggcggccaggattcaactccctgcctggatctcaccagcactttccctctgtttcctgacctatgaaacagaaaataacatcacttatttattgttgttggatgctgcaaagtgttagtaggtatgaggtgtttgctgctctgccacgtagagagccagcaaagggatcatgaccaactcaacattccattggaggctatatgatcaaacagcaaattgtttatcatgaatgcaggatgtgggcaaactcacgactgctcctgccaacagaaggtttgctgagggcattcactccatggtgctcattggagttatctactgggtcatctagagcctattgtttgaggaatgcagtcttacaagcctactctggacccagcagctgactccttcttccacccctcttcttgctatctcctataccaataaatacgaagggctgtggaagatcagagcccttgttcacgagaagcaagaagccccctgaccccttgttccaaatatactcttttgtctttctctttattcccacgttcgccctttgttcagtccaatacagggttgtggggcccttaacagtgccatattaattggtatcattatttctgttgtttttgtttttgtttttgtttttgtttttgagacagagtctcactctgtcacccaggctgcagttcactggtgtgatctcagctcactgcaacctctgcctcccaggttcaagcacttctcgtacctcagactcccgaatagctgggattacagacaggcaccaccacacccagctaatttttgtattttttgtagagacggggtttcgccaagttgaccagcccagtttcaaactcctgacctcaggtgatctgcctgccttggcatcccaaagtgctgggattacaagaatgagccaccgtgcctggcctattttattatattgtaatatattttattatattagccaccatgcctgtcctattttcttatgttttaatatattttaatatattacatgtgcagtaattagattatcatgggtgaactttatgagtgagtatcttggtgatgactcctcctgaccagcccaggaccagctttcttgtcaccttgaggtcccctcgccccgtcacaccgttatgcattactctgtgtctactattatgtgtgcataatttataccgtaaatgtttactctttaaatagaaaaaaaaaaaaaaaa

SEQ ID NO: 14408 - DNA, 2529 bp, Homo sapiens
ggtggcgcgaccctctgtccccgcctcggggcggagcccaggtcccagcctgcggagcgcgagacacgccgaaatccgcccgaggctacctgtgcgactccagccgccctgcaccggaatctggggagacccgccccccgccccaccggtctgcggccctccgccccagcgcaggtgcaggtgcggcttctctgcccctttcaccccaggcgcatccgccgcggcggccatggcgcgaggagacgccccgcgggacagctaccacctggtcgggatcagcttcttcatcctggggctgggcaccctccttccctggaacttcttcatcaccgccatcccgtacttccaggcgcgactggccggggccggcaacagcacagccaggatcctgagcaccaaccacacgggtcccgaggatgccttcaacttcaacaattgggtgacgctgctgtcccagctgcccctgctgctcttcaccctcctcaactccttcctgtaccagtgcgtcccggagacggtgcgcattctgggcagcctgctggccatactgctgctctttgccctgacagcagcgctggtcaaggtggacatgagccccggacccttcttctccatcaccatggcctccgtctgcttcatcaactccttcagtgcagtcctacagggcagcctcttcgggcagctgggcaccatgccctccacctacagcaccctcttcctcagcggccagggcctggctgggatctttgctgcccttgccatgctcctgtccatggccagtggcgtggacgccgagacctctgccctggggtactttatcacgccctgtgtgggcatcctcatgtccatcgtgtgttacctgagcctgcctcacctgaagtttgcccgctactacctggccaataaatcatcccaggcccaagctcaggagctggagaccaaagctgagctcctccagtctgatgagaacgggattcccagtagtccccagaaagtagctctgaccctggatcttgacctggagaaggagccggaatcagagccagatgagccccagaagccaggaaaaccttcagtcttcactgtcttccagaagatctggctgacagcgctgtgccttgtgttggtcttcacagtcaccctgtccgtcttccccgccatcacagccatggtgaccagctccaccagtcctgggaagtggagtcagttcttcaaccccatctgctgcttcctcctcttcaacatcatggactggctgggacggagcctgacctcttacttcctgtggccagacgaggacagccggctgctgcccctgctggtctgcctgcggttcctgttcgtgcccctcttcatgctgtgccacgtgccccagaggtcccggctgcccatcctcttcccacaggatgcctacttcatcaccttcatgctgctctttgccgtttctaatggctacctggtgtccctcaccatgtgcctggcgcccaggcaggtgctgccacacgagagggaggtggccggcgccctcatgaccttcttcctggccctgggactttcctgtggagcctccctctccttcctcttcaaggcgctgctctgaagtggcccctccaggctctttggcagcctcttctcgacgtctccttccggagctgagatccagcccagggcgaatggcgagcttggctcaggcctctgcggggtggaggcccctgggcctgaggctgccagcagcgggcaggagctgctcttcatccacttggagtgctgcggggaagaaatcaccaccggtcattctaaccctcacccaggaatgggggtgactcgcacaagacctcatggaaagggtgatgactagggaaaagagggtgcagggcacggctgctccccaccaccaggtctgcatttgttcatcatcatcaggagcagaggtgaccagagggttcagagtgggaggcggggccagcccaggccaggagcgcctcatcttcccaggcctcagccacccagggtaaaaggtgccagggaagttgtgggcacctgagaggaggaacagatgtggaggacctgagggtgctcaaagggccaggctcagcctcaagcagtgttttcattgccaacacttactgtacccactccgcagagcccagctgggcctgggccccagggccacagctagcctgcatgtgtgtactgcactttacagtttgcaaagctcttccatacccactctctcaccgaagcctaattgaggctcttggaaggagtcaggcaaggattgtgcttcccccattatacaggtgacaaaactgagtcctggggaaagtgactggtccgtggtagagccgggacccaatcccctctctctcctccctgttggtgctgttcttcctgcccaacacctgtttctcttttcctcaaggggtttggggcaggagcctgggcacttactccccgtttttgctgtttctccttctgaccctgctcttgggtctaataaccccatttatttgtaaaaaaaaaaaaaaa

SEQ ID NO: 14409 - DNA, 2676 bp, Homo sapiens
ctctctaggctgccgggcgctggtcgtcagcgccgaggctgggctgaggcgccgcggtaccatgaggcgccggtacttaagagattatggcatcagaaacccacaatgttaaaaaacggaacttttgtaataagattgaggatcatttcattgatcttcctagaaaaaagatctctaatttcactaataagaacatgaaggaggttaagaaatctccaaaacagttggctgcttacataaatagaacagttggacaaactgtgaaaagcccagataaacttcgtaaagtgatctatcgcagaaagaaagttcatcatccctttccaaatccttgttacagaaaaaaacagtcccctggaagtgggggctgtgacatggcaaataaagaaaatgaactggcttgtgcaggccacctgcctgaaaaattacaccatgatagtcgaacatatttggttaactccagtgattctggttcttcacagacagaaagcccatcatcaaaatatagtgggtttttttctgaggtttctcaggaccatgaaacaatggcccaagttttgttcagcaggaatatgagattgaatgtagctttaactttctggagaaagagaagtataagtgaacttgtagcttatttgttgaggatagaagatcttggcgttgtggtagattgccttcctgtgctcaccaattgtttacaggaagaaaaacaatatatctcacttggctgctgtgttgacttgttgcctctagtaaagtcactacttaaaagcaaatttgaagaatatgttatagttggtttaaactggcttcaagcagtcattaaaaggtggtggtcagaactatcatccaaaacagaaattataaatgatggaaatattcaaattttaaaacaacaattaagtggattatgggaacaggaaaaccatcttactttggttccaggatatactggtaatatagctaaggatgtagatgcttatttattacagttacattgagagatttcatctactaaagagcatttggtttttcaaaacatccctgaactgtataatttacaaaaaaaaaagtctcgtctgagaactgtgaactgtggaagaaatcaaaactattttttcttttaaaaagccacgtaatgaaaccactaatgaaatcccagcaatctgcttcacattgaagtggaaaaatatccaaaaggagcagcttcaatttcattgaggtgaaagtgcactatgaagattgttcacctttgctgcatttgggagttatatggttatttggtaacattaagaactactggattttaatgcaatcctgcataaaaatataatttatactatgtgaaaaaataagacaggacttaccactaggaaccaccaagaccaatcatcattaacttttttaagattgtgttttattaaaaaaaaaaaacacttaaatgtgtgcagctattttcttatgttgaaaagactgaaagtttaaaacatgaaaaaaatcaatattaaacattttttgttcacactgagatactgtgtatgtaaaatgccttaattattaataagccaatgtgttatgataccaatatctgttttaaaaaactaaaaccaaccatgcttctggcatgataaaatcatggaattaaatcaggggtttacattcttgtagagtgttcttgaaacactctctgcaccatttttaaaacttgagaatagttttagtatctctgatattttttgccagaatcatcatgtcatgtatgaatgtgttatccctatctaaggaaaaaggtgaatatgtttttgtatgaatgtttaactggaaatgtccatggacttggctaatttatatttactttttattgtacatagatttctaatatttttcattcctgtatcatttaaacttccttcatttgagtaaattcactaaatatttctatttttttgcttttttaaattctgattttatatgaattctaattctttttcactacatatgttttaaagagttacatacagtgatttagaatggtttacagttaatgctgatcttgtattttaaattccaacactttgtgtcactacctcctctaatggttagtatgatatgctagcagactgtatgaggtctttttttaaaataccacttttagtgtcagtgaaccaaattctggaatgtcttaacagctctaaatcttacttgtcttgaaaatgattggggtttaataccactgctggtggttcacacatcatcccatccttaatatgcctgacaggcatctgagcaaaggtttttagtaattgaatttctctgcagtagtccttcaagcacttgaatgtaaacctttagcatttattcgtttaatgactactgatacgaatctcaagcagatttcttgctcttaaaagttatgtttcactgagttctggttttgtgtagctatattttatatagctagatattcctcacagtgaacatgaattgtaataattggttatttccttaagtctttagattataataatttcagattattgcacgtctgtgatttgagaggtgagttatttaagaggccagttttcaggacatgggaatttgaattgtaaacctgttatctctgtgaaacttttaacatgataaaatataacctttctttgtgcttaaaaaaaaaaa

SEQ ID NO: 14410 - DNA, 1332 bp, Homo sapiens
ccgggagcgctaggcctggtccctcttcctagaatagcgttgcgcgcatgcgccttgacgagtgagccggggagccatggacaactgtttggcggccgcagcgctgaatggggtggaccgacgttccctgcagcgttcagcaaggctggctctagaagtgctggagagggccaagaggagggcggtggactggcatgccctggagcgtcccaaaggctgcatgggggtccttgcccgggaggcgccccacctagagaaacagccggcagccggcccgcagcgcgttctcccgggagagagagaagagagacccccaacccttagtgcttccttcagaacaatggctgaattcatggactatacttcaagtcagtgtgggaaatattattcatctgtgccagaggaaggaggggcaacccatgtctatcgttatcacagaggcgagtcgaagctgcacatgtgcttggacatagggaatggtcagagaaaagacagaaaaaagacatcccttggtcctggaggcagctatcaaatatcagagcatgctccagaggcatcccagcctgctgagaacatctctaaggacctctacatagaagtatatccagggacctattctgtcactgtgggctcaaatgacttaaccaagaagactcatgtggtagcagttgattctggacaaagcgtggacctggtcttccctgtgtgatgttgaccatcactgccatcacatcacctttttttaagtagtaagaataaagccactgtatgattctcttaatagctatacattaatcctgtttttagtgctgactgggtcagccttccgggaactggagtctgtctctttcagtgcttttttgtttgtttggttggtttttttttgagacagtctcactctgttgcccaggctggagtgcagtggcgtgatctcggctcactgcaagttccgcctcccgggttcacaccattctcctgcctcagcctcccgagtagctggcactacaggcacccgccaccatgcccggctattttttttgtatttttagtagagacggggtttaaccatgttggccaggatggtctcgatctcttgacctcgtgatccacccaccttggcctcccaaagtgttgggattacaggcgtgagccaccgcgcccggcctcagtgccttttttaacttgagggtgtagaggtcctccacgcttgtttgcctgaaagtaatataatgatgctgtctgaacaggttttactgcttgctttccaagtaaaggttaattatgataataaagagatttggaaatgaaaaaaaaaaaaaaaaaaaaaaaaaa

SEQ ID NO: 14411 - DNA, 1829 bp, Homo sapiens
agatgaaaatggaaggggcgggcgcgctaggcctagtcctggctgggctcccgctggagtgtgcgttgggggcggaccaggagcggtggtctccagggaggtcgaggctggggctcccacccggatttggagcagggtcgccgcggcccagctgacccgccggcgtttgtacgttgtgtgcccactcagggagccatggacaactgtttggcggccgcagcgctgaatggggtggaccgacgttccctgcagcgttcagcaaggctggctctagaagtgctggagagggccaagaggagggcggtggactggcataccctggagcgtcccaaaggctgcatgggggtccttgcccgggaggcgccccacctagagaaacagccggcagccggcccgcagcgcgttctcccgggagagagagaagagagacccccaacccttagtgcttccttcagaacaatggctgaatccatggactatacttcaagtcagtgtgggaaatattattcatctgtgccagaggagggaggggcaacccatgtctatcgttatcacagaggcgagtcgaagctgcacatgtgcttggacatagggaatggtcagagaaaagacagaaaaaagacatcccttggtcctggaggcagctatcaaatatcagagcatgctccagaggcatcccagcctgctgagaacatctctaaggacctctacatagaagtatatccagggacctattctgtcactgtgggctcaaatgacttaaccaagaagactcatgtggtagcagttgattctggacaaagcgtggacctggtcttccctgtgtgatgttgaccatcactgccatcacatcacctttttttaagtagtaagaataaagccactgtatgattctcttaatagctatacattaatcctgtttttagtgctgactgggtcagccttccgggaactggagtctgtctctttcagtgcttttttgtttgtttggttggttgttttttgagacagtctcgctctgttgcccgggctggagtgcagtggcgtgatctcggctcaccgcaagttccgcctcccgggttcacaccattctcctgcctcagcctcccgagtagctggcactacaggcacccgccaccatgcccggctattttttttgtatttttagtagagacggggtttcaccatgttggccaggatggtctcgatctcttgacctcgtgatccacccaccttggcctcccaaagtgttgggattacaggcgtgagccaccgcgccccacctaacccttccttatttagcctaggagtaagagaacacaatctctgtttcttcaatggttctcttcccttttccatcctccaaacctggcctgagcctcctgaagttgctgctgtgaatctgaaagacttgaaaagcctccgcctgctgtgtggacttcatctcaaggggcccagcctcctctggactccaccttggacctcagtgactcagaacttctgcctctaagctgctctaaagtccagactatggatgtgttctctaggccttcaggactctagaatgtccatatttatttttatgttcttggctttgtgttttaggaaaagtgaatcttgctgttttcaataatgtgaatgctatgttctgggaaaatccactatgacatctaagttttgtgtacagagagatatttttgcaactatttccacctcctcccacaaccccccacactccactccacactcttgagtctctttacctaatggtctctacctaatggacctccgtggccaaaaagtaccattaaaaccagaaaggtgattgg

SEQ ID NO: 14412 - DNA, 5032 bp, Homo sapiens
taacttttccgtctgcaacctttaataattgagagggtatgcgcaactcagaaaagtgcgcccgctgaggttgggtgcagagtggactggaggaaaggcgacacccatttacggtgcggccccggacggggtccccagacacggccttcccggcgtgccacgcgcggaggggactcttaacgtgaagcgctgggtgactcagccgcgtggccgcgcggtccggggcggggggcgcgcgccgctgcggcacagccggtcccggctgcggcttctggctgcgcggcctgcgcgcgcctcccgggcggattccagccccgagcgggacagcgcggcggggagcgacgagatttctctctgatcaaacggacagttcaggactcagaatctaaggatgaatgttcaccgtggcagtgacagtgacaggttattgcggcaggaggccagctgcttagtggatgatactttagctgtagcccaagaaaaagaagcaaacagcctggcttcatctggtcctcataatcttacttatcctctaggtcccaggaatgaagacctctcacttgactatgcctctcagccagcaaatcttcagttccctcacataatgccccttgctgaagacatcaaaggttcttgcttccaaagtgggaataaacggaaccatgaaccttttattgctccagaaagatttggaaacagtagtgtgggctttggcagtaattcccattcccaagcaccagagaaagtgacgcttcttgtagatggcacacgttttgttgtgaatccacagattttcactgctcatccggataccatgctgggaaggatgtttggaccaggaagagagtacaacttcactcggcccaatgagaagggagagtatgagattgctgaaggcatcagtgcaactgtatttcgcacagtgctggattattacaaaaccggtatcatcaattgtcctgatggcatctctatcccagatcttagagatacttgtgattatctctgcattaattttgacttcaacactatccgatgtcaagatctgagtgctttactccatgaactgtctaatgacggtgctcataagcagtttgatcactacctcgaagagctcatcttgcccatcatggtgggctgtgccaagaaaggagaacgagagtgccacattgttgtgctgacggatgaggattctgtggactgggatgaagaccaccctccaccaatgggggaggaatattcccaaattctttatagctccaagctctacagattcttcaaatatattgagaatagggatgttgcaaaaacagtgttaaaggaacggggcctaaaaaacattcgcattggaattgaaggttaccctacctgtaaagaaaaaattaagagaaggcctggcggccggtctgaagtcatctataattatgtacaacgccccttcatccagatgtcatgggaaaaggaagaagggaagagtcgccatgtggatttccagtgtgttcgaagcaaatccctcacgaatctggtagctgctggagatgatgtcttggaggaccaggagatattaatgcatcacccaccccaagtggatgaacttgaccggctaaatgccccactttctcagatggcttctaacgactttcaggattagggccagctgtgggtctactccttgttggagcccatctcacctgggatgcctgcagccagccctccctcgtgatttgtctcaccttgagtaggagacatgcttctcccctaaccttttcctttctgccataattaacatatgtccttttcagtaagtccatgcctctggcaggggatgaagaagtactcactggtaattagctaccatctttgcagcagccctggtaacttgaaaaatttgggtctggtgctgttcattgagtctttgtgtaactgcaaaagcaggaaaggaagtcaagactcctgttgcctcgtgcttagcaaagcagtccttatcctttatactctgttcttgggttttgtttttgtcttgttttataccaggcaaattgcttagtagcaaagggaccaaactgaaaaggtgacaatctctaacttctaaaagcagacaccaatcggatgctcattagaggttaatgaagatgccattcttggtggcctctgcacccaaattgcatctggaaagaactagggtctcattcagaatgtccaaaaggaaattcttaagagcttaaattcagatttgtgtctcattaatgcagtgaacaattcaaaaccacacagattccttggcaggaaggataatggaataacagtgttgatgagacctttttagcttcaaggtttcggagtctaaacaaatggatgattcatttggaatgaaactcacaatgcaagtagaaggacctctccaaatcaggccagttgggttatcctggcttggaatctggtgtgaaaccataggtcttaacactctggagcagcacattgctgtggatatgtccaggagaccttagatatggcttaaaggctttcaagatgaggacagaaattgcttacaattgctcagtttctcaacagaaagactcataagagtgccagcatggggtacatggagtgaagctgggtgggaagcatcatctgcacagtccctgtcctagtgcaggacttttctctgtatgttttcataccatgggatttttggatatcagtgtattttggttcttgaaatagcctaatagctgctcacacattgggtaggaatattataccaatgtcatccccaaaggaagggtgagctgaatggaaattaagcccagtcattttatttgatctattagctctgttatcagtgcatgatcacccagatcaccctcctcagcccacacagtgctgaaccatcttccctcctgttctccatggctattaatagtatagctaaatttagagtgcagagccagatataagtattttggaattatctcccagcttgtggtagaagctgactggaatacaggttgagtatctcttatccaaaatgctagggaccagaaaggtttcagattttttcagattttggaatacttaacagttgagcaccccaaatctgaaaggcttctgaacgtcatgtcagcactcaaaaaagtggattttggagcacttcaaatttcggatttttggatttgggatgctcatcctgtgtaggagaggctactcgattccatttaatgactgtcctagtcataatcatccaaagataaaagccaggtagatgttgaaagctctttccagggctgaaaaagtgttcttacgttctctgcatgtgactagcatcactgtggaaattaatgctctgttcttcactagaatgtagtaagtggttaaactgagctatcccccacctgatgactattggcatccatttgcaaggccaatggcctggattaagggttaggattatttgtagctagaaggtaattttatttctgtgaaactaattggctcatatttgaggttaggtgtggccttgaccttaccagtacatttatacccactaccagttgactagcccagataattgttaaatggtgcttcttttctgcttctcagtagacttccatgccattacaaaggaaatttgaattacctagtgtttgtatattccatgataactatgtataacttctgttacacagcttatgtattgttaacatttaagtgtaaaccatgccacagctaacacttaaaaatgaaaactaattagttcttgcttagggaaaatgccaggtatgaagtatggcatatacttgacactgtcctgtgtaaccctttactttgctcaggctttcaagattgagtcttttttcccccaaattaggttaacatgcatttgaccccaacctgtggggtttgagtaagctggaaatctgtgacggtaggctttctagtgtcacgaggtggtggtgactgaaggaaaagctgggatcacaggttccttctgatggagaggaaggtttatttctatgcccctcccaccaccctccacctagagctcacccaagcctgctccagtcccaggggcaggccattctgcaaaagcaggacctcacagaaacaagggctgggttgaggtcacccccttcagagttggttcctggccagatgggtaagaggcatttgtaattttaaaaatgtgaaacttgggtttggtgttttcttctaagtgcctaaataagcaagccaggctgttgatattttagccagagaaatcggcaagccaagattaacccgaatctgaagtttagaatcttgagtttgcatctgcatcatatcatgctgttttgatgaggaaacatttgccactgaggagttggagggagggcaagacgacagtgttaagtcagatcatttaatggtttcccctaagccctggaaaaatatttgaaagaatggcagcaaaaaggttaagaaagcaagccagatttactgcacaatatgcagtacccagtactactttaaatcccaagagaacagtgtgatgtctaatatatacaggtctatgaaaatactgtggaataagcccaggaaggttagatgtgtttgcaaataagttgcccaaagggtccccctctaagtaaaacaaatattcagaccacaggctttaatgtaaactgtcaaaaagtgggatgtggaggatttttgttaagtgtcaatcgaagttaaaaagcaagggtttttggccaggcgtggtggctcacgcctgtaatcccagcactttgggaggccgaggccggcaaatcacctaaggtcaggagttcgagaccagcctggccaacatggtgaaaccccgtctctactaaaaatacaaaaaaattagcccggtgtggtggcaagtgcctgtagtcccagctacttgggaggctgaggcaggagaactgcttgaacccgggaggtagaggttgcagtgagccacgatcatgccactgcactccagcctgggcaacagagcaagactccatctcaaaaaaaaaaaaaaaaaaaa

SEQ ID NO: 14413 - DNA, 3100 bp, Homo sapiens
tgctggagggggagccgtgggtgcggggcaccgtgggggccgaggccccgggacgcccgcccggccccaggccccgctcagcccgggcgcccccacgggtgccccccccttcttggtccgagcagtgtgagtgtgccagggagcccggcggcggcggcggcggtggtggcggcggtggcggcggcgtggaatccggcgtgggctggggggtccgagccgcggggggcagtgccatgcacaagcaccagcactgctgtaagtgccctgagtgctatgaggtgacccgcctggccgccctgcggcgcctcgagcctccggggtacggcgactggcaagtccccgacccttacgggccaggtgggggcaacggcgccagcgcgggttatgggggctacagctcgcagaccttgccctcgcaggcgggggccacccccacccctcgcaccaaggccaagctcatccccaccggccgggatgtggggccggtgcctcttaagccagtcccgggcaagagcacccccaaactcaacggcagcggccccagctggtggccagagtgcacctgtaccaaccgggactggtatgagcaggtgaatggcagtgatggcatgttcaaatatgaggaaatcgtacttgagaggggcaactctggcctgggcttcagtatcgcaggtggcatcgacaatccccatgtccctgatgaccctggcatttttattaccaagattatccctggtggagcagctgccatggatgggaggctgggggtgaatgactgtgtgctgcgggtgaatgaggtggaagtgtcggaggtggtacacagccgggcggtggaggcgctgaaagaggcaggccctgtggtgcgattggtggtgcggaggcgacagcctccacccgagaccatcatggaggtcaacctgctcaaagggcccaaaggcctgggtttcagcattgctgggggtattggcaaccagcacatcccaggagacaacagcatctacatcaccaagatcattgaggggggtgctgctcagaaggatggacgcctacagattggggaccggctgctggcggtgaacaacaccaatctgcaggatgtgaggcacgaggaagctgtggcctcactgaagaacacatctgatatggtgtatttgaaggtggccaagccaggcagcctccacctcaacgacatgtacgctccccctgactacgccagcacttttactgccttggctgacaaccacataagccataattccagcctgggttatctcggggctgtggagagcaaggtcagctaccctgctcctcctcaggttccccccacccgctactctcctattcccaggcacatgctggctgaggaggacttcaccagagagcctcgcaagatcatcctgcacaaaggctccacaggcctgggcttcaacatcgtaggaggagaggatggagaaggcatttttgtctccttcatcctggcaggaggcccagctgacctgagtggggagctgcgcaggggagaccggatcttatcggtgaatggagtgaatctgaggaatgcaactcatgagcaggctgcagctgctctgaaacgggccggccagtcagtcaccattgtggcccagtacagacctgaagaatacagtcgctttgaatcgaagatacatgacttacgagaacaaatgatgaacagcagcatgagctctgggtctgggtccctccgaacaagtgaaaagaggtccttgtatgtcagggccctgtttgattatgatcggactcgggacagctgcctgccaagccaggggctcagcttctcttatggtgacattctgcatgtcattaatgcctctgatgatgagtggtggcaggcaaggctggtgaccccacacggagaaagtgagcagatcggtgtgatccccagtaagaagagggtggaaaagaaagaaagagctcgattgaaaactgtgaagttccatgccaggacggggatgattgagtctaacagggacttcccggggttaagtgacgattattatggagcaaagaacctgaaaggacaagaggatgctattttgtcatatgagccagtgacacggcaagaaattcactatgcaaggcctgtgatcatcctgggcccaatgaaggaccgagtcaatgatgacctgatctccgaatttccacataaatttggatcctgtgtgccacatactacccggcctcgacgtgataatgaggtggatggacaagactaccactttgtggtgtcccgagaacaaatggagaaagatattcaggacaacaagttcatcgaggcgggccaatttaatgataacctctatgggaccagcatccagtcagtgcgggcagttgcagagaggggcaagcactgcatcttagatgtttccggcaatgctatcaagagactgcagcaagcacaactttaccccattgccattttcatcaagcccaagtccattgaagcccttatggaaatgaaccgaaggcagacatatgaacaagcaaataagatctatgacaaagccatgaaactggagcaggaatttggagagtactttacagccattgtacagggtgactcactggaagagatttataacaaaatcaaacaaatcattgaggaccagtctgggcactacatttgggtcccatcccctgaaaaactctgaagaatcccctccaaccattctcttgtgaacagaagaaatcaagtccctcttccctcctccctcttcattcctgtccccatggggagaacaaatgctactgttcttgtccccttttttagatatgtcaaaaaaaattaagttttctagtcctgttcttttttttttttaagtttttgtttgtttcagtttattttttgggatgatgccatctcattcatcatgtgactgtgcccattcctgcatggacctttcccaagcgctagcataggtgcaaaatccatcagagccattgttttcataaaaaccaagcagaagtgaagagaaaagaggaggactgatggaaagacagactctggacagctgcacggcttgtgaagtgagctaaatgcaccacatgatgagatgctcctggg

SEQ ID NO: 14414 - DNA, 1967 bp, Homo sapiens
ataaaaaccgtcctcgggcgcggcggggagaagccgagctgagcggatcctcacacgactgtgatccgattctttccagcggcttctgcaaccaagcgggtcttacccccggtcctccgcgtctccagtcctcgcacctggaaccccaacgtccccgagagtccccgaatccccgctcccaggctacctaagaggatgagcggtgctccgacggccggggcagccctgatgctctgcgccgccaccgccgtgctactgagcgctcagggcggacccgtgcagtccaagtcgccgcgctttgcgtcctgggacgagatgaatgtcctggcgcacggactcctgcagctcggccaggggctgcgcgaacacgcggagcgcacccgcagtcagctgagcgcgctggagcggcgcctgagcgcgtgcgggtccgcctgtcagggaaccgaggggtccaccgacctcccgttagcccctgagagccgggtggaccctgaggtccttcacagcctgcagacacaactcaaggctcagaacagcaggatccagcaactcttccacaaggtggcccagcagcagcggcacctggagaagcagcacctgcgaattcagcatctgcaaagccagtttggcctcctggaccacaagcacctagaccatgaggtggccaagcctgcccgaagaaagaggctgcccgagatggcccagccagttgacccggctcacaatgtcagccgcctgcaccggctgcccagggattgccaggagctgttccaggttggggagaggcagagtggactatttgaaatccagcctcaggggtctccgccatttttggtgaactgcaagatgacctcagatggaggctggacagtaattcagaggcgccacgatggctcagtggacttcaaccggccctgggaagcctacaaggcggggtttggggatccccacggcgagttctggctgggtctggagaaggtgcatagcatcacgggggaccgcaacagccgcctggccgtgcagctgcgggactgggatggcaacgccgagttgctgcagttctccgtgcacctgggtggcgaggacacggcctatagcctgcagctcactgcacccgtggccggccagctgggcgccaccaccgtcccacccagcggcctctccgtacccttctccacttgggaccaggatcacgacctccgcagggacaagaactgcgccaagagcctctctggaggctggtggtttggcacctgcagccattccaacctcaacggccagtacttccgctccatcccacagcagcggcagaagcttaagaagggaatcttctggaagacctggcggggccgctactacccgctgcaggccaccaccatgttgatccagcccatggcagcagaggcagcctcctagcgtcctggctgggcctggtcccaggcccacgaaagacggtgactcttggctctgcccgaggatgtggccgttccctgcctgggcaggggctccaaggaggggccatctggaaacttgtggacagagaagaagaccacgactggagaagccccctttctgagtgcaggggggctgcatgcgttgcctcctgagatcgaggctgcaggatatgctcagactctagaggcgtggaccaaggggcatggagcttcactccttgctggccagggagttggggactcagagggaccacttggggccagccagactggcctcaatggcggactcagtcacattgactgacggggaccagggcttgtgtgggtcgagagcgccctcatggtgctggtgctgttgtgtgtaggtcccctggggacacaagcaggcgccaatggtatctgggcggagctcacagagttcttggaataaaagcaacctcagaacacttaaaaaaaaaaaaaaaaaaaaaaaaaaaaaaaaaaaaaaaaaaaaaaaaaaaaaaaaaaaaaaaa

SEQ ID NO: 14415 - DNA, 880 bp, Homo sapiens
tgaaaatctactctatcagctgctgtggttgccaccattctcaggaccctcgccatgaaagcccttatgctgctcaccctgtctgttctgctctgctgggtctcagctgacattcgctgtcactcctgctacaaggtccctgtgctgggctgtgtggaccggcagtcctgccgcctggagccaggacagcaatgcctgacaacacatgcataccttggtaagatgtgggttttctccaatctgcgctgtggcacaccagaagagccctgtcaggaggccttcaaccaaaccaaccgtaagctgggtctgacatataacaccacctgctgcaacaaggacaactgcaacagcgcaggaccccggcccactccagccctgggccttgtcttccttacctccttggctggccttggcctctggctgctgcactgagactcattccattggctgcccctcctcccacctgccttggcctgagcctctctccctgtgtctctgtatcccctggctttacagaatcgtctctccctagctcccatttctttaattaaacactgttccgagtggtctcctcatccgtccttcccacctcacacccttcactctcctttttctgggtcccttcccacttccttccaggacctccattggctcctagaagggctccccactttgcttcctatactctgctgtcccctacttgaggagggattgggatctgggcctgaaatggggcttctgtgttgtccccagtgaaggctcccacaaggacctgatgacctcactgtacagagctgactccccaaatccaggctcccatatgtaccccatcccccatactcacctctttccattttgagtaataaatgtctgagtctga

SEQ ID NO: 14416 - DNA, 3992 bp, Homo sapiens
ataaaagctgcccggggaagccaggagagcgaagggcggacgtactcgccacggcacccaggctgcgcgcacgcggtcccggtgtgcagctggagagcgagcggccaccgggagcccccggcacagcccgcgcccgccccgcaggagcccgcgaagatgccccggcgcagcctgcacgcggcggccgtgctcctgctggtgatcttaaaggaacagccttccagcccggccccagtgaacggttccaagtggacttattttggtcctgatggggagaatagctggtccaagaagtacccgtcgtgtgggggcctgctgcagtcccccatagacctgcacagtgacatcctccagtatgacgccagcctcacgcccctcgagttccaaggctacaatctgtctgccaacaagcagtttctcctgaccaacaatggccattcagtgaagctgaacctgccctcggacatgcacatccagggcctccagtctcgctacagtgccacgcagctgcacctgcactgggggaacccgaatgacccgcacggctctgagcacaccgtcagcggacagcacttcgccgccgagctgcacattgtccattataactcagacctttatcctgacgccagcactgccagcaacaagtcagaaggcctcgctgtcctggctgttctcattgagatgggctccttcaatccgtcctatgacaagatcttcagtcaccttcaacatgtaaagtacaaaggccaggaagcattcgtcccgggattcaacattgaagagctgcttccggagaggaccgctgaatattaccgctaccgggggtccctgaccacacccccttgcaaccccactgtgctctggacagttttccgaaaccccgtgcaaatttcccaggagcagctgctggctttggagacagccctgtactgcacacacatggacgacccttcccccagagaaatgatcaacaacttccggcaggtccagaagttcgatgagaggctggtatacacctccttctcccaagtgcaagtctgtactgcggcaggactgagtctgggcatcatcctctcactggccctggctggcattcttggcatctgtattgtggtggtggtgtccatttggcttttcagaaggaagagtatcaaaaaaggtgataacaagggagtcatttacaagccagccaccaagatggagactgaggcccacgcttgaggtccccggagctcccgggcacatccaggaaggaccttgctttggaccctacacacttcggctctctggacacttgcgacacctcaaggtgttctctgtagctcaatctgcaaacatgccaggcctcagggatcctctgctgggtgcctccttgccttgggaccatggccaccccagagccatccgatcgatggatgggatgcactctcagaccaagcagcaggaattcaaagctgcttgctgtaactgtgtgagattgtgaagtggtctgaattctggaatcacaaaccaagccatgctggtgggccattaatggttggaaaacactttcatccggggctttgccagagcgtgctttcaagtgtcctggaaattctgctgcttctccaagctttcagacaagaatgtgcactctctgcttaggttttgcttgggaaactcaacttctttcctctggagacggggcatctccctctgatttccttctgctatgacaaaacctttaatctgcaccttacaactcggggacaaatggggacaggaaggatcaagttgtagagagaaaaagaaaacaagagatatacattgtgatatattagggacactttcacagtcctgtcctctggatcacagacactgcacagaccttagggaatggcaggttcaagttccacttcttggtggggatgagaagggagagagagctagagggacaaagagaatgagaagacatggatgatctgggagagtctcactttggaatcagaattggaatcacattctgtttatcaagccataatgtaaggacagaataatacaatattaagtccaaatccaacctcctgtcagtggagcagttatgttttatactctacagattttacaaataatgaggctgttccttgaaaatgtgttgttgctgtgtcctggaggagacatgagttccgagatgacccaatctgcctttgaatctggaggaaataggcagaaacaaaatgactgtagaacttattctctgtaggccaaatttcatttcagccacttctgcaggatccctactgccaacctggaatggagacttttatctacttctctctctctgaagatgtcaaatcgtggtttagatcaaatatatttcaagctataaaagcaggaggttatctgtgcagggggctggcatcatgtatttaggggcaagtaataatggaatgctactaagatactccatattcttccccgaatcacacagacagtttctgacaggcgcaactcctccattttcctcccgcaggtgagaaccctgtggagatgagtcagtgccatgactgagaaggaaccgacccctagttgagagcaccttgcagttccccgagaactttctgattcacagtctcattttgacagcatgaaatgtcctcttgaagcatagctttttaaatatctttttccttctactcctccctctgactctaagaattctctcttctggaatcgcttgaacccaggaggcggaggttgcagtaagccaaggtcatgccactgcactctagcctgggtgacagagcgagactccatctcaaaaaaaaaaaaaaaaaaattattctgtaccatcacaacttttcacaacgatggcaagccttatgtcttgggagcctgttttgctaggcaaagttacaagtgacctaatgggagctcaaatgtgtgtgtgtctctctgtgtgtttgtgtgtgtgtgtgcactcaagacctctaacagcctcgaagcctggggtggcatcccggccttgccattagcatgcctcatgcatcatcagatgacaaggacaaccctcatgacgaagcaacatgaattagggggcctcttggccttggtccaaaattgtcaatcagaaatgaacataaaggactccagagcagtgggactgtctgtcaaaagactctgtatatcttttgtggatgagttttgtgagagaacagagagaccattgtacctggcacaagggctgttcatgaaaagggagacttactgggaggtgcaagacagtggcatttctcctctcctcttgctgctcagcacagccctggattgcagccccgaggctgagaccagacaaagcccgggaggcagaaagatgctccaagaaccaacactatcaatgtctttgcaaatcctcacaggattcctgtgggtccagctttggaactgggaaacctttcttcggatccgcactcattccactgatgccagctgcccctgaaggatgccagtactgtggtgtgtgagtctcagcagccgcccacacgctcctaactctgctgcatggcagatgcctaggtggaaatagcaaaaacaaggcccaggctggggccagggccagaggggaaggccctggattctcactcatgtgagatcttgaatctctttctttgttctgtttgtttagttagtatcatctggtaaaatagttaaaaaacaacaaaaaactctgtatctgtttctagcatgtgctgcattgactctattaatcacatttcaaattcaccctacattcctctcctcttcactagcctctctgaaggtgtcctggccagccctggagaagcactggtgtctgcagcacccctcagttcctgtgcctcagcccacaggccactgtgataatggtctgtttagcacttctgtatttattgtaagaatgattataatgaagatacacactgtaactacaagaaattataaatgtttttcacatcaaaaaaaaaaaaaaaaaa

SEQ ID NO: 14417 - DNA, 2262 bp, Homo sapiens
gggggctttgcggctgtcgtcaagcgcggcgttgggccggcgggcgggggctgaggggctgccatggcggcggcgggccggctcccgagctcctgggccctcttctcgccgctcctcgcagggcttgcactactgggagtcgggccggtcccagcgcgggcgctgcacaacgtcacggccgagctctttggggccgaggcctggggcacccttgcggctttcggggacctcaactccgacaagcagacggatctcttcgtgctgcgggaaagaaatgacttaatcgtctttttggcagaccagaatgcaccctattttaaacccaaagtaaaggtatctttcaagaatcacagtgcattgataacaagtgtagtccctggggattatgatggagattctcaaatggatgtccttctgacatatcttcccaaaaattatgccaagagtgaattaggagctgttatcttctggggacaaaatcaaacattagatcctaacaatatgaccatactcaataggacttttcaagatgagccactaattatggatttcaatggtgatctaattcctgatatttttggtatcacaaatgaatccaaccagccacagatactattaggagggaatttatcatggcatccagcattgaccactacaagtaaaatgcgaattccacattctcatgcatttattgatctgactgaagattttacagcagatttattcctgacgacattgaatgccaccactagtaccttccagtttgaaatatgggaaaatttggatggaaacttctctgtcagtactatattggaaaaacctcaaaatatgatggtggttggacagtcagcatttgcagactttgatggagatggacacatggatcatttactgccaggctgtgaagataaaaattgccaaaagagtaccatctacttagtgagatctgggatgaagcagtgggttccagtcctacaagatttcagcaataagggcacactctggggctttgtgccatttgtggatgaacagcaaccaactgaaataccaattccaattacccttcatattggagactacaatatggatggctatccagacgctctggtcatactaaagaacacatctggaagcaaccagcaggcctttttactggagaacgtcccttgtaataatgcaagctgtgaagaggcgcgtcgaatgtttaaagtctactgggagctgacagacctaaatcaaattaaggatgccatggttgccaccttctttgacatttacgaagatggaatcttggacattgtagtgctaagtaaaggatatacaaagaatgattttgccattcatacactaaaaaataactttgaagcagatgcttattttgttaaagttattgttcttagtggtctgtgttctaatgactgtcctcgtaagataacaccctttggagtgaatcaacctggaccttatatcatgtatacaactgtagatgcaaatgggtatctgaaaaatggatcagctggccaactcagccaatccgcacatttagctctccaactaccatacaacgtgcttggtttaggtcggagcgcaaattttcttgaccatctctacgttggtattccccgtccatctggagaaaaatctatacgaaaacaagagtggactgcaatcattccaaattcccagctaattgtcattccataccctcacaatgtccctcgaagttggagtgccaaactgtatcttacaccaagtaatattgttctgcttactgctatagctctcatcggtgtctgtgttttcatcttggcaataattggcattttacattggcaggaaaagaaagcagatgatagagaaaaacgacaagaagcccaccggtttcattttgatgctatgtgacttgcctttaatattacataatggaatggctgttcacttgattagttgaaacacaaattctggcttgaaaaaataggggagattaaatattatttataaatgatgtatcccatggtaattattggaaagtattcaaataaatatggtttgaatatgtcacaaggtctttttttttaaagcactttgtatataaaaatttgggttctctattctgtagtgctgtacatttttgttcctttgtggaatgtgttgcatgtactccagtgtttgtgtatttataatcttatttgcatcatgatgatggaaaaagttgtgtaaataaaaataattaaaaaaaaaaaaaaaaaaaaaaaaaaaaaa

SEQ ID NO: 14418 - DNA, 5178 bp, Homo sapiens
ggcgcggagtcagagtggcgcagcaagtggccgcaggtggcgacggtggcggggggtggggtgtgaggtaatccaggggtcgcggaagaggaggctgagagggtcaaaagaaaactaaagctgcagtccggcctactgttccgggggccgcggagcccccacccggggagatggacctcaaccggatcatccaggcgctgaagggcaccatcgacccgaagttgcggattgcagccgagaacgagctcaaccagtcctacaagattatcaattttgcccccagtttacttcggattatagtctctgaccatgtggaattcccagtacgacaggcagctgccatttacctgaagaacatggtgacacaatactggccagatcgagaacctccaccaggagaagcaatatttccattcaacattcacgaaaacgatcgccagcaaatacgtgataacattgtggaaggaataattcggtctccagatttagtgagagtccaattaacaatgtgtctccgtgccatcataaaacatgattttcctggtcactggccaggagtggtcgacaagatagactattacttgcaatcacagagcagtgcaagctggcttggcagtttattatgcctgtatcaactggtgaagacatatgaatataagaaagcagaagagagagaacctcttataatagcaatgcagatattcctgcctcgtattcagcaacaaattgttcagctccttcctgattcctcctattattctgtattactgcagaaacaaattctgaaaatcttttatgcacttgttcagtatgcattgcctcttcagctagtgaataaccaaaccatgacaacatggatggagatcttccgaactattatcgacaggaccgttcctcctgagactctgcacattgatgaggatgatagaccagaactggtatggtggaagtgtaagaagtgggcactgcatattgtagctcggctctttgaacgatatggaagcccaggaaatgtcacaaaagaatactttgaattttctgaattctttttgaaaacctatgcagtgggcattcagcaggtgctactaaaaattttagatcaatatagacagaaagaatatgtagctccccgtgttcttcagcaagcattcaactatctcaaccaaggggtggttcattctataacctggaagcagatgaagccacacatacagaatatctctgaagatgtgattttttctgtgatgtgttataaagatgaggatgaagagctgtggcaagaagatccatatgagtatataaggatgaaatttgatatttttgaagattatgcttctcccaccacagcagcccagactctcttatatactgctgcaaagaaaagaaaagaggtgttgccaaaaatgatggcattctgttatcaaatcctgacagacccgaactttgaccctaggaagaaagatggagccctgcatgtgattggttccctagctgagattttactgaagaagagtttattcaaggaccaaatggagctgtttctacaaaatcatgtatttccattattattgtctaacctgggatatcttcgagctagatcttgctgggtacttcatgcatttagttctttgaagttccataatgagctcaatctaagaaatgccgttgaattagcgaagaagagcctgattgaagataaagagatgcctgtcaaagttgaagctgcccttgctcttcagtctttaatttctaaccagatacaagctaaggaatatatgaagccacatgtgaggcctattatgcaggaactgttgcacattgttagagagacagaaaatgatgatgttactaatgtcatccagaagatgatatgtgaatacagtcaagaggtagcctcaattgctgttgatatgacccaacacttggctgagatatttggcaaagttcttcaaagtgatgaatatgaagaagttgaagacaaaacagtaatggctatgggaattttacataccattgatactatcttaacagttgtagaagatcataaagagattacccagcagttagagaatatctgtctacggatcattgatcttgttctgcagaaacatgtaattgaattctatgaagaaattctttccctggcatacagtttaacctgccacagtatttcccctcaaatgtggcagcttctaggtatactatatgaagtgtttcagcaggattgctttgaatactttacagacatgatgcctctcctgcataattatgtgacaatagatacagataccttactatcaaatgcaaaacatttagaaattctttttacaatgtgtaggaaggtactatgtggagatgcaggagaagatgcagagtgtcatgcagctaaacttctggaagtcatcattcttcagtgcaaaggaaggggaattgatcagtgcattccactcttcgttcaacttgttttggagagattaactcgaggggtcaaaactagtgagcttcgtactatgtgtcttcaggttgcaattgctgccttgtactacaaccctgatttgctgctacatactttagaacgaattcagttgcctcacaaccctggacctatcactgtacagtttataaatcaatggatgaatgatacagattgttttcttgggcatcatgaccggaagatgtgtataataggactgagtatccttttggaattgcaaaatcgacctcctgcagtagatgctgtggtgggacagattgttccctcaattcttttccttttccttggcctaaagcaggtctgtgctactagacaactggtaaaccgggaagatcgttcaaaagcagagaaagctgatatggaagaaaatgaggagatttcaagtgatgaagaggagacaaatgtaactgctcaagcaatgcagtcaaataatggaagaggtgaagatgaggaggaggaagatgatgactgggatgaagaagtattggaagaaaccgcgcttgaggggttcagtactccacttgaccttgacaatagtgtggatgaatatcagttttttacacaagctctgataactgtgcagagtcgagatgcagcctggtaccagctgctgatggcaccactcagcgaggatcagaggacagcactgcaggaggtgtacacactggcagagcaccgacggacggtggcagaggcaaagaagaagattgaacaacagggaggcttcacctttgaaaacaaaggagtcctctccgcatttaattttgggactgtgcccagcaacaactgaaggaaagaacatcagctgaccaaatgtcatcgctgcattttatttcacaagaggagtgtgagggtcaaggggatgaaatgaggggctgcttttagggccctcctgctgtgccagttaccatctggcattaggcagcacttttatctactctttcccctttgacctttgtcaccctgaaatatatattttaaacagctactgtaagtatgaaatgaaagaaaaacaatcattggacggaaaaggacaacccatatgttccaaaggctgaatgcccaaggttgttttagaggattggatagacttgcacgtctcaggtttttgccatgcagaatcaatggatttatgcggataacagtgccttctgttgtacatgaattatcagaaaaaaatttttggagtgcattgcaattttttttaaagcataaaacatatttctagatacaacataaaccttggttatatgtcaactattctgcattttactctgtgaatttattgttaggcagttactgcaagtcactctggtttcaaaatcttcacggctccctctgctcaccctgctgctggggggcttttttcaggggttgtattataaaatatgcactggctgtggtttttcataagatgttttgtggctttttaaagaagtgtcttactccctcttctctcatttttttctgccttgaaaaggggtggtatttcttttggggtcaacaaatacacatatcagtttcactcctaaccttgtaagttcaggactcattttcttggcagcaagtggcaggggctctttagtcactggagttaacagtaagtctgagtatattctgaataatgtaattatgcaattaattgataatcatacctaaagcacattgaacttctaagagacaggtgctacgtaagcacactgtctttctggatggggacttgtattttaaataacttatcattccagctatgttggactagggtccaaagcattttataatatttttttttaatctaggaaaaagacccaaacaaatctaacttcttgctttctcacctatttgaattttctcctacctaatttgtttgtgtctttattatagctcagtttgacttctcaaacttttcaagggttggggcagctgcacttttaggttgcctataggaaatattgcatatggagattacagtgtttttctgacctagttcaagaccagaacatgggtcatagggtttttattcagcaaaatgaaaacgtatcttcagaacttaacatattactggatgtgatacagattttgctttctgtggaattgaaaattcacaaaaattcacagcttaaatttcccatcagtgactggaggaatttttttcaggtgcttcctatattactatccctcatgcatattaactctttagaattttaggttaagtgatgtctatagaagtagcctggaaaaccatgagttttggagttcagtgaccccctgctttcctctgctcctcccttcccaaggcattgaagctgaatgtgccaactggcagttagaagcgaaagatggcattgggagaaattttagagagctttcaaactctttattctcatgttccacatggtctaattttaacataaataatatgccttcacactggattgtaaaaggcatgtgatttttgagattttattttgtgatgtattgtcttctgcagtattaaagggaaagagatattaatgtgcattaccctatcttgtttttgaagccagggtagttgtatgattttgttaccagcagtgctaacctgaatgtgacctggttaccttggaaatgcaggaacttatatgaatgtactataaaataaaatgcggactgattcccaggaaaaaaaaaaaaaaaaaaaaaaa

SEQ ID NO: 14419 - DNA, 2184 bp, Homo sapiens
tattcttccaaatggaaactgctaatttttgaagcagaaggttgacagcttcagtaagatctcaagagagcgagaagactggaatcagggaaccctactctggaaactgtcagtcccagggcactggggagggctgaggccgaccatgcccagcctgctgctgctgttcacggctgctctgctgtccagctgggctcagcttctgacagacgccaactcctggtggtcattagctttgaacccggtgcagagacccgagatgtttatcatcggtgcccagcccgtgtgcagtcagcttcccgggctctcccctggccagaggaagctgtgccaattgtaccaggagcacatggcctacataggggagggagccaagactggcatcaaggaatgccagcaccagttccggcagcggcggtggaattgcagcacagcggacaacgcatctgtctttgggagagtcatgcagataggcagccgagagaccgccttcacccacgcggtgagcgccgcgggcgtggtcaacgccatcagccgggcctgccgcgagggcgagctctccacctgcggctgcagccggacggcgcggcccaaggacctgccccgggactggctgtggggcggctgtggggacaacgtggagtacggctaccgcttcgccaaggagtttgtggatgcccgggagcgagagaagaactttgccaaaggatcagaggagcagggccgggtgctcatgaacctgcaaaacaacgaggccggtcgcagggctgtgtataagatggcagacgtagcctgcaaatgccacggcgtctcggggtcctgcagcctcaagacctgctggctgcagctggccgagttccgcaaggtcggggaccggctgaaggagaagtacgacagcgcggccgccatgcgcgtcacccgcaagggccggctggagctggtcaacagccgcttcacccagcccaccccggaggacctggtctatgtggaccccagccccgactactgcctgcgcaacgagagcacgggctccctgggcacgcagggccgcctctgcaacaagacctcggagggcatggatggctgtgagctcatgtgctgcgggcgtggctacaaccagttcaagagcgtgcaggtggagcgctgccactgcaagttccactggtgctgcttcgtcaggtgtaagaagtgcacggagatcgtggaccagtacatctgtaaatagcccggagggcctgctcccggcccccctgcactctgcctcacaaaggtctatattatataaatctatataaatctattttatatttgtataagtaaatgggtgggtgctatacaatggaaagatgaaaatggaaaggaagagcttatttaagagacgctggagatctctgaggagtggactttgctggttctctcctcttggtgggtgggagacagggctttttctctccctctggcgaggactctcaggatgtagggacttggaaatatttactgtctgtccaccacggcctggaggagggaggttgtggttggatggaggagatgatcttgtctggaagtctagagtctttgttggttagaggactgcctgtgatcctggccactaggccaagaggccctatgaaggtggcgggaactcagcttcaacctcgatgtcttcagggtcttgtccagaatgtagatgggttccgtaagaggcctggtgctctcttactctttcatccacgtgcacttgtgcggcatctgcagtttacaggaacggctccttccctaaaatgagaagtccaaggtcatctctggcccagtgaccacagagagatctgcacctcccggacttcaggcctgcctttccagcgagaattcttcatcctccacggttcactagctcctacctgaagaggaaagggggccatttgacctgacatgtcaggaaagccctaaactgaatgtttgcgcctgggctgcagaagccagggtgcatgaccaggctgcgtggacgttatactgtcttcccccacccccggggaggggaagcttgagctgctgctgtcactcctccaccgagggaggcctcacaaaccacaggacgctgcaacgggtcaggctggcgggcccggcgtgctcatcatctctgccccaggtgtacggtttctctctgacattaaatgcccttcatgg

SEQ ID NO: 14420 - DNA, 2251 bp, Homo sapiens
gaccattagcaggcacccaggcctgtctttggctcggaaacggtggcccccaatgtagcctagtttgaacctaggaactgcaggaccagagagattccactggagcctgatggacgggtgacagagggaaccctactctggaaactgtcagtcccagggcactggggagggctgaggccgaccatgcccagcctgctgctgctgttcacggctgctctgctgtccagctgggctcagcttctgacagacgccaactcctggtggtcattagctttgaacccggtgcagagacccgagatgtttatcatcggtgcccagcccgtgtgcagtcagcttcccgggctctcccctggccagaggaagctgtgccaattgtaccaggagcacatggcctacataggggagggagccaagactggcatcaaggaatgccagcaccagttccggcagcggcggtggaattgcagcacagcggacaacgcatctgtctttgggagagtcatgcagataggcagccgagagaccgccttcacccacgcggtgagcgccgcgggcgtggtcaacgccatcagccgggcctgccgcgagggcgagctctccacctgcggctgcagccggacggcgcggcccaaggacctgccccgggactggctgtggggcggctgtggggacaacgtggagtacggctaccgcttcgccaaggagtttgtggatgcccgggagcgagagaagaactttgccaaaggatcagaggagcagggccgggtgctcatgaacctgcaaaacaacgaggccggtcgcagggctgtgtataagatggcagacgtagcctgcaaatgccacggcgtctcggggtcctgcagcctcaagacctgctggctgcagctggccgagttccgcaaggtcggggaccggctgaaggagaagtacgacagcgcggccgccatgcgcgtcacccgcaagggccggctggagctggtcaacagccgcttcacccagcccaccccggaggacctggtctatgtggaccccagccccgactactgcctgcgcaacgagagcacgggctccctgggcacgcagggccgcctctgcaacaagacctcggagggcatggatggctgtgagctcatgtgctgcgggcgtggctacaaccagttcaagagcgtgcaggtggagcgctgccactgcaagttccactggtgctgcttcgtcaggtgtaagaagtgcacggagatcgtggaccagtacatctgtaaatagcccggagggcctgctcccggcccccctgcactctgcctcacaaaggtctatattatataaatctatataaatctattttatatttgtataagtaaatgggtgggtgctatacaatggaaagatgaaaatggaaaggaagagcttatttaagagacgctggagatctctgaggagtggactttgctggttctctcctcttggtgggtgggagacagggctttttctctccctctggcgaggactctcaggatgtagggacttggaaatatttactgtctgtccaccacggcctggaggagggaggttgtggttggatggaggagatgatcttgtctggaagtctagagtctttgttggttagaggactgcctgtgatcctggccactaggccaagaggccctatgaaggtggcgggaactcagcttcaacctcgatgtcttcagggtcttgtccagaatgtagatgggttccgtaagaggcctggtgctctcttactctttcatccacgtgcacttgtgcggcatctgcagtttacaggaacggctccttccctaaaatgagaagtccaaggtcatctctggcccagtgaccacagagagatctgcacctcccggacttcaggcctgcctttccagcgagaattcttcatcctccacggttcactagctcctacctgaagaggaaagggggccatttgacctgacatgtcaggaaagccctaaactgaatgtttgcgcctgggctgcagaagccagggtgcatgaccaggctgcgtggacgttatactgtcttcccccacccccggggaggggaagcttgagctgctgctgtcactcctccaccgagggaggcctcacaaaccacaggacgctgcaacgggtcaggctggcgggcccggcgtgctcatcatctctgccccaggtgtacggtttctctctgacattaaatgcccttcatggaaaaaaaaaaaaaaaaaaaaaaaaaaaaa

SEQ ID NO: 14421 - DNA, 5855 bp, Homo sapiens
agttgcctgcgcgccctcgccggaccggcggctccctagttgcgccccgaccaggccctgcccttgctgccggctcgcgcgcgtccgcgccccctccattcctgggcgcatcccagctctgccccaactcgggagtccaggcccgggcgccagtgcccgcttcagctccggttcactgcgcccgccggacgcgcgccggaggactccgcagccctgctcctgaccgtccccccaggcttaacccggtcgctccgctcggattcctcggctgcgctcgctcgggtggcgacttcctccccgcgccccctccccctcgccatgaagaagtccattggaatattaagcccaggagttgctttggggatggctggaagtgcaatgtcttccaagttcttcctagtggctttggccatatttttctccttcgcccaggttgtaattgaagccaattcttggtggtcgctaggtatgaataaccctgttcagatgtcagaagtatatattataggagcacagcctctctgcagccaactggcaggactttctcaaggacagaagaaactgtgccacttgtatcaggaccacatgcagtacatcggagaaggcgcgaagacaggcatcaaagaatgccagtatcaattccgacatcgaaggtggaactgcagcactgtggataacacctctgtttttggcagggtgatgcagataggcagccgcgagacggccttcacatacgcggtgagcgcagcaggggtggtgaacgccatgagccgggcgtgccgcgagggcgagctgtccacctgcggctgcagccgcgccgcgcgccccaaggacctgccgcgggactggctctggggcggctgcggcgacaacatcgactatggctaccgctttgccaaggagttcgtggacgcccgcgagcgggagcgcatccacgccaagggctcctacgagagtgctcgcatcctcatgaacctgcacaacaacgaggccggccgcaggacggtgtacaacctggctgatgtggcctgcaagtgccatggggtgtccggctcatgtagcctgaagacatgctggctgcagctggcagacttccgcaaggtgggtgatgccctgaaggagaagtacgacagcgcggcggccatgcggctcaacagccggggcaagttggtacaggtcaacagccgcttcaactcgcccaccacacaagacctggtctacatcgaccccagccctgactactgcgtgcgcaatgagagcaccggctcgctgggcacgcagggccgcctgtgcaacaagacgtcggagggcatggatggctgcgagctcatgtgctgcggccgtggctacgaccagttcaagaccgtgcagacggagcgctgccactgcaagttccactggtgctgctacgtcaagtgcaagaagtgcacggagatcgtggaccagtttgtgtgcaagtagtgggtgccacccagcactcagccccgctcccaggacccgcttatttatagaaagtacagtgattctggtttttggtttttagaaatattttttatttttccccaagaattgcaaccggaaccattttttttcctgttaccatctaagaactctgtggtttattattaatattataattattatttggcaataatgggggtgggaaccaagaaaaatatttattttgtggatctttgaaaaggtaatacaagacttcttttgatagtatagaatgaaggggaaataacacataccctaacttagctgtgtggacatggtacacatccagaaggtaaagaaatacattttctttttctcaaatatgccatcatatgggatgggtaggttccagttgaaagagggtggtagaaatctattcacaattcagcttctatgaccaaaatgagttgtaaattctctggtgcaagataaaaggtcttgggaaaacaaaacaaaacaaaacaaacctcccttccccagcagggctgctagcttgctttctgcattttcaaaatgataatttacaatggaaggacaagaatgtcatattctcaaggaaaaaaggtatatcacatgtctcattctcctcaaatattccatttgcagacagaccgtcatattctaatagctcatgaaatttgggcagcagggaggaaagtccccagaaattaaaaaatttaaaactcttatgtcaagatgttgatttgaagctgttataagaattaggattccagattgtaaaaagatccccaaatgattctggacactagatttttttgtttggggaggttggcttgaacataaatgaaaatatcctgttattttcttagggatacttggttagtaaattataatagtaaaaataatacatgaatcccattcacaggttctcagcccaagcaacaaggtaattgcgtgccattcagcactgcaccagagcagacaacctatttgaggaaaaacagtgaaatccaccttcctcttcacactgagccctctctgattcctccgtgttgtgatgtgatgctggccacgtttccaaacggcagctccactgggtcccctttggttgtaggacaggaaatgaaacattaggagctctgcttggaaaacagttcactacttagggatttttgtttcctaaaacttttattttgaggagcagtagttttctatgttttaatgacagaacttggctaatggaattcacagaggtgttgcagcgtatcactgttatgatcctgtgtttagattatccactcatgcttctcctattgtactgcaggtgtaccttaaaactgttcccagtgtacttgaacagttgcatttataaggggggaaatgtggtttaatggtgcctgatatctcaaagtcttttgtacataacatatatatatatatacatatatataaatataaatataaatatatctcattgcagccagtgatttagatttacagtttactctggggttatttctctgtctagagcattgttgtccttcactgcagtccagttgggattattccaaaagttttttgagtcttgagcttgggctgtggccctgctgtgatcataccttgagcacgacgaagcaaccttgtttctgaggaagcttgagttctgactcactgaaatgcgtgttgggttgaagatatcttttttcttttctgcctcacccctttgtctccaacctccatttctgttcactttgtggagagggcattacttgttcgttatagacatggacgttaagagatattcaaaactcagaagcatcagcaatgtttctcttttcttagttcattctgcagaatggaaacccatgcctattagaaatgacagtacttattaattgagtccctaaggaatattcagcccactacatagatagcttttttttttttttttttaataaggacacctctttccaaacagtgccatcaaatatgttcttatctcagacttacgttgttttaaaagtttggaaagatacacatctttcataccccccttaggcaggttggctttcatatcacctcagccaactgtggctcttaatttattgcataatgatattcacatcccctcagttgcagtgaattgtgagcaaaagatcttgaaagcaaaaagcactaattagtttaaaatgtcacttttttggtttttattatacaaaaaccatgaagtactttttttatttgctaaatcagattgttcctttttagtgactcatgtttatgaagagagttgagtttaacaatcctagcttttaaaagaaactatttaatgtaaaatattctacatgtcattcagatattatgtatatcttctagcctttattctgtacttttaatgtacatatttctgtcttgcgtgatttgtatatttcactggtttaaaaaacaaacatcgaaaggcttatgccaaatggaagatagaatataaaataaaacgttacttgtatattggtaagtggtttcaattgtccttcagataattcatgtggagatttttggagaaaccatgacggatagtttaggatgactacatgtcaaagtaataaaagagtggtgaattttaccaaaaccaagctatttggaagcttcaaaaggtttctatatgtaatggaacaaaaggggaattctcttttcctatatatgttccttacaaaaaaaaaaaaaaaagaaatcaagcagatggcttaaagctggttataggattgctcacattcttttagcattatgcatgtaacttaattgttttagagcgtgttgctgttgtaacatcccagagaagaatgaaaaggcacatgcttttatccgtgaccagatttttagtccaaaaaaatgtatttttttgtgtgtttaccactgcaactattgcacctctctatttgaatttactgtggaccatgtgtggtgtctctatgccctttgaaagcagtttttataaaaagaaagcccgggtctgcagagaatgaaaactggttggaaactaaaggttcattgtgttaagtgcaattaatacaagttattgtgcttttcaaaaatgtacacggaaatctggacagtgctgcacagattgatacattagcctttgctttttctctttccggataaccttgtaacatattgaaaccttttaaggatgccaagaatgcattattccacaaaaaaacagcagaccaacatatagagtgtttaaaatagcatttctgggcaaattcaaactcttgtggttctaggactcacatctgtttcagtttttcctcagttgtatattgaccagtgttctttattgcaaaaacatatacccgatttagcagtgtcagcgtattttttcttctcatcctggagcgtattcaagatcttcccaatacaagaaaattaataaaaaatttatatataggcagcagcaaaagagccatgttcaaaatagtcattatgggctcaaatagaaagaagacttttaagttttaatccagtttatctgttgagttctgtgagctactgacctcctgagactggcactgtgtaagttttagttgcctaccctagctcttttctcgtacaattttgccaataccaagtttcaatttgtttttacaaaacattattcaagccactagaattatcaaatatgacgctatagcagagtaaatactctgaataagagaccggtactagctaactccaagagatcgttagcagcatcagtccacaaacacttagtggcccacaatatatagagagatagaaaaggtagttataacttgaagcatgtatttaatgcaaataggcacgaaggcacaggtctaaaatactacattgtcactgtaagctatacttttaaaatatttattttttttaaagtattttctagtcttttctctctctgtggaatggtgaaagagagatgccgtgttttgaaagtaagatgatgaaatgaatttttaattcaagaaacattcagaaacataggaattaaaacttagagaaatgatctaatttccctgttcacacaaactttacactttaatctgatgattggatattttattttagtgaaacatcatcttgttagctaactttaaaaaatggatgtagaatgattaaaggttggtatgatttttttttaatgtatcagtttgaacctagaatattgaattaaaatgctgtctcagtattttaaaagcaaaaaaggaatggaggaaaattgcatcttagaccatttttatatgcagtgtacaatttgctgggctagaaatgagataaagattatttatttttgttcatatcttgtacttttctattaaaatcattttatgaaatccaaaaaaaaaaaaaaaaaa

SEQ ID NO: 14422 - DNA, 4767 bp, Homo sapiens
gcccccgtagttagcgcggtgcttctcttccgctccgggtcggctccgtttccctttccgggcgggcaggcggcggaccccagtgtctttatccctcttttgcacagtcagcttctgcagctctcccgggctagcatggcagcgtggaagagttggacggccctgcggctctgcgccacagttgttgtacttgatatggtcgtctgtaaaggatttgtagaagatttagatgaatcgtttaaagaaaatcgaaatgatgacatttggcttgtagatttttatgcgccatggtgtggccattgtaaaaagctggaaccaatttggaatgaagttggtcttgagatgaaaagcattggttctccagttaaggttggaaagatggatgctacttcctattctagcattgcttcagagtttggagttcgaggttatccaacaattaagctattaaaaggggacttggcatataattatagaggaccacgaacaaaagatgatattattgagtttgctcacagagtatctggggctctaattcggccacttccaagtcaacaaatgtttgaacatatgcagaagagacaccgtgtatttttcgtttatgtaggtggagaatcacctttgaaagagaaatacatagatgctgcttcagaattgattgtatatacatacttcttttctgcctcagaagaagtggttcctgagtatgtgacactaaaagagatgccagctgtgcttgttttcaaagatgaaacttactttgtttatgatgagtatgaagatggtgatctgtcatcatggatcaacagggaaaggtttcagaattaccttgctatggatggcttcctcttgtatgaacttggagacacaggaaagcttgtggctcttgcagttattgatgagaaaaatacatcagttgaacataccagattgaagtcaattattcaggaagttgcaagagattacagagacctcttccatagggattttcagtttggccacatggatggaaatgactacataaataccttgctgatggatgaattgacagtcccaactgtagttgtactgaatacttcaaaccagcaatatttcttgctagatagacagattaagaatgttgaagacatggtccagtttattaataacattttggatggcacagtagaagcccaaggaggtgatagcattttgcagagattgaaaagaatagtatttgatgccaaatctactattgtgtctatattcaagagctcaccactgatgggctgctttctctttggcctgccactgggtgtcatcagtatcatgtgctatggaatctacacagccgacacagatggaggttatatagaagaacgatatgaagtgtctaaaagtgaaaatgaaaaccaagaacagatagaagagagcaaagaacagcaggagcccagcagtggaggatctgtagtgcctacagtgcaggagcccaaggatgtattagaaaagaagaaagattgagacttgatgactataaaatatttgttaggacttcaaattattaaagagtctatttattgaatttagacatttaatcatgatctttacagaaaagaacatgttattcgtattttgctaatatcaactgcatggattaaagtagtccctccatacatggggaagtgtttggagcaaagagatgaacagtttgtctgaaacaaacacagagcactccatcaaaatttacctgatctttgtgattagaacagaacaattctatttgcatgtttctctatctgaatattctgtgacaaaaagttaagattcttgggcagaatatttaaattggtcagtcaggtagaagatacatgtgtgatatagaaaaataatgcctctcctgctgccatccgtttccctcatatattttggacaagatttatatggacaaaattaagtctttaaaatttaggcactttaaggagaactaataactttttccatgtatcaagattatgaggttaaaaataatgtggttttatatagcatagtggttttattttgttagttatttttaaaggagaagaaatgttactttttaactttatactcagttgcattatcataaaattttcatatatgcctagataatggggaaaaaaagtcttgtgattgactttcgcaaaataaacaggatttactgagtagaggtttcagcccattccttggaatactaacaggtatttcatcagtcattgtaggttgggaagggtctctgttaatcctactctgctttagccagaatagcctagtattttatttctattttatatattgagatttcttctaacatttcctttgataaaaatcttctgctttttgaaaagtggtatgtatcatatttttatgtttctggtgtgtgaactttatggtaacttctactctagaatacgtacgtatgcacccacagacacacacagtttattgacacatctattatgtaatgctgtagacctgtccgtgtctgcttcataaggagtaacgactgacattagcatgtccagtgacaagtcacatccggtgtaaaaaaaagagatcagccagttaccttctccattgtcttagttctgtcacccatttcgtcaagtgacctctcatcttctataaactaatacaggaattctttccaaagcaatgtctaaaaactcttttttttaaagtaacagtttggtatgtttattgtagataaattatttttgaggccttcattttagctaagtttagaatttatattaggcaactatgatttgagtggttattcattgagtaattttccactataaagaattttattgaacatttattaaaaaataatgtaatgcatggtcaaaaaatatgtaattcatggtctggacactgacgttgtttagggatttagtcatcaaggacagccctctgttgtttctaatgccgtactaatcaagactgtatggacacttgcatcttaagtactaaggaattactagtgattgttttattttatccatgtactcttttagtatttaataattaaatacctattcttagtgtttgacactccatatttcttttttttggaaatgaaacaaatatgcagtccaaaattcaggaactactagagtgaaatgatattaagtggaaaccagagataaatgctgttaatttaacaagtagattcttctccaaagaatgatgagtgattcttgggaagataaatgttaatgttcccaatagtcaagcttgttttgcagtagtgaaaagcttagatgagtacggatacctcatttgaaactcagcctagtaaggaagtgaaaacttagcagtcagtgacatggggaaatagttatagaaaatgtcactgaattttttcatatttataattagtcatttacatatttttgtcttgttgatcattacctgtaaatgaaagaccttaataggaaaaaaagagtaaagctcagtgtgaatgcaaacatccacaaaatatgatcttcgtttatattctgtgatgttgtttataaatgaatgcctcagttctctgctacccttttcacagctttgtactgtttgccttatattctatttgtgcttttaaagtgtgtctgttgggaaaacaaaatgtgtaggtggtttgtaagtgaataatttttatttcttcttgtattaaaattttgtttttttctctactttgggagatgtttatttacattgtcagactattcacaaaacagattctaaaatttgtttgctcgtatgctgttcccttcaatgtgatatcagagattactatgaatgttagtttcattccgtgaaacattacttccatataaagacagatctcttaataagtgaatctagtggaagaacataggtatcattctaattccatggtaaattttgtcatgattctatatgaataatggggtccttcaggaagttggaatttttgccttctcttttaattgcagtgaagttctctttataacttctaaaattcggaattctagatccttgcttttgcagaatttggtgctcagacaatatttaaggacatttcagcgagacaaagtgcatgtttttatcgagtaccctgtgcaccacattatatctggcaattctttttgtttcattatgtgcatcaatatttttctcagctactattacctgaaacttgtttaacatgtattagacctagaattttcattttctttctcacatagttgcttcctggtatctgatttagaaataacatttaaatgccaagtatctgggggattgaaggaagggtctatatgagcaggtgaattagcagtactgtttttgtttagtggatattgttagtgactttttgtgtgtgttttgctttgggacctttttattttggtgttgcaaaaagtaacatattttcatcattgcttcatacgacatggagttaggacagggaaaaatcattcaacactccttatgcattaaatgatcaaataaaccagtgtaggatattaagactatcaattggtgggattaggcttgacattttatttttataaatatatattttttctgaatgtgtctgagtccaagagtgggcaaaaaataattttctactttggactaatctatagaggtttttgaaagtctgcattactaacttgttgaattcatgatattctgcctatggcacaaattgtaaacctttgtttttctaaaataaagtaattgaaaacctgcaaaaaaaaaaaaaaaaaaaaaaaa

SEQ ID NO: 14423 - DNA, 2048 bp, Homo sapiens
ttcctcccggcgtgctccgcggctcttggctcacagccgtcccttcgctggtgggaagaagccgagatggcggcagccagcgctggggcaacccggctgctcctgctcttgctgatggcggtagcagcgcccagtcgagcccggggcagcggctgccgggccgggactggtgcgcgaggggctggggcggaaggtcgagagggcgaggcctgtggcacggtggggctgctgctggagcactcatttgagatcgatgacagtgccaacttccggaagcggggctcactgctctggaaccagcaggatggtaccttgtccctgtcacagcggcagctcagcgaggaggagcggggccgactccgggatgtggcagccctgaatggcctgtaccgggtccggatcccaaggcgacccggggccctggatggcctggaagctggtggctatgtctcctcctttgtccctgcgtgctccctggtggagtcgcacctgtcggaccagctgaccctgcacgtggatgtggccggcaacgtggtgggcgtgtcggtggtgacgcaccccgggggctgccggggccatgaggtggaggacgtggacctggagctgttcaacacctcggtgcagctgcagccgcccaccacagccccaggccctgagacggcggccttcattgagcgcctggagatggaacaggcccagaaggccaagaacccccaggagcagaagtccttcttcgccaaatactggcacatcatcctggggggggccgtgttgctcacagccctgcgtcctgctgcgccagggcccgcgccaccgccacaggaggcctgatggatgtacatcattcccgtcgtcctgttcctcatgatgtcaggagcgccagacaccgggggccagggtgggggtgggggtgggggtggtggtgggggtagtggccggtgagggcccaggctggtcagcgtcccgtcttgcacacccaggggcctccctttctgctggagtcccctgtgtcctcagccatcccaagaagggtttgctggtccctcctttccccccgtcccacgaggccacctgggccagccccttgtcctctgccttctgctggcagaggagcagctggactggggcctttggcacagcagccggtgtctcctgcgcccgcctcccccatggccccatgcagccccaggggcttcccccctgcccatggagtagagcccgagatcctggccactatgccagttctgacctcgcatccccctaccccgagcccatgcagtctgggaacatgccgccttctctccagcctctgtgcctttgttccaggtggtctcaccctcctgtccctggctgggctaggtggtcctgtccaggctcctgcagcgcccccctcactttgacactggactaggatgcagcctcccttctgtgtccccttgagggtaccctgggtcccctcatcaggggcagaggcatgaaagagtcggggctggatggccgggggcttctgggcccgacgcctagtgcagcccctggggtcgtggtttgacatttgtctgcctggtgcaaacaaggaatccttgcctttaaggtgacaggccctccacaggcttccagacttgaaggaaaaggtttaagaaagaaaacaaaaccaacagttagtggagtcaaagcccagacactgtaaatagaaccccctccaccaccccccgccgcccagcatcctacctggactgcggtgctacgagggcctgcgggcctttgctgtgtgccaccctccctgtaagtctatttaaaaacatcgacgatacattgaaatgtgtgaacgttttgaaaagctacagcttccagcagccaaaagcaactgttgttttggcaagacggtcctgatgtacaagcttgattgaaattcactgctcacttgatacgttattcagaaacccaaggaatggctgtccccatcctcatgtggctgtgtggagctcagctgtgttgtgtggcagtttattaaactgtcccccagatcgacacgcaaaaaaaaaaaaaaa

SEQ ID NO: 14424 - DNA, 1637 bp, Homo sapiens
ggcaagacgcctcttcagttgtctgctactcagaggaaggggcggttggtgcggcctccattgttcgtgttttaaggcgccatgaggggtgacagaggccgtggtcgtggtgggcgctttggttccagaggaggcccaggaggagggttcaggccctttgtaccacatatcccatttgacttctatttgtgtgaaatggcctttccccgggtcaagccagcacctgatgaaacttccttcagtgaggccttgctgaagaggaatcaggacctggctcccaattctgctgaacaggcatctatcctttctctggtgacaaaaataaacaatgtgattgataatctgattgtggctccagggacatttgaagtgcaaattgaagaagttcgacaggtgggatcctataaaaaggggacaatgactacaggacacaatgtggctgacctggtggtgatactcaagattctgccaacgttggaagctgttgctgccctggggaacaaagtcgtggaaagcctaagagcacaggatccttctgaagttttaaccatgctgaccaacgaaactggctttgaaatcagttcttctgatgctacagtgaagattctcattacaacagtgccacccaatcttcgaaaactggatccagaactccatttggatatcaaagtattgcagagtgccttagcagccatccgacatgcccgctggttcgaggaaaatgcttctcagtccacagttaaagttctcatcagactactgaaggacttgaggattcgttttcctggctttgagcccctcacaccctggatccttgacctactaggccattatgctgtgatgaacaaccccaccagacagcctttggccctaaacgttgcatacaggcgctgcttgcagattctggctgcaggactgttcctgccaggttcagtgggtatcactgacccctgtgagagtggcaactttagagtacacacagtcatgaccctagaacagcaggacatggtctgctatacagctcagactctcgtccgaatcctctcacatggtggctttaggaagatccttggccaggagggtgatgccagctatcttgcttctgaaatatctacctgggatggagtgatagtaacaccttcagaaaaggcttatgagaagccaccagagaagaaggaaggagaggaagaagaggagaatacagaagaaccacctcaaggagaggaagaagaaagcatggaaactcaggagtgacattcccttcactccttttcctacccaagggggaagactggagcctaagctgcctgctactgggctttacatggtgacagacatttccgtgggatagggaagatagcaggaagaaaagtaaactccatagaagtgtcattccactgggttttgatattggcttagctgccagtctcccatttgtgacctatgccatccatctataatggaggataccaacatttcttcctaatattctataatctccaactcctgaaaacccctctctcaactaatactttgctgttgaaatgttgtgaaatgttaagtgtctggaaatttttttttctaagaaaaactattaaagtacttcctagtaaaaaaaaaaaaaaaaaaaaaaaaaa

SEQ ID NO: 14425 - DNA, 2664 bp, Homo sapiens
agagccagcccggaggagctagaaccttccccgcatttctttcagcagcctgagtcagaggcgggctggcctggcgtagccgcccagcctcgcggctcatgccccgatctgcccgaaccttctcccggggtcagcgccgcgccgcgccacccggctgagtcagcccgggcgggcgagaggctctcaactgggcgggaaggtgcgggaaggtgcggaaaggttcgcgaaagttcgcggcggcgggggtcgggtgaggcgcaaaaggataaaaagcccgtggaagcggagctgagcagatccgagccgggctggctgcagagaaaccgcagggagagcctcactgctgagcgcccctcgacggcggagcggcagcagcctccgtggcctccagcatccgacaagaagcttcagccatgcaggccccacgggagctcgcggtgggcatcgacctgggcaccacctactcgtgcgtgggcgtgtttcagcagggccgcgtggagatcctggccaacgaccagggcaaccgcaccacgcccagctacgtggccttcaccgacaccgagcggctggtcggggacgcggccaagagccaggcggccctgaacccccacaacaccgtgttcgatgccaagcggctgatcgggcgcaagttcgcggacaccacggtgcagtcggacatgaagcactggcccttccgggtggtgagcgagggcggcaagcccaaggtgcgcgtatgctaccgcggggaggacaagacgttctaccccgaggagatctcgtccatggtgctgagcaagatgaaggagacggccgaggcgtacctgggccagcccgtgaagcacgcagtgatcaccgtgcccgcctatttcaatgactcgcagcgccaggccaccaaggacgcgggggccatcgcggggctcaacgtgttgcggatcatcaatgagcccacggcagctgccatcgcctatgggctggaccggcggggcgcgggagagcgcaacgtgctcatttttgacctgggtgggggcaccttcgatgtgtcggttctctccattgacgctggtgtctttgaggtgaaagccactgctggagatacccacctgggaggagaggacttcgacaaccggctcgtgaaccacttcatggaagaattccggcggaagcatgggaaggacctgagcgggaacaagcgtgccctgcgcaggctgcgcacagcctgtgagcgcgccaagcgcaccctgtcctccagcacccaggccaccctggagatagactccctgttcgagggcgtggacttctacacgtccatcactcgtgcccgctttgaggaactgtgctcagacctcttccgcagcaccctggagccggtggagaaggccctgcgggatgccaagctggacaaggcccagattcatgacgtcgtcctggtggggggctccactcgcatccccaaggtgcagaagttgctgcaggacttcttcaacggcaaggagctgaacaagagcatcaaccctgatgaggctgtggcctatggggctgctgtgcaggcggccgtgttgatgggggacaaatgtgagaaagtgcaggatctcctgctgctggatgtggctcccctgtctctggggctggagacagcaggtggggtgatgaccacgctgatccagaggaacgccactatccccaccaagcagacccagactttcaccacctactcggacaaccagcctggggtcttcatccaggtgtatgagggtgagagggccatgaccaaggacaacaacctgctggggcgttttgaactcagtggcatccctcctgccccacgtggagtcccccagatagaggtgacctttgacattgatgctaatggcatcctgagcgtgacagccactgacaggagcacaggtaaggctaacaagatcaccatcaccaatgacaagggccggctgagcaaggaggaggtggagaggatggttcatgaagccgagcagtacaaggctgaggatgaggcccagagggacagagtggctgccaaaaactcgctggaggcccatgtcttccatgtgaaaggttctttgcaagaggaaagccttagggacaagattcccgaagaggacaggcgcaaaatgcaagacaagtgtcgggaagtccttgcctggctggagcacaaccagctggcagagaaggaggagtatgagcatcagaagagggagctggagcaaatctgtcgccccatcttctccaggctctatggggggcctggtgtccctgggggcagcagttgtggcactcaagcccgccagggggaccccagcaccggccccatcattgaggaggttgattgaatggcccttcgtgataagtcagctgtgactgtcagggctatgctatgggccttctagactgtcttctatgatcctgcccttcagagatgaactttccctccaaagctagaactttcttcccaggataactgaagtcttttgactttttggggggagggcggttcatcctcttctgcttcaaataaaaagtcattaatttattaaaacttgtgtggcactttaacattgctttcacctatattttgtgtactttgttacttgcatgtatgaattttgttatgtaaaatatagttatagacctaaataaaaaaaaaaaaaa

SEQ ID NO: 14426 - DNA, 5238 bp, Homo sapiens
cgagcggcggcgcggcgcggcaacatggcgacggtgcccgtgtactgcgtctgccggctcccctacgacgttacccgcccccgcgcggcccggcccccggcccggcccggaccgacccgggcagcgcagcggcggggccgagcggcggcgcccgacatcgacatataccactgcccaaactgtgagaaaacccatgggaagtccacagtaaagaagaagcggacctggcacaaacacggcccggggcaagcgcctgacgtcaagcccgtgcagaatggcagccagctcttcatcaaggagctgcggagccggacctttcccagtgctgaagacgtggtggcccgtgtgccaggaagtcagctcacgctgggctacatggaggagcacggcttcaccgagcccatcctcgtccctaagaaagacgggctgggtctggctgtcccggcccccacgttctatgtcagtgacgtcgagaactacgtggggccggaacggagtgtggatgtgacagatgtcaccaagcagaaggactgcaagatgaagctgaaggagtttgtggactattactacagcaccaaccgcaagcgggtcctcaacgtcaccaacctcgagttctctgacacccgaatgtccagcttcgtggagccacctgacattgtaaagaaactgtcatgggtagaaaactactggccagatgatgcattgctggccaagcccaaagtgaccaagtactgcctaatctgcgtgaaggacagttacaccgacttccacatcgactctgggggcgcctctgcctggtaccacgtgctcaagggggagaagaccttctatctcatcaggccggcctcggccaacatctccctgtatgagcgctggcggtctgcctctaaccacagcgagatgttctttgctgaccaggtcgacaaatgctacaagtgcatcgtcaagcagggccagaccctcttcatcccctcaggctggatctacgccacactcacccctgtggactgcctggccttcgcgggacatttcctccacagcctgagtgtggagatgcagatgagagcatatgaagtggaaaggaggttgaaactgggcagcctgactcagtttcccaactttgaaactgcgtgctggtacatggggaagcacctgctggaggcattcaaaggctctcacaaatctgggaagcagctgccccctcatctagtccaaggagctaaaattctcaatggtgctttccgatcgtggacgaagaagcaggctttggcagagcatgaggacgagctcccggagcacttcaaaccttcacagctaatcaaagacctggccaaagagatccggctcagtgagaatgcctccaaagccgtccgaccggaagtgaatactgtcgcctcgtcagatgaggtgtgtgacggggaccgggagaaggaggagcccccgtctcccattgaggccaccccgcctcaatccctcctggagaaagtgtccaaaaaaaagactcccaaaactgtgaagatgcccaagccatccaaaatccccaagcccccgaagccccctaagcccccaaggccccccaaaacgctgaagctcaaagatggaggcaagaagaaagggaagaagtcccgggagtcagcctcacccaccatccccaacctggacctgctcgaagcccacaccaaggaggcactgaccaagatggagccgcccaagaagggcaaggccacaaagagtgtcctgagtgtgcccaacaaagatgtggttcacatgcagaatgatgtggagaggctggaaattcgagagcaaaccaagagcaagtcagaggccaagtggaagtacaagaacagcaaacctgactccttactgaagatggaagaggagcagaagctagagaagtcgcctctagctggaaacaaagacaataagttctctttttctttctccaacaagaaactcctcggctccaaggctctcaggcccccgacgagccctggtgtgttcggggccttgcagaacttcaaggaggacaagcccaagcccgtgcgggatgagtatgagtacgtgtcggatgacggtgagctcaagatcgacgagtttcccatcaggaggaagaaaaacgccccgaaaagggacttgtccttcttgttggataagaaggctgtgctgcccacgcctgtcacgaagccaaagctggactcggcagcgtacaagagtgatgactcctcggacgagggttcgctgcacatcgacacagacaccaagcccggccgcaatgccagagtcaagaaggagagtgggagctcggcagctggcatcttggacctgctgcaggccagtgaggaggttggcgcgctggagtacaaccccagcagccagcccccggcctcccccagcacacaggaagccattcagggaatgctgtccatggccaacctgcaggcctccgactcctgcctgcagaccacgtggggagctggccaggccaaggggagctcgctggctgcccatggtgcccggaagaatgggggtggcagtggcaagagtgcaggcaaacgactgctgaagagggctgccaagaacagtgtcgacctggacgactacgaggaagagcaggaccacctggatgcctgcttcaaggactcagactacgtttacccctcactggagtcagatgaagacaaccccatctttaagtcccggtcgaagaaaaggaaaggctcagacgacgctccctacagcccaacagcaagggtcggcccatcggtgccaagacaggacaggcctgtgcgtgagggtacacgggtggcttccatcgagaccgggctggcggctgctgcagctaagttgtcccagcaggaggagcagaaaagcaagaaaaaaaagagtgccaagaggaagctgactcctaacaccacctccccttccacctccacctccatctctgccggcaccacctccacctccaccacgccagcctctaccaccccagcctccaccaccccggcctccaccaccccggcctccaccagcacggccagcagccaggcctcgcaggagggcagctcgccagagcccccgcctgagtcgcatagcagcagcctggcggaccatgagtacacagccgctggcaccttcaccggggcccaggctggccgcacctcccagcccatggcccctggggtctttctcacacagaggcggccctccgcatcgtctccaaacaacaacaccgctgccaaaggaaaacgtacgaaaaagggcatggcgaccgccaagcagaggcttgggaaaattttgaaaattcatcggaacgggaaactactcctttaagatttggaaagccaggatccttctgctccgctcaggacccccggagccccgcgaaaacatctgcctcccaggagggtgccgagctgcctcaccagggagggccttgcctcttcccggctgccatctccccaacaagcgtctgtcccttcagccggcagagcgagcccagcgtggcccctcaatttgaaaatggacgtcttttctcaagttgctaagagtgatctgtcccagaaaagcggccctgcaagtttgaggaccgcttattccactttaaggacagccttcaggccccctgagcgtgggtgtgattgcagggcctctgcagctctgctgagagcatgagtccttcaaggaagacagagtgagccaatgctcaccagccccagagtcagagctggccacaggctggcagcctccaggggcttaaaaaaaaaggcaaagaacacagaaagaggaggagcaagtgggatgtttatgtccccccttctcttcctgagtgattctcagccaagtccagacagtgctcggcgggtgaggaagggtctgccccgagctttctggttggcaggtggcagcaggatggtgggtgttcagcctgaatgcccaggagcatttctggggggcagctaagactggcagctgggttggtgtgttagcgggcaggggagccattgtggggtccccaggaaagggcaagggctcagccacatcttggggtctgggaggcccaggctaagccatgtggcagggaccgtcttgccctgctggccacactctggagaagcacttctcagccaaggcacccctgccctgggactggcagggcaggggcaggggcagggacagtggccaggcggcccgaggacttacggtcggcacttctctgttctcccgtgtcagcgtgtggtgtcgcctgcatgggtcgtacctggatggtgtgtccaccatcgacacggaggggctggatttgtttctcaggcaatcctgtattttaattttagatgtatttcctgaagcatatttttcatagaatgtagcgtgtaaatagctttttaaataacttcttttttataagagtaaaagtatctttaggaatttctttctatagagttcttcattaacatttatacgagttttttgctgagtcagatggacagttgggttctgatgctttttccttctcctttccttttattattattatttttttcttttaagaactaaggtattgcctgaaaaacaagtgatgtctgtgcagccttacactctgtctttacagaagcaaatagtacacaaaagatctatttcagacacattttgaagatgaatcttcaactttaataccagctctttgttttccttgtatgatgaggggattgggggatacagttattttactagcaccttgtgaagtgtttccgtgttttgtgatgctgtaatttattaatgtttgtagctttttatatttgtacatttcttatgagctttgtttatatacccattacctggatgtttttgtccactgggagaggcagcttggtggaggccttatccactcccacttgtcctgtttggagggacgcagtccctagggcccgagactgggtgggagagggggagtctcacggggccccaggcttattcagaactggtgtttttaaagtttcctttaccctgcccttgttgaacatttatataatctaacctggacatcaagctgttctctctctctcttttttttaattttattattattattttggcaacatgtacatttctaacaaagtttatcgtggctattaaagtgttttatttcccaattcatattactcttgtatcgagtccatgaggtctaaggcaacttagatcaaagttttaaaaaagtaaaaatatttcaggttttgtaca

SEQ ID NO: 14427 - DNA, 5279 bp, Homo sapiens
gccgagcggcggcgcggcgcggcaacatggcgacggtgcccgtgtactgcgtctgccggctcccctacgacgttacccgcttcatgatcgagtgcgacgcctgcaaggactggttccacggcagctgtgttggggtggaagaggaggaggcgcccgacatcgacatataccactgcccaaactgtgagaaaacccatgggaagtccaccttaaagaagaagcggacctggcacaaacacggcccggggcaagcgcctgacgtcaagcccgtgcagaatggcagccagctcttcatcaaggagctgcggagccggacctttcccagtgctgaagacgtggtggcccgtgtgccaggaagtcagctcacgctgggctacatggaggagcacggcttcaccgagcccatcctcgtccctaagaaagacgggctgggtctggctgtcccggcccccacgttctatgtcagtgacgtcgagaactacgtggggccggaacggagtgtggatgtgacagatgtcaccaagcagaaggactgcaagatgaagctgaaggagtttgtggactattactacagcaccaaccgcaagcgggtcctcaacgtcaccaacctcgagttctctgacacccgaatgtccagcttcgtggagccacctgacattgtaaagaaactgtcatgggtagaaaactactggccagatgatgcattgctggccaagcccaaagtgaccaagtactgcctaatctgcgtgaaggacagttacaccgacttccacatcgactctgggggcgcctctgcctggtaccacgtgctcaagggggagaagaccttctatctcatcaggccggcctcggccaacatctccctgtatgagcgctggcggtctgcctctaaccacagcgagatgttctttgctgaccaggtcgacaaatgctacaagtgcatcgtcaagcagggccagaccctcttcatcccctcaggctggatctacgccacactcacccctgtggactgcctggccttcgcgggacatttcctccacagcctgagtgtggagatgcagatgagagcatatgaagtggaaaggaggttgaaactgggcagcctgactcagtttcccaactttgaaactgcgtgctggtacatggggaagcacctgctggaggcattcaaaggctctcacaaatctgggaagcagctgccccctcatctagtccaaggagctaaaattctcaatggtgctttccgatcgtggacgaagaagcaggctttggcagagcatgaggacgagctcccggagcacttcaaaccttcacagctaatcaaagacctggccaaagagatccggctcagtgagaatgcctccaaagccgtccgaccggaagtgaatactgtcgcctcgtcagatgaggtgtgtgacggggaccgggagaaggaggagcccccgtctcccattgaggccaccccgcctcaatccctcctggagaaagtgtccaaaaaaaagactcccaaaactgtgaagatgcccaagccatccaaaatccccaagcccccgaagccccctaagcccccaaggccccccaaaacgctgaagctcaaagatggaggcaagaagaaagggaagaagtcccgggagtcagcctcacccaccatccccaacctggacctgctcgaagcccacaccaaggaggcactgaccaagatggagccgcccaagaagggcaaggccacaaagagtgtcctgagtgtgcccaacaaagatgtggttcacatgcagaatgatgtggagaggctggaaattcgagagcaaaccaagagcaagtcagaggccaagtggaagtacaagaacagcaaacctgactccttactgaagatggaagaggagcagaagctagagaagtcgcctctagctggaaacaaagacaataagttctctttttctttctccaacaagaaactcctcggctccaaggctctcaggcccccgacgagccctggtgtgttcggggccttgcagaacttcaaggaggacaagcccaagcccgtgcgggatgagtatgagtacgtgtcggatgacggtgagctcaagatcgacgagtttcccatcaggaggaagaaaaacgccccgaaaagggacttgtccttcttgttggataagaaggctgtgctgcccacgcctgtcacgaagccaaagctggactcggcagcgtacaagagtgatgactcctcggacgagggttcgctgcacatcgacacagacaccaagcccggccgcaatgccagagtcaagaaggagagtgggagctcggcagctggcatcttggacctgctgcaggccagtgaggaggttggcgcgctggagtacaaccccagcagccagcccccggcctcccccagcacacaggaagccattcagggaatgctgtccatggccaacctgcaggcctccgactcctgcctgcagaccacgtggggagctggccaggccaaggggagctcgctggctgcccatggtgcccggaagaatgggggtggcagtggcaagagtgcaggcaaacgactgctgaagagggctgccaagaacagtgtcgacctggacgactacgaggaagagcaggaccacctggatgcctgcttcaaggactcagactacgtttacccctcactggagtcagatgaagacaaccccatctttaagtcccggtcgaagaaaaggaaaggctcagacgacgctccctacagcccaacagcaagggtcggcccatcggtgccaagacaggacaggcctgtgcgtgagggtacacgggtggcttccatcgagaccgggctggcggctgctgcagctaagttgtcccagcaggaggagcagaaaagcaagaaaaaaaagagtgccaagaggaagctgactcctaacaccacctccccttccacctccacctccatctctgccggcaccacctccacctccaccacgccagcctccaccacgccagcctctaccaccccggcctccaccaccccggcctccaccagcacggccagcagccaggcctcgcaggagggcagctcgccagagcccccgcctgagtcgcatagcagcagcctggcggaccatgagtacacagccgctggcaccttcaccggggcccaggctggccgcacctcccagcccatggcccctggggtctttctcacacagaggcggccctccgcatcgtctccaaacaacaacaccgctgccaaaggaaaacgtacgaaaaagggcatggcgaccgccaagcagaggcttgggaaaattttgaaaattcatcggaacgggaaactactcctttaagatttggaaagccaggatccttctgctccgctcaggacccccggagccccgcgaaaacatctgcctcccaggagggtgccgagctgcctcaccagggagggccttgcctcttcccggctgccatctccccaacaagcgtctgtcccttcagccggcagagcgagcccagcgtggcccctcaatttgaaaatggacgtcttttctcaagttgctaagagtgatctgtcccagaaaagcggccctgcaagtttgaggaccgcttattccactttaaggacagccttcaggccccctgagcgtgggtgtgattgcagggcctctgcagctctgctgagagcatgagtccttcaaggaagacagagtgagccaatgctcaccagccccagagtcagagctggccacaggctggcagcctccaggggcttaaaaaaaaaggcaaagaacacagaaagaggaggagcaagtgggatgtttatgtccccccttctcttcctgagtgattctcagccaagtccagacagtgctcggcgggtgaggaagggtctgccccgagctttctggttggcaggtggcagcaggatggtgggtgttcagcctgaatgcccaggagcatttctggggggcagctaagactggcagctgggttggtgtgttagcgggcaggggagccattgtggggtccccaggaaagggcaagggctcagccacatcttggggtctgggaggcccaggctaagccatgtggcagggaccgtcttgccctgctggccacactctggagaagcacttctcagccaaggcacccctgccctgggactggcagggcaggggcaggggcagggacagtggccaggcggcccgaggacttacggtcggcacttctctgttctcccgtgtcagcgtgtggtgtcgcctgcatgggtcgtacctggatggtgtgtccaccatcgacacggaggggctggatttgtttctcaggcaatcctgtattttaattttagatgtatttcctgaagcatatttttcatagaatgtagcgtgtaaatagctttttaaataacttcttttttataagagtaaaagtatctttaggaatttctttctatagagttcttcattaacatttatacgagttttttgctgagtcagatggacagttgggttctgatgctttttccttctcctttccttttattattattatttttttcttttaagaactaaggtattgcctgaaaaacaagtgatgtctgtgcagccttacactctgtctttacagaagcaaatagtacacaaaagatctatttcagacacattttgaagatgaatcttcaactttaataccagctctttgttttccttgtatgatgaggggattgggggatacagttattttactagcaccttgtgaagtgtttccgtgttttgtgatgctgtaatttattaatgtttgtagctttttatatttgtacatttcttatgagctttgtttatatacccattacctggatgtttttgtccactgggagaggcagcttggtggaggccttatccactcccacttgtcctgtttggagggacgcagtccctagggcccgagactgggtgggagagggggagtctcacggggccccaggcttattcagaactggtgtttttaaagtttcctttaccctgcccttgttgaacatttatataatctaacctggacatcaagctgttctctctctctcttttttttaattttattattattattttggcaacatgtacatttctaacaaagtttatcgtggctattaaagtgttttatttcccaattcatattactcttgtatcgagtccatgaggtctaaggcaacttagatcaaagttttaaaaaagtaaaaatatttcaggttttgtacaaaaaaaaaaaaaaaaaaaaaaaaaaaaaaaaaaaaaaaa

SEQ ID NO: 14428 - DNA, 6611 bp, Homo sapiens
tgactgcatcacctggtctgtgaattttccattagaagcttggtgtgctgttaggtgaaagacttgctcagctatgcgtcattgggttttatcaacatataggcgaaaaaaatcctggtctctgagtgtacagctgagatgaaaatttcttttattggaggaagtattgagtgtgtgctctcaaatgcggcctcagttgagtagtgcattcctgagttttggaagcaaatttgcaaacaattgagagtcgtacagtgggtgttctaactggattcaggttttttctaatgtaattttttcacacgtaaattaaaaagtttagaaatgtcacacataacttcataacactttatggagaaatggttgtacttttaatttttttctttttatttatactccaactgactgagcagaggttgtacttctaaataactttgtggaagtttttagtaccataatttttataattttcattccagtcctttgatatttatgacagtacttctgaagcgcttactgagtgccggacactgttgtaagtgctttacggaacttgacttttttttttttttgagacggactctcgctctgtcgcccaggctggagtgcagtggtgcagtggctcgatctcggctcactgccacctctccctcatggtttcaaacacttctcctgcctcagcctcccaggtagccaggattatagccgcccgccaccactcccgactaattttattttgtatgttcttttttagtagagacggaggagtttcaccatgttggccaggctggtatcgacctcctgacctcaagtgatgtgtccatctcggcctcccaaggtgctggaattacaggtgtgagccactgtgctcggcctaccttttttttttgttttttgtttttttgaaaaggagtttcgctcttgtccaggctggagtataatggtgcgatctcagctcaccgcaatctccgcctcccagattcaagcgattctcctgcctcagcctcctcaggagctgggattacaggcgcccaccgccatgcccggctaatttttgtatttttagtagagacggggtttcactatattggccaggctggtctcgaactgctgacctcaagtaatccgcctgcctcagcctcccaaagtgctgggattacagacgtgatccaccaggatcacaccaggccgcgcctggcctgctttcattttaaaagtcaaatttgtcatccgcctcagtgcttgtaatcttttctgagtgagatactgaaatttgcagtttcgttttgcttgcacttgttcactggaccagtagtcactgttaaatgtaaaagtatctacttcctctgaaagttttttattcctttatttcctgcctgggcttgtcctccaccctacatgtatgcgtagtagatttagtgtttgttatcctaacctttaggtttagggattgactgggtttctgactttttatttggccaatgaggacgatacagaaaatgaagcattggtcattatcacattttaacgctgaaaaagtaagaaggacaaccccggaataaaatgatatcagtatcaagataaaagtttggaatgggagaaaaattctcaaagcctgaaagaaaatctgtagttacttttggtgacgctgtccagttcccacaatgtatcattccttatctgaaactagacatcctctgcagccagaagaacaagaagtaggcattgaccccttgtccagttactctaacaagtctggaggagattcaaataaaaatggaagaagaacaagttctactttagactctgaagggacttttaattcctataggaaagaatgggaagaactatttgtaaacaacaattacttggcaacaataaggcagaaggggattaatgggcagctgagaagcagcaggttccgcagcatttgctggaagctatttctttgtgttcttcctcaagacaaaagtcaatggataagtagaattgaagaattaagagcatggtatagcaacattaaagaaatacatattaccaacccgaggaaggttgttggccaacaagatttgatgatcaataatcctctttcacaggatgaagggagtctttggaacaaattcttccaagataaagaacttcgatcaatgattgaacaagatgtcaaaagaacgtttcctgaaatgcagtttttccagcaagaaaatgtgagaaaaattcttacagatgttcttttctgttatgccagagaaaacgagcagttgctttataaacagggcatgcacgaactgttagcacctatagtctttgtccttcactgtgaccaccaagcttttctacatgccagtgagtctgcacagcccagtgaggaaatgaaaactgtcttgaaccctgagtatctggaacatgatgcctatgcagtgttctcacaacttatggaaactgctgaaccttggttttcaacttttgagcatgatggtcagaaggggaaagaaacactgatgactcccattccctttgctagaccacaagatttagggccaacaattgctattgttactaaagtcaaccagatccaggatcatctactgaagaagcatgatattgagctttacatgcacttgaacagactagaaattgcaccacagatatatgggttaaggtgggtgcggctgctatttggacgagagttccccctgcaggaccttctggtggtctgggatgccttgtttgcagacggcctcagcctgggtttagtagattatatcttcgtagccatgttactttacatccgagatgctttgatctctagtaactaccagacctgtctcggccttctgatgcattacccattcatcggggatgtacactcactgattcttaaggctctgttccttagagatccaaagagaaatccaagaccagtgacttatcaattccatccaaatttagattattacaaagcacgaggagcagacctcatgaataaaagccggaccaatgccaaaggtgctcccctgaatataaataaggtctctaatagcctgattaattttggaagaaagttgatttccccagcaatggctccaggcagtgcaggtggccctgtacctggaggcaacagcagtagctcctcctctgttgtaattcctaccaggacctcagcagaggccccaagccatcacttgcaacagcaacagcagcagcagaggctgatgaaatcagaaagcatgcctgtgcaattgaacaaagggctaagttctaaaaacatcagttcatctccaagcgttgagagtttgcctggaggaagagaattcactggctctccaccttcatctgctactaaaaaagattccttttttagcaacatctcacgttctcgctcacacagcaaaactatgggcagaaaagaatctgaagaagaattagaagcccaaatttccttccttcaagggcagttgaatgacctggatgccatgtgcaaatactgtgcaaaggtgatggacactcatcttgtaaatattcaagatgtgatattacaagaaaatttggaaaaagaagatcaaattctggtttccctggcaggattaaaacagatcaaagacattctaaaaggttccctgcgttttaaccagagccagctagaggccgaagagaacgaacagatcaccattgcggacaaccactactgctccagcggccagggccagggccgaggccaaggccagagcgttcaaatgtcaggggccattaaacaggcctcttcagaaacgccagggtgcactgatagagggaattccgatgacttcatcctgatttccaaagatgatgatgggagcagtgccaggggctccttctccggccaggcccagcctcttcgcaccctcagaagcacctctgggaaaagccaggccccagtctgctccccactggtgttctcagatccactgatgggcccagcctcagcttcctccagcaaccccagctccagtcctgatgacgacagcagcaaggactctggcttcaccattgtgagtcccctggacatctgaccacagtgcccagtcctgccccacagggatctagccacccttcagtggccccaaggccagactgaggctcatccagtggagaaccttcttaaaccactgcttccttcccggcatgcatttggcattggtccagccctttgaaaccccttagagagaagcatatatggccacaaagcacagaggcttaggtttgccacatgcagacagggctttctgggcccttacctaatccccacccgactcttgctctgagttagagctgagttacgtacccagtatcacactcacagttagaaaagaccgaatcacaatttagaatcacttttcctctgtccccttctccccagctaagaatgtgtggcacctccatcagttatacttagaaggagcagaaatagttattttcgtatcttctatccctcaaagcatcagacatgggaaaattggtttataccaagaaagcttcctctgtggaaatctgtctcagcctactttattcctgcattgggaagccatatcgcagagctaaatgcaatagaatgaaccagaactagtggattccagggctgggggaaaaaaaaaaaagaaaaaacctcattactgacctctcaaagttataaggatctctgcaaacaggatctaagcttaggaataatatttaggtgtgatatagtgttagatttttttgatgtattaaagaatgcatctccaatccttaggccatatcaactttggccatcaatatctctccttaaacaattatatttcaccttttagaatctttcatagccagaaaacaagattactgtaagccagttttagctgcactgatttcaaaagatataagaatattactatccttcaaatggaaaatgcgaccttgactttatgggataaacatctttcagacagtcagttttctagtcaggtttctctggtttcagagctgtatatacctgtcaactgaggaataaagggaaaaacccaagttcattcccacccaaagtcagaatccctcattggccttaaggtagcagtcataagacagagaattggacctagagtcccttctgtggggaataaggatacctagagaacattccacatgccaagaggatgcaggatttctacacaaccccttcccttcttggaagtcaagtgtaggtactgcagggcctgtgctcagctgtgaaccccgtatcctgggccccactgccgggaccgggtctgacatgccagtgccttcctgggctgagcacagattagagactctcccccttgtcagtcagcaccttaggaaaccatgatgggcacagagcatcacatgagctgtttctctccttaaagaagatccctggaaaggatgcttttcctctcctttgcctgcgcaggaattctaacaggagtgggtgaggatggcagagggacacagtgcctgtctcgcctccatcagggagagcagccatgccagggatgactagctctttgagcctgtcctcagaggatggcgaggcagccgggcagtggaggccttcatggtaacaaatgaaagctcagtatagaggaacagacactgtttacgtccctcccactgctaaccttatatatctctatagacaaatgtgataatgacatgatttcccacctgccctccaagaaaatggtgactcactctcaagtcagctactgtagagagggttctaattggttctgcaatttgctcttaaactctagcagggaactctcctcttaccacatcagcatgtaaggtgaataataactctggttttgccagacagcaggttgtctgaccttcaaccactgggcaattgcctggcagatgcacacagtagctccctggcttctggctctgagtgttcctctcagcacctctgagtaagctgctgccaagcacatatccctatgacaacactttgtaaaagccgcggggcccccatacagcgagtgaccttgcaactgtgcagggttgccattggtcactttctcaccttgggaaggtgtcagtgttttcagttctaaggtaagaggtgtagagctgttcccaccagggctctgggacagactggaaaggaccacagacctggccatccctgggcagcagggccagtgtcacctgctgacctctagtatttcctttgccctagagctagagtcatgatagctgagggtcactcgccctgcaagagtcactaggcacccaccatgccaataaggctctccgctggctccctgcagttggctgggtgtttaatagtcactgaaaactcccagccctgctgcacactagaggcaggtcctctcggtcctctccatcctgtgcttctgtggcccccagcaagctcaccgcctccttggaggagagagacatacaaggacagtgggtcatgggtagtaccagcctcaaattcccacaggctcatactcagacaattgtattactgccttatgttttttaagtgtttttttaaattcttcatagttgagtattatttgcaattttattagttacagtgctattaaagaatatgtgctcctttt

SEQ ID NO: 14429 - DNA, 4598 bp, Homo sapiens
aactaactcaggtcctgaaggactctttcatcggcaatgccaaaacctgcatgatcgccaacatctcaccaagccacgtggccactgaacacactctcaacaccttgcgctatgctgaccgggtcaaagaactaaagaaaggcattaagtgttgcacttcagttaccagtcgaaatcggacatctggaaactcctctccaaaacgaattcagagctcccctggggctttgtcagaggacaaatgttctcccaaaaaagtcaagctgggatttcagcagtcactcacagtggcagcccctggttccacgagagggaaggtccatcctctgaccagccacccacccaacattccttttacttctgcacctaaggtctctggtaaaaggggtggctccagagggagtccttcacaagagtgggtcattcatgctagccctgtgaaaggaactgtgcgctctggacatgtggccaaaaaaaagccagaagagtcagcaccattgtgctctgagaaaaatcgaatgggcaacaaaactgtccttgggtgggaaagcagggcctcaggcccaggagaaggcctagtgcgtggtaagctgtccaccaagtgcaagaaagtgcagacagtgcagccagtacagaagcagcttgtgtctcgagttgagctctcctttggcaacgcccaccacagggctgagtacagtcaagacagccagaggggcacgcctgctaggcctgcctctgaagcttggacaaacatcccgccacatcagaaggagagggaggaacatctgcgtttctatcaccagcagttccaacagccacctctcctccaacagaagttaaaataccaaccactgaaaaggtctttacgccagtacaggcccccagagggtcagctcacgaatgagactccgcctctgttccactcttactctgaaaaccatgatggagcccaagtagaggaacttgatgacagtgatttcagtgaagattctttttcacacatctttagtcagagggccacaaagcaaaggaacaccctggagaatagcgaagactcattcttcctgcaccagacgtggggacagggtcctgagaagcaggtggcagaaagacagcagagtctgttttctagccccaggacaggtgacaagaaagatctaactaaaagctgggtggactccagggaccccataaaccacagaagagcagcactcgatcacagctgcagcccaagtaaggggcccgtggactggagcagagagaactctacttcctcagggccttctcccagagacagcctggcagagaagccatactgttcacaggtagatttcatatatagacaggaaagaggtggaggctcttcctttgatctcagaaaggatgcctcccaaagtgaggtttctggggagaatgagggcaacttgccatccccagaggaagatggtttcactatctcattgtcccacgttgcagttcctggatccccagaccaaagagacacagtcaccacacctctgagagaagtcagtgcagacggcccaatccaggtgaccagcactgtgaaaaacggtcatgctgtcccaggagaggatcctagggggcagttaggcacgcatgctgaatatgcttctggactcatgtctcccctcaccatgtccctcctggagaacccagacaacgaagggtctcctccctcggagcagctggtccaggatggggctacgcacagtctagtggcagagagcacagggggcccagttgtgagccacacagtgccatctggtgatcaagaggcagccttgccagtgtcttcagcaactaggcacctgtggctgtcctcatctccccctgataataagcctggtggtgatcttccagctctgtccccatcacccatccgtcagcacccagctgacaagctgcccagcagggaggcagacctaggagaggcctgccagagcagagagactgtacttttctcccacgaacacatgggtagtgagcagtatgatgctgatgcagaggagacggggctggatggctcctggggtttcccaggaaagcccttcaccaccatacatatgggggtaccccattctggacctacactcaccccacgaacaggaagtagtgatgtggctgaccagctctgggcccaggagagaaaacatcctacaaggcttggttggcaggagtttggtttgtccacagaccccatcaagttgccctgcaacagtgaaaatgtcacatggctcaaacccaggccgatctcaaggtgcttagcaaggccaagttctcccttggttcccagctgctctcccaagactgcagggacactccgtcagcccaccctggagcaagcgcagcaggtggtcatccgagcacaccaggaacagctggatgaaatggctgagctcggcttcaaggaggagacgctgatgagccagctggcttctaatgattttgaagattttgtgacccagctggatgaaatcatggttctgaaatccaagtgtatccagagtctaaggagccagctgcagctctatctcacctgccacgggcccaccgcagcccctgagggaacagtgccgtcttagagccagaccctgtgccgagatggtgggggccctgcaggagtctgtgctgggctctcaggctggaggagcctctgccaggtcctccctgcacacaccagaacccacacgctggtcctgcctatgctagcgtcaccccagccccacgtggcttcagataggtcccagcttctccctcagggacaggcccctgtccctcagttccatgcacaggagtgcctccaagggtgggccaggccgaagaacctaatgcctttcccttgtgcctagagaatatgattaactaaccccttgcctgtgggaatatatttgggtctaataaccctgaagtttctaagtttggggatcagaggatggggtggtcagtggtagcctagaggtcagaggtcacaagacagagaagacaacatgctgagaccagaggcttcaccagctgaattctgtgcctaacttagaagactaaacactggcccaaacttaaccattggtgctagggggacaggggtggggtgagctctgccccatcagcccttggagattgatttggggatttagaggcgtttttgaaaatgtaaatagcataaaccttgacttgatgtgtcactgacagcagcagatgtgagacaggccttatatttacagctcccttcccttcctgcaatccagtgttgaggcagaagagggtgcctgtgtcacacatcaatttttctcctgacttttgctcgggtgaaaggcctctgtacaatgcccgatactctcatgcttccatggcagctcctggctcctatctgggacacctcactacccagccccctcatggaatagtccatctcctagcctggccttcatccagttcaccctgcccagccaccctgcctctcaggggtctgtgctgggaaccttggcagttgaacagagtgctctgttcaacagtctgaggcctctgaaacagaattcacacacaaaccttcagccaagttctgcctgctgtgtatctttttagcaggaagcagctcaggacagggaagacaaagtagcctccaggtgccaattactttaaagccactctgggtcaaatggagattcatgagtcacggccttggcccgaacgcccattactatgtgagcctttatttccttcagataaaggataactttttacggttttaaaaggagggcttaattaaaaggccaagaagagggttaaatggctctcttgagacactagcagcctggtccagtcaccctttgtcagcctgacagtgcctcatctgaccgccaggaggcatccttattggtgcttcccggctgcagggcactgcggcccctccctcacatgatcactaaaaaccttcaaagacccagtctagccaaaagctcaagtgggacaatggcacagtattaaggtcaaggacaaaaacttacttactttaggaatgaaccctattctatcatcatatacaacagcaccactgagagctggtgaaacagtttaaatcccatcctctgcttgtggcaaatgatgcataaatgcctgctgctcacagtaaaagggcttcttcctcttttactgggtgatccccctgaaggcccagcctatcccaactccacagtcaggaaggcctacgtccttggtccacagacggagctgggccaggtttaaaagactcagtctaggcttgcctttgcaaaccaaaaacgaggacaggtctgaagtgggaagaaagctccgaaatagaaaacggttaggtcctattctatccccagcaaatctaagcaagaaatctctttatacaccacatggcccccccactcccataaaacagccttggtaataaagaagttatcacaccaagacataccttttagatttttattagtagttctctctgaagaatcaaaatagttagcaaattattttagattcaagactgtatatcctttgtatttagatctttaatgatgtacaacataatacaaaacaaaccagagagactg

SEQ ID NO: 14430 - DNA, 2278 bp, Homo sapiens
ggctatccagcctccctcggccaaattgctgcggagcccgtcgtcagggggcgccaaggagccagggggaaaaccaagaggcgctgacaggagcctcccggcggtgctaccctccacctcccacctccctgcgccccgccccgaggttggggctttgaagaatgcagccggggaaagcattaacttttgagctacgtccagaatagcatcatcttcatgggtattccctactcctaggatttcagaaaacctttgataactaattgagaaaatgcagaagatcgtgcagacagatgaaattaccaatacacaagcttttagaaaaggaaagaggaaaagaacagagacaatggactcagaaaatgcaaatagtgacatggataaaggacagagagacccatattcgggaaatgcctttctgcctggtgaaagctccagtgaggatgaagagcctttggcagaattgtcaaaggaagaattgtgcgccaaaataaaaagcctgaaagaaaaactaacaaacacccggaaagaaaacagccgacttcgacagtctttggtcatgcttcaagtgttaccacaagcagtcacccagtttgaagaattggttggtatggccgaggctctgcttaagggtgggggaaccatgtctacatctgcatccaccctctggagagcaacaaacaactcctcgccagattcatttgcctcaacatgcagtaattctaattctaactccagttcaccagtttccttaaagcctgaggaagagcatcagactgatgagaaacagttccagattgaaaaatggcaaaatcctctacttcaagggacaaagctgtaaaaccagctatgaatcagaatgaagtccaagaaatcataggagtaacaaaacaattatttcccaatacggatgatgtttcaattaggagaatgatagggcaaaagctaaacaactgtaccaagaagccaaatttaagcaaaaatcttaactctcaggatattaaatagatccttttggtattacaggtatctgaaacaaagcaccttcaattctaaatctagcactggattttgttggagaatctgcagccttcctggcagtgagaaagacagacatgtgcagtgacaggctgtaagacatatgtaacattgctgagctctcctaagggaccaacaagcttgctgaagaagctgcatgtagattccaccctcagtactagtgatgcatcaaaccagagaatttctgccagtcaaataagcatgcaatatggtttctttggaaataagcatttcccaatccccaaatacccctctgtacagttaatctaacaggatagtcagagctcttatcatagcagccaaaacttcagcccataggttagtcattgtcctaaccaatcattgtacattgattattaccagtgacttcccattatagtttttggatctttagcataagcacatgcttgcaaaagtaaacagtgaaataattaatgttggcaaatatgagaacaacaaagtcagcccaaaatctgataatcatgtctaaccaagtaataatgttttagcaataaaattacaggattattctgttatctaaaaatgtataaaatgggaatatgaaaaaaatgacaacagcaagatgttttattttaatgttaagcaattccaccacacttctgaagaataaacctaagtttttgtgattgttaaaacaatgcatcaattttcagggaaatctttttgtttgtttatttaccagacatgttctaactttgtattgcccaaagtatattaaatacagatgtgtaatataaagcatcaatatcacctaacacatcgtatataagatataacatgatagatagttggtcgattacattgctatactgcttagttttaactggtttatttttattgtagcagaaatgaactgaaaaaaaatatgggtttgataatcacacacatgaaagtaccattttgtaactcaacaaaagataaaacattcttcatcaaaaggcttctcgcttggtgtcaggttgtcacatgtgaccactgtgcaatgcgaagccatacttcttcagtgcacaaagtcatgtttaaacttggaaaagaggatgctacagtagtttcaaagtttagtgttgtggacccaggaaattttccataagtcttgcttgataacaatgtgattgtacaaaataaatgttcttaaggaaacaacttatgtaacatttgctacctttatgtaaacataaataaatcccatttaaaagat

SEQ ID NO: 14431 - DNA, 705 bp, Homo sapiens
ggcgcaaagcatgctggtctcaggcggtctccgctcaacgatccttcctcaaagcatggttgctgagtacccagagttgcgaggagttttttaactgatttagccaggtggcaatcatgagtgaatggatgaagaaaggccccttagaatggcaagattacatttacaaagaggtccgagtgacagccagtgagaagaatgagtataaaggatgggttttaactacagacccagtctctgccaatattgtccttgtgaacttccttgaagatggcagcatgtctgtgaccggaattatgggacatgctgtgcagactgttgaaactatgaatgaaggggaccatagagtgagggagaagctgatgcatttgttcacgtctggagactgcaaagcatacagcccagaggatctggaagagagaaagaacagcctaaagaaatggcttgagaagaaccacatccccatcactgaacagggagacgctccaaggactctctgtgtggctggggtcctgactatagacccaccatatggtccagaaaattgcagcagctctaatgagattattctgtcgcgtgttcaggatcttattgaaggacatcttacagcttcccaatgagaggccaggaagtgtgaacatactgatagaaaaagactatattttatccctcataaaatgttttaaatgtaaaaaaaaaaaaaaa

SEQ ID NO: 14432 - DNA, 5221 bp, Homo sapiens
gtgagtgttgcccagagttaaagggaatatcaaggatggtggcagaattaaagggcaaacttaccttccatcccaggtctagtattcagtcccccttcctcccactctccaccctactgcgtgctcttacttattctgttggaacccagtgtagcttcctgagatttaaaatataggaagactcaaaactatgttacttcttggaatatagataattcagtactgatttaaataacaactgaatagcaaggaccttctggaacataatcttacattcacaaaatcacctgctaagaagctgactaatgcattaagcaagtccctgagctgtgcttccagccgtgaacctttgcaccccatgttcccagatcagcctgagaagccactcaacttggctcacatcgtgcctcccagacctgtaaccagcatgaacgacaccctgttctcccactctgttccctcctcaggaagtccttttattaccaggagctctcctcccaaggacagtgaagtagagcagaacaaactgctggctagggctgctccagcttttctgaagggcaaaggcatgcttgagagttcaaaccggcttgatgaagaacacaggctaattgccaggtatgcggcaaggctggcagcagagtcctcttcgtctcagccacctcagcagagaagtgctcctgacatctctttcaccatcgatgcgaataagcagcaaaggcagctgattgctgagctagaaaacaagaacagagaaatcttacaggagatccagagacttcggctagagcatgaacaagcttctcagcccacgccagagaaggcacagcaaaaccccaccctgctggcagaactccggctcctcagacagcgcaaagatgagctggaacagagaatgtctgctctccaggagagccggagagagctaatggtccagttggagggtctcatgaagctactaaagactcagggggcaggctctccccgctcctcccccagccacaccatcagcaggccaattcccatgcccatccggtcagcgtcagcctgctccaccccgacgcacacgccgcaggactccctcacaggagtagggggagatgtacaagaggcatttgcacaaagttcaagaagaaacttaaggaatgacttgctagtggctgcagattccatcactaacactatgtcctctcttgtgaaagagctgaattctgaggttgggagtgaaacagagagtaatgtggattctgaatttgcacggactcagtttgaggatcttgttccctcaccaacctctgaaaaggcttttctagcgcaaatccatgcccgaaaacctgggtacattcacagtggagctaccacaagtaccatgcgtggcgacatggttacggaggatgcagatccctatgtgcagcctgaagatgaaaactatgaaaatgactctgtccggcagctggagaatgagctccagatggaggaatacctgaaacagaagctgcaagatgaagcttatcaggtcagcttgcaaggttgaatgcaatatccttttatcacactcctctcaagcaagctatagtcagacagatgatgaaagtaacatgaaaactggtgatgatggagagccctgtggccacacagaggaggaagacagcagcctggcagcagcctcaccgaagagaggaaccaccacacccagcagctcctgacagacccccacccctaaagatgtgtcctgatgactatagtgcagctaactttttgttctcagatttgtagtgcataggtgtgtgtttcaagaaggaaaaaaaaagacttctgttcaaagttaacttatcagctacatcctctgtaacgtggttcatccctggttaaaaagcaaacaaacacaggctgaaaacccatgctgctgttatacacaatggcagtattaacaagcattttaaacctttgcacatgatattgaacctgttcagtttacaatgacaatattaatactgtttatagctagaagtttgatttctgaattctttgagattttagcaaaacagtttattatacactgtacatttttttcacagcaattggaaaaaaacaaccacttgcaatcattcaataaccctgaagaatttggttcctgagtgtacaaactcagagcccggaagccaagaagggtccttggcctgcacggtctgtagttgactccaagtctctgtgagcagtgacttgaaccaaacacaccaggaataatccattctttggggcctctttccaactcgaggttgttttctttcaagatactctaatcagccatagaatttagtgtaaatatttttttttccaaatagatatcatattcaaaaaaggcagcattcaaattatatagaatctagtttttaaaatcagcacagatcttcttaaaaactgtgaactatgttttgaaatactcgttactaaagctgtttataaaccacaggtgccataagatccccaaacggactaaagttatctctgctcttccatggtcttgttcctctcgttttggctttaggaagcatgtctttaacagcaccgctcgttcacaagttcccccatcaagttgtttggaggccttcagctttaaatgtacaggcttaaagtgcgcttgcaaacgtttgctctcctttttttctgaatgttgattgccttagctggccacctggtgttctgcatgtagccttctgtggtcatgtgaaaggagacaggctcttctaagttgagttgggatttttgcactcagtgaaaagctgaagtgcaaaagagctatcaaagacaagaggataaaagactgggatagtcttttccaaggaccctctttagagggccctaaagacctcctttgggaattctggggaaaaagaaaaagtaatcttctacttgcttcaagatttgatttttttaaaaaagcctgcgacctattcaatacattatgcttaaattagcagtttctctggaattcctgtctctcctttaaaagaaaggagagaacattttagaacaatagttctcaaagtgtgttccccggacaagcagcatctgcaacacttaggaaggtcttcgaaatactaatttgtaagccccacctcaggcctactgaatcagaagctctgggggttgggtccagaagtctgttttagtcaaccctctaggtgattctgatgctcgctaaaggttgagaactactgctttagaatgaagtcgtataataaagtctctgaaaaggccttattcagaataagcaagaaaggttctgtgattcacttttgcttctggggctggcaaaaaccttctctgaacccacacaccaagttcgtagttggtaggtgcccagccaagtcctgacatcttcatgccccctctgcagagggcggctgtacgatgttcacatgtctgcgtttggtcagacatcatctccttggctgccctttgaaaccaaatcacttgccttggggataaagtgctcaattggcattagtgagaagcccatcctatcccttgacatacttaatcatatatctctccagagaactcacctgacaaatgtctctgagcacaggctgacaccaaagtggcacaactgcacagttctcagatttctttgcacagattgatttttattgcgggttttgttggggtgtcttaatgttcatctcttttccactgcccatcctctgtgaacccatacctctctagatggagcaggtggccactggtgcctcatactcagtattgaaaaccactacatcccagctacctataatgctgtcagctcaaaatcatagccaggtagttcttgaactcagaacttaaatcctgcacgtggcactccaccactgactggaccgagctggcatatgttgtttctttgtgtttctacatcaaaatgttcgtctaagatttgaactgttctgctgataaccttccccgttgtcatagctatttcattgccaaccaactccatcacatggttgttgatatcgtcatataaagccattgcaaggactctggaaactgccgccaatgaccaatttctgactaaccagccaccttttctctctcttagctccacgtcagcactgagaccagactcgagcacccctgtcctgtaagcgagacaaaatggcgtgtgttattttggggttttgtgttttttggtgggtttctttccttggctctccagatttacttttggggcctgttctaagtgcaaacccagcaagtttcacttgtcctgtccattagatacaactacatcttgcgggggttgtttctttcttgttccacaatgaattgcacatccatctccatcagagctgatagcctgttaataagcactggtctaacacagccaaccctcctccacagcgccatattaatggaggaggggaggaaggtgaaatctactgcatgggattcaggaaacagttgtggttggtcaggacggaagttggggtaagtttggttggtcagagggagttgtgctggagattgtgaaaaatgggttcttgaatgatctactataaggcagggaaggttcatttgtaagtagtaatgtgaactgaattgcattaagagtgtgtggcctttgttgtgatatactatgtattttcttatatgcatgagccaaactgttgcatcataatttagcactgatgtctgcttttattttgatcatctttgtccacccttattagttcttggctgttaaccgtagatagatcttgtaaatccagcaacctttggttgctgcattccccttggttcgattccacgcaaggagccacaagtgagaactccactgtccttagaagaaagggcatttttacttttgaaccaaaaagagaaaaaaaaatcagaagtgttgcatcttgaggcgaattaactgtaagacatttttaattatgactactgcaatttgacaccatttgaaataatcaattcagagacactaaagatttcacaatattcattggtattgtaaaaaaaaaatactattgtatggatttttgtattgctgttaagtattgttttgtgtgtgtgtgtgtgtgtgtgtgttggaacctcctggggacatgttatattttgaagtgattaaactatttaattgtgtgtctatattttggagtggaataatttcttcattaaaaaatgtttttaaaaacactaaaaaaaaaaaaaaaaaaaa

SEQ ID NO: 14433 - DNA, 3189 bp, Homo sapiens
gaactgtattcagcggcgacagcggcgactgcggcggccgcgggagggcatcccgttggggatccttccgcacactgaagagtacgtcttcgggtctacccctaatcacataatggctgtgtttaatcagaagtctgtctcggatatgattaaagagtttcgaaaaaattggcgtgctctttgtaactctgagagaactactctatgtggtgcagactccatgctcttggcattgcagctttctatggcggagaacaacaaacaggagagacggggtttcaccatgttagccaggatggtctcgatctcctgacttcgtgatccacccgcctcggcctcccaaagtgctaaaattacaggcgtgaaccaccaccacagtggagaatttacagtctctctcagtgatgttttattgacatggaaatacttgctccatgagaaattgaacttaccagttgaaaacatggacgtgactgaccattatgaggacgttaggaagatttatgatgatttcttgaagaacagtaatatgttagatctgattgatgtttatcaaaaatgtagggctttgacttctaattgtgaaaattataacacagtatctcctagtcaactactggattttctgtctggcaaacagtatgcagtaggtgatgaaactgatctttctataccaacatcaccaacaagtaaatacaaccgtgataatgaaaaggtgcagctgctagcaaggaaaattatcttttcatatttaaatctgctagtgaattcaaagaatgacctggctgtggcttatattctcaatattcctgatagaggactaggaagagaagccttcactgatttgaaacatgctgctcgagagaaacaaatgtctatctttttggtggccacgtcttttattagaacaatagagcttggagggaaaggatatgcaccaccaccatcagatcctttaaggacacatgtaaagggattgtctaattttattaatttcattgacaaattagatgagattcttggagaaataccaaacccaagcattgcagggggtcaaatactgtcagtgataaagatgcaactgattaaaggccaaaacagcagggatcctttttgcaaagcaatagaggaagttgctcaggatttggatttgaggattaaaaatattatcaattctcaagaaggtgttgtagctcttagcaccactgacatcagtcctgctcggccaaaatctcatgccataaaccatggtactgcatactgtggcagagatactgtgaaagccttattagttcttttggacgaagaagcagctaatgctcctaccaaaaacaaagcagagcttttatatgatgaggaaaacacaatccatcatcatggaacgtctattcttacactttttaggtctcccacacaggtgaataattcgataaaacccctaagagaacgcatctgtgtgtcaatgcaagagaaaaaaattaagatgaagcaaactttaattagatcccaatttgcttgtacttataaagatgactacatgataagcaaggataattggaataatgttaatttagcatcaaagcctttgtgtgttctttacatggaaaatgacctttctgagggtgtaaatccatctgttggaagatcaacaattggaacgagttttggaaatgttcatctggacagaagtaaaaatgaaaaagtatcaagaaaatcaaccagtcagacaggaaataaaagctcaaaaaggaaacaggtggatttggatggtgaaaatattctctgtgataatagaaatgaaccacctcaacataaaaatgctaaaatacctaagaaatcaaatgattcacagaatagattgtacggcaaactagctaaagtagcaaaaagtaataaatgtactgccaaggacaagttgatttctggccaggcaaagttaactcagttttttagactataaatttgtgtcttatatgctttaggtttatgtatctataaaccattcaccaaagacatgcttaatttttaagagatcaaggtgtaaattatgatgatttattattttggtctacagtgtatgtaaggttagtatgttaagcattgtttaaaaatactagtaagtcataattatgcagaattttcacaaagtttaatgcacagagaaagcatatcatttcagttactgatacatcttaacactactttcttttaaaacagacatttaacatacacaagttatagtagcagtatgggcttctcctcccattggcaattaaatgcttttattttcttctgaaaagatgatgtggaccaacaggtatcagacttgccaacaaggtcggtagactcttcccagcatacatctgagcactgaaggaagaagaaagtttaaattgtttaaaggactataattatcacacaaaatttattaagaaaaaaagaatggatctagtataactaattctgagtaaaccaaaatgataataattaattgttgctatttaatcccacatttttggcaggtgtaattgagccatggtcttatttgattttgttatgattgcatccaaattcactttaactcagagttctgtttaatggtggtaggatgtaagaattgaattttgaaaagactactcactgtcaaaatctctccttcctataggaaatttagctgagttttcttcatccccaatttctctcttttcttgtgttgattcagtattctgaactccattctcagctgggaaagctacagatccttttagtgcaagataaggttttatagccagattcagtggcagaccatgatttaagaaattatgtttggagcctgtgttctgtaaagagaaggttgatttggtttttagctatcgtattcggagtggaactataatacaattgtataatattcttgttgatcaattcaaagttactctgcactgtttttgactttttaaaaataccttagatgcaaatttataggagaaaaaacactttcagataagaggtgtttgctgggatggaagaactacctggcatgtaagaaatatcgtcagtcgtcctaatgcatattgtgactgtttgcatatacttctgtttataaaagtatcagttttacttttcagaggatttgtaagaatcatttaaattttcattgaaataaacgacaagtcacattgccactta

SEQ ID NO: 14434 - DNA, 840 bp, Homo sapiens
aggggggacccaaagggtgcaggacgcctggtctgccttgtgggtcctggacggagcccctacctctgcaaagatgacttggagacaggccgtcctgctgtcttgcttctccgccgtggtgctcctgtctatgctgagagagggaaccagtgtatctgtgggcaccatgcagatggcgggagaagaggcgagtgaagatgcaaaacagaagattttcatgcaggaatcagatgcctcgaatttcctcaagaggcgcggcaagcggtcccccaagtcccgagatgaggtcaatgtggaaaacaggcagaagcttcgggttgatgagctgcggagagaatattacgaggaacaaaggaatgaatttgagaacttcgtggaggaacaaaacgatgagcaggaagagaggagccgggaggctgtggagcagtggcgccagtggcactatgacggcctgcacccatcctatctctacaaccgccaccacacgtgatcccatcctgaagccggccaagaagacaaagcttgtagcaccattggcatccccgtgttccagcaatctttcccatgcaaaccggcccttcagagggtctcagcttggggtctgcagtggccagcagctcttgaaaagacgcatgcctttccttccagtgtgtgaaagtgtcctgactttcacctctttgcagaccatcatctgaggtgagcaactgcctgcagggcctcctagtaccaaacctacagtggcttcccctggcttcgttcccaagcaaaagaatcagtcaagaatcacatgtttgcttatggcttacaaataaaaacgctgaaccaaaaaaaaaaaaaaaa

SEQ ID NO: 14435 - DNA, 9599 bp, Homo sapiens
cgaagatggcggcgtcgcgtcgctctcagcatcatcaccaccatcatcaacaacagctccagcccgccccaggggcttcagcgccgccgccgccacctcctcccccactcagccctggcctggccccggggaccaccccagcctctcccacggccagcggcctggcccccttcgcctccccgcggcacggcctagcgctgccggagggggatggcagtcgggatccgcccgacaggccccgatccccggacccggttgacggtaccagctgttgcagtaccaccagcacaatctgtaccgtcgccgccgctcccgtggtcccagcggtttctacttcatctgccgctggggtcgctcccaacccagccggcagtggcagtaacaattcaccgtcgtcctcttcttccccgacttcttcctcatcttcctctccatcctcccctggatcgagcttggcggagagccccgaggcggccggagttagcagcacagcaccactggggcctggggcagcaggacctgggacaggggtcccagcagtgagcggggccctacgggaactgctggaggcctgtcgcaatggggacgtgtcccgggtaaagaggctggtggacgcggcaaacgtaaatgcaaaggacatggccggccggaagtcttctcccctgcacttcgctgcaggttttggaaggaaggatgttgtagaacacttactacagatgggtgctaatgtccacgctcgtgatgatggaggtctcatcccgcttcataatgcctgttcttttggccatgctgaggttgtgagtctgttattgtgccaaggagctgatccaaatgccagggataactggaactatacacctctgcatgaagctgctattaaagggaagatcgatgtgtgcattgtgctgctgcagcacggagctgacccaaacattcggaacactgatgggaaatcagccctggacctggcagatccttcagcaaaagctgtccttacaggtgaatacaagaaagacgaactcctagaagctgctaggagtggtaatgaagaaaaactaatggctttactgactcctctaaatgtgaattgccatgcaagtgatgggcgaaagtcgactcctttacatctagcagcgggctacaacagagttcgaatagttcagcttcttcttcagcatggtgctgatgttcatgcaaaagacaaaggtggacttgtgcctcttcataatgcatgttcatatggacattatgaagtcacagaactgctactaaagcatggagcttgtgttaatgccatggatctctggcagtttactccactgcacgaggctgcttccaagaaccgtgtagaagtctgctctttgttacttagccatggcgctgatcctacattagtcaactgccatggcaaaagtgctgtggatatggctccaactccggagcttagggagagattgacttatgaatttaaaggtcattctttactacaagcagccagagaagcagacttagctaaagttaaaaaaacactcgctctggaaatcattaatttcaaacaaccgcagtctcatgaaacagcactgcactgtgctgtggcctctctgcatcccaaacgtaaacaagtgacagaattgttacttagaaaaggagcaaatgttaatgaaaaaaataaagatttcatgactcccctgcatgttgcagccgaaagagcccataatgatgtcatggaagttctgcataagcatggcgccaagatgaatgcactggacacccttggtcagactgctttgcatagagccgccctagcaggccacctgcagacctgccgcctcctgctgagttacggctctgacccctccatcatctccttacaaggcttcacagcagcacagatgggcaatgaagcagtgcagcagattctgagtgagagtacacctatacgtacttctgatgttgattatcgactcttagaggcatctaaagctggagacttggaaactgtgaagcaactttgcagctctcaaaatgtgaattgtagagacttagagggccggcattccacgcccttacacttcgcagcaggctacaaccgcgtgtctgttgtagagtacctgctacaccacggtgccgatgtccatgccaaagacaagggtggcttggtgccccttcataatgcctgttcatatggacactatgaggtggctgagcttttagtaaggcatggggcttctgtcaatgtggcggacttatggaaatttacccctctccatgaagcagcagctaaaggaaagtatgaaatctgcaagctccttttaaaacatggagcagatccaactaaaaagaacagagatggaaatacacctttggatttggtaaaggaaggagacacagatattcaggacttactgagaggggatgctgctttgttggatgctgccaagaagggctgcctggcaagagtgcagaagctctgtaccccagagaatatcaactgcagagacacccagggcagaaattcaacccctctgcacctggcagcaggctataataacctggaagtagctgaatatcttctagagcatggagctgatgttaatgcccaggacaagggtggtttaattcctcttcataatgcggcatcttatgggcatgttgacatagcggctttattgataaaatacaacacgtgtgtaaatgcaacagataagtgggcgtttactcccctccatgaagcagcccagaaaggaaggacgcagctgtgcgccctcctcctagcgcatggtgcagaccccaccatgaagaaccaggaaggccagacgcctctggatctggcaacagctgacgatatcagagctttgctgatagatgccatgcccccagaggccttacctacctgttttaaacctcaggctactgtagtgagtgcctctctgatctcaccagcatccaccccctcctgcctctcggctgccagcagcatagacaacctcactggccctttagcagagttggccgtaggaggagcctccaatgcaggggatggcgccgcgggaacagaaaggaaggaaggagaagttgctggtcttgacatgaatatcagccaatttctaaaaagccttggccttgaacaccttcgggatatctttgaaacagaacagattacactagatgtgttggctgatatgggtcatgaagagttgaaagaaataggcatcaatgcatatgggcaccgccacaaattaatcaaaggagtagaaagactcttaggtggacaacaaggcaccaatccttatttgacttttcactgtgttaatcagggaacgattttgctggatcttgctccagaagataaagaatatcagtcagtggaagaagagatgcaaagtactattcgagaacacagagatggtggtaatgctggcggcatcttcaacagatacaatgtcattcgaattcaaaaagttgtcaacaagaagttgagggagcggttctgccaccgacagaaggaagtgtctgaggagaatcacaaccatcacaatgagcgcatgttgtttcatggttctcctttcattaatgccattattcataaagggtttgatgagcgacatgcatacataggaggaatgtttggggccgggatttattttgctgaaaactcctcaaaaagcaaccaatatgtttatggaattggaggaggaacaggctgccctacacacaaggacaggtcatgctatatatgtcacagacaaatgctcttctgtagagtgacccttgggaaatcctttctgcagtttagcaccatgaaaatggcccacgcgcctccagggcaccactcagtcattggtagaccgagcgtcaatgggctggcatatgctgaatatgtcatctacagaggagaacaggcatacccagagtatcttatcacttaccagatcatgaagccagaagccccttcccagaccgcaacagccgcagagcagaagacctagtgaatgcctgctggtgaaggccagatcagatttcaacctgggactggattacagaggattgtttctaataacaacatcaatattctagaagtccctgacagcctagaaataagctgtttgtcttctataaagcattgctatagtgatgaatagtatgagtaactgatacatactcaactgctactgttccctttgaggaaatgtttacaggggcggccttttaacatatctcaggctcattttcattgcaattatccatttctaaaacaagattgcttcgatctagacttggaaatggaaaataagaaaaccaatgctttttcaaatgttcacaattcacacactacatttgttttgttatgcatgacgtgtctataacaaatatacacatacgacaggcaacaagcttgtttttgatttgccagacatgcatcattggctattgtttgtttgttttttgtttttttgtgttttttgggttactttgaaaatgagccagagccttcttgaggatattttgcacaaagtcacgctgacaaaatcattagcagtgcaacccaagcttctggctgagcaagattcagtttccactttttaaaatttttttattttgctctgtagctgcacttctcgttatcataaattgagatgaaaaggaaaaaacatcaagttttagtacctttttatgaattggcctatcttacaagagaagggcacaaacaccaacctgacttaggaacgcctaaattcagagaagtcaaagccggtgaaggccacttgctctttccaacacaagcctgccacagaggtcttcgggacagtactggagatgcaggttgacacgggcttgagttccaaggtgaaaaaactggggaggctgtgaaggaagagctgcattaaggagggtgaggagcgtgtggttctgtatcatggcagccccaatggatccaggggatgcctccaaaaaatacatgcttcccttcccttaatctgtactgttgggattgttacccctccaaattagctgccttatttcaaaagtcagtgaaattactgcacttgatgagggtcacaaaaataccacttgattgtttctttagttgagaatgctgggattcagactcgaatagtggatagatacacacaaatgcaaggacttttttgtttactccagatttggggtttattttgagtggcatgcttcaaatagttcataaagatccttgcattaaatttctgaaccatttcttcaaacttcttagtgtgtttagacaaggagaacaaaaattgaaaccaaagccctttctgttattttttcaatgaaggtgagaaagaaataccatacaattttctttgtgaaattactgtttattttcatcaacatttaccaagtgccattgacatttataaaaaaaaatgatcctttatagttcttacacttgcccttttcaccttaactgaatatgaattgagtgcactaacttatttacttgatatactgtgcatctactctgctttgaagcgaaagaaatataaacacgaggaggaataggaaagacagtgtgacacaaacttgccattgcaattcaaagccctgaaaacgatgggtttaatgcaaggtgattaagctgtgacctcctttaatctcctgaagcaaaataaaatggttacatgcaaaacttctagaaatagactcttaaaatatatacattttgctttgattttggcttcaacccagtgctggaactaggcatccagactagtttgaatgtttgtagctgaatttttatgggtcctcaaaattaaatcgagaattagcctcagttgttgcttcttttgaagtttcagtgacccaagctgggtgtttgtgtcttggctacttgtttaatagcactagaattccaggtgaagctttgagagttgatattcattaagagggctttttttccccttctttccttctcttttgctgtaacaaagggttgaagaaattgccatctgtgtagttttcagtagctgtcaagtgtgtcttacttaccttcccccagacgtagtttaaaatggtaaacacagctgtgatttttagttaagtaaaagagttaatatgatatagatatggaaagctttatggcttcattaaaaagataaaccactacctaactgtggttgtatgttgtttccatcatactaactagatgaatggatgcgccagttttcatcttggtccttacacttgagaagttaaactgtggttcagtatttaaactgccagtgttatacgtctcatgctctgtgtgccaggtgaaggtactgtgtaaggaagacatttgcggtgcttcttgtcctataatgattcaagtatatagtagttcttgaaagagtgtgcatatattactcatctgcttaagagagtgggttaatggatatatcagaggagccaaatacatttttttcagaacttgaaaaccaaaggtcatcatgagtgcactcaaaagttaggacaagtttattacatttgggattttcatctgtagccgtatgaagaaccctttccaatataaaagcatggcattaaattaggctgaagtcttttattttttgtatatgtactatatagaaatactagcaagttaggatcatccaatatggcctaccccgaaatggcccctctgtttccctaaccacatggaagaaagaatctgaacgtctccaccggctctacccgagttccaaaactaaagggcttctccagacctgatggttccagtttacctgctgttggcctgctggatacttgactcaggcataaattaagtgccctggtcccgaactttctccctgtatttgacctccttccctctttcctaaattactagtctggaattaaaattagctccagcaatgacctttgactccattcattttctcctcatcttgggtcttaaaaaaggagaccagatacctcctagcttttgtatcacaaccaggaatgggtattaggcctcatgcgctttgctcagaacactgccgctttgttaacaaatgacagcatggaacccagagttttgattcgatgcaaaataacagcagtgcaaccaggattcttgttttccttttccttcttggagtttggaatttctagcttttcaagcagcataagtagaatcaacattaggatgttttcatgaaatagcatccttatacttctttgagcttgatgttagtggctagactgatttccctttgctctcaaaatacaaagtgcattgaagtatacagagaaatgcctgaatatggcaagcaaataatgtagattaacattctattattgtatccgttttacaaaaaataaaattttgatatatgccggagaacggcattagaatgcaataagttgtctaggtttttctgtttcagtgtctctcccaatggcacgaagggttattgggcattgtccccacccccgcctttttaacatgtgcactatctggattcctgtaaatggccttgcaaacagaagtggtgtgtattttcaagcacctttcccccattgtatccgaatccctcttgtgtgatatctgtgacaaatagccttcttcttgtgttttctgttggactaattgtctcacgtaaagctatagaccttactaatttggcaggtattcaaaactgccattaagataggatttcatgtcagatacgtatttaaagagtaaagtcaaatttgtttaatgtcagatcagtgacagaagtgaaaagaaagtaattgtgaaagtgatgtttgagctattgtacacatctagcatatggaaagcaaatgcactcgaaaactactattctagaacatgaggcttcttcagcaacttgtgcactctgccattaataaattaaatttttcccctctagaaagccttaactatggcggaaactttttaaccttttatattttaataaataaaacattgtagtcccatttcttagtgtttgaaaggtgtgtcagtgagtcggccatgtctccatgtgtttcagacctgttcatcttattttatgatggtatatttcataagtaatattcccttacatgcaatggagctgattaaaattaatccatttcaatttctccatattggaacttcctcagctaccagatttctggtttggagaagtgctggaaagatttcaaagcctattcagttgtgtatgtggggatacgacagcaactgtgataccttgtagaatatgagtgatatgcaagctgtgttttttaattgttttaaaatgtaaattatggttatgctaaagtgaaaacctagaggaagctaatgattttatatactttgcacgaccaaatatggtcgtagtatgacgagttttatacattgccagagagttctgcctcctctgaaataacattcgcactgtagattgcatttcggcttttcctcctttcacattcttttttgctttacacttcacgtcttcgcacctgccctacctcccatcctttcaaagaggtttctttcacgttccagaattcagattgttctgtgatttcttttacatcagtctacccatttctgcaggcagccctgaaagcccttgtgttgattcagagtgtttgcagagaaatgcagttgaaccctggtagtggggtgtccctcacacacccgcgcacccctcccaaagttcaggatgaaaggctagaaaacccattcaaagttaggaaagaacacagatctttgaggccgatagcctagacctagaagatgaccttgagtatgtaaacattgtctccgtgacacaaaacactgaaactcttcatgtgcatataacacctgcttctgctcccattgtttcaagctcatcttatctttgtagtagtaatgtttgtctttgatacctacaaactaaaaaggtacttttatcaaggtttctcaaaacatttacaaaaccagctttgagaaaatgttatgttgcctggcaacagcactcggagtagtaattgtgttttctcattgtgatgttggtctgtgtgagcaaccagtgtagtgactctttggttcattattcgtgttgtttttatttttagtctctgtgtgacccaacagtggcaggggttacaaccccctctcctttcttttttgtatttatctatttgtaggattgtcagatcaagtacaagatgcccagttaagtttgaatttcagagaaacaatttcacgttaagaatgtttcatgcaatatttggcatatatttacagtaaaagcattcattatttgtctgaaattcaaatttaactgagcatgctggtttttctcattgtttggtttttctaaatctggcaatcctacagctgtggtcatgggaaatcacctacagcatgttaaagtcctctagtcatcatctcgtcacctgaaatggaagtcctttttccctcaccctccacttctttccaaaggagggcatcaaggaacttaacctgcctgcctggtgggtttctatttaagacatctttgtgattatatttaacctgcaattgtgctttggcttaatgtctagctcactgtacttgtaaatgattaatattcaataaaaccatttttaaagta

SEQ ID NO: 14436 - DNA, 3300 bp, Homo sapiens
aatttcagttcctgaacgcacggagctcgctccgggaccgggctgagaaggacctcagctcgcgggcccgccggagccatcggtgtggcaccgagagacggtgcttgggatatgcgacgggaagcccccgccacagcgcaggcagtggccccgccgcgccgcggagccgggcagagcaggctggttcttcagaggaatcatccctgactgtgtcatcactctgagctctgactgcgctcccctcccccaccagtgggaccagtactcaagagagctctggagtgctcctgaagagaaattccatggggactgtacctgaccctctgagatcagctaaaacttccctgattgcagcttccggaaaagaagacgatctaggagagccacaggctgcctcacctcggcatcgaccagctctcctgtgtaagaatgccaatggcttttcaggtgcccctgcagaaccagacctcagccccagggcagctgccgaagccctgatgcaggtttgtgagcatgagaccacccaaccagatatgtcttctcctggtgtgttcaatgaagtgcagaaagcacctgccacattcaactctcccggcaatccccagctgccagggagcagccagcccgcagcatcagccccgagttctgcagcaggaagggatcttatacacacaccattgacaatgcccgccaatcagcacacctgccagtccatcccaggtgatcagcccaatgccatcacctcatccatgcctgaagattccctgatgagatcacagagaacctcaaatagagagcaacctgagaaaccaagttgtcctgtgggaggcgtcctcagtagcagcaaagatcaggtgtcctgtgagtttccttctccagaaacaatccagggaacagtgcagactccagtgacagcagccagggtggtcagtcactcatcctctcctgtaggtggacctgaaggggaaaggcagggagccatctgtgactctgaaatgaggtcctgtaaacctctaactagagaatctggatgttcagagaacaagcagccctctgtcactgcctcgggcccccaaggcacaacttctgtgacacctcaaccaacccccctcactagcgaaccttcggcatgtcccccaggtccagagaaggtgccgctgccagcacagcgtcagatgtcaaggttcaaagaagccagtacgatgaccaaccaagctgaaagtgaaatcaaggaagttcccagcagggcttggcaagatgcggaggtgcaggcagtggcgagtgtcgagagcagatccgtctccaccagccccagtatcctcactgcatttctgaaggaaagccgtgctcctgagcattttgaacaagagcagctgcgtgtcatttgccgcagcagtgggagccacacactggagctctctgacagcacgctagccccccaggagtccagccagtgccctggcatcatgccacaggtgcacattcaggcagctgcagctgagtctacagctttccaacgggaaaataaacttgcgagcctaccaggtggggtccttaaaacctcatcaatcaatttggtctccagtaatgcccagcatacgtgtaaagaagatgggaggttagcaggaatgactccagcgagggaagagtcaactgctaaaaagctcgcaggtactaattctagctccctgaaagctaccgccattgaccagatttctatcagtgcatgcagtcaagctgaaacaagttatggattggggaaatttgaaaccaggccatctgagtttgcagagaaaacgacaaacggccacaaaacagacccagattgcaaactatctgactcttgtggctctatcagcaaagctgatcattctgggagcttggatcccactaataaaggagatgcaagggaaaagaagcctgcatctcctcaggtagtaaaagaaaaagagtctactggcactgatacctcggatgccaaaaccctactgctcaatcctaaatcccaagaaagtggaggcacagaatcagctgctaatcctacaccctccccaattaggaagaaccaggagagcaccttagaagaaaacagacagaccaagacagccaccagcctgagcctgccatctgatcccatgggtgactccagcccaggttctggcaagaagaccccatctcgctccgtcaaagccagcccacgcaggcccagccgcgtcagcgagttcctcaaggagcaaaagttaaatgtgacagcagctgctgctcaggtaggactcactccaggagataagaaaaagcagcttggcgcagactccaagctccagctgaaacagtccaagcgtgtcagggacgtcgtgtgggatgagcagggaatgacctgggaagtgtatggtgcatccttggacgcagagtccctgggaatcgcgatccagaaccatttgcaaagacaaatcagggaacatgagaaattaatcaaaactcaaaatagccagacccggagatccatttcctcagatacttcttcaaataagaagctcagaggaaggcagcacagtgttttccagtccatgctgcagaacttccgacgccccaactgctgcgtccgtcctgccccgtcttctgtgttagattgaaagggagtatttatgggagtttgtgtataaatttacggtattcacatgcgtccctctatgtcaaagcttgcttagttttttgctgcaagactaggaagaaaaagcgagtattcactataggaaattgctattaaaaattgttagatcctttgacctggagctctataaacaaaaatgtcatttcaatttgaaagaaggaacaagaaaagagaaacaagcttcactgaaggtttgcaaccttaacaaattgaaaataatactcactgggtttttaaaaatatgatgttgttcatagaaatagcattattgtatcattatacatgtattattttgtataactgcctcaatttatcacacaatagtagttccattaaaatccctgcttcatattgaaagtagcaaaaacactattggcgaaaacattgttataatttctagtcttattgcagtaagaatgctgtaaccacacaaattataaataggtgataagaaccataatgaaaaaaatgagaacaaatttgattcattcctaggccagataacattaaataaaaacagttaaatgtgtaaaatatgaaatatgaattaatatttgtaaacatctgcagacaactctttttataaaccttcttattgctgttaataaatataagaaagttatattagg

SEQ ID NO: 14437 - DNA, 2395 bp, Homo sapiens
cattcaaacccagtccattctggctcatggggcccaagccttgctctgctgccccaggctgtgtaggatgcatctgcggtggccattcttctctccagaggtccttcctaggactgactttgtggagattctgtgctggtaggtggcggggcaagacacgcctgtctctccccctggaaggagtcagtccagcaagaaacctgatgaaaccagtgactcccagctctggatgagatggaccaaacgcccccggcgcgtcctgaatatctggtctcagggattcgaactccccctgtgaggaggaacagcaaactggccaccctgggcaggatcttcaaaccctggaaatggaggaaaaagaaaaacgaaaaactgaagcagacaacgtcagcgctggagaagaagatggccggcaggcaaggccgagaggagctcatcaagaaggggctgctggagatgatggagcaggatgctgaaagcaaaacttgcaaccccgatggaggaccccgatctgtacagagtgaaccacccactcccaagtcggagacgctgacttcagaagatgcccagcccggaagccccttggccactgggacggaccaggtctccctggacaagccactgtcctcagctgcccacttggacgatgcagccaagatgccttctgcatccagtggtgaagaagcagacgctggcagcctcctgcccaccaccaatgagctctcccaagccttagctggggctgactccctggacagtcctcccagacctctggagagatccgtgggccagctccccagccccccactgctgcccactccgccacccaaggcaagctccaaaaccacaaaaaatgtcacaggccaagccacactcttccaagcctccagcatgaagagtgccgacccttccctccggggccagctctccacacccacggggtctccgcatctcaccacggtccaccggcctcttcccccaagccgcgtcattgaggagctgcacagggcgctggccacgaagcaccgccaggacagttttcaaggaagagaaagtaaagggtctccaaagaagcggctggatgtccgtctgtcgagaacgtccagcgtggagcggggcaaggagagggaggaggcttggagctttgacggggcattggagaacaagcgaactgccgctaaggaatctgaggagaacaaggagaacctgatcataaattctgaactcaaagacgacttgcttttgtatcaggacgaggaggcgctgaacgactccattatttctggaacactgccacggaaatgcaagaaggagctcctggccgtgaagctaaggaaccggccaagcaaacaggaactagaagaccggaacattttccccagaaggactgatgaagaaagacaggagatccggcagcagatcgagatgaagctttccaaacggctgagccaaagacctgccgtggaagagctggagagaagaaatatcttgaaacaaaggaatgatcagacagagcaggaagaaagaagagaaatcaagcaaagattgacaagaaagcttaatcagagacccactgttgatgaattaagagacagaaaaattctgatacgattcagtgattacgtggaagtagcaaaagcgcaggactatgacaggagggcagacaaaccctggacgagactgtcagcagcagataaggcagcaattcgtaaagaattaaatgagtacaaaagtaatgaaatggaggtacatgcatcaagcaagcacttgacaagattccacaggccatagagattttcttctgagaagaatttgtgtttaattttttgataccaacactgaacattcatcagggaactttcctgaagttcagctcaagactaccctacctgctgtgtttgtgagaagagtaggatcacacacacaggtgcaatcttgaccacacttacctgcaagaggagtaaccagaggacacacttccttccttctttggtgtctgaggagtgtgaactgttggggtcagttaagacccaacataactctatcagaagaaaactgttgtttgcctttcaaccttgttttacagttctgcagtgtaatggaggacgggcaacgtgcatgtgcaggctcaccactcccaggcctctgacatgagggacatgtgacagtgtcattcagtattatgttcaaaagacatttttatcctgatcataattaatttgaaaactctttaagttcatgttatacaagatgatttactgtattatacttttccttttttatataatgtctaacaaaaaatacagctgcaacattttgattcctgttaattttgttctttaattaaatgactacttattgcaggaaattaaaaaaaaaaaaaaaaaaaaaaaaa

SEQ ID NO: 14438 - DNA, 2728 bp, Homo sapiens
gcaattgcaagagcaaagattcttccttttcccttttttcctgggggggtggggggtggggtggggggagggagcgcccccagacattccaggacatcaccccctgccccaagcacgcaataaacactgacaagaaaaagtttttatttcctggttcaacttttttttttttccctggaatatagactgaagaatgggaataaacacgaataaataacaaagcgaggccgcgcacgccgggatgcgcctggctgcagccggcgaggctattgtctccccgccctgaagccagccccggcgtctttctccagctcgtttcctttcccggccttttttttttttttttttttttaattttcttttttaaaaagacgccccctccagccccctcgccggtgaccttggccgcctcggatgctctgattccacgcggctcgctctaacttgcccccgcgccggccgggcccatggccgcgtcggaggacgggagcggctgcctcgtgtcgcggggccgctcgcagagtgaccccagcgtcctcaccgactcctcggccacctcctccgcggacgccggggagaacccagatgagatggaccaaacgcccccggcgcgtcctgaatatctggtctcagggattcgaactccccctgtgaggaggaacagcaaactggccaccctgggcaggatcttcaaaccctggaaatggaggaaaaagaaaaacgaaaaactgaagcagacaacgtcagcgctggagaagaagatggccggcaggcaaggccgagaggagctcatcaagaaggggctgctggagatgatggagcaggatgctgaaagcaaaacttgcaaccccgatggaggaccccgatctgtacagagtgaaccacccactcccaagtcggagacgctgacttcagaagatgcccagcccggaagccccttggccactgggacggaccaggtctccctggacaagccactgtcctcagctgcccacttggacgatgcagccaagatgccttctgcatccagtggtgaagaagcagacgctggcagcctcctgcccaccaccaatgagctctcccaagccttagctggggctgactccctggacagtcctcccagacctctggagagatccgtgggccagctccccagccccccactgctgcccactccgccacccaaggcaagctccaaaaccacaaaaaatgtcacaggccaagccacactcttccaagcctccagcatgaagagtgccgacccttccctccggggccagctctccacacccacggggtctccgcatctcaccacggtccaccggcctcttcccccaagccgcgtcattgaggagctgcacagggcgctggccacgaagcaccgccaggacagttttcaaggaagagaaagtaaagggtctccaaagaagcggctggatgtccgtctgtcgagaacgtccagcgtggagcggggcaaggagagggaggaggcttggagctttgacggggcattggagaacaagcgaactgccgctaaggaatctgaggagaacaaggagaacctgatcataaattctgaactcaaagacgacttgcttttgtatcaggacgaggaggcgctgaacgactccattatttctggaacactgccacggaaatgcaagaaggagctcctggccgtgaagctaaggaaccggccaagcaaacaggaactagaagaccggaacattttccccagaaggactgatgaagaaagacaggagatccggcagcagatcgagatgaagctttccaaacggctgagccaaagacctgccgtggaagagctggagagaagaaatatcttgaaacaaaggaatgatcagacagagcaggaagaaagaagagaaatcaagcaaagattgacaagaaagcttaatcagagacccactgttgatgaattaagagacagaaaaattctgatacgattcagtgattacgtggaagtagcaaaagcgcaggactatgacaggagggcagacaaaccctggacgagactgtcagcagcagataaggcagcaattcgtaaagaattaaatgagtacaaaagtaatgaaatggaggtacatgcatcaagcaagcacttgacaagattccacaggccatagagattttcttctgagaagaatttgtgtttaattttttgataccaacactgaacattcatcagggaactttcctgaagttcagctcaagactaccctacctgctgtgtttgtgagaagagtaggatcacacacacaggtgcaatcttgaccacacttacctgcaagaggagtaaccagaggacacacttccttccttctttggtgtctgaggagtgtgaactgttggggtcagttaagacccaacataactctatcagaagaaaactgttgtttgcctttcaaccttgttttacagttctgcagtgtaatggaggacgggcaacgtgcatgtgcaggctcaccactcccaggcctctgacatgagggacatgtgacagtgtcattcagtattatgttcaaaagacatttttatcctgatcataattaatttgaaaactctttaagttcatgttatacaagatgatttactgtattatacttttccttttttatataatgtctaacaaaaaatacagctgcaacattttgattcctgttaattttgttctttaattaaatgactacttattgcaggaaattaa

SEQ ID NO: 14439 - DNA, 7209 bp, Homo sapiens
gacgtcatcacgcagggccgagtcggcgcggccacatcctttaaatatggtcttttttgggcgcgcgcgacaatgtgaggagtggggtggagcgtgtgtggtgtgtggctgcggcctgggcaagagccgccgcggaccatgagctgagtaagttctggagggatcctgcctcttggagccttcgcagccaggcagctgtgaactgtgagctagagtgaagcagaaatctaggaagatgagctccaagatggtcataagtgaaccaggactgaattgggatatttcccccaaaaatggccttaagacatttttctctcgagaaaattataaagatcattccatggctccaagtttaaaagaactacgtgttttatccaacagacgtataggagaaaatttgaatgcctcagcaagttctgtagaaaatgagccggcagttagttcagcaactcaagcaaaggaaaaagttaaaaccacaattggaatggttcttcttccaaaaccaagagttccttatcctcgtttctctcgtttctcacagagagagcagaggagttatgtggacttgttggttaaatacgcaaagattcctgcaaattccaaagctgttggaataaataaaaatgactacttgcagtacttggatatgaaaaaacatgtgaacgaagaagttactgagttcctaaagtttttgcagaattctgcaaagaaatgtgcgcaggattataatatgctttctgatgatgcccgtctcttcacagagaaaattttaagagcttgcattgaacaagtgaaaaagtattcagaattctatactctccacgaggtcaccagcttaatgggattcttcccattcagagtagagatgggattaaagttagaaaaaactcttctcgcattgggcagtgtaaaatatgtgaaaacagtatttccctcaatgcctataaagttgcagctgtcaaaggacgatatagctaccattgaaacgtcagaacaaacagctgaagctatgcattatgatattagtaaagatccaaatgcagagaagcttgtttccagatatcaccctcagatagctctaactagtcagtcattatttaccttattaaataatcatggaccaacgtacaaggaacagtgggaaattccagtgtgtattcaagtaatacctgttgcaggttcaaaaccagttaaagtaatatatattaattcaccacttccccaaaagaaaatgactatgagagagagaaatcaaatctttcatgaagttccattaaaatttatgatgtccaaaaacacatctgttccagtctctgcagtctttatggacaaacctgaagagtttatatctgaaatggacatgtcctgtgaagtcaacgagtgccgaaaaattgagagtcttgaaaacttgtatttggattttgatgatgatgtcacagaacttgaaacttttggagtaaccaccaccaaagtatcaaaatcaccaagtccagcaagtacttccacagtacctaacatgacagatgctcctacagcccccaaagcaggaactacaactgtggcaccaagtgcaccagacatttctgctaattctagaagtttatctcagattctgatggaacaattgcaaaaggagaaacagctggtcactggtatggatggtggccctgaggaatgcaaaaataaagatgatcagggatttgaatcatgtgaaaaggtatcaaattctgacaagcctttgatacaagatagtgacttgaaaacatctgatgccttacagttagaaaattctcaggaaattgaaacttctaataaaaatgatatgactatagatatattacatgctgatggtgaaagacctaatgttctagaaaacctagacaactcaaaggaaaagactgttggatcagaagcagcaaaaactgaagatacagttctctgcagcagtgatacagatgaggagtgtttaatcattgatacagaatgtaaaaataatagtgatggaaagacagctgttgtgggttctaacttaagttccagaccagctagtccaaattcttcctcaggacaggcttctgtaggaaaccagactaatactgcttgtagtcctgaagagtcatgtgttttaaaaaaacctatcaaacgagtatataaaaaatttgatccagttggagagattttaaaaatgcaggatgagctcttaaagccaatttccagaaaagtaccagaattgcccttaatgaatttagaaaattctaaacagccttctgtttctgagcaattgtctggtccttcagactcctctagttggccgaaatctggatggccttctgcatttcagaagccaaaaggacgattgccatatgaacttcaggactatgttgaagatacatcggaatacctagctcctcaggaaggaaattttgtttataagttatttagcctgcaagacctgttgttactcgtacgctgcagtgtccagaggatagagacaagaccacgttctaaaaaacggaagaaaatcagaagacaatttccagtttatgtactaccaaaagtagagtatcaagcttgttatggagttgaagctctgactgaaagtgaactttgtcgcttatggactgaaagtttattgcattccaacagctcattttatgttgggcatatcgatgcatttacttcaaaactttttctactggaagaaattacctcagaagaattaaaagaaaagctttcagcactcaagatttccaatttatttaacatcctccaacacattctaaagaaactaagtagcttgcaggagggttcctacttgttatctcatgcagcagaagattcttcactcctgatttataaggcctctgatggaaaagttactaggacagcatacaatttgtataaaacacattgcggccttcctggtgtaccttccagtctctcagttccctgggtcccattagatcccagcctgttattaccatatcatatccatcatggaagaataccttgtacttttccaccgaaatcactggataccacaacacaacaaaagattggtggaacgagaatgcctacacgcagccacaggaatccagtttccatggaaaccaaaagcagttgcttgcctgctcagcaagttgaaactgaaggagtggctccacataaaagaaaaataacttgaggactgtaccatggaaaactaaatttaaaaaaacagttataacagtgtttaatttagataagtttgagggaaaataatcagtaggcaagaggaacatttttcctgtagtagctagagtgccttgaaaaaatgtgttggctatgtgaaggaatatttcaactaaaatggaatggtatgcttttcacccttgaagtttgaggaggatcttgatatgttttaacattatcatggcagggaaatatataaagaagaaaaatatttttacattaaaccttttctaaaaattgtaaatagaaaaataatttggttttttatcaagaacaacacttatcgttatgtattgtgttagttatattgccagtctgttgcgactgactcaaaaagttaaatgttgccactgctgaagatgattatgagcatcgcaaactttgtttctgacccattttgacagtttttatatactcctttaaaatgatgaatgttacaggttaataaagttaatacctttaaaaacttggtgaaattccattacagaagccaaaaataaaaactccctgcctctgaaaagtcagattactgacttcttgtttggcaaccatcagtttgtttaataaaagaaaaaatttggtggtataacatgtttgatgacagatgcctctatctctagattcaagctgagtgttgaaatacactgctgaaagcaaagagataggtatgttttccagaaaaaaagtcagtgtcattgctccagatgacaaggttaatgtggtaaagcataagcttttttttttttttgagatggagtctcgctctgttgcccaggctggagtgcagtggcatgatctcagctcaccacaacatccacctcctggattaaagcgattctcctgcctcatcctcccgagtagctgggactacaggcacctaccaccaggcttggctaatttttttttgtatttttagtagagacagggtgttaccatgttggccgggctggtctcaaactcctgaccttgtgatccgcctgccttggcctcccaaagtgctgggattacaggggtaagccaccgtgcctggccagcataagctatttttatcctcatctatactgattgatttaaattttccgggcctgcagatgaatttggaaaagggcataatcaactgatgttgctgtagcaaatttggacttaagaaactacagacagggccgggcgtggtggctcacacctgtaattccagcacttcgcaaggccgaggcgggagaatcacttgagtccaggggttggagaccagtctgggcaacacagacctcatctctacaaataaaaaagttagccgggtgtggtggggtgtgcctgtagtcccagctactcaaaaggctgaggcagaagaattgcttgagcccaagaagtcaaggctacagtgagttgtgatcgcaccacagaactcagcttgagtatcagagtgtgaccctgtctcaaagaaaaaaaaaaacaggacaggcttgtttaatctttagaacccttacactaaaattttcagaaattatgtatgtcatttgtaaaatataagttttgtaatcctagataattgcttcacattgaaattttttagctattctgtgtaaagaatagctattcttttggcctaatttctgagaaattagaccgaaaaatctcctcaagtattgtaacagttgaaaatacttatattcaactaccaagttttgtttcattttgattttttgttataaaacatttttaagttatttgagaagtaattattagtaaaattgtatcttgataaatcatttcctcatcctgccattcccttttataaaacactgagtttttttattccttaagtcacatatcccagaaatgttttggttgtgaatcatttgccagcgagccaagggagaggcagggattcccttgaaatgtactcttacacttttttattttatttttaatgtacatttgtgtgcaccagaatggaatgtgctctttttaaagagctggacagtggttgcttcagacttctgaataccagaaagacttgccttttaatttttaaatattactttttacatcataaaatgtgttatcttatccatgtatttgaataacatcatatataaaggtagttttttgcttgtgcttagtgaagcctccttttttaacatacatttgatatgctttatgttctttttcttgatttttagtactgagaatttataagccaagaagtaactgacaatatgtttagcaggatgtaatcccagctacttgggaagctgaggtgggaggatcgcttgagtctaggagtttgaggctgcagtgagctatgatggtgccactgcactccatcctgggtgagagatcaagaccctatctcaaaaaatgagcaagttttttttttttttttaaatcagacttagggctagcaaggatgtgatcaccctggcccatttatacctcagcagtgaaggtgtaatttatacacacctctttgaaaacagtttaattcagtaagtgagtgcaactatgtgccatgcactccaaagtaggtccccacagttattctctcatagccttgttttttcagatctcaccatatttatttgtttctttgattttcttttcttatagattacaagctctgcaaggacaggggcatatttgttttgttcaccattaagtaataaacacctaatacagtgcctgtcatgtagttgcttagcagatattagttagatgcatgaatgtgtaggtatcaaagattttttttttcaggagatcacattctagtggaagacactatactgctttatgtgataagtgctttgataaagtaagcaagtcatctaaccagatcttggtagttaaggttttctgagatagaacttgagctgagtcttttaaaaatagtaggatttataagggaaaattaaaggtcttccacaaagaaactaagtgaaactaagcagcctatgaaaaggtgaaagttggagagattataggctatgaacatgggagatgagagagaaaactgcaggatagggacagaaacactgtgctaagacatttgaactttgtcctgtgcaatgtgggaaccagtagtgaaggttaattaactgacatgatcagatatgtatttgaaaagggctcttgttggcattagtctagagaatgcgatggagctgggaagcgaaagaagaaatgttgggagcctgtgttgtagtaactgaaaaatggcaatggcccagaattaaagcagcaagaataggagtgggctcaagtgatgtataaggaaaaaaaaaaaaatgacaactcagttttgttgttggtaaggagagtaaagtatggcttctgggtttctcatttgagatactgagtaaatgatggtgttaacccattgagaaaatagtgtggttagagtgggaagaaagttaatttaaaatgttcatttttttttttagtcatttctacttttggattctaggtttgtgtgctatattggttataaccaatttgctgaataataaattatcccaaaacttagctacttaaaacaacaaacattatctcacagtttctgtaagtcaaaagtccaggtctctcatgaagttgcagtcaggctcttggctagggctgcagtcatctgaaggattagtaagtcgctaagcccacacttaagctccacccttgaagggagaagtttggaaagaatttgtgaacatatttttaaatcacatatgctatgaacaggtttaggggagggagaggaaagaaaactttaacttttcattagcatactgcatctgtagttcctaatgggcatgttgtaaagatgttaagacgttttctatgcattataggtatatagtagtattttgttttgttctgtttttttgtttggtatgtagtagtttttaatcaaaccttaacgtatttgatattaagatttattgagtttcttgttgagatgtagaaataaaggggatccatttcatttatcca

SEQ ID NO: 14440 - DNA, 1777 bp, Homo sapiens
agcaagagcctcctgatctagcagccaagactccccctgacctttggccatgtaccccaaccctctcatctactgcacctgctgggacccctggaacttgggaccacggaagctaatcaagacccctcaactaccacgcaagaactccacagggagttccaagctaactcctcttctaccagctccaaaaaatcacaattacctccaaccaacaaaacctgttgtttccccaaaaatgaaaatccattcagcaaggcaagaagagactaataaatcattttatgaagtgatcaacgtgtcacctggctatcaacttgttcggaatcgggaacagatttctgtcaccttaggggatgagatgtttgataggaaaaagcggtgggaatcggagatcccggacaaaggcagattttccaggaccaacatcatttctgacctagaagagcaaatctcagagctgacagcaataattgaacaaatgaacagagaccaccagtctgcccagaaattgctctccagtgaaatggatctccgctgtgctgagatgaaacagaactttgaaaacaagaacagggagctcaaagaggcccatgaagcagaactcagtgagttggagaacaactacaaagcagccttgaaggcagagaagttggctgcccaagagaagctagaggagatgggaaaagaatacaagtatttgaagaatatgtttcgtacgtatcaggacagtatttatgatgaaatggaagagaagtggtcaaaacagaaggcgaaatggaagaaggatgagaagttcgagcgagaaaatatcctgctacagcaaaaaaaaaagatgaccaaaaaattcgaaatggagtcaggagaagaagataagaaaataaatgaatcctgcagtgctgtctttgagaacttcattcaagagaaggaggagctcttgaaacaacatcaaagtgacaccttgcaattagaagagctgagaaaaaccaaagaggtgccctggagaagagaccaaataaatagacattggcatgatgtcctgcaacagcttcttcttatgcaggtcatgcaggaagaattgcatgcacaagcccttatcctagagtcactgaacacaaacctctactatacccagttggaactccagaaagagaaagctatagtgggaaatctggagaaaatgcttcaaaccaagtttgctgaaactgaagaaaagtataagcacaccatacagatcctgacggaagagaacattcatctgaagcaaaagataatttctaagaatgaagaaatttgtgaaggatgttctgggagattggcctctattactgtttctaaggatgattctgacactgtgcaagatggtagcaagaaaggacaagaatcataaacaaaaagttgctctgcattgttgaagatggttggcacaccatttctgtaggcccaggaaactcctgggagggttttcttgagaaaatgcatataatgagtttagttcttgggttgctctgactctctgaatgtctgaaaatgtttgaattctcatctgaatttcacagcttatcacggactcttcactgaaaaatgatgctctccatactgggagctgagctttctctgagttttgtactatttttcttctaccttgacgtatttcgttagaaagaaactgatttgaaggccttcttcatattgaacttttactatatttgggaggtgtacctttgtcccctggggcatttaggtagcaaaaaaagatgatgtgttgattttaaaaaat

SEQ ID NO: 14441 - DNA, 3857 bp, Homo sapiens
ccgcggtcggcggcagcgctctcctaagctctcgcggctgcgcttcggtcccggacccgggccacccacggggtagtgggtgctcctcggccccggacattgcaagccccagaaggcaagactaactcggtgttgctcctcccggcgctgacttcgaggcccggctatggacggcgagagcgaggtggatttttctagcaacagcataacccctttgtggcggaggcggtcgattcctcagccccaccagcttctgggccggagcaagccgaggccccagtcctaccagagccccaacgggttactaattacggatttcccggtggaggacggagggacgctctccgcagcgcagattcccgcccaggtgcccaccgcctcggacagcaggacggtacataggagccccctgcttctgggcgcccagcggagagcggtggccaatggtgggacggcatccccggagtacagggctgcctctcctcgacttcgacggcccaagtcacccaagctccccaaagcggtgcctggcggctccccgaaatccccagcaaatggcgcggtgaccttgcctgcgccgccgccgccgccggttctgcgccccccgcggactcctaacgcgcccgccccctgcacccccgaggaggaccttactgggttgactgccagcccggtgccttcgcccactgcaaatggccttgccgctaataacgactctcctgggtcaggttcgcagtccggccggaaggcaaaggaccccgaacgggggctctttcctgggccccagaaaagttcttcggaacaaaaactccccctccaaaggctgccctcccaggagaacgagctcctcgagaatccttccgtggttttgagtacaaacagccccgccgccctcaaagtggggaagcagcagatcattccgaagagtctggcctcggaaattaaaataagtaaatccaacaatcaaaatgtggagccccacaagagactcctcaaggtgcgcagcatggtggagggcctaggaggacccctgggtcacgcaggggaggagagtgaggtcgataacgacgtggatagcccagggtctctgcggagaggcttgcggtccacgtcttatcgcagggcagtggtcagtggctttgattttgacagtcctaccagctcgaagaagaagaacagaatgtcccagcctgttctgaaagtggtgatggaagacaaggagaagttttccagtctgggaaggataaagaaaaaaatgctgaaaggacaaggaacatttgatggggaagaaaatgctgtcctgtatcaaaactacaaggaaaaggcccttgacattgattctgatgaagagtcagagcccaaagaacagaagtcagatgaaaaaattgtgattcaccataagccattgagatccacatggagccaactctctgcggtgaaaagaaagggattatctcagacagtaagccaggaggaaagaaagagacaagaggctatctttgaagtcatatcctctgaacattcatatttactcagcttggagatcttgatacgaatgtttaaaaattctaaagaactgagtgatacaatgactaaaaccgagaggcaccatcttttctccaatattacagatgtctgtgaggcaagcaaaaagttctttatagagttggaagcaagacatcagaataatatcttcatagatgacataagtgacattgtggaaaaacacacagcatccacatttgacccatatgtgaaatactgcacaaatgaagtctaccaacaacgaacactacaaaaattgttagctaccaatccttcctttaaggaagtattgtcaaggattgagtcccatgaagactgtaggaacttacccatgatctcttttctcattctccccatgcagagggtgacccgccttcccctgctgatggatactatctgtcaaaaaacacctaaggactctccgaagtatgaagtctgcaaaagagccttgaaggaagttagcaagttggttcgactatgcaatgagggcgcccggaagatggaaaggactgagatgatgtacacaattaactcccagctggaatttaaaattaagccttttcctttagtctcctcttcccggtggttggtaaaaagaggtgaattgacagcctatgttgaagacactgtgcttttctcaagaaggacatccaaacagcaagtctacttctttctctttaacgatgtgctcattatcaccaagaagaagagtgaagaaagttacaacgtcaatgattattccttaagagatcagctattggtggaatcttgtgacaatgaagagcttaattcttctccagggaagaacagctccacaatgctctattcaagacagagctctgccagtcacctctttactctgacagtccttagtaaccacgcgaatgagaaagtggagatgctactaggagctgagacgcagagcgagcgagcccgctggataactgccctgggacacagcagagggaagccgcctgcagaccgaacctcactgacccaggtggaaatcgttaggtcatttactgctaagcagccagatgaactctccctgcaggtggctgacgtcgtcctcatctatcaacgtgtcagcgatggctggtatgagggggaacgactacgagatggagaaagaggctggtttcctatggaatgtgccaaggagataacatgtcaagctacaattgataagaatgtggagagaatgggacgcttgctaggactggagaccaacgtgtagtctctcagatggtcttttgttactgcaagatttgcacgacacttaccgggctggttggttctgggctagttttattgttaattttgtcacagcctatttaattaaaagaacgaaaacacttgcctttaagcttgccaggttgttccgctctctcatgagaagagcttggatacagtgagtttgcacagctcagtttttacctaaccacacacttgcagacctcctgaggtacacagagtagctgagcagttcacttcagggatcaggtcatctctgctcctcctagtttcaccatgttctggcaataaaaaacacatattatatcctggttttctctatccttgcattactaaggtgactgtctctctttatacatccttgtatggttctcccagtattagcaagattgtatatctgtaaagaatgtccagttttgtaaatatttccctgcctttttttttctttttttacatctgattttaatgcttcgttaacttcaaaaggaactggtagagttcagaaggtgagctgttgtttttctaaacctcttcccaggaaggggacattgacacttgaatttttgtcacctttttcctcattagaaggaaagtagaaagccttactgtaggatttttaaaaaaaaatccatctcaccccatattggtcttaaataagtatagactaattaacctaagctacctttaacaacgtagaatttagatgggttcatatatgtgagaaaaacctgaatataggacaggggtcctacttttttccccacctctgtcgcccaggctagagtatagtggtgtgatcttggcccactgcaacctctgcttcctaggttcaagtgattctcctgcctcagcctcccaagtagctgggattgtaagagtatgccaccacgcccagctactttttgtatttttagtagagacagggtttcatcatgttggccaggatggtctcttaactcctgccctcaagtgatccaccagagaggagatcctcggcctccccaagtgctgggattataggcatgagccaccgtgcccagcctactttctaattaatt

SEQ ID NO: 14442 - DNA, 471 bp, Homo sapiens
atgctagaaacaggatatttagggcactttaaaaaaagtaatagtgctgaagaggttgtttatgagtgcaccaaccagccacctctgtccctttcccggatgatcccgaaaatgaagcttcctggccaggaaaacaaaacggccgtggttgtgggaaccataacagatgacgtgtgggttcaggaggtgcccaaactgaaggtgtgtgcactgggcgtgaccagccgggcccgcagccacatcttcagggtggggggcaagaacctcactttcgaccagctggccctggactcccccaaggtctgcggcaccgtcctgctctcaggtcctcgcaagggtcgagaggtgtactggcatttcgacaaggccctgggaaccccacacagccacaccaaaccctacgtccgctccaagggccggaagttcgagtatgccagaggccaaggggccagccaaggctacaaaaactaa

SEQ ID NO: 14443 - DNA, 2271 bp, Homo sapiens
gcctcgcggcaggagcgggatttccggggtcacgggaaccggcaggggaacgggataaagttcccggagaaaggaaaggagagcgtgggatagtaaaagagaagacgcggagaagaggagaggacctacaagaacggaggacaggggcgcacgatggtcccggggggagcggaaacaaaggcacgcaaaacggaaaagcgtgtgtaggggagcggaaaaggaagtcaccaccgtggcctgcgacgaaatggcgaaaagtcttttgaagacagcctctctgtctggaaggacaaaattgctacatcaaacaggattgtcactttatagtacatcccatggattttatgaggaagaagtgaaaaaaacacttcagcagtttcctggtggatccattgaccttcagaaggaagacaatggcattggcattcttactctgaacaatccaagtagaatgaatgccttttcaggtgttatgatgctacaacttctggaaaaagtaattgaattggaaaattggacagaggggaaaggcctcattgtccgtggggcaaaaaatactttctcttcaggatctgatctgaatgctgtgaaatcactaggaactccagagacttcctttaataagtgttgcgctggttcaaggttgggcattgggtggaggagcagaatttactacagcatgtgatttcaggttaatgactccagagagtaagatcagattcgtccacaaagagatgggcataataccaagctggggtggcaccacccggctagttgaaataatcggaagtagacaagctctcaaagtgttgagtggggcccttaaactggattcaaaaaatgctctaaacataggaatggttgaagaggtcttgcagtcttcagatgaaactaaatctctagaagaggcacaagaatggctaaagcaattcatccaagggccaccggaagtaattagagctttgaaaaaatctgtttgttcaggcagagagctatatttggaggaagcattacagaacgaaagagatcttttaggaacagtttggggtgggcctgcaaatttagaggctattgctaagaaaggaaaatttaataaataattggtttttcgtgtggatgtactccaagtaaagctccagtgactaatatgtataaatgttaaatgatattaaatatgaacatcagaattactttgaaggctactattaatatgcagacttacttttaatcatttgaatatctgaactcatttacctcatttcttgccaattactcacttgggtatttactgcgtaatctggaacatttagctaaaatatacacttttggcttaaaaattattgctgtcaattccaataataattcttagcttataaccaaagagcagtgtttaaaaggagagcttctatacaaaacctattcctggcgttacttttcatacaatttttgttctgttttacctggaaataatttaccaaaataactgagtgttgctgctaaagaacaaaagtggggaggtatcagggaacaagaaaacaagaaagggtatgatcaatcattttcttctgctccaaacagctggagtaaaattcatgggaaatggcccttcatttaaaaaaagatgtacctcactacccactacaaatttggaactttgttcttttcaataattagttttctattgtaaattacctactaaacagtggtagccatgacatggaaagtcaactgattctacaattggacattcatttgtgtgccctggaatttccaactagtaataaacaactactgttgatgtagttttaaaccacttgaagggactcatgaagcatcctgcaacataaatttgcatttttacatcagatttcttttttttcctgaaaaacaactaaccttctaacaactatctttcaaaagtaaatgtaataaaaatgcacaacataaaatgtttatgatcccagcaatacactttttaaaaaatgtgaaagtcaaagaattaagttctagttctgactcatcacaagaggtcaaaagtatttgctactgtaacattcaattcacatttgagaatcatggtaaaaataacttgcatttgccttaccatcatgatcctactgttgagttaggaaaatatggttagacagactcacattactttttttcagaggtaaactctagattactgtgtcaacccaatactatttggccatagatgtaaaaactaccaaataaaagtggattttgtggtctacaaaaaaaaaaaaaaaa

SEQ ID NO: 14444 - DNA, 1854 bp, Homo sapiens
atgtcccaccaagaaggcagcacagacggcttaccagacttagggactgaaagcctgttcagcagcccagaggagcagtctggagccgtggcggcgacagaggcctcctcagacattgacatagcgacctcagagctgagtgtgacagtgaccggagatggcagtgatagcagggatggtggattccccaacgatgccagcacagaaaatcgaagctcagaccaagaaagcgcaagtgaagacatcgaacttgagagcttggaggactttgagcatttcctcatgagtggtgaaagtttattccattaccctttagtgggagaggaggagacagaaagggaggaggaagacgaagagatacaagaggaggaggaggaggaggaggaggaggaagaagaacagcctcgggcgggtccacaaggcagtggcggcaaccatgagcagtattcgttagaggaggatcaggcgctggaggagtgggtttcctcagagacatctgccctgccccgacctcgctggcaggtcgttactgctcttcaccagcggcagctgggttcacgtccccgctttgtatatgaggcctgtggggcaagagcctttgtgcagcgtttccgcctgcaatatcgtcttgcagaccatgtcggctgtgtcaatactgtacactttaaccagcgtggcacccggctggccagtagcggtgatgacctaaaggtgatagtgtgggactgggtgcggcagaggccagtactgaactttgaaagtggtcacacaaataatgtcttccaggccaagttccttcctaactgtggtgattccactctggccatgtgtgcccgtgatgggcaggtacgggtagcagagttaattaatgcatcatatttcaacaatactaagtgtgtggcccagcacaggggacctgcccacaagttggctctggagcctgactctccttataagttcctcacttcaggtgaagatgctgttgtcttcaccattgacctcagacaagaccggccagcttcaaaagttgtggtaacaagagaaaatgataagaaagtgggactgtatacaattactgtgaatcccgccaatacctaccaatttgcagtgggtggacaagatcagtttgtaaggatttatgaccagaggaaaattgataagaaagaaaacaatggcgtgctcaagaaattcactcctcatcatctggttaattgtgatttcccaacaaacatcacctgcgttgtgtacagccacgatggcacagagctgctagccagctacaatgatgacgatatttacctcttcaactcctctcacagtgatggtgctcaatacagtaagagatttaagggacacagaaataataccacagtcaaaggtgttaatttctatggccccaggagtgagtttgtagtgagcggtagtgattgcgggcacatcttcttctgggagaaatcatcctgccaaatcatccagttcctaaaggggagcagagaaggtacaataaactgtcttgaaccccacccttacctacctgtgttggcgtgcagtggcctagatcatgatgtcaagatctggacacccacagctaaagctgccactgagcttactgggttaaagaaggtgattaagaagaacaagtgggaacgagatgaagacagcttgcaccatggcagcctgtttgaccagtacatgctttggttcctcctgcgtcacgtgacgcagagaggtcgtcaccaggactggagaagtggtgaagctgaatttccagatgaagaatcggatgagtcttccagcacttcagagacatctgaggaggaggtccaagaccgagtgcagtgcatgccatcctga

SEQ ID NO: 14445 - DNA, 2400 bp, Homo sapiens
ctgtaggggaggatattttgattgaacacaggcttgacagaatcttcttttcttcttagaaatcctagaaaacagaaagcaacaggaagatgtcttattgggaactacccccatcaacttcaccatgagtcaaacaaggaagaaaacttcctcagaaggagaaactaagccccagacttcaactgtcaacaaatttctcaggggctccaatgctgaaagcagaaaagaggacaatgaccttaaaacaagtgattcccaacccagcgactggatacagaagacagccacctcagagactgctaagcctctcagttcagaaatggaatggagatccagtatggagaaaaatgagcatttcctgcagaagctgggcaaaaaggctgtcaacaagtgtctagatttgaataactgtggattaacaacagcggacatgaaagaaatgggagaagcatttgagatgattcctgaacttgaagagctaaatttgtcttggaacagtaaagtgggaggaaatttgcctctgatccttcagaagttccaaaaagggagcaagatacaaatgattgagcttgtggattgctccctcacgtcagaagatgggacatttctgggtcaactgctacctatgctgcaaagtctcgaagtacttgatctttccattaacagagacattgttggcagtctgaacagtattgctcagggattaaaaagcacctcaaatctgaaagtactgaagttacattcatgtggattatcacaaaagagtgtcaaaatattggatgctgcttttaggtatttgggtgagctgaggaaattagatctttcctgcaataaggatctaggtggaggttttgaagactcgccggctcagttggtcatgctaaagcatctacaagtcctagatcttcaccagtgctcactaacagcagatgacgtgatgtcactgacccaggtcattcctttactttcaaatcttcaagaattggatttatcagccaacaaaaagatgggcagttcttctgaaaacttactcagcaggctccgatttttaccagcattgaagtcattagttatcaacaactgtgctttggagagtgagacttttacagctcttgctgaagcctctgttcacctctctgctctggaagtattcaacctttcttggaacaagtgtgttggtggcaacttggagctgcttctggaaacactaaagctttccatgtctcttcaagtgctgaggctgagcagctgttccctggtgacagaggatgtggctctcctggcatcggtcatacagacgggtcatctggccaaactgcaaaagctggacctgagctacaatgacagcatctgtgatgcagggtggaccatgttctgccaaaacgtgcggttcctcaaagagctaatcgagctggatattagccttcgaccatcaaattttcgagattgtggacaatggtttagacacttgttatatgctgtgaccaagcttcctcagatcactgagataggaatgaaaagatggattctcccagcttcacaggaggaagaactagaatgctttgaccaagaaaaaaaaaagaagcattcactttgaccatggtgggtttcagtaaactgatttcccatgtcctactaagctacaaaccattctccaaaggaaaagaacatgaacgaattccagagtcatgaactgaatttcaacttctgggccatttaatgggacttatattacaagagctttgtaaatatatatatatattacatatatatatgtaatatacatatatacacatatatataatatacatatataatacacatatatatgtaaatatatatataatatctaatatgagcatgccattattctctgtctatgaaacaaaaatggcatttttcaatggatttgttttggatatataattagttcatttgctgtttagaagccttgccaaaagtgtttagattttggtactgcaactgctttcctcttgcccagaaatgttttgcctcttcttttcctacaagttaaatgttctaaatataaaggggtatgtgtgtgtgtgtgtaattctaatgtgaaaggcactagctgtctaatagtttcatgtatcattactattactatatgtatcttaatgtagtctatgtaggtttttatcagaaagtgtacctttctatggtttattattttatattctggtgccttttatctcagatataaaccatgaacagtaatgatagtcactgacatataaatcttagtaaaaagtgattaaaaatctaaaactcagtatgaaaaacatatcttgttagaataaattaaaaccttttattgtttaaaaaattgttaaaaaaaaaaaaaaaaaaaaaaaaaaaaaaaaaaaaaaaaaaaaa

SEQ ID NO: 14446 - DNA, 2593 bp, Homo sapiens
ggccagcgcgtctgcttgttcgtgtgtgtgtcgttgcaggccttattcatgggctcaccgctgaggttcgacgggcgggtggtactggtcaccggcgcgggggcaggattgggccgagcctatgccctggcttttgcagaaagaggagcgttagttgttgtgaatgatttgggaggggacttcaaaggagttggtaaaggctccttagctgctgataaggttgttgaagaaataagaaggagaggtggaaaagcagtggccaactatgattcagtggaagaaggagagaaggttgtgaagacagccctggatgcttttggaagaatagatgttgtggtcaacaatgctggaattctgagggatcgttcctttgctaggataagtgatgaagactgggatataatccacagagttcatttgcggggttcattccaagtgacacgggcagcatgggaacacatgaagaaacagaagtatggaaggattattatgacttcatcagcttcaggaatatatggcaactttggccaggccaattatagtgctgcaaagttgggtcttctgggccttgcaaattctcttgcaattgaaggcaggaaaagcaacattcattgtaacaccattgctcctaatgcgggatcacggatgactcagacagttatgcctgaagatcttgtggaagccctgaagccagagtatgtggcacctcttgtcctttggctttgtcacgagagttgtgaggagaatggtggcttgtttgaggttggagcaggatggattggaaaattacgctgggagcggactcttggagctattgtaagacaaaagaatcacccaatgactcctgaggcagtcaaggctaactggaagaagatctgtgactttgagaatgccagcaagcctcagagtatccaagaatcaactggcagtataattgaagttctgagtaaaatagattcagaaggaggagtttcagcaaatcatactagtcgtgcaacgtctacagcaacatcaggatttgctggagctattggccagaaactccctccattttcttatgcttatacggaactggaagctattatgtatgcccttggagtgggagcgtcaatcaaggatccaaaagatttgaaatttatttatgaaggaagttctgatttctcctgtttgcccaccttcggagttatcataggtcagaaatctatgatgggtggaggattagcagaaattcctggactttcaatcaactttgcaaaggttcttcatggagagcagtacttagagttatataaaccacttcccagagcaggaaaattaaaatgtgaagcagttgttgctgatgtcctagataaaggatccggtgtagtgattattatggatgtctattcttattctgagaaggaacttatatgccacaatcagttctctctctttcttgttggctctggaggctttggtggaaaacggacatcagacaaagtcaaggtagctgtagccatacctaatagacctcctgatgctgtacttacagataccacctctcttaatcaggctgctttgtaccgcctcagtggagactggaatcccttacacattgatcctaactttgctagtctagcaggttttgacaagcccatattacatggattatgtacatttggattttctgccaggcgtgtgttacagcagtttgcagataatgatgtgtcaagattcaaggcaattaaggctcgttttgcaaaaccagtatatccaggacaaactctacaaactgagatgtggaaggaaggaaacagaattcattttcaaaccaaggtccaagaaactggagacattgtcatttcaaatgcatatgtggatcttgcaccaacatctggtacttcagctaagacaccctctgagggcgggaagcttcagagtacctttgtatttgaggaaataggacgccgcctaaaggatattgggcctgaggtggtgaagaaagtaaatgctgtatttgagtggcatataaccaaaggcggaaatattggggctaagtggactattgacctgaaaagtggttctggaaaagtgtaccaaggccctgcaaaaggtgctgctgatacaacaatcatactttcagatgaagatttcatggaggtggtcctgggcaagcttgaccctcagaaggcattctttagtggcaggctgaaggccagagggaacatcatgctgagccagaaacttcagatgattcttaaagactacgccaagctctgaagggcacactacactattaataaaaatggaatcattaaatactctcttcacccaaatatgcttgattattctgcaaaagtgattagaactaagatgcaggggaaattgcttaacattttcagatatcagataactgcagattttcattttctactaattttcatgtatcattatttttacaaggaactatatataagctagcacatgattatccttctgttcttagatctgtatcttcataataaaaaattttgcccaagtcctgtttccttagaatttgtgatagcattgataagttgaaaggaaaattaaatcaataaaggcctttgatacc

SEQ ID NO: 14447 - DNA, 2769 bp, Homo sapiens
gtcttggtcttctggcctggcggcgatcgtcggccagtttatccctcggagttgcactggcagacacgccgctactttgtagcgggtttcgggcgggccacgcgtgcggcgacaggaacccaaccccggccgaccttgggctccaggaattcgttgtctacgtctgcggaggtgcggcagcctcagttttaagcgcaggaaggcaatagaggctgtgctctgaacctttccctcacgatgatcttctgcctgttgaccatcctggtgtctttcccatgtggccctgtatggttggcatggttcctgtctttaggacttgtgatcaagtatatctgaaagtttttagaagaaaagatgtgttgtaacctccctggaaaaagaagagaccttatgaagtactgctaaccacctacatagtcatcaaaataaaattcctgaatttgtacaagccacaggaagctagattgagatcattatatgacaactggaaggccaaggctatgggttacctcaaattgaggaattttggcacctactcacaggctccatgagcagatgaagtagacagctttactcagtatctcagaccaagaacttcatctccatctccaactagctgaaacatcttccctcctcaacctggaaaattctctgacttagaaatttaaacaaaaccctcccctttcattgaatctccattgtctggagtttgcttgttttaatctagcctgttcctccactatgggctccctttcaaactatgccctgcttcaactaacccttactgcttttttgacaattctagtacaacctcagcacctgcttgctccagttttccggacactatctatcttgactaatcagtctaattgctggttatgtgaacatctagataatgcagaacaacccgaactagtttttgttcctgccagtgcaagcacctggtggacctattctggacaatggatgtatgaaagggtgtggtatccacaagcagaagtacagaatcactctacttcctcctatcgtaaagtgacttggcactgggaagcctccatggaagctcaaggtctatcctttgctcaagtaaggttattggagggaaatttttctctttgcgtagaaaataaaaatggcagtggacccttcctaggtaatatacctaaacaatactgtaatcaaatactatggtttgattctacagatggcaccttcatgccctctatagatgttacaaatgaatccaggaacgatgatgatgatacaagtgtttgcctaggcactagacaatgttcctggtttgcaggttgcacaaaccggacctggaacagctcagctgttcccttgattggtctgcccaatacccaagactacaaatgggtagatcgaaattctggattgacctggtcaggtaatgacacctgtctctatagctgccaaaaccaaaccaaaggccttctgtaccagctatttcgcaacctattttgctcttatggcctgacagaggcacatgggaaatggagatgtgcagatgccagcataactaatgacaaaggtcatgatggacaccggacccccacctggtggctcacaggttccaatctgaccttgtctgtgaacaactctggcctcttttttttgtgcggcaatggggtgtacaaagggtttccacctaaatggtctgggcgatgtggacttgggtatcttgtaccttccctcaccagatacctcaccttaaatgctagccaaattacaaacctgagatccttcattcataaagtaacaccgcatagatgcacccaaggagacacagacaatccacctctgtattgcaaccccaaggacaattcaacaataagggccctttttccaagtttgggaacttatgatttagaaaaggcaattctaaacatttccaaagcaatggaacaggaattcagtgccactaagcagaccttggaagcacaccaatcaaaagttagcagtttagcctctgcatcccgaaaggatcatgtcttggatataccgaccacccaacgacaaacggcttgtggaactgttggcaaacagtgttgcctctatataaattattcggaagaaataaagtctaatatacagcgtctccacgaagcatccgagaacctgaagaatgtaccgttacttgattggcaaggcatatttgcaaaagtgggagactggttcagatcatggggctatgtgcttttaattgttcttttctgcttattcatctttgttttaatctatgttcgtgtctttcgcaaatctcgcagatcccttaactcccaacctctgaacctagccttatctccacagcaatcagcacagctccttgtcagtgaaacttcatgtcaagtttcaaatagggcaatgaagggactaacaacccatcaatatgacacaagtctactttgagaatatttgaacaaacagcagctgcagacaaaaagccttagctaaactttgatgagtaaagcaggtcttaccgagaattcagctgccaaaaccctcctctgagtgttcctcttataagggcacttagcactaggacctcccaaggtattgtaaataagccttatcagaactttttgtagtttcattctgaagccttaagacacacaccataaagctgatctgtaaacccttaccccttgctgttcagagagctactctttgtagtgttcttgcatgcatatataataaatgttttttctattgatctgttaaaaaaaaaaaaaaaaaaaaaaaaaa

SEQ ID NO: 14448 - DNA, 2943 bp, Homo sapiens
ccgaaagagaaaacaggccgcgcgggcggcagaggagccgggcgccgcaatggacgtgcgggcgctgccgtggctgccgtggctgctgtggctgctgtgccggggcggcggcgatgcggactcccgcgcccccttcaccccgacctggccgcggagccgcgagcgtgaagccgccgccttccgggaaagtcttaatagacatcgatacttgaattctttatttcccagtgaaaactccaccgccttctatggaataaatcagttttcctatttgtttcctgaagagtttaaagccatttatttaagaagcaaaccttccaagtttcccagatactcagcagaagtacatatgtccatccccaatgtgtctttgccgttaagatttgactggagggacaagcaggttgtgacacaagtgagaaaccagcagatgtgtggaggatgctgggccttcagcgtggtgggggcagtggaatctgcttatgcaataaaggggaagcccctggaagacctaagtgtccagcaggtcattgactgttcgtataataattatggctgcaatggaggctctactctcaatgctttgaactggttaaacaagatgcaagtaaaactggtgaaagattcagaatatccttttaaagcacaaaatggtctgtgccattacttttctggttcacattctggattttcaatcaaaggttattctgcatatgacttcagtgaccaagaagatgaaatggcaaaagcacttcttacctttggccctttggtagtcatagtagatgcagtgagctggcaagattatctgggaggcattatacagcatcactgctctagtggagaagcaaatcatgcagttctcataactgggtttgataaaacaggaagcactccatattggattgtgcggaattcctggggaagttcttggggagtagatggttatgcccatgtcaaaatgggaagtaatgtttgtggtattgcagattccgtttcttctatatttgtgtgacatgttgggcagatcaagagacagctacaaaaatgaaggttttcataatgcaatgtaacatagtacttcaaagtattattcaacttcaagtttcagcaactacctacaaaagattctaaggcctagtagtatttaaactaagtttcagaatgttcccttcttgtagagagatggacaaccaaagtcagtgggacaaactccagcacagaagcctgcgaggaagcctatggaatagtttcctgtcctgagacgaaattcagattaggagatattttaggcccctgcaactggggaaggctactgtttgtttttgtttgcttattatttatttgtttgtttattgtgagatatttcaggtgggatcaaagaggtcataagaatttattttcttttgtggggtgtaactactagctttagattacccctatacacaagaatggccaacctaaaattatgtgtgtcttgtacagttagttatattagcagccctctgagatggcgtatctatcggaaggatttcaaacaccaattgctttacctgaacaaatggtgcttaccctttgaacagcagagtgaccacgtagaaggaaggaaaagggcaaaatcgcttcagttaaactgaaattaaatgaacaataaggcaactatataagtaacttctagtagcattgcctgagagacaaattattgtttgataattttcattgtgaataggaatccaatagatcatattgcttactttgttctttttatactatagaataatattttgttctctagtatatcaaaataccaaaatattatctcatattttctccctctttctcttactctttaccaagttttcctggtggcttggcttccctgactaaagaattaagtctcatttttactttccatttctattttcttaccacttggttggctccctttgtctctgtacctttaccaacattaggatctcacctctttcttcctcccttaattcataagcaccactcctatcaaagtcccatctcttaaccctgggtatcaaacaaactgtgagttttccagaatctgtttcccagttttcccctcagctttcctggtctcccatccgaactgcttctttgtgcacctcttgttctttctcttggctcccagtcttgattcctgtgatcactcttgcatcactaattgcacaagtgatttcaggtgcaattctgattagcctgcgtccacacagtgatcgatgatcctatgtgcctagaaaggacactgtgtgctgctcatgacctgcaacaggaaaaaagccatttcttgttagcagtgtaagaaccttagagcaaaggagttgaccttctgattgaatataagcacaaccatattaaatgaatcaatacaagaaaattatttctgatactatgtatgtacatatttcttctctaaaatgtatcattcttttctaatgtatatgatctaacaaaaatgaaacatgaaatgcagtagcaaccactaaaaaaaaaaattcaaggacatctaactttttctctcacttttgccctttgtttatccttccctgtgattagataaacaaaataaaaaacaaaatgctgtatttctcttcttacgccagtcagaaccaatccgaaaagaatgtgtgttgactcaggtttggagttatttcaggaagacagatattgaccttttaattgataaatattcttattatcctggaatgccagaaaagaactatgtcctgcttgtctagtttgtattcgctgactttctatgtgatatagatgcatttgtaatactctttttcaagtgctaaaggatttctaaaatttcaaactgattaatatgtttctgctgttctggattttgatgacatttacaataaaacaacctacatttgactttggtttaaaaagaaaaaaaaaaaa

SEQ ID NO: 14449 - DNA, 2447 bp, Homo sapiens
ggggcggggctggcggcgccggcgcagcccgggggcggcgggaggaggaggtggcggcggtggcgctgggagctcctgtcaccgctggggccgggccgggcgggagtgcaggggacgtgagggcgcaagggccgggacatggggcccgccagccccgctgctcgcggtctaagtcgccgcccgggccagccgccgctgccgctgctgctgccactattgctgctgcttctgcgcgcgcagcccgccatcgggagcctggccggtgggagccccggcgcggccgaggccccggggtcggcccaggtggctggactatgcgggcgcctaacccttcaccgggacctgcgcaccggccgctgggaaccagacccacagcgctctcgacgctgtctccgggacccgcagcgcgtgctggagtactgcagacagatgtacccggagctgcagattgcacgtgtggagcaggctacgcaggccatccccatggagcgctggtgcgggggttcccggagcggcagctgcgcccacccccaccaccaggttgtgcccttccgctgcctgcctggtgaatttgtgagtgaggccctgctggtgcctgaaggctgccggttcttgcaccaggagcgcatggaccaatgtgagagttcaacccggaggcatcaggaggcacaggaggcctgcagctcccagggcctcatcctgcacggctcgggcatgctcttaccctgtggctcggatcggttccgtggtgtggagtatgtgtgctgtccccctccagggacccccgacccatctgggacagcagttggtgacccctccacccggtcctggcccccggggagcagagtagagggggctgaggacgaggaagaggaggaatccttcccacagccagtagatgattacttcgtggagcctccgcaggctgaagaggaagaggaaacggtcccacccccaagctcccatacacttgcagtggtcggcaaagtcactcccaccccgaggcccacagacggtgtggatatttactttggcatgcctggggaaatcagtgagcacgaggggttcctgagggccaagatggacctggaggagcgtaggatgcgccagattaatgaggtgatgcgtgaatgggccatggcagacaaccagtccaagaacctgcctaaagccgacagacaggccctgaatgagcacttccagtccattctgcagactctggaggagcaggtgtctggtgagcgacagcgcctggtggaaacccacgccacccgcgtcatcgcccttatcaacgaccagcgccgggctgccttggagggcttcctggcagccctgcaggcagatccgcctcaggcggagcgtgtcctgttggccctgcggcgctacctgcgtgcggagcagaaggaacagaggcacacgctgcgccactaccagcatgtggccgccgtggatcccgagaaggcacagcagatgcgcttccaggtgcatacccaccttcaagtgattgaggagagggtgaatcagagcctgggcctgcttgaccagaacccccacctggctcaggagctgcggccccaaatccaggaactcctccactctgaacacctgggtcccagtgaattggaagcccctgcccctgggggcagcagcgaggacaagggtgggctgcagcctccagattccaaggatgacacccccatgacccttccaaaagggtccacagaacaagatgctgcatcccctgagaaagagaagatgaacccgctggaacagtatgagcgaaaggtgaatgcgtctgttccaaggggtttccctttccactcatcggagattcagagggatgagctggcaccagctgggacaggggtgtcccgtgaggctgtgtcgggtctgctgatcatgggagcgggcggaggctccctcatcgtcctctccatgctgctcctgcgcaggaagaagccctacggggctatcagccatggcgtggtggaggtggaccccatgctgaccctggaggagcagcagctccgcgaactgcagcggcacggctatgagaaccccacttaccgcttcctggaggaacgaccctgacccggcccccttcaccccttcagccgagcccagacctcccctcttcctggagccccagaaccccaactcccagcctagggcagcagggagtcttgaagtgatcatttcacacccttttgtgagacggctggaaattcttatttcccctttccaattccaaaattccatccctaagaattcccagatagtcccagcagcctccccacgtggcacctcctcaccttaatttattttttaagtttatttatggctctttaaggtgaccgccaccttggtcctagtgtctattccctggaattcaccctctcatgtttccctactaacatcccaataaagtcctcttccctaccaggcca

SEQ ID NO: 14450 - DNA, 4421 bp, Homo sapiens
tgctgcgaggatgctgcctgggcggctgtgctgggtgccgctcctgctggcgctgggcgtggggagcggcagcggcggtggcggggacagccggcagcgccgcctcctcgcggctaaagtcaataagcacaagccatggatcgagacttcatatcatggagtcataactgagaacaatgacacagtcattttggacccaccactggtagccctggataaagatgcaccggttccttttgcaggggaaatctgtgcgttcaagatccatggccaggagctgccctttgaggctgtggtgctcaacaagacatcaggagagggccggctccgtgccaagagccccattgactgtgagttgcagaaggagtacacattcatcatccaggcctatgactgtggtgctgggccccacgagacagcctggaaaaagtcacacaaggccgtggtccatatacaggtgaaggatgtcaacgagtttgctcccaccttcaaagagccagcctacaaggctgttgtgacggagggcaagatctatgacagcattctgcaggtggaggccattgacgaggactgctccccacagtacagccagatctgcaactatgaaatcgtcaccacagatgtgccttttgccatcgacagaaatggcaacatcaggaacactgagaagctgagctatgacaaacaacaccagtatgagatcctggtgaccgcctacgactgtggacagaagcccgctgctcaggacaccctggtgcaggtggatgtgaagccagtttgcaagcctggctggcaagactggaccaagaggattgagtaccagcctggctccgggagcatgcccctgttccccagcatccacctggagacgtgcgatggagccgtgtcttccctccagatcgtcacagagctgcagactaattacattgggaagggttgtgaccgggagacctactctgagaaatcccttcagaagttatgtggagcctcctctggcatcattgacctcttgccatcccctagcgctgccaccaactggactgcaggactgctggtggacagcagtgagatgatcttcaagtttgacggcaggcagggtgccaaaatccccgatgggattgtgcccaagaacctgaccgatcagttcaccatcaccatgtggatgaaacacggccccagccctggtgtgagagccgagaaggaaaccatcctctgcaactcagacaaaaccgaaatgaaccggcatcactatgccctgtatgtgcacaactgccgcctcgtctttctcttgcggaaggacttcgaccaggctgacacctttcgccccgcggagttccactggaagctggatcagatttgtgacaaagagtggcactactatgtcatcaatgtggagtttcctgtggtaaccttatacatggatggagcaacatatgaaccatacctggtgaccaacgactggcccattcatccatctcacatagccatgcaactcacagtcggcgcttgttggcaaggaggagaagtcaccaaaccacagtttgctcagttctttcatggaagcctggccagtctcaccatccgccctggcaaaatggaaagccagaaggtgatctcctgcctgcaggcctgcaaggaagggctggacattaattccttggaaagccttggccaaggaataaagtatcacttcaacccctcgcagtccatcctggtgatggaaggtgacgacattgggaacattaaccgtgctctccagaaagtctcctacatcaactccaggcagttcccaacggcgggtgtgcggcgcctcaaagtatcctccaaagtccagtgctttggggaagacgtatgcatcagtatccctgaggtagatgcctatgtgatggtcctccaggccatcgagccccggatcaccctccggggcacagaccacttctggagacctgctgcccagtttgaaagtgccaggggagtgaccctcttccctgatatcaagattgtgagcaccttcgccaaaaccgaagcccccggggacgtgaaaaccacagaccccaaatcagaagtcttagaggaaatgcttcataacttagatttctgtgacattttggtgatcggaggggacttggacccaaggcaggagtgcttggagctcaaccacagtgagctccaccaacgacacctggatgccactaattctactgcaggctactccatctacggtgtgggctccatgagccgctatgagcaggtgctacatcacatccgctaccgcaactggcgtccggcttcccttgaggcccggcgtttccggattaagtgctcagaactcaatgggcgctacactagcaatgagttcaacttggaggtcagcatccttcatgaagaccaagtctcagataaggagcatgtcaatcatctgattgtgcagcctcccttcctccagtctgtccatcatcctgagtcccggagtagcatccagcacagttcagtggtcccaagcattgccacagtggtcatcatcatctccgtgtgcatgcttgtgtttgtcgtggccatgggtgtgtaccgggtccggatcgcccaccagcacttcatccaggagactgaggctgccaaggaatctgagatggactgggacgattctgcgctgactatcacagtcaaccccatggagaaacatgaaggaccagggcatggggaagatgagactgagggagaagaggaggaagaagccgaggaagaaatgagctccagcagtggctctgacgacagcgaagaggaggaggaggaggaagggatgggcagaggcagacatgggcagaatggagccaggcaagcccagctggagtgggatgactccaccctcccctactagtgcccaggggtctgctgcctggcccacatgtcccttttgtaaaccctgacccagtgtatgcccatgtctatcatacctcacctctgatgtctgtgacatgtctgggaaggccttctccagcttcctggagcccaccctttaagccttgggcactccctgtgtttcatccatggggaagttccaagaagcccagcatggccatcagtgaggacttcagggtagactttgtcctgtagcctccacttctgccctaagttccccagcatcctgactacctgtctgcagagtttgcctttgttttttcctgcagggaagaaggcccacctttgtgtcactcacctccccaggctcagagtccccaaggccctggggttccaactcactgtgcgtctcctccacacagaccagtaggttctcctatgctgactccaggttgcttcatacaaggagggtggttgaacttcacacacgtaaggtcttagtgcttaacagtttaaaggaaagtccttgttgaggcagaactaagtttacagggaaaggtacacacattctctctctctctctctctctgtctatctagttccccagcttggagagcctttccccttgcttctttctgaggccatataagcttataagaaaagtcccaaaccaagaataggtccttggccacaagcagggtctgatcccccatcagagctatctgagcctgcctgtctgggcacctgctgcaaccatgcagctaccctgccaggggcactcagcaaacagaaccacagggcccaggaggcattccacacaggcactgccccaggacaacacaacaaggacagtcacaacaaggacaacaaggacacaacacaacacacaacaaggacagtcacaacaagcctagagccagaaagcagatggaaatgctaatgaggtcaaacgtaggcttcatggtgggtggagtgggggtggctgggctcccccaggacagaggggaccctgaggttggcaaggctctcaccactcagccttatggtcccttatctcctatcttccctcttgagaaaatacacgctttctgcatgtattagaaacgcacgagctccaccaagtctacaatgaaagtttgaaatttaactgcaaggaattagaagcatatttgcaatcattgcagcttcttctttcttctgctcataaaaggaggaacactttagatagagggcaaatatatctgaaaacctaatttctttctttttttgataaggaaatcttttccatctccatcctaacatgcacaacctgtgaagagaattgtttctatagtaactggtctgtgatcttttgtggccaagagaatagcaggcaagaattagggccttgacagaatttccacgaagctctgagaacatgtttgtttcgaatgtctgattcctctttgtcatcaatgtgtatgctctgtccccatccttcactcctcctcaagctcacaccaattggtttggcacaggcacagagctggtccctagttaagtggcatttatgttaaaaaaaa

SEQ ID NO: 14451 - DNA, 2661 bp, Homo sapiens
gctcccggggccacgggatgacgcctcctccgcccggacgtgccgcccccagcgcaccgcgcgcccgcgtccctggcccgccggctcggttggggcttccgctgcggctgcggctgctgctgctgctctgggcggccgccgcctccgcccagggccacctaaggagcggaccccgcatcttcgccgtctggaaaggccatgtagggcaggaccgggtggactttggccagactgagccgcacacggtgcttttccacgagccaggcagctcctctgtgtgggtgggaggacgtggcaaggtctacctctttgacttccccgagggcaagaacgcatctgtgcgcacggtgaatatcggctccacaaaggggtcctgtctggataagcgggactgcgagaactacatcactctcctggagaggcggagtgaggggctgctggcctgtggcaccaacgcccggcaccccagctgctggaacctggtgaatggcactgtggtgccacttggcgagatgagaggctacgcccccttcagcccggacgagaactccctggttctgtttgaaggggacgaggtgtattccaccatccggaagcaggaatacaatgggaagatccctcggttccgccgcatccggggcgagagtgagctgtacaccagtgatactgtcatgcagaacccacagttcatcaaagccaccatcgtgcaccaagaccaggcttacgatgacaagatctactacttcttccgagaggacaatcctgacaagaatcctgaggctcctctcaatgtgtcccgtgtggcccagttgtgcaggggggaccagggtggggaaagttcactgtcagtctccaagtggaacacttttctgaaagccatgctggtatgcagtgatgctgccaccaacaagaacttcaacaggctgcaagacgtcttcctgctccctgaccccagcggccagtggagggacaccagggtctatggtgttttctccaacccctggaactactcagccgtctgtgtgtattccctcggtgacattgacaaggtcttccgtacctcctcactcaagggctaccactcaagccttcccaacccgcggcctggcaagtgcctcccagaccagcagccgatacccacagagaccttccaggtggctgaccgtcacccagaggtggcgcagagggtggagcccatggggcctctgaagacgccattgttccactctaaataccactaccagaaagtggccgtccaccgcatgcaagccagccacggggagacctttcatgtgctttacctaactacagacaggggcactatccacaaggtggtggaaccgggggagcaggagcacagcttcgccttcaacatcatggagatccagcccttccgccgcgcggctgccatccagaccatgtcgctggatgctgagcggaggaagctgtatgtgagctcccagtgggaggtgagccaggtgcccctggacctgtgtgaggtctatggcgggggctgccacggttgcctcatgtcccgagacccctactgcggctgggaccaaggccgctgcatctccatctacagctccgaacggtcagtgctgcaatccattaatccagccgagccacacaaggagtgtcccaaccccaaaccagacaaggccccactgcagaaggtttccctggccccaaactctcgctactacctgagctgccccatggaatcccgccacgccacctactcatggcgccacaaggagaacgtggagcagagctgcgaacctggtcaccagagccccaactgcatcctgttcatcgagaacctcacggcgcagcagtacggccactacttctgcgaggcccaggagggctcctacttccgcgaggctcagcactggcagctgctgcccgaggacggcatcatggccgagcacctgctgggtcatgcctgtgccctggccgcctccctctggctgggggtgctgcccacactcactcttggcttgctggtccactagggcctcccgaggctgggcatgcctcaggcttctgcagcccagggcactagaacgtctcacactcagagccggctggcccgggagctccttgcctgccacttcttccaggggacagaataacccagtggaggatgccaggcctggagacgtccagccgcaggcggctgctgggccccaggtgcgcacggatggtgaggggctgagaatgagggcaccgactgtgaagctggggcatcgatgacccaagactttatcttctggaaaatatttttcagactccctcaaacttgactaaatgcagcgatgctcccagcccaagagcccatgggtcggggagtgggtttggataggagagctgggactccatctcgaccctggggctgaggcctgagtccttctggactcttggtacccacattgcctccttcccctccctctctcatggctgggtggctggtgttcctgaagacccagggctaccctctgtccagccctgtcctctgcagctccctctctggtcctgggtcccacaggacagccgccttgcatgtttattgaaggatgtttgctttccggacggaaggacggaaaaagctctatttttatgttaggcttatttcatgtatagctacttccgactgcc

SEQ ID NO: 14452 - DNA, 1246 bp, Homo sapiens
aagactgggagcagtctcttaaacaaaagcaaaagaataagcttcgggcgctgtagtacctgccagctttcgccacaggaggctgccacctgtaggtcacttgggctccagctatgtggctgcctcttctgctgggtgccttactctgggcagtgctgtggttgctcagggaccggcagagcctgcccgccagcaatgcctttgtcttcatcaccggctgtgactcaggctttgggcgccttctggcactgcagctggaccagagaggcttccgagtcctggccagctgcctgaccccctccggggccgaggacctgcagcgggtggcctcctcccgcctccacaccaccctgttggatatcactgatccccagagcgtccagcaggcagccaagtgggtggagatgcacgttaaggaagcagggctttttggtctggtgaataatgctggtgtggctggtatcatcggacccacaccatggctgacccgggacgatttccagcgggtgctgaatgtgaacacaatgggtcccatcggggtcacccttgccctgctgcctctgctgcagcaagcccggggccgggtgatcaacatcaccagcgtcctgggtcgcctggcagccaatggtgggggctactgtgtctccaaatttggcctggaggccttctctgacagcctgaggcgggatgtagctcattttgggatacgagtctccatcgtggagcctggcttcttccgaacccctgtgaccaacctggagagtctggagaaaaccctgcaggcctgctgggcacggctgcctcctgccacacaggcccactatgggggggccttcctcaccaagtacctgaaaatgcaacagcgcatcatgaacctgatctgtgacccggacctaaccaaggtgagccgatgcctggagcatgccctgactgctcgacacccccgaacccgctacagcccaggttgggatgccaagctgctctggctgcctgcctcctacctgccagccagcctggtggatgctgtgctcacctgggtccttcccaagcctgcccaagcagtctactgaatccagccttccagcaagagattgtttttcaaggacaaggactttgatttatttctgcccccaccctggtactgcctggtgcctgccacaaaataagcactaacaaaagtgtattgtttaaaaaataaaaagaaggtgggcagaaatgtgcccagtggaaaaaaaaaaaaaaaaaa

SEQ ID NO: 14453 - DNA, 1241 bp, Homo sapiens
agcgcgcaggcgcagccggccggcagtcccgtcagctgtcccagagcctgtgtcgcgcccgtgccggtagcgcccgtgccggtagcgccgctgccaccgctcaccatgggcccgggtcctcggctgctgctacctctcgtgctttgcgtggggctcggcgcacttgtgttttcttcgggggccgagggcttccgcaagcgaggcccctcggtgacggccaaggtcttctttgatgtgaggattggagacaaagatgttggcagaattgtgattggcctctttggaaaagttgtgcccaagacagtggaaaattttgttgctctagcaacaggagagaaaggatatggatataaaggaagcaagtttcatcgtgtcatcaaggatttcatgattcaaggaggtgacatcaccactggagatggcactgggggtgtgagcatctatggtgagacatttccagatgagaacttcaagctgaagcactatggcattgggtgggtcagcatggccaacgctgggcctgacaccaatggctctcagttctttatcaccttgaccaagcccacctggttggacggcaaacatgtggtgtttggaaaagtcattgatgggatgacagtggtgcactccatagagctccaagcaactgatgggcatgaccgtccactcaccaactgctcgatcatcaacagtggcaagatagacgtgaaaacgccttttgtggttgagatcgctgattggtgacacaactggcagaaaacaaggatatgctttggcaggggtgtgtgtgtgtgtgtgtgtgtgtgtgtgttgtgttgtctttcaattatttgcttttttttttttactttctttttgtattctatcccagatcacaggaaagttataaaaatcaaaccgtcaccctttagtttgcttgaactttagtaaaccacctgcttagggactttgaacttaaatatatccccttcctcaagtggtgctattttaaaactaaaaaaaactttgaattggctatttttttaatgcaatattttttttctgaattcattatgatccccatattgggtaatgctgaacatttatctgaaacagatgaggatattattattttgtatccaaacagaaattcagataaagggaaatttgactagtgtaatctgagatatgtcatagggatttctttctgacaaaagggtgctttgctgttctttatattaaatacttttagatcaaaaaaa

SEQ ID NO: 14454 - DNA, 5189 bp, Homo sapiens
ggactgcgaaaggagcagggttgcggagctagggctccagcctgcggccgcgcattcttgcgtctggccagccgcgagctctaagggtcggccccgcccggtccgcccccgcggctccctgccaggctctcgcgggcgcgctcggggtggggcctcgcggctggcggagatgcggccggggctgcgcggtggtgatgcgagcctgctgggcggcgcgccggggcagccggagccgcgcgccgcggcgctgtaatcggacaccaagagcgctcgcccccggcctccggccactttccattcactccgaggtgcttgattgagcgacgcggagaagagctccgggtgccgcggcactgcagcgctgagattcctttacaaagaaactcagaggaccgggaagaaagaatttcacctttgcgacgtgctagaaaataaggtcgtctgggaaaaggactggagacacaagcgcatccaaccccggtagcaaactgatgacttttccgtgctgatttctttcaacctcggtattttcccttggatattaacttgcatatctgaagaaatggcattccggacaatttgcgtgttggttggagtatttatttgttctatctgtgtgaaaggatcttcccagccccaagcaagagtttatttaacatttgatgaacttcgagaaaccaagacctctgaatacttcagcctttcccaccatcctttagactacaggattttattaatggatgaagatcaggaccggatatatgtgggaagcaaagatcacattctttccctgaatattaacaatataagtcaagaagctttgagtgttttctggccagcatctacaatcaaagttgaagaatgcaaaatggctggcaaagatcccacacacggctgtgggaactttgtccgtgtaattcagactttcaatcgcacacatttgtatgtctgtgggagtggcgctttcagtcctgtctgtacttacttgaacagagggaggagatcagaggaccaagttttcatgattgactccaagtgtgaatctggaaaaggacgctgctctttcaaccccaacgtgaacacggtgtctgttatgatcaatgaggagcttttctctggaatgtatatagatttcatggggacagatgctgctatttttcgaagtttaaccaagaggaatgcggtcagaactgatcaacataattccaaatggctaagtgaacctatgtttgtagatgcacatgtcatcccagatggtactgatccaaatgatgctaaggtgtacttcttcttcaaagaaaaactgactgacaataacaggagcacgaaacagattcattccatgattgctcgaatatgtcctaatgacactggtggactgcgtagccttgtcaacaagtggaccactttcttaaaggcgaggctggtgtgctcggtaacagatgaagacggcccagaaacacactttgatgaattagaggatgtgtttctgctggaaactgataacccgaggacaacactagtgtatggcatttttacaacatcaagctcagttttcaaaggatcagccgtgtgtgtgtatcatttatctgatatacagactgtgtttaatgggccttttgcccacaaagaagggcccaatcatcagctgatttcctatcagggcagaattccatatcctcgccctggaacttgtccaggaggagcatttacacccaatatgcgaaccaccaaggagttcccagatgatgttgtcacttttattcggaaccatcctctcatgtacaattccatctacccaatccacaaaaggcctttgattgttcgtattggcactgactacaagtatacaaagatagctgtggatcgagtgaacgctgctgatgggagataccatgtcctgtttctcggaacagatcggggtactgtgcaaaaagtggttgttcttcctactaacaactctgtcagtggcgagctcattctggaggagctggaagtctttaagaatcatgctcctataacaacaatgaaaatttcatctaaaaagcaacagttgtatgtgagttccaatgaaggggtttcccaggtatctctgcaccgctgccacatctatggtacagcctgtgctgactgctgcctggcgcgggacccttattgcgcctgggatggccattcctgttccagattctacccaactgggaaacggaggagccgaagacaagatgtgagacatggaaacccactgactcaatgcagaggatttaatctaaaagcatacagaaatgcagctgaaattgtgcagtatggagtaaaaaataacaccacttttctggagtgtgcccccaagtctccgcaggcatctatcaagtggctgttacagaaagacaaagacaggaggaaagaggttaagctgaatgaacgaataatagccacttcacagggactcctgatccgctctgttcagggttctgaccaaggactttatcactgcattgctacagaaaatagtttcaagcagaccatagccaagatcaacttcaaagttttagattcagaaatggtggctgttgtgacggacaaatggtccccatggacctgggccagctctgtgagggctttacccttccacccgaaggacatcatgggggcattcagccactcagaaatgcagatgattaaccaatattgcaaagacactcggcagcaacatcagcagggagatgaatcacagaaaatgagaggggactatggcaagttaaaggccctcatcaatagtcggaaaagtagaaacaggaggaatcagttgccagagtcataatattttcttatgtgggtcttatgcttccattaacaaatgctctgtcttcaatgatcaaattttgagcaaagaaacttgtgctttaccaaggggaattactgaaaaaggtgattactcctgaagtgagttttacacgaactgaaatgagcatgcattttcttgtatgatagtgactagcactagacatgtcatggtcctcatggtgcatataaatatatttaacttaacccagattttatttatatctttattcaccttttcttcaaaatcgatatggtggctgcaaaactagaattgttgcatccctcaattgaatgagggccatatccctgtggtattcctttcctgctttggggctttagaattctaattgtcagtgattttgtatatgaaaacaagttccaaatccacagcttttacgtagtaaaagtcataaatgcatatgacagaatggctatcaaaagaaatagaaaaggaagacggcatttaaagttgtataaaaacacgagttattcataaagagaaaatgatgagtttttatggttccaatgaaatatgttggggtttttttaagattgtaaaaataatcagttactggtatctgtcactgacctttgtttccttattcaggaagataaaaatcagtaacctaccccatgaagatatttggtgggagttatatcagtgaagcagtttggtttatattcttatgttatcaccttccaaacaaaagcacttactttttttggaagttatttattttagactcaaagaatataatcttgcactactcagttattactgtttgttctcttattccctagtctgtgtggcaaattaaacaatataagaaggaaaaatttgaagtattagacttctaaataaggggtgaaatcatcagaaagaaaaatcaaagtagaaactactaattttttaagaggaatttataacaaatatggctagttttcaacttcagtactcaaattcaatgattcttccttttattaaaaccagtctcagatatcatactgatttttaagtcaacactatatattttatgatcttttcagtgtgatggcaaggtgcttgttatgtctagaaagtaagaaaacaatatgaggagacattctgtctttcaaaaggtaatggtacatacgttcactggtctctaagtgtaaaagtagtaaattttgtgatgaataaaataattatctcctaattgtatgttagaataattttattagaataatttcatactgaaattattttctccaaataaaaattagatggaaaaatgtgaaaaaaattattcatgctctcatatatattttaaaaacactacttttgcttttttatttaccttttaagacattttcatgcttccaggtaaaaacagatattgtaccatgtacctaatccaaatatcatataaacattttatttatagttaataatctatgatgaaggtaattaaagtagattatggcctttttaagtattgcagtctaaaacttcaaaaactaaaatcattgtcaaaattaatatgattattaatcagaatatcagaatatgattcactatttaaactatgataaattatgataatatatgaggaggcctcgctatagcaaaaatagttaaaatgctgacataacaccaaacttcattttttaaaaaatctgttgttccaaatgtgtataattttaaagtaatttctaaagcagtttattataatggtttgcctgcttaaaaggtataattaaacttcttttctcttctacattgacacacagaaatgtgtcaatgtaaagccaaaaccatcttctgtgtttatggccaatctattctcaaagttaaaagtaaaattgtttcagagtcacagttccctttatttcacataagcccaaactgatagacagtaacggtgtttagttttatactatatttgtgctatttaattctttctattttcacaattattaaattgtgtacactttcattacttttaaaaatgtagaaattcttcatgaacataactctgctgaatgtaaaagaaaattttttttcaaaaatgctgttaatgtatactactggtggttgattggttttattttatgtagcttgacaattcagtgacttaatatctattccatttgtattgtacataaaattttctagaaatacacttttttccaaagtgtaagtttgtgaatagattttagcatgatgaaactgtcataatggtgaatgttcaatctgtgtaagaaaacaaactaaatgtagttgtcacactaaaatttaattggatattgatgaaatcattggcctggcaaaataaaacatgttgaattccccaaaaaaaaaaaaaaaa

SEQ ID NO: 14455 - DNA, 3015 bp, Homo sapiens
tgcagccggagcagcaccagcaacagcaacagcgagcgggacggagttaggaccgctcggagcgcacaggtctcgagggtgttggtgccagaagaaaagaatgattgatgggaaacagacaccgggctatagacactcatccttttgcttcagatactgatatctcagcctgcttgagcatcccttgtgagctgtgaacattgaggatcactcagggttatcggatgtacaacgggagagccatcgctttgctaaattattatctgcaattggacatcttttacaaaaaccaaactagacctgagtctaatagatatgttctaagacaaagaaaaagctgcaagttgttaacgcctaacacacaagtatgttaggcttccaccaaagtcctcaatatacctgaatacgcacaatatcttaactcttcatatttggttttgggatctgctttgaggtcccatcttcatttaaaaaaaaatacagagacctacctacccgtacgcatacatacatatgtgtatatatatgtaaactagacaaagatcgcagatcataaagcaagctctgctttagtttccaagaagattacaaagaatttagagatgtatttgtcaagattcctgtcgattcatgccctttgggttacggtgtcctcagtgatgcagccctaccctttggtttggggacattatgatttgtgtaagactcagatttacacggaagaagggaaagtttgggattacatggcctgccagccggaatccacggacatgacaaaatatctgaaagtgaaactcgatcctccggatattacctgtggagaccctcctgagacgttctgtgcaatgggcaatccctacatgtgcaataatgagtgtgatgcgagtacccctgagctggcacacccccctgagctgatgtttgattttgaaggaagacatccctccacattttggcagtctgccacttggaaggagtatcccaagcctctccaggttaacatcactctgtcttggagcaaaaccattgagctaacagacaacatagttattacctttgaatctgggcgtccagaccaaatgatcctggagaagtctctcgattatggacgaacatggcagccctatcagtattatgccacagactgcttagatgcttttcacatggatcctaaatccgtgaaggatttatcacagcatacggtcttagaaatcatttgcacagaagagtactcaacagggtatacaacaaatagcaaaataatccactttgaaatcaaagacaggttcgcgttttttgctggacctcgcctacgcaatatggcttccctctacggacagctggatacaaccaagaaactcagagatttctttacagtcacagacctgaggataaggctgttaagaccagccgttggggaaatatttgtagatgagctacacttggcacgctacttttacgcgatctcagacataaaggtgcgaggaaggtgcaagtgtaatctccatgccactgtatgtgtgtatgacaacagcaaattgacatgcgaatgtgagcacaacactacaggtccagactgtgggaaatgcaagaagaattatcagggccgaccttggagtccaggctcctatctccccatccccaaaggcactgcaaatacctgtatccccagtatttccagtattggtacgaatgtctgcgacaacgagctcctgcactgccagaacggagggacgtgccacaacaacgtgcgctgcctgtgcccggccgcatacacgggcatcctctgcgagaagctgcggtgcgaggaggctggcagctgcggctccgactctggccagggcgcgcccccgcacggctccccagcgctgctgctgctgaccacgctgctgggaaccgccagccccctggtgttctaggtgtcacctccagccacaccggacgggcctgtgccgtggggaagcagacacaacccaaacatttgctactaacataggaaacacacacatacagacacccccactcagacagtgtacaaactaagaaggcctaactgaactaagccatatttatcacccgtggacagcacatccgagtcaagactgttaatttctgactccagaggagttggcagctgttgatattatcactgcaaatcacattgccagctgcagagcatattgtggattggaaaggctgcgacagccccccaaacaggaaagacaaaaaacaaacaaatcaaccgacctaaaaacattggctactctagcgtggtgcgccctagtacgactccgcccagtgtgtggaccaaccaaatagcattctttgctgtcaggtgcattgtgggcataaggaaatctgttacaagctgccatattggcctgcttccgtccctgaatcccttccaacctgtgctttagtgaacgttgctctgtaacccttgttggttgaaagatttctttgtctgatgttagtgatgcacatgtgtaacagccccctctaaaagcgcaagccagtcatacccctgtatatcttagcagcactgagtccagtgcgagcacacacccactatacaagagtggctataggaaaaaagaaagtgtatctatccttttgtattcaaatgaagttatttttcttgaactactgtaatatgtagattttttgtattattgccaatttgtgttaccagacaatctgttaatgtatctaattcgaatcagcaaagactgacattttattttgtcctctttcgttctgttttgtttcactgtgcagagatttctctgtaagggcaacgaacgtgctggcatcaaagaatatcagtttacatatataacaagtgtaataagattccaccaaaggacattctaaatgttttcttgttgctttaacactggaagatttaaagaataaaaactcctgcataaacaaaaaaaaaaaaaaaaaaaaaaaaaaaaaaaaaaaaaaaaaaaaaaaaaaaaaaaaaaaaaaaaaaaaaaaaaaaaaaaaaaa

SEQ ID NO: 14456 - DNA, 3502 bp, Homo sapiens
gcgcgcagctggttcccgctctgcagcgcaacgcctgaggcagtgggcgcgctcagtcccgggaccaggcgttctctcctctcgcctctgggcctgggacccgcaaagcggcgatggagcggaggtcgcggaggaagtcgcggcgcaacgggcgctcgaccgcgggcaaggccgccgcgacccagcccgcgaagtctccgggcgcacagctctggctctttcccagcgccgcgggcctccaccgcgcgctgctccggagggtggaggtgacgcgccaactctgctgctcgccggggcgcctcgcggtcttggaacgcggcggggcgggcgtccaggttcaccagctgctcgccgggagcggcggcgcccggacgccgaaatgcattaaattaggaaaaaacatgaagatacattccgtggaccaaggagcagagcacatgctgattctctcatcagatggaaaaccatttgagtatgacaactatagcatgaaacatctaaggtttgaaagcattttacaagaaaaaaaaataattcagatcacatgtggagattaccattctcttgcactctcaaaaggcggtgagctttttgcctggggacagaacctgcatgggcagcttggagttggaaggaaatttccctcaaccaccacaccacagattgtggagcacctcgcaggagtacccttggctcagatttctgccggagaagcccacagcatggccttatccatgtctggcaacatttattcatggggaaaaaatgaatgtggacaactaggcctgggccacactgagagtaaagatgatccatcccttattgaaggactagacaatcagaaagttgaatttgtcgcttgtggtggctctcacagtgccctactcacacaggatgggctgctgtttactttcggtgctggaaaacatgggcaacttggtcataattcaacacagaatgagctaagaccctgtttggtggctgagcttgttgggtatagagtgactcagatagcatgtggaaggtggcacacacttgcctatgtttctgatttgggaaaggtcttttcctttggttctggaaaagatggacaactgggaaatggtggaacacgtgaccagctgatgccgcttccagtgaaagtatcatcaagtgaagaactcaaacttgaaagccatacctcagaaaaggagttaataatgattgctggagggaatcaaagcattttgctctggataaagaaagagaattcatatgttaatctgaagaggacaattcctactctgaatgaagggactgtaaagagatggattgctgatgtggagactaaacggtggcagagcacaaaaagggaaatccaagagatattttcatctcctgcttgtctaactggaagttttttaaggaaaagaagaactacagaaatgatgcctgtttatttggacttaaataaagcaagaaacatcttcagggagttaacccaaaaggactggattactaacatgataaccacctgcctcaaagataatctgctcaaaagacttccatttcattctccaccccaagaagctttagaaattttcttccttctcccagaatgtcctgtgatgcatatttccaacaactgggagagccttgtggttccatttgcaaaggttgtttgtaaaatgagtgaccagtcttcactggttctggaagagtattgggcaactctgcaagaatccactttcagcaaactggtccagatgtttaaaacagccgtcatatgccagttggattactgggatgaaagtgctgaggagaatggtaatgttcaagctctcctagaaatgttgaagaagctgcacagggtaaaccaggtgaaatgtcaactacctgaaagtattttccaagtagacgaactcttgcaccgtctcaatttttttgtagaagtatgcagaaggtacttgtggaaaatgactgtggacgcttcagaaaatgtacaatgctgcgtcatattcagtcactttccatttatctttaataatctgtcgaaaattaaactactacatacagacacacttttaaaaatagagagtaaaaaacataaagcttatcttaggtcggcagcaattgaggaagaaagagagtctgaattcgctttgaggcccacgtttgatctaacagtcagaaggaatcacttgattgaggatgttttgaatcagctaagtcaatttgagaatgaagacctgaggaaagagttatgggtttcatttagtggagaaattgggtatgacctcggaggagtcaagaaagagttcttctactgtctgtttgcagagatgatccagccggaatatgggatgttcatgtatcctgaaggggcttcctgcatgtggtttcctgtcaagcctaaatttgagaagaaaagatacttcttttttggggttctatgtggactttccctgttcaattgcaatgttgccaacctccctttcccactggcactgtttaagaaacttttggaccaaatgccatcattggaagacttgaaagaactcagtcctgatttgggaaagaatttgcaaacacttctggatgatgaaggtgataactttgaggaagtattttacatccattttaatgtgcactgggacagaaacgacacaaacttaattcctaatggaagtagcataactgtcaaccagactaacaagagagactatgtttctaagtatatcaattacattttcaacgactctgtaaaggcggtttatgaagaatttcggagaggattttataaaatgtgcgacgaagacattatcaaattattccaccccgaagaactgaaggatgtgattgttggaaatacagattatgattggaaaacatttgaaaagaatgcacgttatgaaccaggatataacagttcacatcccaccatagtgatgttttggaaggctttccacaaattgactctggaagaaaagaaaaaattccttgtatttcttacaggaactgacagactacaaatgaaagatttaaataatatgaaaataacattttgctgtcctgaaagttggaatgaaagagaccctataagagcactgacatgtttcagtgtcctcttcctccctaaatattctacaatggaaacagttgaagaagcgcttcaagaagccatcaacaacaacagaggatttggctgaccagcttgcttgtccaacagccttattttgttgttgttatcgttgttgttgttgttgttgttgttgtttctctactttgttttgttttaggcttttagcagcctgaagccatggtttttcatttctgtctctagtgataagcaggaaagagggatgaagaagagggtttactggccggttagaacccgtgactgtattctctcccttggatacccctatgcctacatcatattccttacctcttttgggaaatatttttcaaaaataaaataaccgaaaaactaaaaaaagaaaaaaaaaaaaaaaaaaaaaaa

SEQ ID NO: 14457 - DNA, 4073 bp, Homo sapiens
gcagaggcggaggctcgcgtattcctgcagtcagcacccacgtcgcccccggacgctcggtgctcaggcccttcgcgagcggggctctccgtctgcggtcccttgtgaaggctctgggcggctgcagaggccggccgtccggtttggctcacctctcccaggaaacttcacactggagagccaaaaggagtggaagagcctgtcttggagattttcctggggaaatcctgaggtcattcattatgaagtgtaccgcgcgggagtggctcagagtaaccacagtgctgttcatggctagagcaattccagccatggtggttcccaatgccactttattggagaaacttttggaaaaatacatggatgaggatggtgagtggtggatagccaaacaacgagggaaaagggccatcacagacaatgacatgcagagtattttggaccttcataataaattacgaagtcaggtgtatccaacagcctctaatatggagtatatgacatgggatgtagagctggaaagatctgcagaatcctgggctgaaagttgcttgtgggaacatggacctgcaagcttgcttccatcaattggacagaatttgggagcacactggggaagatataggcccccgacgtttcatgtacaatcgtggtatgatgaagtgaaagactttagctacccatatgaacatgaatgcaacccatattgtccattcaggtgttctggccctgtatgtacacattatacacaggtcgtgtgggcaactagtaacagaatcggttgtgccattaatttgtgtcataacatgaacatctgggggcagatatggcccaaagctgtctacctggtgtgcaattactccccaaagggaaactggtggggccatgccccttacaaacatgggcggccctgttctgcttgcccacctagttttggagggggctgtagagaaaatctgtgctacaaagaagggtcagacaggtattatccccctcgagaagaggaaacaaatgaaatagaacgacagcagtcacaagtccatgacacccatgtccggacaagatcagatgatagtagcagaaatgaagtcataagcgcacagcaaatgtcccaaattgtttcttgtgaagtaagattaagagatcagtgcaaaggaacaacctgcaataggtacgaatgtcctgctggctgtttggatagtaaagctaaagttattggcagtgtacattatgaaatgcaatccagcatctgtagagctgcaattcattatggtataatagacaatgatggtggctgggtagatatcactagacaaggaagaaagcattatttcatcaagtccaatagaaatggtattcaaacaattggcaaatatcagtctgctaattccttcacagtctctaaagtaacagttcaggctgtgacttgtgaaacaactgtggaacagctctgtccatttcataagcctgcttcacattgcccaagagtatactgtcctcgtaactgtatgcaagcaaatccacattatgctcgtgtaattggaactcgagtttattctgatctgtccagtatctgcagagcagcagtacatgctggagtggttcgaaatcacggtggttatgttgatgtaatgcctgtggacaaaagaaagacctacattgcttcttttcagaatggaatcttctcagaaagtttacagaatcctccaggaggaaaggcattcagagtgtttgctgttgtgtgaaactgaatacttggaagaggaccataaagactattccaaatgcaatatttctgaattttgtataaaactgtaacattactgtacagagtacatcaactattttcagcccaaaaaggtgccaaatgcatataaatcttgataaacaaagtctataaaataaaacatgggacattagctttgggaaaagtaatgaaaatataatggttttagaaatcctgtgttaaatattgctatattttcttagcagttatttctacagttaattacatagtcatgattgttctacgtttcatatattatatggtgctttgtatatgccactaataaaatgaatctaaacattgaatgtgaatggccctcagaaaatcatctagtgcatttaaaaataatcgactctaaaactgaaagaaaccttatcacattttccccagttcaatgctatgccattaccaactccaaataatctcaaataattttccacttaataactgtaaagtttttttctgttaatttaggcatatagaatattaaattctgatattgcacttcttattttatataaaataatcctttaatatccaaatgaatctgttaaaatgtttgattccttgggaatggccttaaaaataaatgtaataaagtcagagtggtggtatgaaaacattcctagtgatcatgtagtaaatgtagggttaagcatggacagccagagctttctatgtactgttaaaattgaggtcacatattttcttttgtatcctggcaaatactcctgcaggccaggaagtataatagcaaaaagttgaacaaagatgaactaatgtattacattaccattgccactgatttttttttaaatggtaaatgaccttgtatataaatattgccatatcatggtacctataatggtgatatatttgtttctatgaaaaatgtattgtgctttgatactaaaaatctgtaaaatgttagttttggtaattttttttctgctggtggatttacatattaaattttttctgctggtggataaacattaaaattaatcatgtttcaaagttttattttcagttccttttgcatgcctattttgatttagaaatcactttaagataaatgaacaaaattattgtaagtcttctaaacttggtttattgacgttagtataaataacatacaataccagatgtctacaaaatcgacctgattatttaggtatttgtatgtgaaagagaaacacatatttagaaacacagcaagggagattttgaataaagagagagatgaatttataaagtaggaaaaaaagaatctgaaagatacaaagtgattataaaagaattgacaggacaataaatacttcaaatactttcaggaagtaaatgagtaggagtttaggagggataaacgagataaattccatgcaatgatcaaggaaagcaagagagcagataatacaaaagaaaaagaagaaggttcacataaatagcttctggagtgcaaattataaagacatcaacatttttgatcatataataagtactggcttacagctaagtggttccaaatactggtaattaaaacgatgtatacgttaaagattgcaaaacttaaaagcagatttttatgggaactttttttgaaaggatacatgaccaccttcttaaatagtatgactttacatagactctttttctggtccttactgctcctcccacaacagggaagcccgatcagttctgtcagtataaggttttcttctatttgcccttagtttagatctccatcatcaattccacttactattgtaataccttcagctggagcctgtgtctttctccattcctttttaatacattcgtatttcccagccccagaacccttgaaattaactcttccatgagttttcattgctgaagaaaaaccaaacattcttgtaaaaacatttaagaacttccatagtcttgttcatattgtttacctatcttctacacaaggcgtgtccttgggtaagttatttaacttcaatttaccttacctgtaaaatggaacaaataatatctccttaagattgctctacgaattaattgacacattatgtgtgatgtacttaaaggaataataaatgcataatatgaggtcagtggacgccattttctgttataatcatttttgttatctaatttggggaaactattcatctgtcatatactattgatcctttggcacttaaataaatgtgaaatcctccaggaattttcctgtgattctccttgtaagaattaaatgctctctaatatgatatccctttaaaaaaaaaaaaaaaaa

SEQ ID NO: 14458 - DNA, 2473 bp, Homo sapiens
atcagaggaagaggaaggggcggagctgctttgcggccggccgcggagcagtcagccgactacagagaagggtaatcgggtgtccccggcgccgcccggggccctgagggctggctagggtccaggccgggggggacgggacagacgaaccagccccgtgtaggaagcgcgacaatgccccgctacggagcgtcactccgccagagctgccccaggtccggccgggagcagggacaagacgggaccgccggagcccccggactcctttggatgggcctggtgctggcgctggcgctggcgctggcgctggcgctggctctgtctgactctcgggttctctgggctccggcagaggctcaccctctttctccccaaggccatcctgccaggttacatcgcatagtgccccggctccgagatgtctttgggtgggggaacctcacctgcccaatctgcaaaggtctattcaccgccatcaacctcgggctgaagaaggaacccaatgtggctcgcgtgggctccgtggccatcaagctgtgcaatctgctgaagatagcaccacctgccgtgtgccaatccattgtccacctctttgaggatgacatggtggaggtgtggagacgctcagtgctgagcccatctgaggcctgtggcctgctcctgggctccacctgtgggcactgggacattttctcatcttggaacatctctttgcctactgtgccgaagccgccccccaaaccccctagccccccagccccaggtgcccctgtcagccgcatcctcttcctcactgacctgcactgggatcatgactacctggagggcacggaccctgactgtgcagacccactgtgctgccgccggggttctggcctgccgcccgcatcccggccaggtgccggatactggggcgaatacagcaagtgtgacctgcccctgaggaccctggagagcctgttgagtgggctgggcccagccggcccttttgatatggtgtactggacaggagacatccccgcacatgatgtctggcaccagactcgtcaggaccaactgcgggccctgaccaccgtcacagcacttgtgaggaagttcctggggccagtgccagtgtaccctgctgtgggtaaccatgaaagcacacctgtcaatagcttccctccccccttcattgagggcaaccactcctcccgctggctctatgaagcgatggccaaggcttgggagccctggctgcctgccgaagccctgcgcaccctcagaattggggggttctatgctctttccccataccccggtctccgcctcatctctctcaatatgaatttttgttcccgtgagaacttctggctcttgatcaactccacggatcccgcaggacagctccagtggctggtgggggagcttcaggctgctgaggatcgaggagacaaagtgcatataattggccacattcccccagggcactgtctgaagagctggagctggaattattaccgaattgtagccaggtatgagaacaccctggctgctcagttctttggccacactcatgtggatgaatttgaggtcttctatgatgaagagactctgagccggccgctggctgtagccttcctggcacccagtgcaactacctacatcggccttaatcctggttaccgtgtgtaccaaatagatggaaactactccgggagctctcacgtggtcctggaccatgagacctacatcctgaatctgacccaggcaaacataccgggagccataccgcactggcagcttctctacagggctcgagaaacctatgggctgcccaacacactgcctaccgcctggcacaacctggtatatcgcatgcggggcgacatgcaacttttccagaccttctggtttctctaccataagggccacccaccctcggagccctgtggcacgccctgccgtctggctactctttgtgcccagctctctgcccgtgctgacagccctgctctgtgccgccacctgatgccagatgggagcctcccagaggcccagagcctgtggccaaggccactgttttgctagggccccagggcccacatttgggaaagttcttgatgtaggaaagggtgaaaaagcccaaatgctgctgtggttcaaccaggcaagatcatccggtgaaagaaccagtccctgggccccaaggatgccggggaaacaggaccttctcctttcctggagctggtttagctggatatgggagggggtttggctgcctgtgcccaggagctagactgccttgaggctgctgtcctttcacagccatggagtagaggcctaagttgacactgccctgggcagacaagacaggagctgtcgccccaggcctgtgctgcccagccaggaaccctgtactgctgctgcgacctgatgctgccagtctgttaaaataaagataagagacttggactccaaaaaaaaaaaaaaa

SEQ ID NO: 14459 - DNA, 4354 bp, Homo sapiens
gacagacagggcacgctgggtcggcggagctgaggctcccagctgtgggcctcgctggcccggtcgcccagtctcgcgagagttgggagtaaacagccccgaatggagtgcccaggcgtgttcgccgcggaggcgccgttatcccgggcccgccggccctgagctcccggcggcgcagattggctcacagtggttgattgatcaaccccattggacgttggttctgtggtacaaatggagtacaggactcagtcgtcacggcctgagtgagagaagccttatttccaagatggagaagaagcggagaaagaaatgaaagcctctcttcaggctgaaccacaaaaggccatgggatttaacttttatttatgttgggcaagactgtaagatggctgattagtaatgttgcagcttttagctgaaacaaaaattcacttttaatcaagaagaaaaaagtgtgatttgaatatatgcaattttatgatcatattcgcttgtgaccatgaagcttgtcaacatctggctgcttctgctcgtggttttgctctgtgggaagaaacatctgggcgacagactggaaaagaaatcttttgaaaaggccccatgccctggctgttcccacctgactttgaaggtggaattctcatcaacagttgtggaatatgaatatattgtggctttcaatggatactttacagccaaagctagaaattcatttatttcaagtgccctgaagagcagtgaagtagacaattggagaattatacctcgaaacaatccatccagtgactaccctagtgattttgaggtgattcagataaaagaaaaacagaaagcggggctgctaacacttgaagatcatccaaacatcaaacgggtcacgccccaacgaaaagtctttcgttccctcaagtatgctgaatctgaccccacagtaccctgcaatgaaacccggtggagccagaagtggcaatcatcacgtcccctgcgaagagccagcctctccctgggctctggcttctggcatgctacgggaaggcattcgagcagacggctgctgagagccatcccgcgccaggttgcccagacactgcaggcagatgtgctctggcagatgggatatacaggtgctaatgtaagagttgctgtttttgacactgggctgagcgagaagcatccccacttcaaaaatgtgaaggagagaaccaactggaccaacgagcgaacgctggacgatgggttgggccatggcacattcgtggcaggtgtgatagccagcatgagggagtgccaaggatttgctccagatgcagaacttcacattttcagggtctttaccaataatcaggtatcttacacatcttggtttttggacgccttcaactatgccattttaaagaagatcgacgtgttaaacctcagcatcggcggcccggacttcatggatcatccgtttgttgacaaggtgtgggaattaacagctaacaatgtaatcatggtttctgctattggcaatgacggacctctttatggcactctgaataaccctgctgatcaaatggatgtgattggagtaggcggcattgactttgaagataacatcgcccgcttttcttcaaggggaatgactacctgggagctaccaggaggctacggtcgcatgaaacctgacattgtcacctatggtgctggcgtgcggggttctggcgtgaaaggggggtgccgggccctctcagggaccagtgttgcttctccagtggttgcaggtgctgtcaccttgttagtgagcacagtccagaagcgtgagctggtgaatcccgccagtatgaagcaggccctgatcgcgtcagcccggaggctccccggggtcaacatgtttgagcaaggccacggcaagctcgatctgctcagagcctatcagatcctcaacagctacaagccacaggcaagtttgagccccagctacatagatctgactgagtgtccctacatgtggccctactgctcccagcccatctactatggaggaatgccgacagttgttaatgtcaccatcctcaacggcatgggagtcacaggaagaattgtagataagcctgactggcagccctatttgccacagaacggagacaacattgaagttgccttctcctactcctcggtcttatggccttggtcgggctacctggccatctccatttctgtgaccaagaaagcggcttcctgggaaggcattgctcagggccatgtcatgatcactgtggcttccccagcagagacagagtcaaaaaatggtgcagaacagacttcaacagtaaagctccccattaaggtgaagataattcctactcccccgcgaagcaagagagttctctgggatcagtaccacaacctccgctatccacctggctatttccccagggataatttaaggatgaagaatgaccctttagactggaatggtgatcacatccacaccaatttcagggatatgtaccagcatctgagaagcatgggctactttgtagaggtcctcggggcccccttcacgtgttttgatgccagtcagtatggcactttgctgatggtggacagtgaggaggagtacttccctgaagagatcgccaagctccggagggacgtggacaacggcctctcgctcgtcatcttcagtgactggtacaacacttctgttatgagaaaagtgaagttttatgatgaaaacacaaggcagtggtggatgccggataccggaggagctaacatcccagctctgaatgagctgctgtctgtgtggaacatggggttcagcgatggcctgtatgaaggggagttcaccctggccaaccatgacatgtattatgcgtcagggtgcagcatcgcgaagtttccagaagatggcgtcgtgataacacagactttcaaggaccaaggattggaggttttaaagcaggaaacagcagttgttgaaaacgtccccattttgggactttatcagattccagctgagggtggaggccggattgtactgtatggggactccaattgcttggatgacagtcaccgacagaaggactgcttttggcttctggatgccctcctccagtacacatcgtatggggtgacaccgcctagcctcagtcactctgggaaccgccagcgccctcccagtggagcaggctcagtcactccagagaggatggaaggaaaccatcttcatcggtactccaaggttctggaggcccatttgggagacccaaaacctcggcctctaccagcctgtccacgcttgtcttgggccaagccacagcctttaaacgagacggcgcccagtaacctttggaaacatcagaagctactctccattgacctggacaaggtggtgttacccaactttcgatcgaatcgccctcaagtgaggcccttgtcccctggagagagcggcgcctgggacattcctggagggatcatgcctggccgctacaaccaggaggtgggccagaccattcctgtctttgccttcctgggagccatggtggtcctggccttctttgtggtacaaatcaacaaggccaagagcaggccgaagcggaggaagcccagggtgaagcgcccgcagctcatgcagcaggttcacccgccaaagaccccttcggtgtgaccggcagcctggctgaccgtgagggccagagagagccttcacggacggcgctggtgggtgagccgagctgtggtggcggctggtttaaaagggatccagtttccagctgcaggtttgttagagtctgttctacatgggcctgccctcctgtgatgggcagaggctcctggtacatcgagaagattcctgtggatcccgtcaggagggacttagtggctctgccgccagtgagacttcccgccggcagctgtgcgcaccaaagactcgggagaactggaaaggctgtctggggtcttctgactgcaggggaaggatgtactttccaaacaaatgatacaaccctgaccaagctaaaagacgcttgttaaaggctattttctatatttattgttgggaaaagtcactttaaagacttgtgctatttggaagcaaagctattttttttgtcagtggaatgcagtttttttactattccatcatgaggaacaacatagattccatgatctttttaatgacagtacagactgagatttgaaggaaacatgcacaaatctgtaaaacatagaccttcgctttatttttgtaagtatcacctgccaccatgttttgtaatttgaggtcttgatttcaccattgtcggtgaagaaaattttcaataaatatgtattacccgtctgaagcttaaaaaaaaaa

SEQ ID NO: 14460 - DNA, 2196 bp, Homo sapiens
ccggcatttgcgtttggggcgccctccctgcgccgggggcgggagcccagcgagcgcagagccccggccccgcgcggcccgagtgccacatcactgcgctggccgtccaaggtccgccgccccaccatgccgcccccgccgccgctgctgctccttacagtcctggtcgtcgccgctgcccggccggggtgcgagtttgagcggaaccccgccgccacctgcgtggacctgcagctcaggacctgcagcgatgccgcctacaaccacaccaccttccccaacctgcttcagcaccggtcgtgggaggtggtggaggccagctccgagtacatcctgctgagcgttctacaccagctcctggaaggccagtgcaacccggacctgcggctgctgggctgtgctgtgctggccccccggtgtgagggcggctgggtgcgcagaccctgccggcacatctgcgagggcctgcgggaggtctgccagcccgccttcgacgccattgacatggcctggccctacttccttgactgccaccgctacttcacgagagaggacgagggctgctatgacccgctggagaagcttcggggaggcctggaggctgacgaggcactgccctcagggctgccgcccaccttcatccgcttcagccaccactcctacgcccagatggtgcgtgtgctgaggcggacggcctcccgctgcgcccacgtggccaggacctacagcatcgggcgcagcttcgacggcagggagctgctggtcatcgagttctccagccgccccggccagcacgagctgatggagcccgaggtgaagctcatcggcaacattcatggcaacgaggtggcgggccgggagatgctcatctacctagcccagtacctgtgctctgagtacctgcttggtaacccccgcatccagcgcctgctcaacaccacccgcatccacctgctgccctccatgaaccctgacggctatgaggtggcagctgccgagggtgccggctacaacgggtggacgagcgggaggcagaacgcgcagaacctggatctgaaccgaaatttcccggacctgacgtccgagtactaccggctggcggagacccgcggcgcacgcagcgaccacatccccatcccccagcactactggtggggtaaggtggccccggagacaaaggcaatcatgaagtggatgcagaccataccctttgtgctctcagccagccttcatgggggcgacctggtggtgtcctaccccttcgacttctccaagcacccccaggaggagaagatgttttctcccacgcccgacgagaagatgttcaagctgctgtccagagcctacgctgacgtccaccccatgatgatggacaggtcggagaataggtgtggaggcaatttcctgaagagggggagcatcatcaacggggcggactggtacagcttcacgggaggcatgtccgatttcaactacctgcacaccaactgctttgagatcacggtagagctgggctgtgtgaagttcccccccgaggaggccctgtacacactctggcagcacaacaaggagtcactcctgaatttcgtggagacggtgcaccggggcatcaaaggtgtggtgacagataaattcggcaagccagtcaaaaacgcccggatctcagtcaaaggcattcgccacgacatcaccacagccccagatggtgactactggagactgctgcccccaggtatccacattgtcattgcccaagcccctggctacgccaaagtcatcaagaaagtcatcatccccgcccggatgaagagggctggccgtgtggacttcattctgcaacctctggggatgggacccaagaactttattcatgggctgcggaggactgggccccacgacccgctgggaggtgccagctctttgggggaggccacggagcccgacccgctccgggcgcgcaggcagccctcggccgacgggagtaagccctggtggtggtcctacttcacatcgctgagcacccacaggccacgctggctgctcaagtactagccccggccccagcacccgccaggatgtggagaccgaggcccatctccgcatcccgggctcctggctcttgattttgtctgccacagacatcccacaaagccgctgccattttattaaagtgttttgatccactttccactggaa

SEQ ID NO: 14461 - DNA, 1546 bp, Homo sapiens
cacggccggagagacgcggaggaggagacatgagccggcgggcgcccagacggagcggccgtgacgctttcgcgctgcagccgcgcgccccgaccccggagcgctgacccctggccccacgcagctccgcgcccgggccggagagcgcaactcggcttccagacccgccgcgcatgctgtccccggactgagccgggcagccagcctcccacggacgcccggacggccggccggccagcagtgagcgagcttccccgcaccggccaggcgcctcctgcacagcggctgccgccccgcagcccctgcgccagcccggagggcgcagcgctcgggaggagccgcgcggggcgctgatgccgcagggcgcgccgcggagcgccccggagcagcagagtctgcagcagcagcagccggcgaggagggagcagcagcagcggcggcggcggcggcggcggcggcggaggcgcccggtcccggccgcgcggagcggacatgtgcaggctgggctaggagccgccgcctccctcccgcccagcgatgtattcagcgccctccgcctgcacttgcctgtgtttacacttcctgctgctgtgcttccaggtacaggtgctggttgccgaggagaacgtggacttccgcatccacgtggagaaccagacgcgggctcgggacgatgtgagccgtaagcagctgcggctgtaccagctctacagccggaccagtgggaaacacatccaggtcctgggccgcaggatcagtgcccgcggcgaggatggggacaagtatgcccagctcctagtggagacagacaccttcggtagtcaagtccggatcaagggcaaggagacggaattctacctgtgcatgaaccgcaaaggcaagctcgtggggaagcccgatggcaccagcaaggagtgtgtgttcatcgagaaggttctggagaacaactacacggccctgatgtcggctaagtactccggctggtacgtgggcttcaccaagaaggggcggccgcggaagggccccaagacccgggagaaccagcaggacgtgcatttcatgaagcgctaccccaaggggcagccggagcttcagaagcccttcaagtacacgacggtgaccaagaggtcccgtcggatccggcccacacaccctgcctaggccaccccgccgcggcccctcaggtcgccctggccacactcacactcccagaaaactgcatcagaggaatatttttacatgaaaaataaggaagaagctctatttttgtacattgtgtttaaaagaagacaaaaactgaaccaaaactcttggggggaggggtgataaggattttattgttgacttgaaacccccgatgacaaaagactcacgcaaagggactgtagtcaacccacaggtgcttgtctctctctaggaacagacaactctaaactcgtccccagaggaggacttgaatgaggaaaccaacactttgagaaaccaaagtcctttttcccaaaggttctgaaaggaaaaaaaaaaaaaaacaaaaaaaaaaaaaaaa

SEQ ID NO: 14462 - DNA, 1437 bp, Homo sapiens
attgctgatggatcagtgagcctgtgttcatgccagtgagctgctgtggctcagatactgatactttctttccaaacagcataagaagtgattgagccacaagtatactgaaggaagggctccctcgagttctggtgtgaagagataaatcaccagtcacagactatgcacccgactgctgctgttcagtccagggaaaatgaaagttggagtgctgtggctcatttctttcttcaccttcactgacggccacggtggcttcctggggaaaaatgatggcatcaaaacaaaaaaagaactcattgtgaataagaaaaaacatctaggcccagtcgaagaatatcagctgctgcttcaggtgacctatagagattccaaggagaaaagagatttgagaaattttctgaagctcttgaagcctccattattatggtcacatgggctaattagaattatcagagcaaaggctaccacagactgcaacagcctgaatggagtcctgcagtgtacctgtgaagacagctacacctggtttcctccctcatgccttgatccccagaactgctaccttcacacggctggagcactcccaagctgtgaatgtcatctcaacaacctcagccagagtgtcaatttctgtgagagaacaaagatttggggcactttcaaaattaatgaaaggtttacaaatgaccttttgaattcatcttctgctatatactccaaatatgcaaatggaattgaaattcaacttaaaaaagcatatgaaagaattcaaggttttgagtcggttcaggtcacccaatttcgaatgtcactcttgtcgcccaagttggagtgcaatggcacaatctaggctcactgcaaccctgcaacctctgcctaccgggttcaagagattcccctgcctcagcctcccaagtagctggaattacaggcacctgccaccacatccagctaactttttttgtatttttactagagacagggtttcaccatgttggccacactggtctcaaactcctgacctcaggtgatccgcctgcctcggcccccaaagtgctgggattacaggcatgagccaccacatctggcctaggaccttaaatattggaaagcatcctcaaaactgtgggtcagtgagtagaactacaaaacaatagcagtagggcagaaacttgaaagaaggcaggagatcatggtgacagtggatgggaaaaagtgagggttggggataagggttgcgggttgtcgaagggtggattttctccttcagcaactacaggagatatgatgcctcataattcggagccagaagtggggctttgggtgagatatctttgcacagataacatgtatacatcatagttcaaaacccagtagtcattgtttacagcaaataaagaaatatttagtaaattaaaaaaaaaaaaaaaa

SEQ ID NO: 14463 - DNA, 792 bp, Homo sapiens
ccgccgctgccaccgcctctgatccaagccacctcccgccagagaggtgtcatgggcttccaaaagttctcccccttcctggctctcagcatcttggtcctgttgcaggcaggcagcctccatgcagcaccattcaggtctgccctggagagcagcccagcagacccggccacgctcagtgaggacgaagcgcgcctcctgctggctgcactggtgcaggactatgtgcagatgaaggccagtgagctggagcaggagcaagagagagagggctccagcctggacagccccagatctaagcggtgcggtaatctgagtacttgcatgctgggcacatacacgcaggacttcaacaagtttcacacgttcccccaaactgcaattggggttggagcacctggaaagaaaagggatatgtccagcgacttggagagagaccatcgccctcatgttagcatgccccagaatgccaactaaactcctccctttccttcctaatttcccttcttgcatccttcctataacttgatgcatgtggtttggttcctctctggtggctctttgggctggtattggtggctttccttgtggcagaggatgtctcaaacttcagatgggaggaaagagagcaggactcacaggttggaagagaatcacctgggaaaataccagaaaatgagggccgctttgagtcccccagagatgtcatcagagctcctctgtcctgcttctgaatgtgctgatcatttgaggaataaaattatttttccccaaaaaaaaaaaaaaaaaaaa

SEQ ID NO: 14464 - DNA, 3334 bp, Homo sapiens
gcacgagccccgggctgccggcgcgggcgccgcggcacgtccacaggctgggtcgcgaggtggcgatcgctgagaggcaggagggccgaggcgggcctgggaggcggcccggaggtggggcgccgctggggccggcccgcacgggcttcatctgagggcgcacggcccgcgaccgagcgtgcggactggcctcccaagcgtggggcgacaagctgccggagctgcaatgggccgcggctggggattcttgtttggcctcctgggcgccgtgtggctgctcagctcgggccacggagaggagcagcccccggagacagcggcacagaggtgcttctgccaggttagtggttacttggatgattgtacctgtgatgttgaaaccattgatagatttaataactacaggcttttcccaagactacaaaaacttcttgaaagtgactactttaggtattacaaggtaaacctgaagaggccgtgtcctttctggaatgacatcagccagtgtggaagaagggactgtgctgtcaaaccatgtcaatctgatgaagttcctgatggaattaaatctgcgagctacaagtattctgaagaagccaataatctcattgaagaatgtgaacaagctgaacgacttggagcagtggatgaatctctgagtgaggaaacacagaaggctgttcttcagtggaccaagcatgatgattcttcagataacttctgtgaagctgatgacattcagtcccctgaagctgaatatgtagatttgcttcttaatcctgagcgctacactggttacaagggaccagatgcttggaaaatatggaatgtcatctacgaagaaaactgttttaagccacagacaattaaaagacctttaaatcctttggcttctggtcaagggacaagtgaagagaacactttttacagttggctagaaggtctctgtgtagaaaaaagagcattctacagacttatatctggcctacatgcaagcattaatgtgcatttgagtgcaagatatcttttacaagagacctggttagaaaagaaatggggacacaacattacagaatttcaacagcgatttgatggaattttgactgaaggagaaggtccaagaaggcttaagaacttgtattttctctacttaatagaactaagggctttatccaaagtgttaccattcttcgagcgcccagattttcaactctttactggaaataaaattcaggatgaggaaaacaaaatgttacttctggaaatacttcatgaaatcaagtcatttcctttgcattttgatgagaattcattttttgctggggataaaaaagaagcacacaaactaaaggaggactttcgactgcattttagaaatatttcaagaattatggattgtgttggttgttttaaatgtcgtctgtggggaaagcttcagactcagggtttgggcactgctctgaagatcttattttctgagaaattgatagcaaatatgccagaaagtggacctagttatgaattccatctaaccagacaagaaatagtatcattattcaacgcatttggaagaatttctacaagtgtgaaagaattagaaaacttcaggaacttgttacagaatattcattaaagaaaacaagctgatatgtgcctgtttctggacaatggaggcgaaagagtggaatttcattcaaaggcataatagcaatgacagtcttaagccaaacattttatataaagttgcttttgtaaaggagaattatattgttttaagtaaacacatttttaaaaattgtgttaagtctatgtataatactactgtgagtaaaagtaatactttaataatgtggtacaaattttaaagtttaatattgaataaaaggaggattatcaaattcatatatgataaaagtgaatgttctaagtctctcaaactagcgttttatgtaataatatgtaatataaataaaactatggtaaatgtgacaagcatttaataggaaaatgctaaggaggcctcataaatgacccataattaccaacgtagaatttttcagtacatttagggttgctggatttagcaaataaaaataaagattgcccagttagatttgaatttcagataaacaattagttttttaatattttacatggaatatttggaaaatacttatactaaaaaattatttgtttgaaattcacatttaactgggagtcttgtattttatctggcaatcctaaaatacattggtatgaaacaaatcacttttagaagtatattgctattttgattgggttgtttttgtgtgtagaaacgtacaataacaactcaaaggcacaggagatttctaaacattgtgaaaagttgaatagattatatatttattctcataatactttcactaatactaaataaaatttggggaacactttttatttttatataatttccaatttacagaaaagtttcaaaaatagtacaaagagctctcttacccagattcactaattgttcatacgtgctttatctttcatgctttctctgtacacacacacacacacacaaatttttcctcaatcatttgaaagtcagttataggcatcatgccccttaaaccctaaatacttcagtgtgtaatactgaataattactaaaaatgattttctcagaaaaaaaaactcccacaattctggaactataatactgtaagccttagaataaataatactttcaagttccaatctaaagttctttttgagttttgttgcccgttttatgcttgatgtgtatagtaatagggtaggctatttattttattaaaattttttttagagacaaggttttgctgtgttgcccaagctggaacttgaacgactgggctgaagtgatcttcccacctcagcctcccaagtagctgggaatacaggtgtctgccaccatacccagtttcatttttgttttttatacccgaagttcatttcctttgtctccctaaaactgaactgtaattttgggaggttttcattagtggaagctcttcatttataaagctatttgaaggggtttaggaatttatatcacatggtaattgtagagaaaaagaagctatatacctcaaaatcgtgccctctttacatatgtcttatcaggtataacatgttgaaatgtcacattagtagtaaagtggggtttatttatatagtggttaagaaatgtcagtttacactgctgtatacttcttcttctgtgtccctaaggcctggtacagtgccaagcacatacttggtatccaataaatatttgttggatgaaaaaaaaaaaaaaaaaaaa

SEQ ID NO: 14465 - DNA, 3537 bp, Homo sapiens
gcgagcgcgggcaggcggcgacgcgggggcaggggtggacggcggtcagagccgaacgcgagggcggcgcccggggactggagctgcgcgcaataggacagctggcctgaagctcagagccggggcgtgcgccatggccccacactgggctgtctggctgctggcagcaaggctgtggggcctgggcattggggctgaggtgtggtggaaccttgtgccgcgtaagacagtgtcttctggggagctggccacggtagtacggcggttctcccagaccggcatccaggacttcctgacactgacgctgacggagcccactgggcttctgtacgtgggcgcccgagaggccctgtttgccttcagcatggaggccctggagctgcaaggagcgatctcctgggaggcccccgtggagaagaagactgagtgtatccagaaagggaagaacaaccagaccgagtgcttcaacttcatccgcttcctgcagccctacaatgcctcccacctgtacgtctgtggcacctacgccttccagcccaagtgcacctacgtcaacatgctcaccttcactttggagcatggagagtttgaagatgggaagggcaagtgtccctatgacccagctaagggccatgctggccttcttgtggatggtgagctgtactcggccacactcaacaacttcctgggcacggaacccattatcctgcgtaacatggggccccaccactccatgaagacagagtacctggccttttggctcaacgaacctcactttgtaggctctgcctatgtacctgagagtgtgggcagcttcacgggggacgacgacaaggtctacttcttcttcagggagcgggcagtggagtccgactgctatgccgagcaggtggtggctcgtgtggcccgtgtctgcaagggcgatatggggggcgcacggaccctgcagaggaagtggaccacgttcctgaaggcgcggctggcatgctctgccccgaactggcagctctacttcaaccagctgcaggcgatgcacaccctgcaggacacctcctggcacaacaccaccttctttggggtttttcaagcacagtggggtgacatgtacctgtcggccatctgtgagtaccagttggaagagatccagcgggtgtttgagggcccctataaggagtaccatgaggaagcccagaagtgggaccgctacactgaccctgtacccagccctcggcctggctcgtgcattaacaactggcatcggcgccacggctacaccagctccctggagctacccgacaacatcctcaacttcgtcaagaagcacccgctgatggaggagcaggtggggcctcggtggagccgccccctgctcgtgaagaagggcaccaacttcacccacctggtggccgaccgggttacaggacttgatggagccacctatacagtgctgttcattggcacaggagacggctggctgctcaaggctgtgagcctggggccctgggttcacctgattgaggagctgcagctgtttgaccaggagcccatgagaagcctggtgctatctcagagcaagaagctgctctttgccggctcccgctctcagctggtgcagctgcccgtggccgactgcatgaagtatcgctcctgtgcagactgtgtcctcgcccgggacccctattgcgcctggagcgtcaacaccagccgctgtgtggccgtgggtggccactctggatctctactgatccagcatgtgatgacctcggacacttcaggcatctgcaacctccgtggcagtaagaaagtcaggcccactcccaaaaacatcacggtggtggcgggcacagacctggtgctgccctgccacctctcctccaacttggcccatgcccgctggacctttgggggccgggacctgcctgcggaacagcccgggaccttcctctacgatgcccggctccaggccctggttgtgatggctgcccagccccgccatgccggggcctaccactgcttttcagaggagcagggggcgcggctggctgctgaaggctaccttgtggctgtcgtggcaggcccgtcggtgaccttggaggcccgggcccccctggaaaacctggggctggtgtggctggcggtggtggccctgggggctgtgtgcctggtgctgctgctgctggtgctgtcattgcgccggcggctgcgggaagagctggagaaaggggccaaggctactgagaggaccttggtgtaccccctggagctgcccaaggagcccaccagtccccccttccggccctgtcctgaaccagatgagaaactttgggatcctgtcggttactactattcagatggctcccttaagatagtacctgggcatgcccggtgccagcccggtggggggcccccttcgccacctccaggcatcccaggccagcctctgccttctccaactcggcttcacctggggggtgggcggaactcaaatgccaatggttacgtgcgcttacaactaggaggggaggaccggggagggctcgggcaccccctgcctgagctcgcggatgaactgagacgcaaactgcagcaacgccagccactgcccgactccaaccccgaggagtcatcagtatgaggggaacccccaccgcgtcggcgggaagcgtgggaggtgtagctcctacttttgcacaggcaccagctacctcagggacatggcacgggcacctgctctgtctgggacagatactgcccagcacccacccggccatgaggacctgctctgctcagcacgggcactgccacttggtgtggctcaccagggcaccagcctcgcagaaggcatcttcctcctctctgtgaatcacagacacgcgggaccccagccgccaaaacttttcaaggcagaagtttcaagatgtgtgtttgtctgtatttgcacatgtgtttgtgtgtgtgtgtatgtgtgtgtgcacgcgcgtgcgcgcttgtggcatagccttcctgtttctgtcaagtcttcccttggcctgggtcctcctggtgagtcattggagctatgaaggggaaggggtcgtatcactttgtctctcctacccccactgccccgagtgtcgggcagcgatgtacatatggaggtggggtggacagggtgctgtgccccttcagagggagtgcagggcttggggtgggcctagtcctgctcctagggctgtgaatgttttcagggtggggggagggagatggagcctcctgtgtgtttggggggaagggtgggtggggcctcccacttggccccggggttcagtggtattttatacttgccttcttcctgtacagggctgggaaaggctgtgtgaggggagagaagggagagggtgggcctgctgtggacaatggcatactctcttccagccctaggaggagggctcctaacagtgtaacttattgtgtccccgcgtatttatttgttgtaaatatttgagtatttttatattgacaaataaaatggagaaaatgaaaaaaaaaaaaaaaaaa

SEQ ID NO: 14466 - DNA, 6200 bp, Homo sapiens
gcgagtgactgcaccgagcccgagaagtcgccgcgccccgcagccgccccgactggttccccgccttgcccgtgggccccgccgggatggggaaccgccgggacctgggccagccgcgggccggtctctgcctgctcctggccgcgctgcagcttctgccggggacgcaggccgatcctgtggatgtcctgaaggccctgggtgtgcagggaggccaggctggggtccccgaggggcctggcttctgtccccagaggactccagagggtgaccgggcattcagaattggccaggccagcacgctcggcatccccacgtgggaactctttccagaaggccactttcctgagaacttctccttgctgatcaccttgcggggacagccagccaatcagtctgtcctgctgtccatttatgatgaaaggggtgcccggcagttgggcctggcactggggccagcgctgggtctcctaggtgaccccttccgccccctcccccagcaggtcaacctcacagatggcaggtggcaccgtgtggccgtcagcatagatggtgagatggtgaccctggtagctgactgtgaagctcagccccctgttttgggccatggcccccgcttcatcagcatagctggactcactgtgctggggacccaggaccttggggaaaagactttcgagggagacattcaggagctgctgataagcccagatcctcaggctgccttccaggcttgtgagcggtacctccccgactgtgacaacctggcaccggcagccacagtggctccccagggtgaaccagaaacccctcgtcctcggcggaaggggaagggaaaagggaggaagaaagggcgaggtcgcaaggggaagggcaggaaaaagaacaaggaaatttggacctcaagtccacctcctgactccgcagagaaccagacctccactgacatccccaagacagagactccagctccaaatctgcctccgacccccacgcctttggtcgtcacctccactgtgactactggactcaatgccacgatcctagaggggagcttggaccctgacagtggaaccgagctggggaccctggagaccaaggcagccagggaggatgaagaaggagatgattccaccatgggccctgacttccgggcagcagaatatccatctcggactcagttccagatctttcctggtgctggagagaaaggagcaaaaggagagcccgcagtgattgaaaaggggcagcagtttgagggacctccaggagccccaggaccccaaggggtggttggcccctcaggccctcccggccccccaggattccctggcgaccctggtccaccgggccctgctggcctcccaggaatccccggcattgatgggatccgaggcccaccgggcactgtgatcatgatgccgttccagtttgcaggcggctcctttaaaggccccccagtctcattccagcaggcccaggctcaggcagttctgcagcagactcagctctctatgaaaggcccccctggtccagtggggctcactgggcgcccaggccctgtgggtctccccgggcatccaggtctgaaaggagaggagggagcagaagggccacagggtccccgaggcctgcagggacctcatggaccccctggccgagtgggcaagatgggccgccctggagcagatggagctcggggcctcccaggggacactggacctaagggtgatcgtggcttcgatggcctccctgggctgcctggtgagaagggccaaaggggtgactttggccatgtggggcaacccggtcccccaggagaggatggtgagaggggagcagagggacctccagggcccactggccaggctggggagccgggtccacgaggactgcttggccccagaggctctcctggccccacgggtcgcccgggtgtgactggaattgatggtgctcctggtgccaaaggcaatgtgggtcctccaggagaaccaggccctccgggacagcagggaaaccatgggtcccagggactccccggtccccagggactcattggcactcctggggagaagggtccccctggaaacccaggaattccaggcctcccaggatccgatggccctctgggtcacccaggacatgagggccccacgggagagaaaggggctcagggtccaccagggtcggcaggccctccgggctatcctggacctcggggagtgaagggcacttcaggcaaccggggcctccagggggagaaaggcgagaagggagaggacggcttcccaggcttcaagggcgatgtggggctcaaaggtgatcaggggaaacccggagctccaggtccccggggagaggatggtcctgaggggccgaaggggcaggcggggcaggctggcgaggaggggcccccaggctcagctggggagaagggcaagcttggggtgccaggcctcccaggttatccaggacgccctggacctaagggatctattggatttcccggtcccctgggacccataggagagaaagggaagtcgggaaagacagggcagccaggcctggaaggagagcggggaccaccaggttcccgtggagagagggggcaaccgggtgccacagggcaaccaggccccaagggcgatgtgggccaggatggagcccctgggatccctggagaaaagggcctccctggtctgcaaggccctccaggattccctgggccaaagggcccccctggtcaccaaggtaaagatgggcgaccagggcaccctggacagagaggagaactgggcttccaaggtcagacaggcccgcctggaccagctggtgtcttaggccctcagggaaagacaggagaagtgggacctctaggtgaaagggggcctccaggcccccctggacctcctggtgaacaaggtcttcctggcctggaaggcagagagggggccaagggggaactgggaccaccaggaccccttgggaaagaagggccagctggactcaggggctttcccggccccaaagggggccctggggacccgggacctactggcttaaagggtgataagggccccccagggcctgtgggggccaatggctcccctggtgagcgcggtcctttgggcccagcaggaggcattggacttcctggccaaagtggcagcgaaggccccgttggccctgcaggcaagaaggggtcccggggagaacgtggcccccctggccccactggcaaagatgggatcccagggcccctggggcctctgggaccccctggagctgctgggccttctggcgaggaaggggacaagggggatgtgggtgcccccggacacaaggggagtaaaggcgataaaggagacgcgggcccacctggacaaccagggatacggggtcctgcaggacacccaggtcccccgggagcagacggggctcaggggcgccggggacccccaggcctctttgggcagaaaggagatgacggagtcagaggctttgtgggggtgattggccctcctggactgcaggggctgccaggccctccgggagagaaaggggaggtcggagacgtcgggtccatgggtccccatggagctccaggtcctcggggtccccaaggccccactggatcagagggcactccagggctgcctggaggagttggtcagccaggcgccgtgggtgagaagggtgagcgaggggacgctggagacccagggcctccaggagccccaggcatcccggggcccaagggagacattggtgaaaagggggactcaggcccatctggagctgctggacccccaggcaagaaaggtccccctggagaggatggagccaaagggagcgtgggccccacggggctgcccggagatctagggcccccaggagaccctggagtttcaggcatagatggttccccaggggagaagggagaccctggtgatgttgggggaccgggtccgcctggagcttctggggagcccggcgcccccgggccccccggcaagaggggtccttcaggccacatgggtcgagaaggcagagaaggggagaaaggtgccaagggggagccaggtcctgatgggcccccagggaggacgggtccaatgggggctagagggccccctggacgtgtggggcctgagggtcttcgagggatccctggccctgtgggtgaaccaggcctcctgggagcccctggacagatgggccctcctggccccctggggccctctggcctcccagggctgaagggagacactggccccaagggggaaaagggccacattggattgatcggtctcattggccccccgggagaagctggtgagaaaggagatcaggggttgccaggcgtgcagggaccccctggtcccaagggagaccctggtccccctggtcccattggctctctgggccaccctgggcccccaggtgtggcgggccctctaggacagaaaggctcaaaagggtctccggggtccatgggcccccgtggagacactggacctgcaggcccaccaggccccccgggtgcccctgccgagctgcatgggctgcgcaggcgccggcgcttcgtcccagtcccgcttccagtcgtggagggcggcctggaggaggtgctggcctcgctcacatcgctgagcttggagctggagcagctgcggcgtcctcccggcactgcggagcgcccgggcctcgtgtgccacgagctgcaccgcaaccacccgcacctgcctgatggggaatactggattgaccccaaccagggctgcgcgcgggactcgttcagggttttttgcaacttcacggcgggaggagagacctgcctctatcccgacaagaagtttgagatcgtgaaattggcctcctggtccaaggaaaagcctggaggctggtatagcacattccgtcgagggaagaagttctcctacgtggacgccgacgggtccccagtgaatgtcgtgcagctgaacttcctgaaactgctgagtgccacagctcgccagaacttcacctactcctgccagaatgcagctgcctggctggacgaagccacgggtgactacagccactccgcccgcttccttggcaccaatggagaggagctgtctttcaaccagacgacagcaaccactgtcagcgtcccccaggatggctgccggctccggaaaggacagacgaagacccttttcgaattcagctcttctcgagcgggatttctgcccctgtgggatgtggcggccactgactttggccagacgaaccaaaagtttgggtttgaactgggccccgtctgcttcagcagctgagagtgtccggggtgggagggaccgtgagggagccccagaatggggtgcatttggtgctgaggctttgaagccaccgtatttttcgttacctgtgactatggagccaatgggatgtgacttcgctcatcacggtcagtcattccttctcctttccagggtgctgggggctggggttccctggcccaagggtccagcctcctctcaccccattccaggtggcatactgcagtctggctctttctcccctccctccccacccaagcctcacctccccaccccttgaacccccatgcaatgagcttctaactcagagctgatgaacaaaagcccccccacccccaatgcctgcctcctcactcctccgtcgctgcccttcacaccttttggtgctacccctccccagagttaagcactggatgtctcctgatcccaggctgggacccctacccccaccccctttgatcctttctacttccacggtgaaaggactgaggtcggactacagagggaagagggacttcccttgactgggttgtgtttcttttcctgcctcagcccagctctgcaaatcccctccccctgcccctcacctccccaggctcaccttgccatgccaggtggtttggggaccaagatgttgggggggtgaatcaggatcctaatggtgctgccctatttatacctgggtctgtattaaaagggaaagtcccccctgttgtagatttcatctgcttcctccttagggaaggctgggatatgatgagagattccagcccaagcccggccccccaccgccaggccatagggcataatttgcatctcaaatctgagaataaactgatgaactgtgaaaaaaaaaaaaaaaaaaaaaaaaaa

SEQ ID NO: 14467 - DNA, 3538 bp, Homo sapiens
gggccatctttgtgcggggccgcgcttccgccagcgccgcagcggggaatctgcagtaggtctgccggcgatggagtggtgggctagctcgccgcttcggctctggctgctgttgttcctcctgccctcagcgcagggccgccagaaggagtcaggttcaaaatggaaagtatttattgaccaaattaacaggtctttggagaattacgaaccatgttcaagtcaaaactgcagctgctaccatggtgtcatagaagaggatctaactcctttccgaggaggcatctccaggaagatgatggcagaggtagtcagacggaagctagggacccactatcagatcactaagaacagactgtaccgggaaaatgactgcatgttcccctcaaggtgtagtggtgttgagcactttattttggaagtgatcgggcgtctccctgacatggagatggtgatcaatgtacgagattatcctcaggttcctaaatggatggagcctgccatcccagtcttctccttcagtaagacatcagagtaccatgatatcatgtatcctgcttggacattttgggaagggggacctgctgtttggccaatttatcctacaggtcttggacggtgggacctcttcagagaagatctggtaaggtcagcagcacagtggccatggaaaaagaaaaactctacagcatatttccgaggatcaaggacaagtccagaacgagatcctctcattcttctgtctcggaaaaacccaaaacttgttgatgcagaatacaccaaaaaccaggcctggaaatctatgaaagataccttaggaaagccagctgctaaggatgtccatcttgtggatcactgcaaatacaagtatctgtttaattttcgaggcgtagctgcaagtttccggtttaaacacctcttcctgtgtggctcacttgttttccatgttggtgatgagtggctagaattcttctatccacagctgaagccatgggttcactatatcccagtcaaaacagatctctccaatgtccaagagctgttacaatttgtaaaagcaaatgatgatgtagctcaagagattgctgaaaggggaagccagtttattaggaaccatttgcagatggatgacatcacctgttactgggagaacctcttgagtgaatactctaaattcctgtcttataatgtaacgagaaggaaaggttatgatcaaattattcccaaaatgttgaaaactgaactatagtagtcatcataggaccatagtcctctttgtggcaacagatctcagatatcctacggtgagaagcttaccataagcttggcacctataccttgaatatctgctatcaagccaaatacctggttttccttatcatgctgcacccagagcaactcttgagaaagatttaaaatgtgtctaatacactgatatgaagcagttcaactttttggatgaataaggaccagaaatcgtgagatgtggattttgaacccaactctacctttcattttcttaagaccaatcacagcttgtgcctcagatcatccacctgtgtgagtccatcactgtgaaattgactgtgtccatgtgatgatgccctttgtcccattatttggagcagaaaattcgtcatttggaagtagtacaactcattgctggaattgtgaaattattcaaggcgtgatctctgtcactttattttaatgtaggaaaccctatggggtttatgaaaaatacttggggatcattctctgaatggtctaaggaagcggtagccatgccatgcaatgatgtaggagttctcttttgtaaaaccataaactgtgttactcaggaggtttctataatgccacatagaaagaggccaattgcatgagtaattattgcaattggatttcaggttccctttttgtgccttcatgccctacttcttaatgcctctctaaagccaaaaaaaaaaaaaaagacaaagcctcttaataaatttaatggaactatacatagaacagcagctcttcctcaccctttgcatacctttaatatttttccttcttaaattggccacagcaggggtcattcacactctcactgtcttgcaggaatcacaagaagtcttcatatgtgaacgtgccattcagttggtagttaagagcattcaacttcaaatatatagaagatatttgttttagtgcaaatccatgatggagtgcctcccttttccttttttcactttttgaaaaagatgttttgggtagtagtttaatatctcagggtgctctttctaacatagtaaaaaatgaagaaaaatgtttagattaaaactctgtagtctgatgacttagaaccatccttgacccttaggcccaacctttccacagagaaatcacctctcttcctttgtcttttaagaactatttggtattaactagtttcagaattagtaaatgtgagattcagtcacataattatcagacattccatttgtcagaaatgtatttggctttttaaactcctttccacaaaagtttaagtctaatgaccttcttagagaagttgagcatgcctggcaagatcatttcatggaataagcagatgtttaaagttggatttttttttttttttttttttgagtactagcaatgcacagggaccgtgttcttaggttcttagtctgtgaatctagcaataggcagtccagatttctgagtcgtactatggttttgccttgtcactgtgaggccctactaggtgtaagcattctctctgaattttaatttcctctcattaaaataggaacaaaatttgctatcctttagattaggagctgaagattcatttccctgggaatgtttcccatttagcttcaagtttcagctcaaacatcaccttctttctgactcctttcattcattcctccaggcagtaaggggctaccatagtactttgtttatgcctgtattatatgacatcactgtagttgcttgactgtttctcctactgttctgtaaacttattaatgggtgagaatctaattttactcatcttgatggcttcatgatccagcacagtgcctcacacaaagaactattgggtgggtggatggatggatggaggaatggagacagttggcttaaccagatcctatatacagattattactggctccaaaggatgagtagataagaccataagaattggatcaatgtaaatcctcacctgccctttgaagagccaataagggcatctttgtctttaaatacagcaaatgttattcagattttgtacttgtctatctgtttacctcagtgtagatgatatgaggatggtataactatgtaaattgtttttgaaaataatttgtttccccacaacttttgaaggttttatttgttgttgttattactagttcagtcccaaacttaccctttccttttcagagagctaatggccatgcttttcttcaaggaaagaataatttatttgaatgaagtgggatacttgcataacacaaaaaaaaaaaaaaaaaaaaaa

SEQ ID NO: 14468 - DNA, 1973 bp, Homo sapiens
ggggcatctttgtgcggggccgcgcttccgccagcgccgcagcggggaatctgcagtaggtctgccggcgatggagtggtgggctagctcgccgcttcggctctggctgctgttgttcctcctgccctcagcgcagggccgccagaaggagtcaggttcaaaatggaaagtatttattgaccaaattaacaggtctttggagaattacgaaccatgttcaagtcaaaactgcagctgctaccatggtgtcatagaagaggatctaactcctttccgaggaggcatctccaggaggatgatggcagaggtagtcagacggaagctagggacccactatcagatcactaagaacagactgtaccgggaaaatgactgcatgttcccctcaaggtgtagcggtgttgagcactttattttggaagtgatcgggcgtctccctgacatggagatggtgatcaatgtacgagattatcctcaggttcctaaatggatggagcctgccatcccagtcttctccttcagtaagacatcagagtaccatgatatcatgtatcctgcttggacattttgggaagggggacctgctgtttggccaatttatcctacaggtcttggacggtgggacctcttcagagaagatctggtaaggtcagcagcacagtggccatggaaaaagaaaaactctacagcatatttccgaggatcaaggacaagtccagaacgagatcctctcattcttctgtctcggaaaaacacaaaacttgttgatgcagaatacaccaaaaaccaggcctggaaatctatgaaagataccttaggaaagccagctgctaaggatgtccatcttgtggatcactgcaaatacaagtatctgtttaattttcgaggcgtagctgcaagtttccggtttaaacacctcttcctgtgtggctcacttgttttccatgttggtgatgagtggctagaattcttctatccacagctgaagccatgggttcactatatcccagtcaaaacagatctctccaatgtccaagagctgttacaatttgtaaaagcaaatgatgatgtagctcaagagattgctgaaaggggaagccagtttattaggaaccatttgcagatggatgacatcacctgttactgggagaacctcttgagtgaatactctaaattcctgtcttataatgtaacgagaaggaaaggttatgatcaaattattcccaaaatgttgaaaactgaactatagtagtcatcgtaggaccatagtcctctttgtggcaacagatctcagatatcctacggtgagaagcttaccataagcttggcacctataccttgaatatctgctatcaagccaaatacctggttttccttatcatgctgcacccagagcaactcttgagaaagatttaaaatgtgtctaatacactgatatgaagcagttcaactttttggatgaataaggaccagaaatcgtgagatgtggattttgaacccaactctacctttcattttcttaagaccaatcacagcttgtgcctcagatcatccacctgtgtgagtccatcactgtgaaattgactgtgtccatgtgatgatgccctttgtcccattatttggagcagaaaattcgtcatttggaagtagtacaactcattgctggaattgtgaaattattcaaggcgtgatctctgtcactttattttaatgtaggaaaccctatggggtttatgaaaaatacttggggatcattctctgaatggtctaaggaagcggtagccatgccatgcaatgatgtaggagttctcttttgtaaaaccataaactgtgttactcaggaggtttctataatgccacatagaaagaggccaattgcatgagtaattattgcaattggatttcaggttccctttttgtgccttcatgccctacttcttaatgcctctctaaagccaaaaaaaaaaaaaaaa

SEQ ID NO: 14469 - DNA, 1592 bp, Homo sapiens
tacggctgcgagaagacgacagaaggggattaagagggagggcggggacaactgggtcttttgcggctgcagcgggcttgtaggtgtccggctttgctggcccagcaagcctgataagcatgaagctcttatctttggtggctgtggtcgggtgtttgctggtgcccccagctgaagccaacaagagttctgaagatatccggtgcaaatgcatctgtccaccttatagaaacatcagtgggcacatttacaaccagaatgtatcccagaaggactgcaactgcctgcacgtggtggagcccatgccagtgcctggccatgacgtggaggcctactgcctgctgtgcgagtgcaggtacgaggagcgcagcaccaccaccatcaaggtcatcattgtcatctacctgtccgtggtgggtgccctgttgctctacatggccttcctgatgctggtggaccctctgatccgaaagccggatgcatatactgagcaactgcacaatgaggaggagaatgaggatgctcgctctatggcagcagctgctgcatccctcgggggaccccgagcaaacacagtcctggagcgtgtggaaggtgcccagcagcggtggaagctgcaggtgcaggagcagcggaagacagtcttcgatcggcacaagatgctcagctagatgggctggtgtggttgggtcaaggccccaacaccatggctgccagcttccaggctggacaaagcagggggctacttctcccttccctcggttccagtcttccctttaaaagcctgtggcatttttcctccttctccctaactttagaaatgttgtacttggctattttgattagggaagagggatgtggtctctgatctccgttgtcttcttgggtctttggggttgaagggagggggaaggcaggccagaagggaatggagacattcgaggcggcctcaggagtggatgcgatctgtctctcctggctccactcttgccgccttccagctctgagtcttgggaatgttgttacccttggaagataaagctgggtcttcaggaactcagtgtctgggaggaaagcatggcccagcattcagcatgtgttcctttctgcagtggttctttatcaccacctccctcccagccccagcgcctcagccccagccccagctccagccctgaggacagctctgatgggagagctgggccccctgagcccactgggtcttcagggtgcactggaagctggtgttcgctgtcccctgtgcacttctcgcactggggcatggagtgcccatgcatactctgctgccggtcccctcacctgcacttgaggggtctgggcagtccctcctctccccagtgtccacagtcactgagccagacggtcggttggaacatgagactcgaggctgagcgtggatctgaacaccacagcccctgtacttgggttgcctcttgtccctgaacttcgttgtaccagtgcatggagagaaaattttgtcctcttgtcttagagttgtgtgtaaatcaaggaagccatcattaaattgttttatttctctcaaaaaaaaaaaaaaaaaaaaaaaaaaaaaa

SEQ ID NO: 14470 - DNA, 3010 bp, Homo sapiens
cgggaggaggcgcgggcgcgccgggagggaccggcggcggcatgggccgggggccctgggatgcgggcccgtctcgccgcctgctgccgctgttgctgctgctcggcctggcccgcggcgccgcgggagcgccgggccccgacggtttagacgtctgtgccacttgccatgaacatgccacatgccagcaaagagaagggaagaagatctgtatttgcaactatggatttgtagggaacgggaggactcagtgtgttgataaaaatgagtgccagtttggagccactcttgtctgtgggaaccacacatcttgccacaacacccccgggggcttctattgcatttgcctggaaggatatcgagccacaaacaacaacaagacattcattcccaacgatggcaccttttgtacagacatagatgagtgtgaagtttctggcctgtgcaggcatggagggcgatgcgtgaacactcatgggagctttgaatgctactgtatggatggatacttgccaaggaatggacctgaacctttccacccgaccaccgatgccacatcatgcacagaaatagactgtggtacccctcctgaggttccagatggctatatcataggaaattatacgtctagtctgggcagccaggttcgttatgcttgcagagaaggattcttcagtgttccagaagatacagtttcaagctgcacaggcctgggcacatgggagtccccaaaattacattgccaagagatcaactgtggcaaccctccagaaatgcggcacgccatcttggtaggaaatcacagctccaggctgggcggtgtggctcgctatgtctgtcaagagggctttgagagccctggaggaaagatcacttctgtttgcacagagaaaggcacctggagagaaagtactttaacatgcacagaaattctgacaaagattaatgatgtatcactgtttaatgatacctgtgtgagatggcaaataaactcaagaagaataaaccccaagatctcatatgtgatatccataaaaggacaacggttggaccctatggaatcagttcgtgaggagacagtcaacttgaccacagacagcaggaccccagaagtgtgcctagccctgtacccaggcaccaactacaccgtgaacatctccacagcacctcccaggcgctcgatgccagccgtcatcggtttccagacagctgaagttgatctcttagaagatgatggaagtttcaatatttcaatatttaatgaaacttgtttgaaattgaacaggcgttctaggaaagttggatcagaacacatgtaccaatttaccgttctgggtcagaggtggtatctggctaacttttctcatgcaacatcgtttaacttcacaacgagggaacaagtgcctgtagtgtgtttggatctgtaccctacgactgattatacggtgaatgtgaccctgctgagatctcctaagcggcactcagtgcaaataacaatagcaactcccccagcagtaaaacagaccatcagtaacatttcaggatttaatgaaacctgcttgagatggagaagcatcaagacagctgatatggaggagatgtatttattccacatttggggccagagatggtatcagaaggaatttgcccaggaaatgacctttaatatcagtagcagcagccgagatcccgaggtgtgcttggacctacgtccgggtaccaactacaatgtcagtctccgggctctgtcttcggaacttcctgtggtcatctccctgacaacccagataacagagcctcccctcccggaagtagaattttttacggtgcacagaggacctctaccacgcctcagactgaggaaagccaaggagaaaaatggaccaatcagttcatatcaggtgttagtgcttcccctggccctccaaagcacattttcttgtgattctgaaggcgcttcctccttctttagcaacgcctctgatgctgatggatacgtggctgcagaactactggccaaagatgttccagatgatgccatggagatacctataggagacaggctgtactatggggaatattataatgcacccttgaaaagagggagtgattactgcattatattacgaatcacaagtgaatggaataaggtgagaagacactcctgtgcagtttgggctcaggtgaaagattcgtcactcatgctgctgcagatggcgggtgttggactgggttccctggctgttgtgatcattctcacattcctctccttctcagcggtgtgatggcagatggacactgagtggggaggatgcactgctgctgggcaggtgttctggcagcttctcaggtgcccgcacagaggctccgtgtgacttccgtccagggagcatgtgggcctgcaactttctccattcccagctgggccccattcctggatttaagatggtggctatccctgaggagtcaccataaggagaaaactcaggaattctgagtcttccctgctacaggaccagttctgtgcaatgaacttgagactcctgatgtacactgtgatattgaccgaaggctacatacagatctgtgaatcttggctgggacttcctctgagtgatgcctgagggtcagctcctctagacattgactgcaagagaatctctgcaacctcctatataaaagcatttctgttaattcattcagaatccattctttacaatatgcagtgagatgggcttaagtttgggctagagtttgactttatgaaggaggtcattgaaaaagagaacagtgacgtaggcaaatgtttcaagcactttagaaacagtacttttcctataattagttgatatactaatgagaaaatatactagcctggccatgccaataagtttcctgctgtgtctgttaggcagcattgctttgatgcaatttctattgtcctatatattcaaaagtaatgtctacattccagtaaaaatatcccgtaattaagaaaaaaaaaaaaaaa

SEQ ID NO: 14471 - DNA, 3098 bp, Homo sapiens
ccagtactgaactaggggcagctgggctccagagtccctcggtctcaggtcatggcggtcgcggggcccgcgcccggagctggcgccaggcccaggttagatctgcaatttctccagcggttcctgcagatactgaaggttttgtttccttcttggtcatcacaaaatgccttgatgttcctgacccttttgtgcctgaccctactggagcaatttgtgatctaccaggttggcttgatccccagtcagtactatggggtcctgggaaacaaagacttggaagggtttaagactctgacattcctggctgtcatgctcattgttctgaactccacgctgaagagctttgatcagttcacctgcaacctgctgtatgtgagctggaggaaggacctcactgagcaccttcaccgcctctacttccggggccgtgcgtactacaccctcaacgtgctgcgggatgacatcgataacccggaccagcgcatcagccaggacgtggagcgattctgccggcagctcagcagcatggccagcaagctcatcatctccccgttcaccctcgtctactacacttaccagtgcttccaaagcacaggctggctcgggcctgtgagcatcttcgggtatttcatcctggggaccgtggtgaacaaaactttgatgggccccattgtgatgaagctggtgcatcaggagaagctggagggagattttaggttcaagcacatgcagattcgggtgaatgcggagcctgctgctttctacagagctgggcatgtggagcacatgaggacagaccgcaggctgcagagactccttcagacccagagggagctgatgtccaaggagctctggctgtacatcggcatcaacacctttgactatctgggcagcatcctgagttatgttgtcatcgcaatccccattttcagcggggtctatggagacctgagtcccgcagagcttagcaccctggtcagcaagaatgcctttgtgtgcatctacctcatcagctgcttcacccagctcatcgacctgtccacgacgctctcagatgtggctggctacacgcacagaattgggcagcttcgggagacgcttctggacatgtccctgaagtcacaggactgcgagatcctgggcgagagcgagtggggcttggacacacccccagggtggccagcggcagagccagcagacacagcatttctccttgagcgggtctccatctctgccccctcctctgacaaacccctaatcaaggatctgagcctaaagatctccgagggacagagcctgctcatcacaggcaacacgggcactggcaagacctccttgctccgggttctaggtggcctctggacgagtacacggggctcagtgcagatgctgacggactttgggccccatggggtgctattcctgccacaaaagccattcttcactgacgggacccttcgggagcaggtgatatatcccctgaaggaggtctaccccgactcaggttctgccgatgatgagaggatcttgaggttcttggaattggcaggcctgtccaacttggtggcaaggacagagggtctggaccagcaggtggactggaactggtatgatgttctgtccccgggggagatgcaacggctctcctttgcccgactcttctacctgcagccgaagtacgcagtgcttgatgaagccaccagtgccctgacagaggaagtggagagcgagctctatcgcatcggccagcagctggggatgacgttcatcagtgtgggacatcggcagagccttgagaaggtacccgtgctcacaaggatggcctgaggaggagaaagaacccaaaggctcagcctggccagggccagaggcccctcaaaacggggagtagcagtagcagagagaaccgagtggcctcctctgccggcggccagggcagcctgatctccatgtggtggtggtctcttgtagtttcattccttggttctgaaactctgtggaggaggaagatgggagctgatgagaatcaaagtggaatgaagctctggcttttggaaggagaaccacactgtggcgggtcggcggccctcaagagacaccaggaggactgacagcgaagatcgagctcaggttcgccacatagatcccgtgcaggagccgcatgggtcctgtgcaggacccctagcagtggtgggctgagcccaggtctaggtttctgtgggggacattgaatctcccagtgttcagtctcccaggactctgctgcctcagccagagcctccatatgcttgaagtgctgattacctacaaatgatttcagatcatgtttgctaaagagaaatctggaagtgtgagatctgtaagaaatgaaagaaatgactcttggagtcaagagatctggaaatcttttaatcagttaaattgtgcagcaatagatttttaactttaactgaccatttaagttttttaataagttttttacaaagaaaagttaaacattaaaaagaattacagctttctgtcttctctatcatggaatgattttttttattgaatctccagatttgtatttgacagcttggtgggaagggaagcacactctgctgttctggaatcttatgcccagggtttttcacttctccccacatctccctttccacttgccagtgttgtgtagttagaacctgaaccactaacttctaggggcctttggtctgccctaccttaacccaaatgaaagtaaatccctttccccttagccaaaataaggttgggttttctaaaaaaatagtctatattagggaacaacaacagcaaattagacaaaacccagaaagcacaaagcatgaggtggagttactgtgcccaaagtcctcactcagaccagtgcccctccagttcagttgtctatgtattaccttccttaccttcataatgtttgccaggcttctgtacttctagtacttgagttacttaatatttttaaaaacaaaccttttaagtttaaatggatttttaagtgaaattttacacttaacatagatggaaagtaactaaaaataaatacaagaaaaacaaaaaaaaaaaaaaaaaaa

SEQ ID NO: 14472 - DNA, 3435 bp, Homo sapiens
ccagtactgaactaggggcagctgggctccagagtccctcgggtctcaggtcatggcggtcgcggggcccgcgcccggagctggcgccaggcccaggttagatctgcaatttctccagcggttcctgcagatactgaaggttttgtttccttcttggtcatcacaaaatgccttgatgttcctgacccttttgtgcctgaccctactggagcaatttgtgatctaccaggttggcttgatccccagtcagtactatggggtcctgggaaacaaagacttggaagggtttaagactctgacattcctggctgtcatgctcattgttctgaactccacgctgaagagctttgatcagttcacctgcaacctgctgtatgtgagctggaggaaggacctcactgagcaccttcaccgcctctacttccggggccgtgcgtactacaccctcaacgtgctgcgggatgacatcgataacccggaccagcgcatcagccaggacgtggagcgattctgccggcagctcagcagcatggccagcaagctcatcatctccccgttcaccctcgtctactacacttaccagtgcttccaaagcacaggctggctcgggcctgtgagcatcttcgggtatttcatcctggggaccgtggtgaacaaaactttgatgggccccattgtgatgaagctggtgcatcaggagaagctggagggagattttaggttcaagcacatgcagattcgggtgaatgcggagcctgctgctttctacagagctgggcatgtggagcacatgaggacagaccgcaggctgcagagactccttcagacccagagggagctgatgtccaaggagctctggctgtacatcggcatcaacacctttgactatctgggcagcatcctgagttacgttgtcatcgcaatccccattttcagcggggtctatggagacctgagtcccgcagagcttagcaccctggtcagcaagaatgcctttgtgtgcatctacctcatcagctgcttcacccagctcatcgacctgtccacgacgctctcagatgtggctggctacacgcacagaattgggcagcttcgggagacgcttctggacatgtccctgaagtcacaggactgcgagatcctgggcgagagcgagtggggcttggacacacccccagggtggccagcggcagagccagcagacacagcatttctccttgagcgggtctccatctctgccccctcctctgacaaacccctaatcaaggatctgagcctaaagatctccgagggacagagcctgctcatcacaggcaacacgggcactggcaagacctccttgctccgggttctgggtggcctctggacgagtacacggggctcagtgcagatgctgacggactttgggccccatggggtgctattcctgccacaaaagccattcttcactgacgggacccttcgggagcaggtcagtctagttcagggggctcactcctccctcctcaaccccgcccacccacagctgggacctctggcactgtgacaagtctcaggtcctagagtcagggcaaaaggtgaggtggtgaagtggcccgggcctgggaactgctggctctaagaaccttctattcacatccatggattgggcccactactcatagcagctcctgaggcaggtaaatggggcaaggactcacgccaaataccacacgcgtatgtcaaacacccaaggtcggattctggggcccctgccctcaggaggctgtcagactgttccccctaaacacacttctgaaggttgtagggaccttgccctgctgtctgccggccagagcctctcccatctgacccaggccaggcgttcccacctctcctccttgggaggttccagtgggttctggagggagggtgggctgtgtgcagctccgtcttttgctcgccctcctaggttggtgtggtttttttcttttctcaggtgatatatcccctgaaggaggtctaccccgactcaggttctgccgatgatgagaggatcttgaggttcttggaattggcaggcctgtccaacttggtggcaaggacagagggcctggaccagcaggtggactggaactggtatgatgttctgtccccgggggagatgcaacggctctcctttgcccgactcttctacctgcagccgaagtacgcagtgcttgatgaagccaccagtgccctgacagaggaagtggagagcgagctctatcgcatcggccagcagctggggatgacgttcatcagtgtgggacatcggcagagccttgagaagtttcattccttggttctgaaactctgtggaggaggaagatgggagctgatgagaatcaaagtggaatgaagctctggcttttggaaggagagccacactgtggcgggtcggcggccctcaggagagaccaggaggactgacagcgaagatcgagctcaggttcgccacatagatcccgtgcaggagccacatgggtcctgtgcaggacccctagcagtggtgggctgagcccaggtctaggtttctgtgggggacactgaatctcccagtgttcagtctcccaggactctgctgcctcagccagagcctccatatgcttgaagtgctgattacctacaaatgatttcagatcatgtttgctaaagagaaatctggaagtgtgagatctgtaagaaatgaaagaaatgactcttggagtcaagagatctggaaatcttttaatcagttaaattgtgcagcaatagatttttaactttaactgaccatttaagttttttaataagttttttacaaagaaaagttaaacattaaaaagaattacagctttctgtcttctctatcatggaatgatcttttttattgaatctccagatttgtatttgacagcttggtgggaagggaagcacactctgctgttctggaatcttatgcccagggtttttcacttctccccacatctccctttccacttgccagtgttgtgtagttagaacctgaaccactaacttccaggggcctttggtctgccctaccttaacccaaatgaaagtaaatccctttccccttagccaaaataaggttgggttttctaaaaaaatagtctatattagggaacaacaacagcaaattagacaaaacccagaaagcacaaagcatgaggtggagttactgtgcccaaagtcctcactcagaccagtgcccctccagttcagttgtctatgtattaccttccttaccttcataatttttgccaggcttctgtacttctagtacttgagttacttaatatttttaaaaacaaaccttttaagtttaaatggatttttaagtgaaattttacacttaacatagatggaaagtaactaaaaataaatacaagaaaaacaaaaaaaaaaaaaaaaaaa

SEQ ID NO: 14473 - DNA, 2927 bp, Homo sapiens
ccagtactgaactaggggcagctgggctccagagtccctcggtctcaggtcatggcggtcgcggggcccgcgcccggagctggcgccaggcccaggttagatctgcaatttctccagcggttcctgcagatactgaaggttttgtttccttcttggtcatcacaaaatgccttgatgttcctgacccttttgtgcctgaccctactggagcaatttgtgatctaccaggttggcttgatccccagtcagtactatggggtcctgggaaacaaagacttggaagggtttaagactctgacattcctggctgtcatgctcattgttctgaactccacgctgaagagctttgatcagttcacctgcaacctgctgtatgtgagctggaggaaggacctcactgagcaccttcaccgcctctacttccggggccgtgcgtactacaccctcaacgtgctgcgggatgacatcgataacccggaccagcgcatcagccaggacgtggagcgattctgccggcagctcagcagcatggccagcaagctcatcatctccccgttcaccctcgtctactacacttaccagtgcttccaaagcacaggctggctcgggcctgtgagcatcttcgggtatttcatcctggggaccgtggtgaacaaaactttgatgggccccattgtgatgaagctggtgcatcaggagaagctggagggagattttaggttcaagcacatgcagattcgggtgaatgcggagcctgctgctttctacagagctgggcatgtggagcacatgaggacagaccgcaggctgcagagactccttcagacccagagggagctgatgtccaaggagctctggctgtacatcggcatcaacacctttgactatctgggcagcatcctgagttatgttgtcatcgcaatccccattttcagcggggtctatggagacctgagtcccgcagagcttagcaccctggtcagcaagaatgcctttgtgtgcatctacctcatcagctgcttcacccagctcatcgacctgtccacgacgctctcagatgtggctggctacacgcacagaattgggcagcttcgggagacgcttctggacatgtccctgaagtcacaggactgcgagatcctgggcgagagcgagtggggcttggacacacccccagggtggccagcggcagagccagcagacacagcatttctccttgagcgggtctccatctctgccccctcctctgacaaacccctaatcaaggatctgagcctaaagatctccgagggacagagcctgctcatcacaggcaacacgggcactggcaagacctccttgctccgggttctaggtggcctctggacgagtacacggggctcagtgcagatgctgacggactttgggccccatggggtgctattcctgccacaaaagccattcttcactgacgggacccttcgggagcaggtgatatatcccctgaaggaggtctaccccgactcaggttctgccgatgatgagaggatcttgaggttcttggaattggcaggcctgtccaacttggtggcaaggacagagggtctggaccagcaggtggactggaactggtatgatgttctgtccccgggggagatgcaacggctctcctttgcccgactcttctacctgcagccgaagtacgcagtgcttgatgaagccaccagtgccctgacagaggaagtggagagcgagctctatcgcatcggccagcagctggggatgacgttcatcagtgtgggacatcggcagagccttgagaagtttcattccttggttctgaaactctgtggaggaggaagatgggagctgatgagaatcaaagtggaatgaagctctggcttttggaaggagaaccacactgtggcgggtcggcggccctcaagagacaccaggaggactgacagcgaagatcgagctcaggttcgccacatagatcccgtgcaggagccgcatgggtcctgtgcaggacccctagcagtggtgggctgagcccaggtctaggtttctgtgggggacattgaatctcccagtgttcagtctcccaggactctgctgcctcagccagagcctccatatgcttgaagtgctgattacctacaaatgatttcagatcatgtttgctaaagagaaatctggaagtgtgagatctgtaagaaatgaaagaaatgactcttggagtcaagagatctggaaatcttttaatcagttaaattgtgcagcaatagatttttaactttaactgaccatttaagttttttaataagttttttacaaagaaaagttaaacattaaaaagaattacagctttctgtcttctctatcatggaatgattttttttattgaatctccagatttgtatttgacagcttggtgggaagggaagcacactctgctgttctggaatcttatgcccagggtttttcacttctccccacatctccctttccacttgccagtgttgtgtagttagaacctgaaccactaacttctaggggcctttggtctgccctaccttaacccaaatgaaagtaaatccctttccccttagccaaaataaggttgggttttctaaaaaaatagtctatattagggaacaacaacagcaaattagacaaaacccagaaagcacaaagcatgaggtggagttactgtgcccaaagtcctcactcagaccagtgcccctccagttcagttgtctatgtattaccttccttaccttcataatgtttgccaggcttctgtacttctagtacttgagttacttaatatttttaaaaacaaaccttttaagtttaaatggatttttaagtgaaattttacacttaacatagatggaaagtaactaaaaataaatacaagaaaaacaaaaaaaaaaaaaaaaaaa

SEQ ID NO: 14474 - DNA, 2521 bp, Homo sapiens
catggggcccagggcaaagaccatctgctccctgttcttcctcctatgggtcctggctgagccggctgagaactcggacttctacctgcctggggattacctcctgggtggcctcttctccctccatgccaacatgaagggcattgttcaccttaacttcctgcaggtgcccatgtgcaaggagtatgaagtgaaggtgataggctacaacctcatgcaggccatgcgcttcgcggtggaggagatcaacaatgacagcagcctgctgcctggtgtgctgctgggctatgagatcgtggatgtgtgctacatctccaacaatgtccagccggtgctctacttcctggcacacgaggacaacctccttcccatccaagaggactacagtaactacatttcccgtgtggtggctgtcattggccctgacaactccgagtctgtcatgactgtggccaacttcctctccctatttctccttccacagatcacctacagcgccatcagcgatgagctgcgagacaaggtgcgcttcccggctttgctgcgtaccacacccagcgccgaccaccacgtcgaggccatggtgcagctgatgctgcacttccgctggaactggatcattgtgctggtgagcagcgacacctatggccgcgacaatggccagctgcttggcgagcgcgtggcccggcgcgacatctgcatcgccttccaggagacgctgcccacactgcagcccaaccagaacatgacgtcagaggagcgccagcgcctggtgaccattgtggacaagctgcagcagagcacagcgcgcgtcgtggtcgtgttctcgcccgacctgaccctgtaccacttcttcaatgaggtgctgcgccagaacttcacgggcgccgtgtggatcgcctccgagtcctgggccatcgacccggtcctgcacaacctcacggagctgggccacttgggcaccttcctgggcatcaccatccagagcgtgcccatcccgggcttcagtgagttccgcgagtggggcccacaggctgggccgccacccctcagcaggaccagccagagctatacctgcaaccaggagtgcgacaactgcctgaacgccaccttgtccttcaacaccattctcaggctctctggggagcgtgtcgtctacagcgtgtactctgcggtctatgctgtggcccatgccctgcacagcctcctcggctgtgacaaaagcacctgcaccaagagggtggtctacccctggcagctgcttgaggagatctggaaggtcaacttcactctcctggaccaccaaatcttcttcgacccgcaaggggacgtggctctgcacttggagattgtccagtggcaatgggaccggagccagaatcccttccagagcgtcgcctcctactaccccctgcagcgacagctgaagaacatccaagacatctcctggcacaccgtcaacaacacgatccctatgtccatgtgttccaagaggtgccagtcagggcaaaagaagaagcctgtgggcatccacgtctgctgcttcgagtgcatcgactgccttcccggcaccttcctcaaccacactgaagatgaatatgaatgccaggcctgcccgaataacgagtggtcctaccagagtgagacctcctgcttcaagcggcagctggtcttcctggaatggcatgaggcacccaccatcgctgtggccctgctggccgccctgggcttcctcagcaccctggccatcctggtgatattctggaggcacttccagacacccatagttcgctcggctgggggccccatgtgcttcctgatgctgacactgctgctggtggcatacatggtggtcccggtgtacgtggggccgcccaaggtctccacctgcctctgccgccaggccctctttcccctctgcttcacaatttgcatctcctgtatcgccgtgcgttctttccagatcgtctgcgccttcaagatggccagccgcttcccacgcgcctacagctactgggtccgctaccaggggccctacgtctctatggcatttatcacggtactcaaaatggtcattgtggtaattggcatgctggccacgggcctcagtcccaccacccgtactgaccccgatgaccccaagatcacaattgtctcctgtaaccccaactaccgcaacagcctgctgttcaacaccagcctggacctgctgctctcagtggtgggtttcagcttcgcctacatgggcaaagagctgcccaccaactacaacgaggccaagttcatcaccctcagcatgaccttctatttcacctcatccgtctccctctgcaccttcatgtctgcctacagcggggtgctggtcaccatcgtggacctcttggtcactgtgctcaacctcctggccatcagcctgggctacttcggccccaagtgctacatgatcctcttctacccggagcgcaacacgcccgcctacttcaacagcatgatccagggctacaccatgaggagggactag

SEQ ID NO: 14475 - DNA, 6704 bp, Homo sapiens
gtgggataaaggaatgaggttcagaaaggggcagggagttgcccgcagccgcaccgcacgtcttcagcccgaccgttgtcctgacctctctgtcccgtcccctgcccagtctcaccatggccttctggacacagctgatgctgctgctctggaagaatttcatgtatcgccggagacagccggtccagctcctggtcgaattgctgtggcctctcttcctcttcttcatcctggtggctgttcgccactcccacccgcccctggagcaccatgaatgccacttcccaaacaagccactgccatcggcgggcaccgtgccctggctccagggtctcatctgtaatgtgaacaacacctgctttccgcagctgacaccgggcgaggagcccgggcgcctgagcaacttcaacgactccctggtctcccggctgctagccgatgcccgcactgtgctgggaggggccagtgcccacaggacgctggctggcctagggaagctgatcgccacgctgagggctgcacgcagcacggcccagcctcaaccaaccaagcagtctccactggaaccacccatgctggatgtcgcggagctgctgacgtcactgctgcgcacggaatccctggggttggcactgggccaagcccaggagcccttgcacagcttgttggaggccgctgaggacctggcccaggagctcctggcgctgcgcagcctggtggagcttcgggcactgctgcagagaccccgagggaccagcggccccctggagttgctgtcagaggccctctgcagtgtcaggggacctagcagcacagtgggcccctccctcaactggtacgaggctagtgacctgatggagctggtggggcaggagccagaatccgccctgccagacagcagcctgagccccgcctgctcggagctgattggagccctggacagccacccgctgtcccgcctgctctggagacgcctgaagcctctgatcctcgggaagctactctttgcaccagatacaccttttacccggaagctcatggcccaggtcaaccggaccttcgaggagctcaccctgctgagggatgtccgggaggtgtgggagatgctgggaccccggatcttcaccttcatgaacgacagttccaatgtggccatgctgcagcggctcctgcagatgcaggatgaaggaagaaggcagcccagacctggaggccgggaccacatggaggccctgcgatcctttctggaccctgggagcggtggctacagctggcaggacgcacacgctgatgtggggcacctggtgggcacgctgggccgagtgacggagtgcctgtccttggacaagctggaggcggcaccctcagaggcagccctggtgtcgcgggccctgcaactgctcgcggaacatcgattctgggccggcgtcgtcttcttgggacctgaggactcttcagaccccacagagcacccaaccccagacctgggccccggccacgtgcgcatcaaaatccgcatggacattgacgtggtcacgaggaccaataagatcagggacaggttttgggaccctggcccagccgcggaccccctgaccgacctgcgctacgtgtggggcggcttcgtgtacctgcaagacctggtggagcgtgcagccgtccgcgtgctcagcggcgccaacccccgggccggcctctacctgcagcagatgccctatccgtgctatgtggacgacgtgttcctgcgtgtgctgagccggtcgctgccgctcttcctgacgctggcctggatctactccgtgacactgacagtgaaggccgtggtgcgggagaaggagacgcggctgcgggacaccatgcgcgccatggggctcagccgcgcggtgctctggctaggctggttcctcagctgcctcgggcccttcctgctcagcgccgcactgctggttctggtgctcaagctgggagacatcctcccctacagccacccgggcgtggtcttcctgttcttggcagccttcgcggtggccacggtgacccagagcttcctgctcagcgccttcttctcccgcgccaacctggctgcggcctgcggcggcctggcctacttctccctctacctgccctacgtgctgtgtgtggcttggcgggaccggctgcccgcgggtggccgcgtggccgcgagcctgctgtcgcccgtggccttcggcttcggctgcgagagcctggctctgctggaggagcagggcgagggcgcgcagtggcacaacgtgggcacccggcctacggcagacgtcttcagcctggcccaggtctctggccttctgctgctggacgcggcgctctacggcctcgccacctggtacctggaagctgtgtgcccaggccagtacgggatccctgaaccatggaattttccttttcggaggagctactggtgcggacctcggccccccaagagtccagccccttgccccaccccgctggacccaaaggtgctggtagaagaggcaccgcccggcctgagtcctggcgtctccgttcgcagcctggagaagcgctttcctggaagcccgcagccagccctgcgggggctcagcctggacttctaccagggccacatcaccgccttcctgggccacaacggggccggcaagaccaccaccctgtccatcttgagtggcctcttcccacccagtggtggctctgccttcatcctgggccacgacgtccgctccagcatggccgccatccggccccacctgggcgtctgtcctcagtacaacgtgctgtttgacatgctgaccgtggacgagcacgtctggttctatgggcggctgaagggtctgagtgccgctgtagtgggccccgagcaggaccgtctgctgcaggatgtggggctggtctccaagcagagtgtgcagactcgccacctctctggtgggatgcaacggaagctgtccgtggccattgcctttgtgggcggctcccaagttgttatcctggacgagcctacggctggcgtggatcctgcttcccgccgcggtatttgggagctgctgctcaaataccgagaaggtcgcacgctgatcctctccacccaccacctggatgaggcagagctgctgggagaccgtgtggctgtggtggcaggtggccgcttgtgctgctgtggctccccactcttcctgcgccgtcacctgggctccggctactacctgacgctggtgaaggcccgcctgcccctgaccaccaatgagaaggctgacactgacatggagggcagtgtggacaccaggcaggaaaagaagaatggcagccagggcagcagagtcggcactcctcagctgctggccctggtacagcactgggtgcccggggcacggctggtggaggagctgccacacgagctggtgctggtgctgccctacacgggtgcccatgacggcagcttcgccacactcttccgagagctagacacgcggctggcggagctgaggctcactggctacgggatctccgacaccagcctcgaggagatcttcctgaaggtggtggaggagtgtgctgcggacacagatatggaggatggcagctgcgggcagcacctatgcacaggcattgctggcctagacgtaaccctgcggctcaagatgccgccacaggagacagcgctggagaacggggaaccagctgggtcagccccagagactgaccagggctctgggccagacgccgtgggccgggtacagggctgggcactgacccgccagcagctccaggccctgcttctcaagcgctttctgcttgcccgccgcagccgccgcggcctgttcgcccagatcgtgctgcctgccctctttgtgggcctggccctcgtgttcagcctcatcgtgcctcctttcgggcactacccggctctgcggctcagtcccaccatgtacggtgctcaggtgtccttcttcagtgaggacgccccaggggaccctggacgtgcccggctgctcgaggcgctgctgcaggaggcaggactggaggagcccccagtgcagcatagctcccacaggttctcggcaccagaagttcctgctgaagtggccaaggtcttggccagtggcaactggaccccagagtctccatccccagcctgccagtgtagccagcccggtgcccggcgcctgctgcccgactgcccggctgcagctggtggtccccctccgccccaggcagtgaccggctctggggaagtggttcagaacctgacaggccggaacctgtctgacttcctggtcaagacctacccgcgcctggtgcgccagggcctgaagactaagaagtgggtgaatgaggtcaggtacggaggcttctcgctggggggccgagacccaggcctgccctcgggccaagagttgggccgctcagtggaggagttgtgggcgctgctgagtcccctgcctggcggggccctcgaccgtgtcctgaaaaacctcacagcctgggctcacagcctggacgctcaggacagtctcaagatctggttcaacaacaaaggctggcactccatggtggcctttgtcaaccgagccagcaacgcaatcctccgtgctcacctgcccccaggccgggcccgccacgcccacagcatcaccacactcaaccaccccttgaacctcaccaaggagcagctgtttgaggctgcattgatggcctcctcggtggacgtcctcgtctccatctgtgtggtctttgccatgtcctttgtcccggccagcttcactcttgtcctcattgaggagcgagtcacccgagccaagcacctgcagctcatggggggcctgtcccccaccctctactggcttggcaactttctctgggacatgtgtaactacttggtgccagcatgcatcgtggtgctcatctttctggccttccagcagagggcatatgtggcccctgccaacctgcctgctctcctgctgttgctactactgtatggctggtcgatcacaccgctcatgtacccagcctccttcttcttctccgtgcccagcacagcctatgtggtgctcacctgcataaacctctttattggcatcaatggaagcatggccacctttgtgcttgagctcttctctgatcagaagctgcaggaggtgagccggatcttgaaacaggtcttccttatcttcccccacttctgcttgggccgggggcttattgacatggtgcggaaccaggccatggctgatgcctttgagcgcttgggagacaggcagttccagtcacccctgcgctgggaggtggtcggcaagaacctcttggccatggtgatacaggggcccctcttccttctcttcacactactgctgcagcaccgaagccaactcctgccacagcccagggtgaggtctctgccactcctgggagaggaggacgaggatgtagcccgtgaacgggagcgggtggtccaaggagccacccagggggatgtgttggtgctgaggaacttgaccaaggtataccgtgggcagaggatgccagctgttgaccgcttgtgcctggggattccccctggtgagtgttttgggctgctgggtgtgaatggagcagggaagacgtccacgtttcgcatggtgacgggggacacattggccagcaggggcgaggctgtgctggcaggccacagcgtggcccgggaacccagtgctgcgcacctcagcatgggatactgccctcaatccgatgccatctttgagctgctgacgggccgcgagcacctggagctgcttgcgcgcctgcgcggtgtcccggaggcccaggttgcccagaccgctggctcgggcctggcgcgtctgggactctcatggtacgcagaccggcctgcaggcacctacagcggagggaacaaacgcaagctggcgacggccctggcgctggttggggacccagccgtggtgtttctggacgagccgaccacaggcatggaccccagcgcgcggcgcttcctttggaacagccttttggccgtggtgcgggagggccgttcagtgatgctcacctcccatagcatggaggagtgtgaagcgctctgctcgcgcctagccatcatggtgaatgggcggttccgctgcctgggcagcccgcaacatctcaagggcagattcgcggcgggtcacacactgaccctgcgggtgcccgccgcaaggtcccagccggcagcggccttcgtggcggccgagttccctgggtcggagctgcgcgaggcacatggaggccgcctgcgcttccagctgccgccgggagggcgctgcgccctggcgcgcgtctttggagagctggcggtgcacggcgcagagcacggcgtggaggacttttccgtgagccagacgatgctggaggaggtattcttgtacttctccaaggaccaggggaaggacgaggacaccgaagagcagaaggaggcaggagtgggagtggaccccgcgccaggcctgcagcaccccaaacgcgtcagccagttcctcgatgaccctagcactgccgagactgtgctctgagcctccctcccctgcggggccgcggggaggccctgggaatggcaagggcaaggtagagtgcctaggagccctggactcaggctggcagaggggctggtgccctggagaaaataaagagaaggctggagagaagccgtggtggtgaaa

SEQ ID NO: 14476 - DNA, 6174 bp, Homo sapiens
atggtctgcctgggaactggccagagcgctggacccctagtgagtgttcaaaatcattgtcccccttgtggtctttctccccaggaatccctggggttggcactgggccaagcccaggagcccttgcacagcttgttggaggccgctgaggacctggcccaggagctcctggcgctgcgcagcctggtggagcttcgggcactgctgcagagaccccgagggaccagcggccccctggagttgctgtcagaggccctctgcagtgtcaggggacctagcagcacagtgggcccctccctcaactggtacgaggctagtgacctgatggagctggtggggcaggagccagaatccgccctgccagacagcagcctgagccccgcctgctcggagctgattggagccctggacagccacccgctgtcccgcctgctctggagacgcctgaagcctctgatcctcgggaagctactctttgcaccagatacaccttttacccggaagctcatggcccaggtcaaccggaccttcgaggagctcaccctgctgagggatgtccgggaggtgtgggagatgctgggaccccggatcttcaccttcatgaacgacagttccaatgtggccatgctgcagcggctcctgcagatgcaggatgaaggaagaaggcagcccagacctggaggccgggaccacatggaggccctgcgatcctttctggaccctgggagcggtggctacagctggcaggacgcacacgctgatgtggggcacctggtgggcacgctgggccgagtgacggagtgcctgtccttggacaagctggaggcggcaccctcagaggcagccctggtgtcgcgggccctgcaactgctcgcggaacatcgattctgggccggcgtcgtcttcttgggacctgaggactcttcagaccccacagagcacccaaccccagacctgggccccggccacgtgcgcatcaaaatccgcatggacattgacgtggtcacgaggaccaataagatcagggacaggttttgggaccctggcccagccgcggaccccctgaccgacctgcgctacgtgtggggcggcttcgtgtacctgcaagacctggtggagcgtgcagccgtccgcgtgctcagcggcgccaacccccgggccggcctctacctgcagcagatgccctatccgtgctatgtggacgacgtgttcctgcgtgtgctgagccggtcgctgccgctcttcctgacgctggcctggatctactccgtgacactgacagtgaaggccgtggtgcgggagaaggagacgcggctgcgggacaccatgcgcgccatggggctcagccgcgcggtgctctggctaggctggttcctcagctgcctcgggcccttcctgctcagcgccgcactgctggttctggtgctcaagctgggagacatcctcccctacagccacccgggcgtggtcttcctgttcttggcagccttcgcggtggccacggtgacccagagcttcctgctcagcgccttcttctcccgcgccaacctggctgcggcctgcggcggcctggcctacttctccctctacctgccctacgtgctgtgtgtggcttggcgggaccggctgcccgcgggtggccgcgtggccgcgagcctgctgtcgcccgtggccttcggcttcggctgcgagagcctggctctgctggaggagcagggcgagggcgcgcagtggcacaacgtgggcacccggcctacggcagacgtcttcagcctggcccaggtctctggccttctgctgctggacgcggcgctctacggcctcgccacctggtacctggaagctgtgtgcccaggccagtacgggatccctgaaccatggaattttccttttcggaggagctactggtgcggacctcggccccccaagagtccagccccttgccccaccccgctggacccaaaggtgctggtagaagaggcaccgcccggcctgagtcctggcgtctccgttcgcagcctggagaagcgctttcctggaagcccgcagccagccctgcgggggctcagcctggacttctaccagggccacatcaccgccttcctgggccacaacggggccggcaagaccaccaccctgtccatcttgagtggcctcttcccacccagtggtggctctgccttcatcctgggccacgacgtccgctccagcatggccgccatccggccccacctgggcgtctgtcctcagtacaacgtgctgtttgacatgctgaccgtggacgagcacgtctggttctatgggcggctgaagggtctgagtgccgctgtagtgggccccgagcaggaccgtctgctgcaggatgtggggctggtctccaagcagagtgtgcagactcgccacctctctggtgggatgcaacggaagctgtccgtggccattgcctttgtgggcggctcccaagttgttatcctggacgagcctacggctggcgtggatcctgcttcccgccgcggtatttgggagctgctgctcaaataccgagaaggtcgcacgctgatcctctccacccaccacctggatgaggcagagctgctgggagaccgtgtggctgtggtggcaggtggccgcttgtgctgctgtggctccccactcttcctgcgccgtcacctgggctccggctactacctgacgctggtgaaggcccgcctgcccctgaccaccaatgagaaggctgacactgacatggagggcagtgtggacaccaggcaggaaaagaagaatggcagccagggcagcagagtcggcactcctcagctgctggccctggtacagcactgggtgcccggggcacggctggtggaggagctgccacacgagctggtgctggtgctgccctacacgggtgcccatgacggcagcttcgccacactcttccgagagctagacacgcggctggcggagctgaggctcactggctacgggatctccgacaccagcctcgaggagatcttcctgaaggtggtggaggagtgtgctgcggacacagatatggaggatggcagctgcgggcagcacctatgcacaggcattgctggcctagacgtaaccctgcggctcaagatgccgccacaggagacagcgctggagaacggggaaccagctgggtcagccccagagactgaccagggctctgggccagacgccgtgggccgggtacagggctgggcactgacccgccagcagctccaggccctgcttctcaagcgctttctgcttgcccgccgcagccgccgcggcctgttcgcccagatcgtgctgcctgccctctttgtgggcctggccctcgtgttcagcctcatcgtgcctcctttcgggcactacccggctctgcggctcagtcccaccatgtacggtgctcaggtgtccttcttcagtgaggacgccccaggggaccctggacgtgcccggctgctcgaggcgctgctgcaggaggcaggactggaggagcccccagtgcagcatagctcccacaggttctcggcaccagaagttcctgctgaagtggccaaggtcttggccagtggcaactggaccccagagtctccatccccagcctgccagtgtagccagcccggtgcccggcgcctgctgcccgactgcccggctgcagctggtggtccccctccgccccaggcagtgaccggctctggggaagtggttcagaacctgacaggccggaacctgtctgacttcctggtcaagacctacccgcgcctggtgcgccagggcctgaagactaagaagtgggtgaatgaggtcaggtacggaggcttctcgctggggggccgagacccaggcctgccctcgggccaagagttgggccgctcagtggaggagttgtgggcgctgctgagtcccctgcctggcggggccctcgaccgtgtcctgaaaaacctcacagcctgggctcacagcctggacgctcaggacagtctcaagatctggttcaacaacaaaggctggcactccatggtggcctttgtcaaccgagccagcaacgcaatcctccgtgctcacctgcccccaggccgggcccgccacgcccacagcatcaccacactcaaccaccccttgaacctcaccaaggagcagctgtttgaggctgcattgatggcctcctcggtggacgtcctcgtctccatctgtgtggtctttgccatgtcctttgtcccggccagcttcactcttgtcctcattgaggagcgagtcacccgagccaagcacctgcagctcatggggggcctgtcccccaccctctactggcttggcaactttctctgggacatgtgtaactacttggtgccagcatgcatcgtggtgctcatctttctggccttccagcagagggcatatgtggcccctgccaacctgcctgctctcctgctgttgctactactgtatggctggtcgatcacaccgctcatgtacccagcctccttcttcttctccgtgcccagcacagcctatgtggtgctcacctgcataaacctctttattggcatcaatggaagcatggccacctttgtgcttgagctcttctctgatcagaagctgcaggaggtgagccggatcttgaaacaggtcttccttatcttcccccacttctgcttgggccgggggcttattgacatggtgcggaaccaggccatggctgatgcctttgagcgcttgggagacaggcagttccagtcacccctgcgctgggaggtggtcggcaagaacctcttggccatggtgatacaggggcccctcttccttctcttcacactactgctgcagcaccgaagccaactcctgccacagcccagggtgaggtctctgccactcctgggagaggaggacgaggatgtagcccgtgaacgggagcgggtggtccaaggagccacccagggggatgtgttggtgctgaggaacttgaccaaggtataccgtgggcagaggatgccagctgttgaccgcttgtgcctggggattccccctggtgagtgttttgggctgctgggtgtgaatggagcagggaagacgtccacgtttcgcatggtgacgggggacacattggccagcaggggcgaggctgtgctggcaggccacagcgtggcccgggaacccagtgctgcgcacctcagcatgggatactgccctcaatccgatgccatctttgagctgctgacgggccgcgagcacctggagctgcttgcgcgcctgcgcggtgtcccggaggcccaggttgcccagaccgctggctcgggcctggcgcgtctgggactctcatggtacgcagaccggcctgcaggcacctacagcggagggaacaaacgcaagctggcgacggccctggcgctggttggggacccagccgtggtgtttctggacgagccgaccacaggcatggaccccagcgcgcggcgcttcctttggaacagccttttggccgtggtgcgggagggccgttcagtgatgctcacctcccatagcatggaggagtgtgaagcgctctgctcgcgcctagccatcatggtgaatgggcggttccgctgcctgggcagcccgcaacatctcaagggcagattcgcggcgggtcacacactgaccctgcgggtgcccgccgcaaggtcccagccggcagcggccttcgtggcggccgagttccctgggtcggagctgcgcgaggcacatggaggccgcctgcgcttccagctgccgccgggagggcgctgcgccctggcgcgcgtctttggagagctggcggtgcacggcgcagagcacggcgtggaggacttttccgtgagccagacgatgctggaggaggtattcttgtacttctccaaggaccaggggaaggacgaggacaccgaagagcagaaggaggcaggagtgggagtggaccccgcgccaggcctgcagcaccccaaacgcgtcagccagttcctcgatgaccctagcactgccgagactgtgctctgagcctccctcccctgcggggccgcggggaggccctgggaatggcaagggcaaggtagagtgcctaggagccctggactcaggctggcagaggggctggtgccctggagaaaataaagagaaggctggagagaagccgtggtggtgaaa

SEQ ID NO: 14477 - DNA, 1465 bp, Homo sapiens
cgcgctcgccggagagctgggtgctaccgctgtttccgctgctgagccctgcccgccggccggcccgctcgctagctcgcttcccctcgcccagggggaaaggtcagcagcgtcctggagccgccgtgtcactccccgaaagccatgaactgcagcgagagccagcggctgcgaacccttctgagccgcctgttgctcgagctgcaccaccggggtaatgccagcggcttgggcgctggccctcgtcccagcatgggcatgggggtcgtgcctgaccctttcgtgggccgcgaggtgaccagcgccaagggcgacgacgcctatctctacatcctgctcatcatgatcttctacgcctgcttggccggaggcctcatcctggcctacacccgctcccgtaagctcgtcgaggccaaggacgagccgtcccaggcttgcgccgagcacgaatgggccccgggaggcgccctgaccgccgacgccgaggctgccgcgggctcccaggccgagggccgccgccagcttgcctccgaggggctgcctgccctcgcccagggcgctgagcgggtctaaaaccacagccccagattgctggttcgcgccctcctcatctcgctcatccctgggcgcgcctcccaccttccacccccaactcccttccagggttcgcctcatctgaggcccagataatggtgagaggccaggagaccttgtctggaaggccctggaaggagaagcaccaccttacccattcgggccagtttctccctcttcacccctgcgcctccacccctaccccgcacatccaactgcactaaactgcctctgctctcttgtcttcagacagccctgacagcacgctccagccctctgggaactgaatccaacacgtccaacacttggcactgaactgaagcaatgcattctatcagaactctgggccgtctaactggcagctgctccaggggctgccagggactgctcactctgcagagccaacgggcttgccaggccgactgcagcagctccagcttccagttgccttagggacagagacaaaggaaatgaagagacctcagacatcttttccctccctctctctttcagcagggagctagcaggacactaggaccagtctgtgggatagaatgaacttaatgggggacggaagggggaggagtgctcaacggggagggaaatgatctatgactccaaccgtatgattttcttgcctccccagttttcatcccagtggtaacgcctgatttttggtagctatgccatcttctgctgaggattaccattactgggtgtatcaccccagtacttccaaatgcctctcctctattgattcagttgttattgcagtgtctgcttcatccgtggaacttgaggctcagatgccccctgctctgtaaccctggggaatgtcagaggcaggtaataaaggttgtttaaacaataa

SEQ ID NO: 14478 - DNA, 1612 bp, Homo sapiens
gcgtgctggcccggggtggcaggagccgcagaggcttgggctgcagaaaaaggatcctgtttgctgtgtaatcctgagaatggactgcaagagaggaaaaactgggcgtctgcttgggaatctattgtggaaacccagggtgtttcccgaccagtccctgggcgccaactagagtatggactgaccaggtacctggatggagacctgagctggagaaggagatgcgcttgggaggaaattgcagaggccgtcaacatggaaaagcagccccagaacagcaggagaggcctcgccccccgagaggtgccgccagctgttgggctgctgctgatcatggccctgatgaatactctactctacctctgcctcgaccacttcttcatcgctcctcgacaatccactgtggaccccacacactgtccctatggtcacttcaggataggacagatgaaaaactgctcaccttggctgtcctgcgaggagctgagaacagaagtgagacagctgaagcgtgttggggaaggagctgtaaagagagtctttctgtctgagtggaaggagcacaaagttgcactctcacagctcaccagcctggagatgaaagatgatttcctccatggactgcagatgctgaaatctctccaaggcacacatgttgtcacgctgcttggctattgtgaggatgacaacactatgcttactgaatatcaccctctaggttccttgagtaacctggaagaaacactaaacctttcaaagtaccaaaatgtgaacacgtggcagcacaggctggagctggccatggactatgtcagcatcattaattacctgcaccacagccctgtgggcacacgggtcatgtgcgactccaacgacctgccgaagacactgtcccagtatctgctaacaagcaacttcagcattttggcaaatgacttggacgccttacccctggtgaaccacagctccgggatgctggtgaagtgcggccacagggagctgcatggggatttcgtggctccagagcaactgtggccctatggagaggacgtgcctttccacgatgatctcatgccctcatatgatgagaagattgacatttggaagatcccagacatctccagtttccttctggggcacattgaagggagtgatatggtccgattccatttgtttgatattcacaaagcatgcaagagccagactccctcagaaagacccactgcccaggacgttctggagacctaccagaaggtcttggatacacttagagatgccatgatgtctcaggcaagagagatgctgtgaaaaccagtccagccaatgaaggtgggattgaagggctgaatggaagttacagcattctactctgatggtggagttttttgcctgagtttcgtgttttattgttttttttatggcttagccatgtggttcgttgtccacatccacatgtacgtttgtatgtagtccacattggttgttagattttttttttttttctttgagatgcggtcttgctctgttgctgaggctggagtgcagtgatgtgatcttggctcactgcagcctctgcctcccaggttcaagcaattctcccacctcagcctcc

SEQ ID NO: 14479 - DNA, 8876 bp, Homo sapiens
ggctgcttcagacatatgtctgtgtgtacgctgtgaaggtgtttctcttcacagttccccgccctctagtggtagttacaataatgccattttgtagtccctgtacaggaaatgcctcttcttacttcagttaccagaatccttttacaggaagttaggtgtggtctttgaaggagaattaaaaaaaaaaaaaaaaaaaaaaaaaaaagatttttttttttttaaagcatgatggaattttagctgcagtcttcttggtgccagcttatcaatcccaaactctgggtgtaaaagattctacagggcactttcttatgcaaggagctaaacagtgattaaaggagcaggatgaaaagatggcacagtcagtgctggtaccgccaggacctgacagcttccgcttctttaccagggaatcccttgctgctattgaacaacgcattgcagaagagaaagctaagagacccaaacaggaacgcaaggatgaggatgatgaaaatggcccaaagccaaacagtgacttggaagcaggaaaatctcttccatttatttatggagacattcctccagagatggtgtcagtgcccctggaggatctggacccctactatatcaataagaaaacgtttatagtattgaataaagggaaagcaatctctcgattcagtgccacccctgccctttacattttaactcccttcaaccctattagaaaattagctattaagattttggtacattctttattcaatatgctcattatgtgcacgattcttaccaactgtgtatttatgaccatgagtaaccctccagactggacaaagaatgtggagtatacctttacaggaatttatacttttgaatcacttattaaaatacttgcaaggggcttttgtttagaagatttcacatttttacgggatccatggaattggttggatttcacagtcattacttttgcatatgtgacagagtttgtggacctgggcaatgtctcagcgttgagaacattcagagttctccgagcattgaaaacaatttcagtcattccaggcctgaagaccattgtgggggccctgatccagtcagtgaagaagctttctgatgtcatgatcttgactgtgttctgtctaagcgtgtttgcgctaataggattgcagttgttcatgggcaacctacgaaataaatgtttgcaatggcctccagataattcttcctttgaaataaatatcacttccttctttaacaattcattggatgggaatggtactactttcaataggacagtgagcatatttaactgggatgaatatattgaggataaaagtcacttttattttttagaggggcaaaatgatgctctgctttgtggcaacagctcagatgcaggccagtgtcctgaaggatacatctgtgtgaaggctggtagaaaccccaactatggctacacgagctttgacacctttagttgggcctttttgtccttatttcgtctcatgactcaagacttctgggaaaacctttatcaactgacactacgtgctgctgggaaaacgtacatgatattttttgtgctggtcattttcttgggctcattctatctaataaatttgatcttggctgtggtggccatggcctatgaggaacagaatcaggccacattggaagaggctgaacagaaggaagctgaatttcagcagatgctcgaacagttgaaaaagcaacaagaagaagctcaggcggcagctgcagccgcatctgctgaatcaagagacttcagtggtgctggtgggataggagttttttcagagagttcttcagtagcatctaagttgagctccaaaagtgaaaaagagctgaaaaacagaagaaagaaaaagaaacagaaagaacagtctggagaagaagagaaaaatgacagagtccgaaaatcggaatctgaagacagcataagaagaaaaggtttccgtttttccttggaaggaagtaggctgacatatgaaaagagattttcttctccacaccagtccttactgagcatccgtggctcccttttctctccaagacgcaacagtagggcgagccttttcagcttcagaggtcgagcaaaggacattggctctgagaatgactttgctgatgatgagcacagcacctttgaggacaatgacagccgaagagactctctgttcgtgccgcacagacatggagaacggcgccacagcaatgtcagccaggccagccgtgcctccagggtgctccccatcctgcccatgaatgggaagatgcatagcgctgtggactgcaatggtgtggtctccctggtcgggggcccttctaccctcacatctgctgggcagctcctaccagagggcacaactactgaaacagaaataagaaagagacggtccagttcttatcatgtttccatggatttattggaagatcctacatcaaggcaaagagcaatgagtatagccagtattttgaccaacaccatggaagaacttgaagaatccagacagaaatgcccaccatgctggtataaatttgctaatatgtgtttgatttgggactgttgtaaaccatggttaaaggtgaaacaccttgtcaacctggttgtaatggacccatttgttgacctggccatcaccatctgcattgtcttaaatacactcttcatggctatggagcactatcccatgacggagcagttcagcagtgtactgtctgttggaaacctggtcttcacagggatcttcacagcagaaatgtttctcaagataattgccatggatccatattattactttcaagaaggctggaatatttttgatggttttattgtgagccttagtttaatggaacttggtttggcaaatgtggaaggattgtcagttctccgatcattccggctgctccgagttttcaagttggcaaaatcttggccaactctaaatatgctaattaagatcattggcaattctgtgggggctctaggaaacctcaccttggtattggccatcatcgtcttcatttttgctgtggtcggcatgcagctctttggtaagagctacaaagaatgtgtctgcaagatttccaatgattgtgaactcccacgctggcacatgcatgactttttccactccttcctgatcgtgttccgcgtgctgtgtggagagtggatagagaccatgtgggactgtatggaggtcgctggccaaaccatgtgccttactgtcttcatgatggtcatggtgattggaaatctagtggttctgaacctcttcttggccttgcttttgagttccttcagttctgacaatcttgctgccactgatgatgataacgaaatgaataatctccagattgctgtgggaaggatgcagaaaggaatcgattttgttaaaagaaaaatacgtgaatttattcagaaagcctttgttaggaagcagaaagctttagatgaaattaaaccgcttgaagatctaaataataaaaaagacagctgtatttccaaccataccaccatagaaataggcaaagacctcaattatctcaaagacggaaatggaactactagtggcataggcagcagtgtagaaaaatatgtcgtggatgaaagtgattacatgtcatttataaacaaccctagcctcactgtgacagtaccaattgctgttggagaatctgactttgaaaatttaaatactgaagaattcagcagcgagtcagatatggaggaaagcaaagagaagctaaatgcaactagttcatctgaaggcagcacggttgatattggagctcccgccgagggagaacagcctgaggttgaacctgaggaatcccttgaacctgaagcctgttttacagaagactgtgtacggaagttcaagtgttgtcagataagcatagaagaaggcaaagggaaactctggtggaatttgaggaaaacatgctataagatagtggagcacaattggttcgaaaccttcattgtcttcatgattctgctgagcagtggggctctggcctttgaagatatatacattgagcagcgaaaaaccattaagaccatgttagaatatgctgacaaggttttcacttacatattcattctggaaatgctgctaaagtgggttgcatatggttttcaagtgtattttaccaatgcctggtgctggctagacttcctgattgttgatgtctcactggttagcttaactgcaaatgccttgggttactcagaacttggtgccatcaaatccctcagaacactaagagctctgaggccactgagagctttgtcccggtttgaaggaatgagggttgttgtaaatgctcttttaggagccattccatctatcatgaatgtacttctggtttgtctgatcttttggctaatattcagtatcatgggagtgaatctctttgctggcaagttttaccattgtattaattacaccactggagagatgtttgatgtaagcgtggtcaacaactacagtgagtgcaaagctctcattgagagcaatcaaactgccaggtggaaaaatgtgaaagtaaactttgataacgtaggacttggatatctgtctctacttcaagtagccacgtttaagggatggatggatattatgtatgcagctgttgattcacgaaatgtagaattacaacccaagtatgaagacaacctgtacatgtatctttattttgtcatctttattatttttggttcattctttaccttgaatcttttcattggtgtcatcatagataacttcaaccaacagaaaaagaagtttggaggtcaagacatttttatgacagaagaacagaagaaatactacaatgcaatgaaaaaactgggttcaaagaaaccacaaaaacccatacctcgacctgctaacaaattccaaggaatggtctttgattttgtaaccaaacaagtctttgatatcagcatcatgatcctcatctgccttaacatggtcaccatgatggtggaaaccgatgaccagagtcaagaaatgacaaacattctgtactggattaatctggtgtttattgttctgttcactggagaatgtgtgctgaaactgatctctcttcgttactactatttcactattggatggaatatttttgattttgtggtggtcattctctccattgtaggaatgtttctggctgaactgatagaaaagtattttgtgtcccctaccctgttccgagtgatccgtcttgccaggattggccgaatcctacgtctgatcaaaggagcaaaggggatccgcacgctgctctttgctttgatgatgtcccttcctgcgttgtttaacatcggcctccttcttttcctggtcatgttcatctacgccatctttgggatgtccaattttgcctatgttaagagggaagttgggatcgatgacatgttcaactttgagacctttggcaacagcatgatctgcctgttccaaattacaacctctgctggctgggatggattgctagcacctattcttaatagtggacctccagactgtgaccctgacaaagatcaccctggaagctcagttaaaggagactgtgggaacccatctgttgggattttcttttttgtcagttacatcatcatatccttcctggttgtggtgaacatgtacatcgcggtcatcctggagaacttcagtgttgctactgaagaaagtgcagagcctctgagtgaggatgactttgagatgttctatgaggtttgggagaagtttgatcccgatgcgacccagtttatagagtttgccaaactttctgattttgcagatgccctggatcctcctcttctcatagcaaaacccaacaaagtccagctcattgccatggatctgcccatggtgagtggtgaccggatccactgtcttgacatcttatttgcttttacaaagcgtgttttgggtgagagtggagagatggatgcccttcgaatacagatggaagagcgattcatggcatcaaacccctccaaagtctcttatgagcccattacgaccacgttgaaacgcaaacaagaggaggtgtctgctattattatccagagggcttacagacgctacctcttgaagcaaaaagttaaaaaggtatcaagtatatacaagaaagacaaaggcaaagaatgtgatggaacacccatcaaagaagatactctcattgataaactgaatgagaattcaactccagagaaaaccgatatgacgccttccaccacgtctccaccctcgtatgatagtgtgaccaaaccagaaaaagaaaaatttgaaaaagacaaatcagaaaaggaagacaaagggaaagatatcagggaaagtaaaaagtaaaaagaaaccaagaattttccattttgtgatcaattgtttacagcccgtgatggtgatgtgtttgtgtcaacaggactcccacaggaggtctatgccaaactgactgtttttacaaatgtatacttaaggtcagtgcctataacaagacagagacctctggtcagcaaactggaactcagtaaactggagaaatagtatcgatgggaggtttctattttcacaaccagctgacactgctgaagagcagaggcgtaatggctactcagacgataggaaccaatttaaaggggggagggaagttaaatttttatgtaaattcaacatgtgacacttgataatagtaattgtcaccagtgtttatgttttaactgccacacctgccatatttttacaaaacgtgtgctgtgaatttatcacttttctttttaattcacaggttgtttactattatatgtgactatttttgtaaatgggtttgtgtttggggagagggattaaagggagggaattctacatttctctattgtattgtataactggatatattttaaatggaggcatgctgcaattctcattcacacataaaaaaatcacatcacaaaagggaagagtttacttcttgtttcaggatgtttttagatttttgaggtgcttaaatagctattcgtatttttaaggtgtctcatccagaaaaaatttaatgtgcctgtaaatgttccatagaatcacaagcattaaagagttgttttatttttacataacccattaaatgtacatgtatatatgtatatatgtatatgtgcgtgtatatacatatatatgtatacacacatgcacacacagagatatacacataccattacattgtcattcacagtcccagcagcatgactatcacatttttgataagtgtcctttggcataaaataaaaatatcctatcagtcctttctaagaagcctgaattgaccaaaaaacatccccaccaccactttataaagttgattctgctttatcctgcagtattgtttagccatcttctgctcttggtaaggttgacatagtatatgtcaatttaaaaaataaaagtctgctttgtaaatagtaattttacccagtggtgcatgtttgagcaaacaaaaatgatgatttaagcacactacttattgcatcaaatatgtaccacagtaagtatagtttgcaagctttcaacaggtaatatgatgtaattggttccattatagtttgaagctgtcactgctgcatgtttatcttgcctatgctgctgtatcttattccttccactgttcagaagtctaatatgggaagccatatatcagtggtaaagtgaagcaaattgttctaccaagacctcattcttcatgtcattaagcaataggttgcagcaaacaaggaagagcttcttgctttttattcttccaaccttaattgaacactcaatgatgaaaagcccgactgtacaaacatgttgcaagctgcttaaatctgtttaaaatatatggttagagttttctaagaaaatataaatactgtaaaaagttcattttattttatttttcagccttttgtacgtaaaatgagaaattaaaagtatcttcaggtggatgtcacagtcactattgttagtttctgttcctagcacttttaaattgaagcacttcacaaaataagaagcaaggactaggatgcagtgtaggtttctgcttttttattagtactgtaaacttgcacacatttcaatgtgaaacaaatctcaaactgagttcaatgtttatttgctttcaatagtaatgccttatcattgaaagaggcttaaagaaaaaaaaaatcagctgatactcttggcattgcttgaatccaatgtttccacctagtctttttattcagtaatcatcagtcttttccaatgtttgtttacacagatagatcttattgacccatatggcactagaactgtatcagatataatatgggatcccagctttttttcctctcccacaaaaccaggtagtgaagttatattaccagttacagcaaaatactttgtgtttcacaagcaacaataaatgtagattctttatactgaagctattgacttgtagtgtgttggtgaaatgcatgcaggaaaatgctgttaccataaagaacggtaaaccacattacaatcaagccaaaagaataaaggtttcgcttttgtttttgtatttaattgttgtctttgtttctatctttgaaatgccatttaaaggtagatttctatcatgtaaaaataatctatctgaaaaacaaatgtaaagaacacacattaattactataattcatctttcaattttttcatggaatggaagttaattaagaagagtgtattggataactactttaatattggccaaaaagctagatatggcatcaggtagactagtggaaagttacaaaaattaataaaaaattgactaacattttaaaaaaaaaaaaaaaaaa

SEQ ID NO: 14480 - DNA, 6147 bp, Homo sapiens
gcgggcgccggcaatcgagtggcttcctggccatggagaggagatctggacccgaggacgccagggactcctctccgtctccctggaccgctgtgtaggcacctgagttaacggacgctaagcggggtaggggaagtaacagtgtatcatgtatgccactgattccaggggacactcccctgctttcctccaacctcagaatggaaatagtcgtcacccatctggctatgttccagggaaggttgtcccattgcgtccccctcctcctccaaagagtcaagcttcagccaaatttacctccatcagacgagaagaccgggcaaccttcgcattctcacctgaagaacagcaagcccagagagaaagtcaaaagcaaaagagacacaaaaatactttcatttgttttgctattactagtttctcattttttattgcacttgcaatcattttaggaatatcctcaaaatatgctccagatgaaaattgcccagatcaaaatcctcgtctcaggaattgggatccaggacaagattctgcaaagcaagttgttatcaaggagggagatatgctccgtctgacctcagacgccaccgtgcattctatagtcattcaggatggaggactgcttgtatttggggacaataaagatggatccagaaatattactttgaggactcattacatcctgatccaggatggtggggcgcttcatattggagcagaaaaatgccgctataaatccaaagcgacaattaccttgtatggcaagtcagatgaaggtgaaagtatgccaacatttggcaaaaagtttattggtgtggaagctggcgggacactggagttacatggggcacggaaggcatcgtggacgttgttggcaaggaccctgaattcctcaggcttgccctttgggtcctatacctttgaaaaggacttttcccggggcctcaatgtgagggtcattgaccaagacacggccaaaattttggaaagtgagagatttgatacccatgaataccgcaatgagagcaggcggcttcaggagtttctgagattccaggatccaggtcggattgttgccatagctgtcggggattcagccgctaaaagtctcttacaaggaaccatccagatgatccaggaacggttgggaagtgaactgatccaaggactgggctacaggcaagcttgggctttagttggtgtcattgatggtggaagcacttcttgcaatgaatccgtgagaaactatgaaaatcatagcagtggcgggaaggctcttgcccaaagagaattttatactgtggatggccagaagttctctgtgacagcttatagtgaatggattgaaggcgtttctctttcaggattccgggtagaggttgtagatggagtgaagctaaatttgctagatgatgttagtagttggaaacctggagaccagattgtggtcgcaagcacagactattccatgtaccaagcagaggagttcactcttcttccctgttctgaatgcagccattttcaggtcaaagtcaaagaaacccctcagttcctgcacatgggtgagatcatagacggtgtagacatgagagctgaggttggaattcttacccggaatattgtgatccaaggagaagtggaggactcatgctacgcagaaaatcagtgccaattttttgattatgatacctttgggggacacattatgataatgaaaaattttacttcagtccatctttcttatgtggaattgaaacacatgggtcagcagcagatggggcgataccctgttcattttcacctgtgtggtgacgtggattataaaggaggatacagacatgcaacatttgtggacggcctgtctattcatcacagcttctcaaggtgcatcactgtgcatgggacaaatggcttgctaataaaagacaccattgggtttgacacactaggtcattgtttctttttggaagatggtattgaacagaggaatactttgttccacaatctgggactcctcaccaagccgggtactctcctgcccaccgataggaacaactccatgtgtaccaccatgcgagataaagtgtttggaaattacattcctgtgcctgctactgactgtatggctgtttcaactttctggattgctcatcccaacaataatctgattaataatgcagctgcaggctcacaggatgctggaatatggtatttattccacaaggaaccaactggggaatccagtggattgcagctcttggcaaaaccagaactcactccattgggtatattttataacaacagggtccattcaaattttaaggctggcttatttattgacaaaggtgtcaaaacaaccaactctagtgctgctgacccaagggaatacctctgtttggacaatagtgcaagatttcgacctcatcaggatgcaaaccccgaaaaaccacgtgttgctgctctaattgacaggctcattgcttttaaaaataatgataatggagcttgggtcagaggaggagatattatcgttcaaaattcagcatttgcagataatggaataggactgacctttgccagtgatggaagcttcccaagtgatgaaggttccagccaagaggtatctgaatctctctttgttggggagagcaggaattacggctttcagggtggtcagaacaagtatgtaggcactggaggaatagaccagaagcctcgaacattacccaggaacaggacgttcccaattagaggctttcagatttatgatgggcccattcatctcacaaggagcactttcaaaaaatatgtgccaactccagataggtacagcagtgcaattggcttcctcatgaagaattcctggcagataacccccaggaataatatctccctcgtgaagtttggtccacatgtctctctgaatgtcttttttggaaagcctggtccctggtttgaagattgtgagatggatggtgataagaactccatattccatgacattgatggctctgtgacaggatacaaggatgcttatgtgggaagaatggacaactacctgatccgccatccaagctgtgtaaatgtgtctaagtggaatgcagtgatctgcagtgggacctatgcacaggtctatgtacagacatggagcactcagaatctttctatgaccattacacgagatgagtatccgtccaaccctatggtgctccgaggtattaatcagaaggctgcctttccacagtaccagcctgtcgtcatgctggagaagggttataccatccactggaatgggccggcaccacggactacatttctatacctcgtcaacttcaacaagaatgactggattcgagttggcctttgctatccatcaaacacaagttttcaagttacctttggctatttgcagcggcagaatggctcattatccaaaatcgaagaatatgagcctgtgcattcactggaagaactgcaaagaaagcaatccgagaggaaattctattttgactccagcacggggttactgtttttgtatctcaaagccaaaagccacaggcatggccacagttactgttcatctcagggatgtgaaagagtcaagatccaagcagccacagactcaaaggacatcagtaactgcatggccaaagcatacccacagtactacagaaagccgtcagtggtcaagcggatgccggccatgctcactggactctgtcaaggctgtggcactcggcaggtggtgtttactagtgatcctcataaaagttacctccctgtgcaattccagtcacctgataaagcagaaacccagcgtggagacccgtctgttatttctgtcaatggcactgactttaccttccgaagtgcaggcgtcctcctccttgttgtggatccgtgcagcgttccattccgcttgacggaaaaaacggtttttcctcttgctgatgtcagtcgcattgaagagtatttaaaaacaggcatccctccaaggtccattgttctgttgagcacaagaggagaaataaagcagttaaacatttcacacttactagtacctctgggattagccaaaccagctcatctttatgacaaagggagtaccatatttttgggattcagtggaaactttaaaccatcatggactaagctatttaccagtcctgctggacagggccttggggtgcttgaacaattcatacctttgcagctggacgaatatggttgtcccagagccaccactgtccgcagaagagacctggaactgctaaagcaagcttcaaaagcacattagagactaactgtaacttaagtgctgggggaaaaaaaatgtgaactaacttatttaatttatggcattttaaaatgacactgttaacccaacggaaccattttccagtttgatacagaatggggagaaaagaaagcgtttgaaattattgcttggataccagcttcatgcaccttctagttgtacaaaatgttaaagacgttgtttgtatttgtaaggctggtgtattcagagagcagatctcttattcctcactttccacccccgtattttgtaatgaccatgagcaatgtttttactttttgtataatggggtggggtggagtgggggcttctgagagtcagcctgaggtctttagaggaccagctattgtagcaccttggatacttgaagtttaatgctcagttgggtcgggtggcagttgacttggtggctggcatgttcagcagtgcctggggccctgtttctgggcagcctttgaggattttctatgatattgaatgacagttttaagtggcaactcaggcccagctcatgcccttttttgcctggacatgtgctatttttattcacttatatatcaattacttgtaagggttaaactttcaaacaggaagtatattgggacaaaagggctcttggggattagatatccctttaatctgtgaccatggggcaaaaaattttcctgcagcaaaagtctgaggctgttgggaccatttttgcagctttaatccttagcctcttttgactgtatatttgtgtttaaaatgcagagctcaactgaatatttccttttttgttttgttttgttttgttttaagaagtaggttgttttcctgaaccgtaaacttgtatcattttaacttgcacaaaggaagtctgttcttggtattgctcttgcacttgggttttttgttattgttttgtgtggattttttaaagcttttctgttcaccctcctgccaggaaaatcccagaaagcttaatgataccccaaaatgattacacccagggaggaaaaaaaggagcgctttctagggtcagaatcgtggagagaatactcagaacatgaacctctttaaagccttgcaggaatgagtcactcttacttaatgaaatgttaaagccaattaaaaagcatgctgtgatgcccagcttccctttccacagggtgcatgcgtctcctgctggtgaatcacatgcggcaagaggcaactggctccacagcctgggatgctgccgtaccaagaggaaagaagcagcaaaatgcctttacgttgttctaaacccccgacgcataaagtgtagaggagggatggccaagggtgggtggtagaaagtgtgttcaggctgacactggcaatgagtacagataatttcactttcctcttccaggggcaaaggctgatggcctctacctttgtatccaggagaaactgcagagcagccctgtgactttacaaaatatgctacctcaaagtgctaccgataaacctttctaattgtaagtgcccttactaagggcacatgtcttaatcaaagttagttttttgttttctggtttgttttttttttttttgtatattgatgaatgagatcttacctattaaatatattattggaaaaaaaaaaaaaaaaaaaattaaagtttgagtgtgtgtgtgtgtgtgtgtgtgtgtgtgtgtgtgtgtgttttatgacttaaatatctttacgtgtgttttttagagcttggttctttaaagatttggagaagatatgtaaattaccaaggcacttggtttttctgttttatatactaataatcagggcctaagttaaataaaaatatgtgtgcatgtatttt

SEQ ID NO: 14481 - DNA, 3095 bp, Homo sapiens
attgctgatggatcagtgagcctgtgttcatgccagtgagctgctgtggctcagatactgatactttctttccaaacagcataagaagtgattgagccacaagtatactgaaggaagggctccctcgagttctggtgtgaagagataaatcaccagtcacagactatgcacccgactgctgctgttcagtccagggaaaatgaaagttggagtgctgtggctcatttctttcttcaccttcactgacggccacggtggcttcctggggaaaaatgatggcatcaaaacaaaaaaagaactcattgtgaataagaaaaaacatctaggcccagtcgaagaatatcagctgctgcttcaggtgacctatagagattccaaggagaaaagagatttgagaaattttctgaagctcttgaagcctccattattatggtcacatgggctaattagaattatcagagcaaaggctaccacagactgcaacagcctgaatggagtcctgcagtgtacctgtgaagacagctacacctggtttcctccctcatgccttgatccccagaactgctaccttcacacggctggagcactcccaagctgtgaatgtcatctcaacaacctcagccagagtgtcaatttctgtgagagaacaaagatttggggcactttcaaaattaatgaaaggtttacaaatgaccttttgaattcatcttctgctatatactccaaatatgcaaatggaattgaaattcaacttaaaaaagcatatgaaagaattcaaggttttgagtcggttcaggtcacccaatttcgaaatggaagcatcgttgctgggtatgaagttgttggctccagcagtgcatctgaactgctgtcagccattgaacatgttgccgagaaggctaagacagcccttcacaagctgtttccattagaagacggctctttcagagtgttcggaaaagcccagtgtaatgacattgtctttggatttgggtccaaggatgatgaatataccctgccctgcagcagtggctacaggggaaacatcacagccaagtgtgagtcctctgggtggcaggtcatcagggagacttgtgtgctctctctgcttgaagaactgaacaagaatttcagtatgattgtaggcaatgccactgaggcagctgtgtcatccttcgtgcaaaatctttctgtcatcattcggcaaaacccatcaaccacagtggggaatctggcttcggtggtgtcgattctgagcaatatttcatctctgtcactggccagccatttcagggtgtccaattcaacaatggaggatgtcatcagtatagctgacaatatccttaattcagcctcagtaaccaactggacagtcttactgcgggaagaaaagtatgccagctcacggttactagagacattagaaaacatcagcactctggtgcctccgacagctcttcctctgaatttttctcggaaattcattgactggaaagggattccagtgaacaaaagccaactcaaaaggggttacagctatcagattaaaatgtgtccccaaaatacatctattcccatcagaggccgtgtgttaattgggtcagaccaattccagagatcccttccagaaactattatcagcatggcctcgttgactctggggaacattctacccgtttccaaaaatggaaatgctcaggtcaatggacctgtgatatccacggttattcaaaactattccataaatgaagttttcctatttttttccaagatagagtcaaacctgagccagcctcattgtgtgttttgggatttcagtcatttgcagtggaacgatgcaggctgccacctagtgaatgaaactcaagacatcgtgacgtgccaatgtactcacttgacctccttctccatattgatgtcaccttttgtcccctctacaatcttccccgttgtaaaatggatcacctatgtgggactgggtatctccattggaagtctcattttatgcctgatcatcgaggctttgttttggaagcagattaaaaaaagccaaacctctcacacacgtcgtatttgcatggtgaacatagccctgtccctcttgattgctgatgtctggtttattgttggtgccacagtggacaccacggtgaacccttctggagtctgcacagctgctgtgttctttacacacttcttctacctctctttgttcttctggatgctcatgcttggcatcctgctggcttaccggatcatcctcgtgttccatcacatggcccagcatttgatgatggctgttggattttgcctgggttatgggtgccctctcattatatctgtcattaccattgctgtcacgcaacctagcaatacctacaaaaggaaagatgtgtgttggcttaactggtccaatggaagcaaaccactcctggcttttgttgtccctgcactggctattgtggctgtgaacttcgttgtggtgctgctagttctcacaaagctctggaggccgactgttggggaaagactgagtcgggatgacaaggccaccatcatccgcgtggggaagagcctcctcattctgacccctctgctagggctcacctggggctttggaataggaacaatagtggacagccagaatctggcttggcatgttatttttgctttactcaatgcattccagggattttttatcttatgctttggaatactcttggacagtaagctgcgacaacttctgttcaacaagttgtctgccttaagttcttggaagcaaacagaaaagcaaaactcatcagatttatctgccaaacccaaattctcaaagcctttcaacccactgcaaaacaaaggccattatgcattttctcatactggagattcctccgacaacatcatgctaactcagtttgtctcaaatgaataaggcaaggaatcataaaatcaagaaaaaatttccagaacaacttgacatttagagacaaatgtcaatgaagaaattatgctcagtattcgatcgggttttctgatttaggggtctgggaataaaacaagaatgtctcagtggcttcaaaaaaaaaaaaaaaaaa

SEQ ID NO: 14482 - DNA, 3497 bp, Homo sapiens
aggctcagcacagagagtggaaaacagcagaggtgacagagcagccgtgctcgaagcgttcctggagcccaagctctcctccacaggtgaagacagggccagcaggagacaccatggggcacctctcagccccacttcacagagtgcgtgtaccctggcaggggcttctgctcacagcctcacttctaaccttctggaacccgcccaccactgcccagctcactactgaatccatgccattcaatgttgcagaggggaaggaggttcttctccttgtccacaatctgccccagcaactttttggctacagctggtacaaaggggaaagagtggatggcaaccgtcaaattgtaggatatgcaataggaactcaacaagctaccccagggcccgcaaacagcggtcgagagacaatataccccaatgcatccctgctgatccagaacgtcacccagaatgacacaggattctacaccctacaagtcataaagtcagatcttgtgaatgaagaagcaactggacagttccatgtatacccggagctgcccaagccctccatctccagcaacaactccaaccctgtggaggacaaggatgctgtggccttcacctgtgaacctgagactcaggacacaacctacctgtggtggataaacaatcagagcctcccggtcagtcccaggctgcagctgtccaatggcaacaggaccctcactctactcagtgtcacaaggaatgacacaggaccctatgagtgtgaaatacagaacccagtgagtgcgaaccgcagtgacccagtcaccttgaatgtcacctatggcccggacacccccaccatttccccttcagacacctattaccgtccaggggcaaacctcagcctctcctgctatgcagcctctaacccacctgcacagtactcctggcttatcaatggaacattccagcaaagcacacaagagctctttatccctaacatcactgtgaataatagtggatcctatacctgccacgccaataactcagtcactggctgcaacaggaccacagtcaagacgatcatagtcactgagctaagtccagtagtagcaaagccccaaatcaaagccagcaagaccacagtcacaggagataaggactctgtgaacctgacctgctccacaaatgacactggaatctccatccgttggttcttcaaaaaccagagtctcccgtcctcggagaggatgaagctgtcccagggcaacaccaccctcagcataaaccctgtcaagagggaggatgctgggacgtattggtgtgaggtcttcaacccaatcagtaagaaccaaagcgaccccatcatgctgaacgtaaactataatgctctaccacaagaaaatggcctctcacctggggccattgctggcattgtgattggagtagtggccctggttgctctgatagcagtagccctggcatgttttctgcatttcgggaagaccggcagggcaagcgaccagcgtgatctcacagagcacaaaccctcagtctccaaccacactcaggaccactccaatgacccacctaacaagatgaatgaagttacttattctaccctgaactttgaagcccagcaacccacacaaccaacttcagcctccccatccctaacagccacagaaataatttattcagaagtaaaaaagcagtaatgaaacctgtcctgctcactgcagtgctgatgtatttcaagtctctcaccctcatcactaggagattcctttcccctgtaggggtagaggggtggggacagaaacaactttctcctactcttccttcctaataggcatctccaggctgcctggtcactgcccctctctcagtgtcaatagatgaaagtacattgggagtctgtaggaaacccaaccttcttgtcattgaaatttggcaaagctgactttgggaaagagggaccagaacttcccctcccttccccttttcccaacctggacttgttttaaacttgcctgttcagagcactcattccttcccacccccagtcctgtcctatcactctaattcggatttgccatagccttgaggttatgtccttttccattaagtacatgtgccaggaaacaagagagagagaaagtaaaggcagtaatgccttctcctatttctccaaagccttgtgtgaactcaccaaacacaagaaaatcaaatatataaccaatagtgaaatgccacacctttgtccactgtcagggttgtctacctgtaggatcagggtctaagcaccttggtgcttagctagaataccacctaatccttctggcaagcctgtcttcagagaacccactagaagcaactaggaaaatcacttgccaaaatccaaggcaattcctgatggaaaatgcaaaagcacatatatgttttaatatctttatgggctctgttcaaggcagtgctgagagggaggggttatagcttcaggagggaaccagcttctgataaacacaatctgctaggaacttgggaaaggaatcagagagctgcccttcagcgattatttaaattattgttaaagaatacacaatttggggtattgggatttttctccttttctctgagacattccaccattttaatttttgtaactgcttatttatgtgaaaagggttatttttacttagcttagctatgtcagccaatccgattgccttaggtgaaagaaaccaccgaaatccctcaggtcccttggtcaggagcctctcaagattttttttgtcagaggctccaaatagaaaataagaaaaggttttcttcattcatggctagagctagatttaactcagtttctaggcacctcagaccaatcatcaactaccattctattccatgtttgcacctgtgcattttctgtttgcccccattcactttgtcaggaaaccttggcctctgctaaggtgtatttggtccttgagaagtgggagcaccctacagggacactatcactcatgctggtggcattgtttacagctagaaagctgcactggtgctaatgccccttggggaaatggggctgtgaggaggaggattataacttaggcctagcctcttttaacagcctctgaaatttatcttttcttctatggggtctataaatgtatcttataataaaaaggaaggacaggaggaagacaggcaaatgtacttctcacccagtcttctacacagatggaatctctttggggctaagagaaaggttttattctatattgcttacctgatctcatgttaggcctaagaggctttctccaggaggattagcttggagttctctatactcaggtacctctttcagggttttctaaccctgacacggactgtgcatactttccctcatccatgctgtgctgtgttatttaatttttcctggctaagatcatgtctgaattatgtatgaaaattattctatgtttttataataaaaataatatatcagacatcga

SEQ ID NO: 14483 - DNA, 3592 bp, Homo sapiens
gtgactgaactttgcctgatcatgaccttgatcatgcacagggctgctggtggggtgaggccatcccacgcaactctggggtctgtgaagccaccaaggatcaaggaatggaagagctgcctgagtgtagagggagttcggtcaggcttcttaaacttggagacttggaaacagaaggccttgtaggccacataggttttcagagactcgcctggcagaggcctggagcgtcctgctgcgtggactgtgggcaccgagccaccaggaggttgttgatctcattcttgctcactggtccctgccagactggtggtgcctctctactgtcgggcagccccacctctgtgctgccccatccacctacagccctcatgcctgggcccagctggaggttctgacaggggccccctggggtggcatgcggacccttcagggtgccccaggcgcagcacaggtctccagagacacaggcaccagggcgttcagagctagtcccctcgctgctgttgactgtccttgagcagccccagggccggtttctcaacctcatttgctcacctgagcaatgaagtgaggtgggctcctggaactgcagcagccaccccccggggccatcgtgaggctaagaatccagtgcagggtgagcaaccagcgaccgctacaaggacagtgaagagctagcaccaggaccttgggtagcccacccgctggagggagcgtgtgctgcaaaaagcaagagtgggctttggaggccaacggatggagcggattcagtctgaggctgttccagcccttgcttaggatccacctacctaggtctggaaatcgtatttccacttcagatgccttctcagaggataaaataacccccggtgggggagagtactggaagagggctaattcccctggttttctccccatgagcattagtgtcagtgtaattttagagtgaccccagctatgtcacgtgtggcaggcacaagaacagatgtcaatgagctattgcagaggtggacacccagatgtgtgcgctggcacactggaggggcccgtagggtggctctagaccgccccctcgtgacggcttgcctaccacctgcaggcgacgttgtggacgtttaccagcgggagttcctggcgctgcgcgatcggttgcacgcagctgagcaggagagcctcaagcgctccaaggagctcaacctggtgctggacgagatcaagagggccgtgtcagaaaggcaggcgctgcgagacggagacggcaatcgcacctggggccgcctaacagaggacccccgattgaagccgtggaacggctcacaccggcacgtgctgcacctgcccaccgtcttccatcacctgccacacctgctggccaaggagagcagtctgcagcccgcggtgcgcgtgggccagggccgcaccggagtgtcggtggtgatgggcatcccgagcgtgcggcgcgaggtgcactcgtacctgactgacactctgcactcgctcatctccgagctgagcccgcaggagaaggaggactcggtcatcgtggtgctgatcgccgagactgactcacagtacacttcggcagtgacagagaacatcaaggccttgttccccacggagatccattctgggctcctggaggtcatctcaccctccccccacttctaccctgacttctcccgcctccgagagtcctttggggaccccaaggagagagtcaggtggaggaccaaacagaacctcgattactgcttcctcatgatgtacgcgcagtccaaaggcatctactacgtgcagctggaggatgacatcgtggccaagcccaactacctgagcaccatgaagaactttgcactgcagcagccttcagaggactggatgatcctggagttctcccagctgggcttcattggtaagatgttcaagtcgctggacctgagcctgattgtagagttcattctcatgttctaccgggacaagcccatcgactggctcctggaccatattctgtgggtgaaagtctgcaaccccgagaaggatgcgaagcactgtgaccggcagaaagccaacctgcggatccgcttcaaaccgtccctcttccagcacgtgggcactcactcctcgctggctggcaagatccagaaactgaaggacaaagactttggaaagcaggcgctgcggaaggagcatgtgaacccgccagcagaggtgagcacgagcctgaagacataccagcacttcaccctggagaaagcctacctgcgcgaggacttcttctgggccttcacccctgccgcgggggacttcatccgcttccgcttcttccaacctctaagactggagcggttcttcttccgcagtgggaacatcgagcacccggaggacaagctcttcaacacgtctgtggaggtgctgcccttcgacaaccctcagtcagacaaggaggccctgcaggagggccgcaccgccaccctccggtaccctcggagccccgacggctacctccagatcggctccttctacaagggagtggcagagggagaggtggacccagccttcggccctctggaagcactgcgcctctcgatccagacggactcccctgtgtgggtgattctgagcgagatcttcctgaaaaaggccgactaagctgcgggcttctgagggtaccctgtggccagccctgaagcccacatttctgggggtgtcgtcactgccgtccccggagggccagatacggccccgcccaaagggttctgcctggcgtcgggcttgggccggcctggggtccgccgctggcccggaggccctaggagctggtgctgcccccgcccgccgggccgcggaggaggcaggcggcccccacactgtgcctgaggcccggaaccgttcgcacccggcctgccccagtcaggccgttttagaagagcttttacttgggcgcccgccgtctctggcgcgaacactggaatgcatatactactttatgtgctgtgttttttattcttggatacatttgattttttcacgtaagtccacatatacttctataagagcgtgacttgtaataaagggttaatgaagtgtgtgcctcaaatgtgagcgccctgggcatctccctctgccctgcggttggcttcatttggtctgtgccccaacatgccaactaagcctggcactgggcctccccagccagcatcagcagcgacctttccctgctaagtcaaggagccagcctggcctgcaggcgcggggtccagcccctggctgtgcagctgcagtgccacctcggcgccagcgtaccccccttcctaggatcaggccgcaaagtctgtcactggtgaaaccagctcagaatctgggaccacaatgcctatagcaggtcccccgaatgtctcccccatgtccaaggcctgcgatgaggccttcccttagctcctcaagctgaaggcatttcccagcctccttgttcccctccgtgtgtctcagcttggtcctcatcctgggtccccgacactcctctggcacattagggtctcccgctcacctcagggcctttgcacacactgttgcccctccttggaaagct

SEQ ID NO: 14484 - DNA, 2945 bp, Homo sapiens
gccgggccgcggctctcgccgcccagcccagcccagcccggcccggcccggccctgccgcggaggcgaggccgccagtgtcccgcgcccctgatatctgcagtgagcctgatacctgcctctgcccttctgagcctgttcctcttccctgagtacagggcacaaagcttgcgccctgaggggcggccggcgcgctccctggcccggtccccgcccggccccgggccccccgcccctccccgacccggggccggggcccctgccgccgccgccgccgccttccgacccctgcgccccggccccggtcccccgggccatgcagcctcggccccgcgggcgcccgccgcgcacccgaggagatgaggctccgcaatggcaccttcctgacgctgctgctcttctgcctgtgcgccttcctctcgctgtcctggtacgcggcactcagcggccagaaaggcgacgttgtggacgtttaccagcgggagttcctggcgctgcgcgatcggttgcacgcagctgagcaggagagcctcaagcgctccaaggagctcaacctggtgctggacgagatcaagagggccgtgtcagaaaggcaggcgctgcgagacggagacggcaatcgcacctggggccgcctaacagaggacccccgattgaagccgtggaacggctcacaccggcacgtgctgcacctgcccaccgtcttccatcacctgccacacctgctggccaaggagagcagtctgcagcccgcggtgcgcgtgggccagggccgcaccggagtgtcggtggtgatgggcatcccgagcgtgcggcgcgaggtgcactcgtacctgactgacactctgcactcgctcatctccgagctgagcccgcaggagaaggaggactcggtcatcgtggtgctgatcgccgagactgactcacagtacacttcggcagtgacagagaacatcaaggccttgttccccacggagatccattctgggctcctggaggtcatctcaccctccccccacttctaccctgacttctcccgcctccgagagtcctttggggaccccaaggagagagtcaggtggaggaccaaacagaacctcgattactgcttcctcatgatgtacgcgcagtccaaaggcatctactacgtgcagctggaggatgacatcgtggccaagcccaactacctgagcaccatgaagaactttgcactgcagcagccttcagaggactggatgatcctggagttctcccagctgggcttcattggtaagatgttcaagtcgctggacctgagcctgattgtagagttcattctcatgttctaccgggacaagcccatcgactggctcctggaccatattctgtgggtgaaagtctgcaaccccgagaaggatgcgaagcactgtgaccggcagaaagccaacctgcggatccgcttcaaaccgtccctcttccagcacgtgggcactcactcctcgctggctggcaagatccagaaactgaaggacaaagactttggaaagcaggcgctgcggaaggagcatgtgaacccgccagcagaggtgagcacgagcctgaagacataccagcacttcaccctggagaaagcctacctgcgcgaggacttcttctgggccttcacccctgccgcgggggacttcatccgcttccgcttcttccaacctctaagactggagcggttcttcttccgcagtgggaacatcgagcacccggaggacaagctcttcaacacgtctgtggaggtgctgcccttcgacaaccctcagtcagacaaggaggccctgcaggagggccgcaccgccaccctccggtaccctcggagccccgacggctacctccagatcggctccttctacaagggagtggcagagggagaggtggacccagccttcggccctctggaagcactgcgcctctcgatccagacggactcccctgtgtgggtgattctgagcgagatcttcctgaaaaaggccgactaagctgcgggcttctgagggtaccctgtggccagccctgaagcccacatttctgggggtgtcgtcactgccgtccccggagggccagatacggccccgcccaaagggttctgcctggcgtcgggcttgggccggcctggggtccgccgctggcccggaggccctaggagctggtgctgcccccgcccgccgggccgcggaggaggcaggcggcccccacactgtgcctgaggcccggaaccgttcgcacccggcctgccccagtcaggccgttttagaagagcttttacttgggcgcccgccgtctctggcgcgaacactggaatgcatatactactttatgtgctgtgttttttattcttggatacatttgattttttcacgtaagtccacatatacttctataagagcgtgacttgtaataaagggttaatgaagtgtgtgcctcaaatgtgagcgccctgggcatctccctctgccctgcggttggcttcatttggtctgtgccccaacatgccaactaagcctggcactgggcctccccagccagcatcagcagcgacctttccctgctaagtcaaggagccagcctggcctgcaggcgcggggtccagcccctggctgtgcagctgcagtgccacctcggcgccagcgtaccccccttcctaggatcaggccgcaaagtctgtcactggtgaaaccagctcagaatctgggaccacaatgcctatagcaggtcccccgaatgtctcccccatgtccaaggcctgcgatgaggccttcccttagctcctcaagctgaaggcatttcccagcctccttgttcccctccgtgtgtctcagcttggtcctcatcctgggtccccgacactcctctggcacattagggtctcccgctcacctcagggcctttgcacacactgttgcccctccttggaaagct

SEQ ID NO: 14485 - DNA, 3074 bp, Homo sapiens
ggggcagcggcggccgctgggtgcagccgagcggtgtggagcggagagaatactcgaagggctctcctgatactaacagttttacgatttaaaacttcgccagaatttcgacagggtctcactgtattgcccaggttggtctcgaactcctggcttcaagcgattctcccacctcagcctcccaaagtgctgggattacaggcgtgagccaccacgcctggcctcactcaaacagtaaacgagtcactgtatatatgccttatttcctgggtccatgggaagcatgagtctgttgggacttgggacaagaagaaaacaagacatcttcacaaggaaaaccaagtactaaaaaaagtatcctcccaactctgaagagatagaacacaaacatggccgacagtggacttagggaacctcaagaggactctcaaaaggatttggaaaatgatccatcagtaaattctcaggcgcaggagaccacaatcatagcaagtaatgctgaagaagctgagatcctacactctgcctgtggtcttagcaaagaccaccaagaggtagagacagaaggtccagaaagtgcagatacaggtgataaatcagaaagtccagatgaagcaaatgtggggaaacatccaaaggataaaacagaagatgagaacaagcagagttttctggatggcggaaaagggcatcacctcccttcagaaaatctgggtaaagaacccttggatccagatcccagccattctccaagtgacaaggtaggaagagcagatgcacacttagggagcagctctgtggccctccctaaggaagcgagtgacggaactggagcatctcaggaaccacctactacagactcccaggaggcccagagtcctggtcattccagtgcagggcaagagggtgaggatacactgaggaggcgactgctggccccagaggctggaagtcatccacaacaaacacaaaaattggaagaaattaaagagaatgcacaggacaccatgagacagattaataaaaagggtttttggagctatggccctgtgattcttgtcgtcctggttgtggctgttgtggcaagttctgtgaatagctactattcctctccagcccagcaagtgcccaaaaatccagctttggaggcctttttggcccagtttagccaattggaagataaatttccaggccagagttccttcctgtggcagagaggacggaagtttctccagaagcacctcaatgcttccaaccccactgagccagccaccatcatatttacagcagctcgggagggaagagagaccctgaagtgcctgagccaccatgttgcagatgcctacacctcttcccagaaagtctctcccattcagattgatggggctggaaggacctggcaggacagtgacacggtcaagctgttggttgacctggagctgagctatgggtttgagaatggccagaaggctgctgtggtacaccacttcgaatccttccctgccggctccactttgatcttctataagtattgtgatcatgagaatgctgcctttaaagatgtggccctggtcctgactgttctgctagaggaggaaacattagaagcaagtgtaggcccaagggaaacggaagaaaaagtgagagacttactctgggccaagtttaccaactctgacactcccacctccttcaaccacatggactcagacaaattgagtgggctgtggagccgaatttcacacctggtactgccagtccagccagtgagtagcatagaagaacaggggtgccttttctaaagctaagcacagagttggttacagaaggtatatgtttatgaaaaagtttgtttaaagaccttccatttatatggaaggaggttgataaaatagcttgaggaaatagcctgaaaaacaaagatgagcttattttagaaacaagtttttattttttattccttgtaaaatctttctaatctaagccttgacaaagctaaaaattaacctgactttttttctttggaccaaatcaggtttgaaatatcgatgatatatatgagaattttttttaaattctaaaatatagcaacattgcacaggaagatactcttacttcttagagtaactacagagtgattttttttttttcttgagtgagactctgaagaaccttttcgataatgtttggacttggactaaagcaattagaattatgaagcaatgataacctttagaaaatttttctatcacatgttgaatattttcaaaccttactttaataatctaaagttacgggattatatcttatattaattttgcagttttgagtagtatgataaaagaaataagaattcaaaccattaagtacctacctaaatactacatgtaaggcactgtgcttttatttcattcagctgaggtataagcagctgtactcaaatgttcttaaaaatgagaaccagtggggaaattgtttataatcattggaaatgaagaaattccaattggctatatctttacttcagcttttcttgaacaatttacagcattgattttcaaactgtgtctactggcacccttcccctttgtatcagagcagttctgcttttaactgttttatatgttggggttctctatgagatttcattggaacaaagagtttcactgatattcgagtttgaaaaccattgattaagtgaaaaaacatcttagaagataggaaatatgtttaaaaaatgaatgtattaaatcttatgagtaggaagatgaaatacaggtttattgtatagatacattatttatgaaggataaagatctatacatgaacagcagaatgtataagctagcatttactagcatgtctctgatgcttttgttcatttctgttaatcgtcatttctgtcccctctgcatggaattttatacttgtctagggtaagagtttgtagactctttcagcagaacagattttaataaccaatttatttgttttattttaaaaatttatttttgaataaccaatttaatagtaaattttatatgaacatttggcaaaaaaaaaaaaaaaaaaaa

SEQ ID NO: 14486 - DNA, 2043 bp, Homo sapiens
aagtgctgggatgacaggtgtgagccaccgcccccggcccctcgcccgccttttgaaggagcctttcgtcctcaagggcgaggccactccccccccgcgagttccatgccccctagagggtcatcgttcccgacggggaggtggcgccctcccccgggccccgggccccgaccgcccgtgctgcctccttccgggccctcctccgcgatgacggcgccgccagcaggccaggcggactgggcggggctccgagcggggactgggacccagaccgactaggggactgggagcgggcggcgcggccatggcgggctgctgcgccgcgctggcggccttcctgttcgagtacgacacgccgcgcatcgtgctcatccgcagccgcaaagtggggctcatgaaccgcgccgtgcaactgctcatcctggcctacgtcatcgggtgggtgtttgtgtgggaaaagggctaccaggaaactgactccgtggtcagctccgttacgaccaaggtcaagggcgtggctgtgaccaacacttctaaacttggattccggatctgggatgtggcggattatgtgataccagctcaggaggaaaactccctcttcgtcatgaccaacgtgatcctcaccatgaaccagacacagggcctgtgccccgagattccagatgcgaccactgtgtgtaaatcagatgccagctgtactgccggctctgccggcacccacagcaacggagtctcaacaggcaggtgcgtagctttcaacgggtctgtcaagacgtgtgaggtggcggcctggtgcccggtggaggatgacacacacgtgccacaacctgcttttttaaaggctgcagaaaacttcactcttttggttaagaacaacatctggtatcccaaatttaatttcagcaagaggaatatccttcccaacatcaccactacttacctcaagtcgtgcatttatgatgctaaaacagatcccttctgccccatattccgtcttggcaaaatagtggagaacgcaggacacagtttccaggacatggccgtggagggaggcatcatgggcatccaggtcaactgggactgcaacctggacagagccgcctccctctgcttgcccaggtactccttccgccgcctcgatacacgggacgttgagcacaacgtatctcctggctacaatttcaggtttgccaagtactacagagacctggctggcaacgagcagcgcacgctcatcaaggcctatggcatccgcttcgacatcattgtgtttgggaaggcagggaaatttgacatcatccccactatgatcaacatcggctctggcctggcactgctaggcatggcgaccgtgctgtgtgacatcatagtcctctactgcatgaagaaaagactctactatcgggagaagaaatataaatatgtggaagattacgagcagggtcttgctagtgagctggaccagtgaggcctaccccacacctgggctctccacagccccatcaaagaacagagaggaggaggagggagaaatggccaccacatcaccccagagaaatttctggaatctgattgagtctccactccacaagcactcagggttccccagcagctcctgtgtgttgtgtgcaggatctgtttgcccactcggcccaggaggtcagcagtctgttcttggctgggtcaactctgcttttcccgcaacctggggttgtcgggggagcgctggcccgacgcagtggcactgctgtggctttcagggctggagctggctttgctcagaagcctcctgtctccagctctctccaggacaggcccagtcctctgaggcacggcggctctgttcaagcactttatgcggcaggggaggccgcctggctgcagtcactagacttgtagcaggcctgggctgcaggcttccccccgaccattccctgcagccatgcggcagagctggcatttctcctcagagaagcgctgtgctaaggtgatcgaggaccagacattaaagcgtgattttcttaaaaaaaaaaaaaaaaa

SEQ ID NO: 14487 - DNA, 6093 bp, Homo sapiens
gcctgccagctagccggagccgcgggtgagcgcggcgagcggcgaccctggtgaggagcgcggcgcgggaggcacgttccttagctccgccgcggccgtcctccgcggctcgaggactccgcttccttccctcccctcccctgcgctccggcctggggtctcggcgcggggagcggagggaagggacgaaggaggagtaggtgaaagcggggtgaggggcggaagggtcccggcgcggggtgaggcgagggctgcctcttgttctcccgccgctgccgccgtctcctggtcgggtgccgcggccagaggcgcgcggggctgccgaggcacccgcactatgcaggcagactgccggccgccgcgatggcgagccgggcggtggtgagagccaggcgctgcccgcagtgtccccaagtccgggccgcggccgccgcccccgcctgggccgcgctccccctctcccgctccctccctccctgctccaactcctcctccttctccatgcctctgttcctcctgctcttacttgtcctgctcctgctgctcgaggacgctggagcccagcaaggtgatggatgtggacacactgtactaggccctgagagtggaacccttacatccataaactacccacagacctatcccaacagcactgtttgtgaatgggagatccgtgtaaagatgggagagagagttcgcatcaaatttggtgactttgacattgaagattctgattcttgtcactttaattacttgagaatttataatggaattggagtcagcagaactgaaataggcaaatactgtggtctggggttgcaaatgaaccattcaattgaatcaaaaggcaatgaaatcacattgctgttcatgagtggaatccatgtttctggacgcggatttttggcctcatactctgttatagataaacaagatctaattacttgtttggacactgcatccaattttttggaacctgagttcagtaagtactgcccagctggttgtctgcttccttttgctgagatatctggaacaattcctcatggatatagagattcctcgccattgtgcatggctggtgtgcatgcaggagtagtgtcaaacacgttgggcggccaaatcagtgttgtaattagtaaaggtatcccctattatgaaagttctttggctaacaacgtcacatctgtggtgggacacttatctacaagtctttttacatttaagacaagtggatgttatggaacactggggatggagtctggtgtgatcgcggatcctcaaataacagcatcatctgtgctggagtggactgaccacacagggcaagagaacagttggaaacccaaaaaagccaggctgaaaaaacctggaccgccttgggctgcttttgccactgatgaataccagtggttacaaatagatttgaataaggaaaagaaaataacaggcattataaccactggatccaccatggtggagcacaattactatgtgtctgcctacagaatcctgtacagtgatgatgggcagaaatggactgtgtacagagagcctggtgtggagcaagataagatatttcaaggaaacaaagattatcaccaggatgtgcgtaataactttttgccaccaattattgcacgttttattagagtgaatcctacccaatggcagcagaaaattgccatgaaaatggagctgctcggatgtcagtttattcctaaaggtcgtcctccaaaacttactcaacctccacctcctcggaacagcaatgacctcaaaaacactacagcccctccaaaaatagccaaaggtcgtgccccaaaatttacgcaaccactacaacctcgcagtagcaatgaatttcctgcacagacagaacaaacaactgccagtcctgatatcagaaatactaccgtaactccaaatgtaaccaaagatgtagcgctggctgcagttcttgtccctgtgctggtcatggtcctcactactctcattctcatattagtgtgtgcttggcactggagaaacagaaagaaaaaaactgaaggcacctatgacttaccttactgggaccgggcaggttggtggaaaggaatgaagcagtttcttcctgcaaaagcagtggaccatgaggaaaccccagttcgctatagcagcagcgaagttaatcacctgagtccaagagaagtcaccacagtgctgcaggctgactctgcagagtatgctcagccactggtaggaggaattgttggtacacttcatcaaagatctacctttaaaccagaagaaggaaaagaagcaggctatgcagacctagatccttacaactcaccagggcaggaagtttatcatgcctatgctgaaccactcccaattacggggcctgagtatgcaaccccaatcatcatggacatgtcagggcaccccacaacttcagttggtcagccctccacatccactttcaaggctacggggaaccaacctcccccactagtgggaacttacaatacacttctctccaggactgacagctgctcctcagcccaggcccagtatgataccccgaaagctgggaagccaggtctacctgccccagacgaattggtgtaccaggtgccacagagcacacaagaagtatcaggagcaggaagggatggggaatgtgatgtttttaaagaaatcctttgaagatgatgctgctttttacaaagcatcgttttaaagcacatggccttttttttttaattattagtggtagtaatatatagaatgtattacataactgtcactgaagtggttggggaaaatgtggtgactgaggtacaggaaactactaatcttgccatcttgctttaaggtgttatggtggcacagttactgctcgcctgttaaatttcaaatgtcctgtttgatactactgtagaacactatttttaatacagaaaaagctccctataatgcacttcagagaaattaaaaatcacagagtatttattaccaatgctgcaggtacattaatgaactcgagatggctctgtaagcctgactggcaataacgcacggtactgttcttgaaatacctaatggcttgaaattctagtctgtttgtgaaagatgggtactatcatgatttcctcttctattcctatattcttttctggattttttttaataattagtgatataagcattgtttttattgcagccatatccacttatccatcttaagatctgtagctgggattttctgacttgtaatgagcagggggattgctttttcactttgtgacactctttagagctttaatgcttcacagtatatggcctggtctcatccttgcgtgttccacttgaggccctttggtgtcttgccccattcttgtgtttataaaatgtttgagtatttctgatgagtgatgcttgccttagtctcatgaattcagatcccttcatgtcctttaagtatgctcctcaatgtgtaaacaggaacaactttatgatttgaaagctttaaaggagattcttctcccacccccaactttatttgcaatgggatttttcctaggagagttatgaaaagttgaaggcttctaagggaatactgtaaacatgacccacttatatttatcacagtgaaaggcaaaattattcactcagaagtaatataaattacctctttaaaaagtaaccagaatttgtcctttttggttttatacattcacaaacatatacatttttcttgagtctcaaggtattttatatttttagtcagaaaaaataatttttcatttcagttttccataaactgttacacaaaatataaacctaacgtgtatttttcaggactgcgtgatcgtgcactttgtgtggtaagaggtttgagtagtcctatatgtcacctagggaacagacattatagcttactagcaaatgaatattcatgccttgtttttgatacctcctggcagcttccatgtcaccacttgttcatacctgcccagagctagttttagacatggcaaaatagaaatcatctgtaatttattagctaacaatgtaaaaccatcttttaaagccttcagactgtcaagacgacatgagcagctcaccatatgataaaaatacataaatttgacattccctcttccataaacctttgtttgtagatttaatgttgaacagtacttttccataaagttctagtcacttctgttggcctgagccaccagattatgatgttgccagaattcactcaatttgaataaagatgaacagtatttgttttcttgtttccatgaattatatcagtattctaaaacatcgcttcagaaagagaactgtttatttctgcaggcttcctgtccttttgtggtatggttttttggccttattttcactggcttttccttctccaaactttgaggcgtgatttcattcattgaagaatcaatacatattttgtttcaaaatgtttgaaacaaaagacatagatggtagacttttattaaaacatatatggatgtggaaagcacatatattaatgcagtcatcccttttcaggtgggaagagagcaaaccagttgattttttaattcatccttagtacacagagaatatacttttcctcaagtaatatacctgtttgaagctttaagagagatgtttttggtaactatttcattttcccaaagaagtttgctattcttgtgttaattgtgtatacctgattgttttttcctggaggtttttgttgttgttgtttagttttgggtttttttttttttaagaggggcaagtgttttctgaaatgatgcatattttaagactcgattcatattgccactgtgctatccttgaactaccaataatttttataaaatatctagtttttactacttttatataaactttactttccagatgaagagctgagcctgattcaaatggtttttctgctttatacttctttttagttcattggtttttatagtagaggttttctattttttttttttttttttttactacatttatatgtctgatacatatacggctttggagacaatcaagtaacaactgaaaatgtgaaagtaaccatatctgacaaaattcccttgaatttttatcctttgcttgcaacatttaagactcaaagtcactggtatattggattaagttttttcctgttaatgcaattatagaaatacatcggagacacaacaaatgtggccattacaggtttcataaaattacactgacttggctgttacttgatcttaggaaacagcacagtttaagatattgtgaattctgacttatactttattaaatgctgtaaatctaaatagatcctgttggatgtgatgggtctagtccagtttatttaagttcatgtttcactgtttgcactttgcattgaacaatgggtttattcgctgatgtaaacggttcgagtgaagaattaatgcagtaagtatgacaacacatacacacttgcctctccccatctccagaagaggggagcagagtccgagcttatctaaatatgaatgtggccacaaagctgtggaaggtgacaaagcttaaacacctttgccctggctctgcattgtcacctagagagcaagaggtctatagaaacatcatgtcacatgaaacgattctctgctttttggttctgaacttgaagtccctaaactgcaaaatctaagagttgggtggttattaaaatgcttttaaagtcaactgtggcaccaattctaatgtaatccaacttgtgactgtttttttttgttttgttttgtttttgtgtgtgtgtgtgtggcactgggaaaagtggaaacaaacatgtattgaaatacatattggaaataaaaatggtttgagcgtcagtgatattctcccagaatgtacttatcttacctcggcatgtactgtagtcactcagtatttgtatatgttgctagaatttagattgtaaaatagtgaaattttaatgtgttcatttgtttttaatgtatatatgtcttgctcagattatttggtttaaataaaacaaccttgaggtttgtagcttttccttatactata

SEQ ID NO: 14488 - DNA, 2856 bp, Homo sapiens
gcttcccatacggcagtggctgggggagagtgatggagagaaaggctaagctaaggtcaaagaaagtggaggaaggctggcttgtcccgctggacttgacggcggagctgctgcaatctcgcgggctgggcccttgccccgggtggacccgagtgcctgcggggaggcgggtgtggctcccccgggaggtgacagctggcggggcccgtaaggagctggtctgctccggctcccctctcgtagccggcgccctgggaccagcgcgtgagcacgtctcggaggagtccgatgcgctgggcagggccgggtggtcacccccgcccagcttccaggggtgactgtgcctctgacgtcagacggtttttgggtcattccctggcacggggactttattttcataacagcatgaagtgccgtggaactggaataggcgtgtcctctccctcgaccctccccctccttgtccctctgctcacccctcgctcgttccctccctccggcgagggccgcctttataacaactgctcagagtgcgagggcgggatagctgtccaaggtctcccccagcactgaggagctcgcctgctgccctcttgcgcgcgggaagcagcaccaagttcacggccaacgccttggcactagggtccagaatggctacaacagtccctgatggttgccgcaatggcctgaaatccaagtactacagactttgtgataaggctgaagcttggggcatcgtcctagaaacggtggccacagccggggttgtgacctcggtggccttcatgctcactctcccgatcctcgtctgcaaggtgcaggactccaacaggcgaaaaatgctgcctactcagtttctcttcctcctgggtgtgttgggcatctttggcctcaccttcgccttcatcatcggactggacgggagcacagggcccacacgcttcttcctctttgggatcctcttttccatctgcttctcctgcctgctggctcatgctgtcagtctgaccaagctcgtccgggggaggaagcccctttccctgttggtgattctgggtctggccgtgggcttcagcctagtccaggatgttatcgctattgaatatattgtcctgaccatgaataggaccaacgtcaatgtcttttctgagctttccgctcctcgtcgcaatgaagactttgtcctcctgctcacctacgtcctcttcttgatggcgctgaccttcctcatgtcctccttcaccttctgtggttccttcacgggctggaagagacatggggcccacatctacctcacgatgctcctctccattgccatctgggtggcctggatcaccctgctcatgcttcctgactttgaccgcaggtgggatgacaccatcctcagctccgccttggctgccaatggctgggtgttcctgttggcttatgttagtcccgagttttggctgctcacaaagcaacgaaaccccatggattatcctgttgaggatgctttctgtaaacctcaactcgtgaagaagagctatggtgtggagaacagagcctactctcaagaggaaatcactcaaggttttgaagagacaggggacacgctctatgccccctattccacacattttcagctgcagaaccagcctccccaaaaggaattctccatcccacgggcccacgcttggccgagcccttacaaagactatgaagtaaagaaagagggcagctaactctgtcctgaagagtgggacaaatgcagccgggcggcagatctagcgggagctcaaagggatgtgggcgaaatcttgagtcttctgagaaaactgtacaagacactacgggaacagtttgcctccctcccagcctcaaccacaattcttccatgctggggctgatgtgggctagtaagactccagttcttagaggcgctgtagtatttttttttttttgtctcatcctttggatacttcttttaagtgggagtctcaggcaactcaagtttagacccttactctttttgtttgttttttgaaacaggatcttgctctgtcacccaggcttgagtgcagtggtgcgatcacagcccagtgcagcctcgaccacctgtgctcaagcaatcctcccatctccatctcccaaagtgctgggatgacaggcgtgagccacagctcccagcctaggcccttaatcttgctgttattttccatggactaaaggtctggtcatctgagctcacgctggctcacacagctctaggggcctgctcctctaactcacagtgggttttgtgaggctctgtggcccagagcagacctgcatatctgagcaaaaatagcaaaagcctctctcagcccactggcctgaatctacactggaagccaacttgctggcacccccgctccccaacccttcttgcctgggtaggagaggctaaagatcaccctaaatttactcatctctctagtgctgcctcacattgggcctcagcagctccccagcaccaattcacaggtcacccctctcttcttgcactgtccccaaacttgctgtcaattccgagatctaatctccccctacgctctgccaggaattctttcagacctcactagcacaagcccggttgctccttgtcaggagaatttgtagatcattctcacttcaaattcctggggctgatacttctctcatcttgcaccccaacctctgtaaatagatttaccgcatttacggctgcattctgtaagtgggcatggtctcctaatggaggagtgttcattgtataataagttattcacctgagtatgcaataaagatgtggtggccactctttcatggtggtggcagcagttaccagtaaaaaaa

SEQ ID NO: 14489 - DNA, 3127 bp, Homo sapiens
gtttgcatagctccctggacttctgctttgcactgccctgcaggagtgggtggggaaaggaagtggctttgaggcacacagaggggcttgttgaggccaccggaggaagcttctgccaccaatatgggacctgtgcccagcctaccagaagagagcatctgaaaacatgtatcgacatggtaacccctctgcttgaagcctcacatggctccctattgccttggtgctgaacaccctatggctgaccgtggcccagcctctgcaacagctctgcctcctctccagtggtgaagacccagcctgctgagactcctcctgcagttcctcaacatgcctgcatttctgctgccgtcagggcctttgcgaaggttgttccttgtaactggaatgcccttccatccctttttttattcaaaaggctgcaattttaattgaagaaagttcccttccaaggttcatgagttgcctgacttgcccaccggtttcctgcaagatcccttggcctggcacttagtgctcaggaaatatttggtgatgggccaactgagtgagaaggtgggatctggtgggaaggaaaggcggaaggtagaaattctgctcacttcctcattcccacctcccaaggaacccctggtgtccctgtggaacccgctttgggaaccggtggttcaggtcagccttttcactttgtactcaaagccacatcgcattgaagccacaggtggggcaaggtcatgcatgactgagtctccaaatcccttcaccctgtttggttctgcaacggggattaggggagccccacgatttgttttcaaaggatgtccgggctccaggacaggatgccctgggtcacctgatgacaggtgtggtggttggaaagggccgggtttcagctccgggtacacttcctccttccttctgctgcgtggtgtggcctcttccacgtcctcagaatccagctgttactcgtccgcggcctctcagctctagggccctctgcacactggcccccccagtgtcacgggcatccagacgggatccagtgcatcctcttttagaagaaaggcctgtctccaggtccccgagtccctctagcatctcccagaaggtgtcaagacgcagcagtgtccaggagcggcagagactctgacccatggatcccctgggcccggccaagccacagtggtcgtggcgctgctgtctgaccacgctgctgtttcagctgctgatggctgtgtgtttcttctcctatctgcgtgtgtctcaagacgatcccactgtgtaccctaatgggtcccgcttcccagacagcacagggacccccgcccactccatccccctgatcctgctgtggacgtggccttttaacaaacccatagctctgccccgctgctcagagatggtgcctggcacggctgactgcaacatcactgccgaccgcaaggtgtatccacaggcagacgcggtcatcgtgcaccaccgagaggtcatgtacaaccccagtgcccagctcccacgctccccgaggcggcaggggcagcgatggatctggttcagcatggagtccccaagccactgctggcagctgaaagccatggacggatacttcaatctcaccatgtcctaccgcagcgactccgacatcttcacgccctacggctggctggagccgtggtccggccagcctgcccacccaccgctcaacctctcggccaagaccgagctggtggcctgggcagtgtccaactgggggccaaactccgccagggtgcgctactaccagagcctgcaggcccatctcaaggtggacgtgtacggacgctcccacaagcccctgccccagggaaccatgatggagacgctgtcccggtacaagttctatctggccttcgagaactccttgcaccccgactacatcaccgagaagctgtggaggaacgccctggaggcctgggccgtgcccgtggtgctgggccccagcagaagcaactacgagaggttcctgccacccgacgccttcatccacgtggacgacttccagagccccaaggacctggcccggtacctgcaggagctggacaaggaccacgcccgctacctgagctactttcgctggcgggagacgctgcggcctcgctccttcagctgggcactcgctttctgcaaggcctgctggaaactgcaggaggaatccaggtaccagacacgcggcatagcggcttggttcacctgagaggctggtgtggggcctgggctgccaggaacctcattttcctggggcctcacctgagtgggggcctcatctacctaaggactcgtttgcctgaagcttcacctgcctgaggactcacctgcctgggacggtcacctgttgcagcttcacctgcctggggattcacctacctgggtcctcactttcctggggcctcacctgctggagtcttcggtggccaggtatgtcccttacctgggatttcacatgctggcttccaggagcgtcccctgcggaagcctggcctgctggggatgtctcctggggactttgcctactggggacctcggctgttggggactttacctgctgggacctgctcccagagaccttccacactgaatctcacctgctaggagcctcacctgctggggacctcaccctggaggcactgggccctgggaactggcacccatgggcccacccatgagtgatggttctggctgatttgtttgtgatgttgttagccgcctgtgaggggtgcagagagataatcaccgcaccgtttccagatgtaatactgcaaagaaaaccaatgatgaggccgggtgcggtggctcacacctgtaatcccagcactttgggaggccgaggcaggcggatcacaaggtcaggagatcgagaccatcctggccaatatggtgaaacccgtctctattaaaaaatacaaaaattagtggggcgtggtctcaggctcctgcagtcccagctacttgggaggctgaggcaggagaatggtgtgaacctgtgaggtggagcttgcagtgagccaagatcgcgccattgcactccaacctggacgacagagcaagactccatctcaaaaaaataaaataaaggccatatgtttaatca

SEQ ID NO: 14490 - DNA, 1988 bp, Homo sapiens
gattacagacatgagccacctcgcccagccttttcatggctgagtgatattccattgtgtggatggatcacactagctactctgacccatggatcccctgggcccagccaagccacagtggctgtggcgccgctgtctggccgggctgctgtttcagctgctggtggctgtgtgtttcttctcctacctgcgtgtgtcccgagacgatgccactggatcccctaggccagggcttatggcagtggaacctgtcaccggggctcccaatgggtcccgctgccaggacagcatggcgacccctgcccaccccaccctactgatcctgctgtggacgtggccttttaacacacccgtggctctgccccgctgctcagagatggtgcccggcgcggccgactgcaacatcactgccgactccagtgtgtacccacaggcagacgcggtcatcgtgcaccactgggatatcatgtacaaccccagtgccaacctcccgccccccaccaggccgcaggggcagcgctggatctggttcagcatggagtcccccagcaactgccggcacctggaagccctggacggatacttcaatctcaccatgtcctaccgcagcgactccgacatcttcacgccctacggctggctggagccgtggtccggccagcctgcccacccaccgctcaacctctcggccaagaccgagctggtggcctgggcggtgtccaactggaagccggactcggccagggtgcgctactaccagagcctgcaggctcatctcaaggtggacgtgtacggacgctcccacaagcccctgcccaaggggaccatgatggagacgctgtcccggtacaagttctatctggccttcgagaactccttgcaccccgactacatcaccgagaagctgtggaggaacgccctggaggcctgggccgtgcccgtggtgctgggccccagcagaagcaactacgagaggttcctgccacccgacgccttcatccacgtggacgacttccagagccccaaggacctggcccggtacctgcaggagctggacaaggaccacgcccgctacctgagctactttcactggcgggagacgctgcggcctcgctccttcagctgggcactggctttctgcaaggcctgctggaagctgcagcaggaatctaggtaccagacggtgcgcagcatagcggcttggttcacctgagaggccggcatggggcctgggctgccgggacctcactttcccagggcctcacctacctagggtctcactagtcgggggatttacctacctggggcctcggctgcctggggcctcggctgcctggggtctcacctgcctggggcctcacctgctggagtctttggtggccaggcatgtgacttacctgggatttcacttgccgggcttcactgccaggagcctcccctgctggggaccttgccagctggggctggggatggtgcctactggggaccttgctttctggaggctgcacctactgaggatctcggctgttggggactttacctgctgggacctgctcccagagaccttgccacactgaatgtcacctgctaggagcctcacccgctgggaggcacagggcccaagggagctggatgtgttgcccaaggtgtgcagggcaggtcagggaagggcagggtcccctaaggaggagggcgaagggtatgtgtgtgaccatcagcagtggtgtgcacatggctgggggacactcggtttgaccgccagcggatgggtgtcacaaatgcatcactatgggtgtgacctcggcgtgactctgatagtgcctgtggatgtgttgcgatgcctcaccctggagggcactgggccctgagaacgggtgcccttgaggccctgcccccgggcgatggtgcaggctggtttgcttgtggttttattgctgttgttaaccacccatgaggggtgcaaacagataatgctgttaacattttca

SEQ ID NO: 14491 - DNA, 2583 bp, Homo sapiens
gttcccacttcctcccgccccaggaaacctgccatggcctcctggtgagctgtcctcatccactgctcgctgcctctccagatcttcagttgcttcaggccactttgaatgtatatgagccggtcgtaggggatatcgatggcttagcttgggctcagaggcctgaaaatcgcccccaccaatcacctgtttcccccaatctaccctcctgaaggtcactgacaaagacttcattgtctcctaggagaggctgccatatatcagggctgacgtaattccatcttaatatcagttacattataaaaatttacctcgtgcctgaggccccagagcccaagggtgcaaagcagtaattagtcaaagttcaacttcccctcccactctgggctcaggctgtccctgagggcctgtgttttgagtctctttccagaaccttggtgtgaacttaggtcttggcgtcgggatcccttttcgtcacactcaggtgacctacaggctccgctcgacactgcaaggcttagaccagttcggtccaacagagaaagcaggcaaccaccatgtcatttgaaaacagtttcatcgggatataattcgcaacccatacagtgaatccatttaagatactctgacccatggatcccctgggtgcagccaagccacaatggccatggcgccgctgtctggccgcactgctatttcagctgctggtggctgtgtgtttcttctcctacctgcgtgtgtcccgagacgatgccactggatcccctagggctcccagtgggtcctcccgacaggacaccactcccacccgccccaccctcctgatcctgctatggacatggcctttccacatccctgtggctctgtcccgctgttcagagatggtgcccggcacagccgactgccacatcactgccgaccgcaaggtgtacccacaggcagacacggtcatcgtgcaccactgggatatcatgtccaaccctaagtcacgcctcccaccttccccgaggccgcaggggcagcgctggatctggttcaacttggagccaccccctaactgccagcacctggaagccctggacagatacttcaatctcaccatgtcctaccgcagcgactccgacatcttcacgccctacggctggctggagccgtggtccggccagcctgcccacccaccgctcaacctctcggccaagaccgagctggtggcctgggcggtgtccaactggaagccggactcagccagggtgcgctactaccagagcctgcaggctcatctcaaggtggacgtgtacggacgctcccacaagcccctgcccaaggggaccatgatggagacgctgtcccggtacaagttctacctggccttcgagaactccttgcaccccgactacatcaccgagaagctgtggaggaacgccctggaggcctgggccgtgcccgtggtgctgggccccagcagaagcaactacgagaggttcctgccacccgacgccttcatccacgtggacgacttccagagccccaaggacctggcccggtacctgcaggagctggacaaggaccacgcccgctacctgagctactttcgctggcgggagacgctgcggcctcgctccttcagctgggcactggatttctgcaaggcctgctggaaactgcagcaggaatccaggtaccagacggtgcgcagcatagcggcttggttcacctgagaggccggcatggtgcctgggctgccgggaacctcatctgcctggggcctcacctgctggagtcctttgtggccaaccctctctcttacctgggacctcacacgctgggcttcacggctgccaggagcctctcccctccagaagacttgcctgctagggacctcgcctgctggggacctcgcctgttggggacctcacctgctggggacctcacctgctggggaccttggctgctggaggctgcacctactgaggatgtcggcggtcggggactttacctgctgggacctgctcccagagaccttgccacactgaatctcacctgctggggacctcaccctggagggccctgggccctggggaactggcttacttggggccccacccgggagtgatggttctggctgatttgtttgtgatgttgttagccgcctgtgaggggtgcagagagatcatcacggcacggtttccagatgtaatactgcaaggaaaaatgatgacgtgtctcctcactctagaggggttggtcccatgggttaagagctcaccccaggttctcacctcaggggttaagagctcagagttcagacaggtccaagttcaagcccaggaccaccacttatagggtacaggtgggatcgactgtaaatgaggacttctggaacattccaaatattctggggttgagggaaattgctgctgtctacaaaatgccaagggtggacaggcgctgtggctcacgcctgtaattccagcactttgggaggctgaggtaggaggattgattgaggccaagagttaaagaccagcctggtcaatatagcaagaccacgtctctaaataaaaaataataggccggccagca

SEQ ID NO: 14492 - DNA, 2503 bp, Homo sapiens
agcatagtttcatttcctgctcttgaatatctggttgaactacttaagcttaatttgttaaactccggtaagtacctagcccacatgatttgactcagagattctcttttgtccacagacagtcatctcaggagcagaaagaaaagagctcccaaatgctatatctattcaggggctctcaagaacaatggaatatcatcctgatttagaaaatttggatgaagatggatatactcaattacacttcgactctcaaagcaataccaggatagctgttgtttcagagaaaggatcgtgtgctgcatctcctccttggcgcctcattgctgtaattttgggaatcctatgcttggtaatactggtgatagctgtggtcctgggtaccatggctatttggagatccaattcaggaagcaacacattggagaatggctactttctatcaagaaataaagagaaccacagtcaacccacacaatcatctttagaagacagtgtgactcctaccaaagctgtcaaaaccacaggggttctttccagcccttgtcctcctaattggattatatatgagaagagctgttatctattcagcatgtcactaaattcctgggatggaagtaaaagacaatgctggcaactgggctctaatctcctaaagatagacagctcaaatgaattgatttcagatcagaaccacagctacccaagaaaacccatctccaaattgtgtatggattcacgtgtcagtcatttatgaccaactgtgtagtgtgccctcatatagtatttgtgagaagaagttttcaatgtaagaggaagggtggagaaggagagagaaatatgtgaggtagtaaggaggacagaaaacagaacagaaaagagtaacagctgaggtcaagataaatgcagaaaatgtttagagagcttggccaactgtaatcttaaccaagaaattgaagggagaggctgtgatttctgtatttgtcgacctacaggtaggctagtattatttttctagttagtagatccctagacatggaatcagggcagccaagcttgagtttttattttttatttatttatttttttgagatagggtctcactttgttacccaggctggagtgcagtggcacaatctcgactcactgcagctatctctcgcctcagcccctcaagtagctgggactacaggtgcatgccaccatgccaggctaatttttggtgttttttgtagagactgggttttgccatgttgaccaagctggtctctaactcctgggcttaagtgatctgcccgccttggcctcccaaagtgctgggattacagatgtgagccaccacacctggccccaagcttgaattttcattctgccattgacttggcatttaccttgggtaagccataagcgaatcttaatttctggctctatcagagttgtttcatgctcaacaatgccattgaagtgcacggtgtgttgccacgatttgaccctcaacttctagcagtatatcagttatgaactgagggtgaaatatatttctgaatagctaaatgaagaaatgggaaaaaatcttcaccacagtcagagcaattttattattttcatcagtatgatcataattatgattatcatcttagtaaaaagcaggaactcctactttttctttatcaattaaatagctcagagagtacatctgccatatctctaatagaatctttttttttttttttttttttgagacagagtttcgctcttgttgcccaggctggagtgcaacggcacgatctcggctcaccgcaacctccgccccctgggttcaagcaattctcctgcctcagcctcccaagtagctgggattacagtcaggcaccaccacacccggctaattttgtatttttttagtagagacagggtttctccatgtcggtcagggtagtcccgaactcctgacctcaagtgatctgcctgcctcggcctcccaagtgctgggattacaggcgtgagccactgcacccagcctagaatcttgtataatatgtaattgtagggaaactgctctcataggaaagttttctgctttttaaatacaaaaatacataaaaatacataaaatctgatgatgaatataaaaaagtaaccaacctcattggaacaagtattaacattttggaatatgttttattagttttgtgatgtactgttttacaatttttaccatttttttcagtaattactgtaaaatggtattattggaatgaaactatatttcctcatgtgctgatttgtcttatttttttcatactttcccactggtgctatttttatttccaatggatatttctgtattactagggaggcatttacagtcctctaatgttgattaatatgtgaaaagaaattgtaccaattttactaaattatgcagtttaaaatggatgattttatgttatgtggatttcatttcaataaaaaaaaactcttatcaaaaaaaaaaaaaaaa

SEQ ID NO: 14493 - DNA, 2365 bp, Homo sapiens
agcatagtttcatttcctgctcttgaatatctggttgaactacttaagcttaatttgttaaactccggtaagtacctagcccacatgatttgactcagagattctcttttgtccacagacagtcatctcaggagcagaaagaaaagagctcccaaatgctatatctattcaggggctctcaagaacaatggaatatcatcctgatttagaaaatttggatgaagatggatatactcaattacacttcgactctcaaagcaataccaggatagctgttgtttcagagaaaggatcgtgtgctgcatctcctccttggcgcctcattgctgtaattttgggaatcctatgcttggtaatactggtgatagctgtggtcctgggtaccatgggggttctttccagcccttgtcctcctaattggattatatatgagaagagctgttatctattcagcatgtcactaaattcctgggatggaagtaaaagacaatgctggcaactgggctctaatctcctaaagatagacagctcaaatgaattgatttcagatcagaaccacagctacccaagaaaacccatctccaaattgtgtatggattcacgtgtcagtcatttatgaccaactgtgtagtgtgccctcatatagtatttgtgagaagaagttttcaatgtaagaggaagggtggagaaggagagagaaatatgtgaggtagtaaggaggacagaaaacagaacagaaaagagtaacagctgaggtcaagataaatgcagaaaatgtttagagagcttggccaactgtaatcttaaccaagaaattgaagggagaggctgtgatttctgtatttgtcgacctacaggtaggctagtattatttttctagttagtagatccctagacatggaatcagggcagccaagcttgagtttttattttttatttatttatttttttgagatagggtctcactttgttacccaggctggagtgcagtggcacaatctcgactcactgcagctatctctcgcctcagcccctcaagtagctgggactacaggtgcatgccaccatgccaggctaatttttggtgttttttgtagagactgggttttgccatgttgaccaagctggtctctaactcctgggcttaagtgatctgcccgccttggcctcccaaagtgctgggattacagatgtgagccaccacacctggccccaagcttgaattttcattctgccattgacttggcatttaccttgggtaagccataagcgaatcttaatttctggctctatcagagttgtttcatgctcaacaatgccattgaagtgcacggtgtgttgccacgatttgaccctcaacttctagcagtatatcagttatgaactgagggtgaaatatatttctgaatagctaaatgaagaaatgggaaaaaatcttcaccacagtcagagcaattttattattttcatcagtatgatcataattatgattatcatcttagtaaaaagcaggaactcctactttttctttatcaattaaatagctcagagagtacatctgccatatctctaatagaatctttttttttttttttttttttgagacagagtttcgctcttgttgcccaggctggagtgcaacggcacgatctcggctcaccgcaacctccgccccctgggttcaagcaattctcctgcctcagcctcccaagtagctgggattacagtcaggcaccaccacacccggctaattttgtatttttttagtagagacagggtttctccatgtcggtcagggtagtcccgaactcctgacctcaagtgatctgcctgcctcggcctcccaagtgctgggattacaggcgtgagccactgcacccagcctagaatcttgtataatatgtaattgtagggaaactgctctcataggaaagttttctgctttttaaatacaaaaatacataaaaatacataaaatctgatgatgaatataaaaaagtaaccaacctcattggaacaagtattaacattttggaatatgttttattagttttgtgatgtactgttttacaatttttaccatttttttcagtaattactgtaaaatggtattattggaatgaaactatatttcctcatgtgctgatttgtcttatttttttcatactttcccactggtgctatttttatttccaatggatatttctgtattactagggaggcatttacagtcctctaatgttgattaatatgtgaaaagaaattgtaccaattttactaaattatgcagtttaaaatggatgattttatgttatgtggatttcatttcaataaaaaaaaactcttatcaaaaaaaaaaaaaaaa

SEQ ID NO: 14494 - DNA, 6948 bp, Homo sapiens
ccaagtacctagggtggtggccgagtcccgcctcccgccagcgggggcgaggacctgcgacgcgcacccctgcctggcccggtctcctcagcaccagccccacgcacaccctacttcctcagcttctcgccctcaccctgccaacttccctgcgaggagggacctgccgccagcctgcttcctcgtccgcaggccctgcgctgaacgctgccgcgcccagggttcaccttgcgccgtcgggaaagcccatgaactctccagaaacggcgtaaaggagggtcccgccgcggcgcagggctggggcgcctgggttccccctgggtggagcagcggcagcagagcgggaaagtggtggaggatgatcttgcggccaaaggggacctcggcgcagtaatgtcaacatgatgtttcgctcagatcgaatgtggagctgccattggaaatggaagcccagtcctctcctgttcttatttgctttatatatcatgtgtgttcctcactcagtgtggggatgtgccaactgccgagtggttttgtccaacccttctgggacctttacttctccatgctaccctaacgactacccaaacagccaggcttgcatgtggacgctccgagcccccaccggttatatcattcagataacatttaacgactttgacattgaagaagctcccaattgcatttatgactcattatcccttgataatggagagagccagactaaattttgtggagcaactgccaaaggcctatcatttaactcaagtgcgaatgagatgcatgtgtccttttcaagtgactttagcatccagaagaaaggtttcaatgccagctacatcagagttgccgtgtccttaaggaatcaaaaggtcattttaccccagacatcagatgcttaccaggtatctgttgcaaaaagcatctctattccagagctcagtgctttcacactctgctttgaagcaaccaaagttggccatgaagacagtgattggacagctttctcctactcaaatgcatccttcacacaattgctcagttttggaaaggccaagagtggctactttctatccatttctgattcaaaatgtttgttgaataatgcattacctgtcaaagaaaaagaagacatttttgcagaaagctttgaacagctctgccttgtttggaataattctttgggctctattggtgtaaatttcaaaagaaactatgaaacagttccatgtgattctaccattagtaaagttattcctgggaatgggaaattgttgttgggctccaatcaaaatgaaattgtctctctaaaaggggacatttataactttcgactttggaattttaccatgaatgccaaaatcctctccaacctcagctgtaatgtgaaagggaatgtagtcgactggcaaaatgacttctggaatatcccaaacctagctctgaaagctgaaagcaacctaagctgtggttcctacctgatcccgctcccagcagcagaactggccagctgtgcagacctggggaccctctgtcaagctactgtaaactctcctagtactacaccacccactgtcaccactaacatgcctgttactaacagaatcgataaacaaaggaatgatggaattatctatagaatatccgtagtgattcagaacatccttcgtcaccctgaggtaaaagtacagagcaaggtggcagaatggctcaattcaaccttccaaaattggaactacacggtttatgtcgttaatatcagttttcacctgagtgctggagaggacaagattaaagtcaagagaagccttgaggatgagccaaggttggtgctttgggcccttctagtttacaatgctaccaacaatactaatttagaaggaaaaatcattcagcagaagctcctaaaaaataatgagtccttggatgaaggcttgaggctacatacagtgaatgtgagacaactgggtcattgtcttgccatggaggaacccaaaggctactactggccatctatccaaccttctgaatacgttcttccttgtccagacaagcctggcttttctgcttctcggatatgtttttacaatgctaccaacccattggtaacctactggggacctgttgatatctccaactgtttaaaagaagcaaatgaagttgctaaccagattttaaatttaactgctgatgggcagaacttaacctcagccaatattaccaacattgtggaacaggtcaaaagaattgtgaataaagaagaaaacattgatataacacttggctcaactctaatgaatatattttctaatatcttaagcagttcagacagtgacttgcttgagtcatcttctgaagctttaaaaacaattgatgaattggccttcaagatagacctaaatagcacatcacatgtgaatattacaactcggaacttggctctcagcgtatcatccctgttaccagggacaaatgcaatttcaaattttagcattggtcttccaagcaataatgaatcgtatttccagatggattttgagagtggacaagtggatccactggcatctgtaattttgcctccaaacttacttgagaatttaagtccagaagattctgtattagttagaagagcacagtttactttcttcaacaaaactggacttttccaggatgtaggaccccaaagaaaaactttagtgagttatgtgatggcgtgcagtattggaaacattactatccagaatctgaaggatcctgttcaaataaaaatcaaacatacaagaactcaggaagtgcatcatcccatctgtgccttctgggatctgaacaaaaacaaaagttttggaggatggaacacgtcaggatgtgttgcacacagagattcagatgcaagtgagacagtctgcctgtgtaaccacttcacacactttggagttctgatggaccttccaagaagtgcctcacagttagatgcaagaaacactaaagtcctcactttcatcagctatattgggtgtggaatatctgctattttttcagcagcaactctcctgacatatgttgcttttgagaaattgcgaagggattatccctccaaaatcttgatgaacctgagcacagccctgctgttcctgaatctcctcttcctcctagatggctggatcacctccttcaatgtggatggactttgcattgctgttgcagtcctgttgcatttcttccttctggcaacctttacctggatggggctagaagcaattcacatgtacattgctctagttaaagtatttaacacttacattcgccgatacattctaaaattctgcatcattggctggggtttgcctgccttagtggtgtcagttgttctagcgagcagaaacaacaatgaagtctatggaaaagaaagttatgggaaagaaaaaggtgatgaattctgttggattcaagatccagtcatattttatgtgacctgtgctgggtattttggagtcatgttttttctgaacattgccatgttcattgtggtaatggtgcagatctgtgggaggaatggcaagagaagcaaccggaccctgagagaagaagtgttaaggaacctgcgcagtgtggttagcttgacctttctgttgggcatgacatggggttttgcattctttgcctggggacccttaaatatccccttcatgtacctcttctccatcttcaattcattacaaggcttatttatattcatcttccactgtgctatgaaggagaatgttcagaaacagtggcggcggcatctctgctgtggtagatttcggttagcagataactcagattggagtaagacagctaccaatatcatcaagaaaagttctgataatctaggaaaatctttgtcttcaagctccattggttccaactcaacctatcttacatccaaatctaaatccagctctaccacctatttcaaaaggaatagccacacagataatgtctcctatgagcattccttcaacaaaagtggatcactcagacagtgcttccatggacaagtccttgtcaaaactggcccatgctgatggagatcaaacatcaatcatccctgtccatcaggtcattgataaggtcaagggttattgcaatgctcattcagacaacttctataaaaatattatcatgtcagacaccttcagccacagcacaaagttttaatgtctttaagaaaaagaaatcaatctgcagaaatgtgaagatttgcaagcagtgtaaactgcaactagtgatgtaaatgtgctattacctaggtaactgcatatatataaggaatgtattttgttaagaaggcttttgtgaaattcagaatttttctttttaatatatttcttccatggaagagttgtcatcactaaaacttcagtactgagagtaacatgactcagtagccacagaagctatgatttgtaaaatatataattgaatcagagtaatcataatgcaggggagacattcaaattagagacaagggagaagcaatgctgaggaagaccctagatagagctcattttactccacctaatcgttatatctggatatacccattttctgcatcttctttctcaacaataaaaaatgtaactattttgaatgcccacaaatcccattccagtgttactttctgtgaatgcagtaccatattctcattttcaatgacatttcaaccacaggcagaaaagactgtttactccttgacccaaagattaaaaaggattttttattattttaaatattacaccttcagaaccataacatgcttaagaaaactttcccaaaatgttgacctagttaaatgaggctatataaatttctaatattttacttattctattcaaggcatagggccaaagcattaagtataatttaatcccatacattcgagttaagtttagtgttgatgttccatcattctggacctcccaggagttgtttaagaatgaatctcttacacctctacttttgcccctctactgtatattaagcccataggcttgtgggaggaaggagaatttccattaggcaagctgtatgcagtggaattttccttttaggagacacacaattaagactctctggttctgtccttgctttggagactttaagacatttcctaaagcacaaataaaagcctcgtatttccccattgagagttttgttccaaggaatatgaagtgagacatatgggtgagtcataataatcaaaataatttatgaagagctgggtctgcaatagctagtctaaaaactacttgtgtgtcagtcctctggttatagtatataagagcctgaggaggtctggcaagatagatggtgtattatttatggatcaggctgctgcatacaaaccttgcatactattatgcagcttacctaactctcagactattctgagtaatgcttgcttgctaatgaatgtataggagaccacattgtaattgttcttagatgatggagtccatgcagtttcttagaaatcggtctcagtgcatgctgtgctttttcacatttgctctgggttatctgggaagtatcaggttctgggaggcaacagcattaagtgataagaaaaggagacattctggcaaagccaatctgcttaaaggcaaagtccagaacctggaacctagaggcctttctctctgcacgaaaaacaggtagtttgcagtctgagatatgggagagcttttaggctacacagcaacccaagggacctctcaccttttgctgagcttcaatcaggaagctatttgcctggctccagcagatgatgagataatgaggtagtgggttttttattactgttccattttgcaacatcctgcaacaccatcctgggagacaagagcattacccagcttggctttcacgggggagggttgtattcagtaaaaaagaatagtaaatataaggtcactgagattctaagtaagatagtaaatctaaggtcactgagccaaatccttttcaataggcatatattaacaggctgcttattttggcggaggttacatatggatgaaaatgaatcttagtcactgaatattcatatacatttcccccaaaaccttagacattcatagtagattttaattagttagctttctaactagtcagatttctgcccaaagtgcttagtcaatagtaattaagatataggtaattaagatatagcttcaaaaatggctttgcttttgatttctactcatattcgtatggctccagaaaaatatttttttcatatttgacaatgtcagctccactttagaaattttcaataaccagatgagaaaaaaattaagaaattgctcaagggaaacatttgtaaatggatttgaaagattgagccaaattctgttgtcagttctaagcatgcagttctcacctccatttagtcccccatcagaacagaggtcaggaatttagctggggagcctaaatttagttcagcttacctttgagaatagcatcaattcagactctcttttcattatgttttcttttctttttccctctttttaaactacattgtgttagagtcatagtctaggatcctgagagattttccattcttgtcaccattcacttgcattgtaaagattttctttgtctgttgttggcatagattcttttgtacatatttatttatttgtgtttatatatgtcaattggtttcctttcttagcttgatattgcctagctttgttgttttaattaactttctattagagagactgtatatattttttctaaatactttgtgaaatcatttttggtagcaatatctttgaatatgatgaataaaagtgactgtgagtgcaaatagaattagcagtaagaagctactctagctaatttgccattttacttaaatggaaaatgtttttcaaataaatacttatgttgttc

SEQ ID NO: 14495 - DNA, 939 bp, Homo sapiens
atggacggggtgaatgatagctccttgcagggctttgttctgatgagcatatcggaccatccccagctggagatgatcttttttatagccatcctcttctcctatttgctgaccctacttgggaactcaaccatcatcttgctttcccgcctggaggcccggctccatacacccatgtacttcttcctcagcaacctctcctccttggaccttgctttcgctactagttcagtcccccaaatgctgatcaatttatggggaccaggcaagaccatcagctatggtggctgcataacccagctctatgtcttcctttggctgggggccaccgagtgcatcctgctggtggtgatggcatttgaccgctacgtggcagtgtgccggcccctccgctacaccgccatcatgaacccccagctctgctggctgctggctgtgattgcctggctgggtggcttgggcaactctgtgatccagtcaacattcactctgcagctcccattgtgtgggcaccggagggtggagggattcctctgcgaggtgcctgccatgatcaaactggcctgtggcgacacgagtctcaaccaggctgtgctcaatggtgtctgcaccttcttcactgcagtcccactaagcatcatcgtgatctcctactgcctcattgctcaggcagtgctgaaaatccactctgcagaggggaggcgaaaggcgttcaatacgtgcctctcccatctgctggtggtgttcctcttctatggctcagccagctatgggtatctgcttccggccaagaacagcaaacaggaccagggcaagttcatttccctgttctactcgttggtcacacccatggtgaatcccctcatctacacgctgcggaacatggaagtgaagggcgcactgaggaggttgctggggaaaggaagagaagttggctga

SEQ ID NO: 14496 - DNA, 7785 bp, Homo sapiens
ctcactgtccctggaatcttcaagggagttactgcattacatcatcagaaacaaggcatttctatattactatggaaagatttcgtctggagaagaagttacctggtcctgatgaagaagctgttgtggatcttggcaaaactagctcaactgtgaacaccaagtttgaaaaagaagaactagaaagtcatagagctgtatatattggtgttcacgtcccgtttagtaaagagagtcgtcggcgtcataggcatcgcggacacaaacatcaccaccggaggagaaaagataaagaatcagataaagaagatggacgggaatctccttcttatgatacaccatcccagagagttcagtttatccttggtactgaagatgatgatgaagaacatattccccatgatctcttcacggaaatggatgaactgtgttacagagatggagaagaatatgaatggaaagaaactgctagatggctgaaatttgaagaggatgttgaagatggcggtgaccgatggagtaaaccttatgtggcaactctctctttgcacagtctttttgaactaaggagttgcatcctcaatggaacagtcatgctggatatgagagcaagcactctagatgaaatagcagatatggtattagacaacatgatagcttctggccaattagacgagtccatacgagagaatgtcagagaagctcttctgaagagacatcatcatcagaatgagaaaagattcaccagtcggattcctcttgttcgatcttttgcagatataggcaagaaacattctgaccctcacttgcttgaaaggaatggggaaggcctttcagcctcccgccactctttgcgaacaggtctgtctgcctcaaacctttccttgagaggagaatcacctttatctcttcttctcggtcatcttcttccttcttcaagagctggaacccctgcaggctcaaggtgtacaaccccagtacccacccctcaaaacagtcctccttctagccctagcatcagccgcctgacctccagaagttcccaaaagagtcagcgtcaggccccagaactactggtttcacctgccagtgatgatattcccacagtagtaattcatccgcctgaggaagacttagaagcagcgctgaaaggcgaggagcagaagaatgaggaaaatgttgacttaactccaggtattttggcctctccccagtctgctcctggaaacttggacaatagtaaaagtggagaaattaaaggtaatggaagtggtggaagcagagaaaatagtactgttgacttcagcaaggttgatatgaatttcatgagaaaaattcctacgggtgctgaggcatccaacgtcctggtgggcgaagtagactttttggaaaggccaataattgcatttgtgagactggctcctgctgtcctccttacagggttgactgaggtccctgttccaaccaggtttttgtttttgttattgggtccagcgggcaaggcaccacagtaccatgaaattggacgatcaatagccactctcatgacagatgagattttccatgatgtagcttataaagcaaaagacagaaatgacctcttatctggaattgatgaatttttagatcaagtaactgtcctacctccaggagagtgggatccttctatacgcatagaaccaccaaaaagtgtcccttctcaggaaaagagaaagattcctgtgtttcacaatggatctacccccacactgggtgagactcctaaagaggccgctcatcatgctgggcctgagctacagaggactggacggctttttggtggtttgatacttgacatcaaaaggaaagcaccttttttcttgagtgacttcaaggatgcattaagcctgcagtgcctggcctcgattcttttcctatactgtgcctgtatgtctcctgtaatcacttttggagggctgcttggagaagctacagaaggcagaataagtgcaatagagtctctttttggagcatcattaactgggattgcctattcattgtttgctgggcaacctctaacaatattggggagcacaggtccagttctagtgtttgaaaaaattttatataaattctgcagagattatcaactttcttatctgtctttaagaaccagtattggtctgtggacttcttttttgtgcattgttttggttgcaacagatgcaagcagccttgtgtgttatattactcgatttacagaagaggcttttgcagcccttatttgcatcatattcatctacgaggctttggagaagctctttgatttaggagaaacatatgcatttaatatgcacaacaacttagataaactgaccagctactcatgtgtatgtactgaacctccaaatcccagcaatgaaactctagcacaatggaagaaagataatataacagcacacaatatttcctggagaaatcttactgtttctgaatgtaaaaaacttcgtggtgtattcttggggtcagcttgtggtcatcatggaccttatattccagatgtgctcttttggtgtgtcatcttgtttttcacaacattttttctgtcttcattcctcaagcaatttaagaccaagcgttactttcctaccaaggtgcgatcgacaatcagtgattttgctgtatttctcacaatagtaataatggttacaattgactaccttgtaggagttccatctcctaaacttcatgttcctgaaaaatttgagcctactcatccagagagagggtggatcataagcccactgggagataatccttggtggaccttattaatagctgctattcctgctttgctttgtaccattctcatctttatggatcaacaaatcacagctgtaattataaacagaaaggaacacaaattgaagaaaggagctggctatcaccttgatttgctcatggttggcgttatgttgggagtttgctctgtcatgggacttccatggtttgtggctgcaacagtgttgtcaataagtcatgtcaacagcttaaaagttgaatctgaatgttctgctccaggggaacaacccaagtttttgggaattcgtgaacagcgggttacagggctaatgatttttattctaatgggcctctctgtgttcatgacttcagtcctaaagtttattccaatgcctgttctgtatggtgttttcctttatatgggagtttcctcattaaaaggaatccagttatttgaccgtataaaattatttggaatgcctgctaagcatcagcctgatttgatatacctccgttatgtgccgctctggaaggtccatattttcacagtcattcagcttacttgtttggtccttttatgggtgataaaagtttcagctgctgcagtggtttttcccatgatggttcttgcattagtgtttgtgcgcaaactcatggacctgtgtttcacgaagagagaacttagttggcttgatgatcttatgccagaaagtaagaaaaagaaagaagatgacaaaaagaaaaaagagaaagaggaagctgaacggatgcttcaagacgatgatgatactgtgcaccttccatttgaagggggaagtctcttgcaaattccagtcaaggccctaaaatatagtcctgataaacctgtgagtgtgaaaataagttttgaagatgaaccaagaaagaaatacgtggatgctgaaacttcattatagaattgaaccaagaggcattatacatatagatatatacatatgtaatgtgtgcgtatcatgtcactatatataagaatattgtatgtcatgctgtttatgtgtgactaccgggtttttaaaagtagtgtctggagtttgtaatgagcaccgtggagactatgtatttaatgaaatgctctctttgaagtgaggtacatggttcttaactattcaaatatttattctgttagaaaaaaaaaattttctgttttgcaatagaaggatgtggagaaatgctttcagtctacttttcttaaatctctgttcatcagtggcaattcgtaaaaaccttaagtgatactttgtttatatgtttataatttttaggtgtttcctgaaattttcacatattatttcacttttgttagtgctttatgggaagaatagggagtctataccagtgctgtgggaaaaatggtaacatttcagggcttctctatttgtgtttcatttctgtagatgtccatcgtgtttcactaactggcgttttcttagccatagagatgactgtagaacaatagaaactttaataatgatagtttttaacttttatgtttaaattttttttaaatcttaaaaccttcatatctaggtatccattgtgacagacaagtaaaattgcaggtgatttgataattaagcacccataccatttataacttctgaatttaaaaagttatacaatgccagtttgcaatagttgattttgatgcctttgtagaatattttttctgaatccttatgctcttttaaagccaatgattcccactctgttctctgccttgtctctctttgtcttaaaatgctttagtttccatcaggttcaagttcttgactattattctcttataagtagtaggcgtaaataatcaggagttagaattctctcagaagggtctatgatcagtattactttattaagaattacctttcattttctctttatgttattctttcacttttgtagattacatttaatagcttgttacctgtgattttattttaaaatatttattttgatatgatgcttaaatattatataaacatttggaaaagtaacaaatagagtaaattgttaatgtaaatagttggtgcttactttcatttatgtttattatcttaaagcaattgatagattttacatctttgatataaagcactgccatatttatattttaaaaggaaattagacattttatatgtagctcagattaatgacatttttattttgtgtattagtttttgcttttctgagctttttaaagtctaacaaatctttttagtcatcttttatatacttttagttccacatgaaataaatgttgttaagcctgtaggactggatgaatggggttgtgaaactgatttgacaagagaataatttacaaaaatcaaatgagtattgagaagccacagaaatatcaaaaatggtgacatcactattaggatgaaaattttatgaaattccaatgctccctttaaccatataattaaattacaaaggtatacataattaatctaataaaggatcatgaggaatgccaaaagctgaaattttagcaagtctggtgttttaaattcattataaactatttattaactaatgtaatgtcctcctctaagaccatattgtaagagtcttgttaaaatgatggattcaacttctgcctcggatgagaggttggaaatgtagctgcttttctttagaaaatatgtagctgtcatcatttggtactgcctaaaaagagttagactctattggcaattgatagagtattacccacggtgcttattattgtttatgagcttccattgtaatgattcctttttatttgtagcagcataattatttccaaagaccccagtatttgctgctatttttaaaactcccctgatgtacctgaacaagaggatttcctcacatcatttccttgtgtctggacatcaggggtaacaactgtacttactttacaggaagaaattttaaaactgaaaactacctgggatcatagtgtttctgtgattttatttaattgtgtatagtaattatccagtgccagaaaaaccgtcacttgcaaaatactttgcactcaaaatgtttttacaatgcttctaaatgttactggtttctgctttcttttgactacttgactgacaaaatgatctgactactccatttaagagcaaaggtaactcatgtttaagtaattaactgcttgttttaagtgattatatttcttccactgtttttgaaaaataatcaaagatagcattcattgagagacagtgacagatataatttactacatatattgatttttaaataaagttgccttaaataagtgtatgtaagcagtagtagttgctatgtactgatttacctcaaggtgcaaaataattaaacctgtacatattccatttacaaaataaattcagccctgcactttctttagatgccttgatttccagaatggagcttagtgctactgaataccctggccacagagccacctcaggatattcttttctccaccctagtttatttatttatagatatctgtttacaaagtctgtagtaaatcctgatgctgaccatctgaaatgtactttttttctgaatgctgtttcaatctaaaatagcagcttttgagaaaacaatgatgtaaattccttatgataaaaggatgattctatatattctttaatgatattaaatatgccgaagccaagcacacagtctttctaaagtgtgtgtatgtttgtgtgaatgtgaatgatactgatcttatatctgttaaaagttgttttaaaaagctgtggcatcccattgttcatatttgccaagtcttctgtaaagatgtctaggacgaaatattttatgtgctaatgcatgtatttgtaaaccagatttgtttaccactcaaaattaacttgttttcttcatccaaaaaagtttatgtcttccacgtacttaaattttctgtgtgggtataatatagctttctaatttttttctttcacaaaggcaggttcaaaattctgttgaaagaaaaatgctttctgaaactgaggtataacaccagagcttgctgtttaaaggattatatgatgtacatcagttctataaatgtgctcagcagtttaacatgtgaatcctgttttaaagtgctcagatttcaactgtgtaagccattgatataacgctgtaattaaaaatgtttatatgaaataacttaatgttttaaatttatttatgtagatcacatcatttttatcagtatgcagtgcaaatatgtgaaatgtcttttggtttattccaacaattatttattttagaaagtaagtttaaagactttaaggacattcaaagtttaaaatagtgttcaaattgcaaaatttggcaatcttcatataaattggtttcttttctaacttttcaaaaactaacattaaatgtcaattataggaaaacatagttggaaatgtaatcatcccaaagatcatttttaaaatgaaatttaattagcacatattgaacatttgacttaattgttaaaccccagttttgttttgtttttttaatcagatttttgcacactgattagtttttgtgttgtggcttttgttgctttattattcaaggtttttttttttctttccccatgggggagattgtcttccaatgtttaactacgtttaaataaataaaaattgaattttattgttcatttatataaaatctgataccttgatgtaatttcacaatacagttccaatttttatggcttttataattacaatgatattttcttctataataaaatccaaagtaaacatttaaattgtagaactgatatttttcatttatatgaagtataagcctctactgggtctatattgtgaatcatcctgcctttcaaatttgtttcataattgttagatgaaaactatttttttggagatgttactgaagttgattgagcaataaaagtctacttaattaaaaaaaaaaaaaaaaaaaaaaaaaaaa

SEQ ID NO: 14497 - DNA, 1331 bp, Homo sapiens
accactgtggttctactatgccttctgaccccgtcttggacttcaactgggagaatgtggagccatttgaacaggctcctcttctggagcatattttcttctgtcacttgtagaaaagctgtattggattgtgaggcaatgaaaacaaatgaattcccttctccatgtttggactcaaagactaaggtggttatgaagggtcaaaatgtatctatgttttgttcccataagaacaaatcactgcagatcacctattcattgtttcgacgtaagacacacctgggaacccaggatggaaaaggtgaacctgcgatttttaacctaagcatcacagaagcccatgaatcaggcccctacaaatgcaaagcccaagttaccagctgttcaaaatacagtcgtgacttcagcttcacgattgtcgacccggtgacttccccagtgctgaacattatggtcattcaaacagaaacagaccgacatataacattacattgcctctcagtcaatggctcgctgcccatcaattacactttctttgaaaaccatgttgccatatcaccagctatttccaagtatgacagggagcctgctgaatttaacttaaccaagaagaatcctggagaagaggaagagtataggtgtgaagctaaaaacagattgcctaactatgcaacatacagtcaccctgtcaccatgccctcaacaggcggagacagctgtcctttctgtctgaagctactacttccagggttattactgttgctggtggtgataatcctaattctggctttttgggtactgcccaaatacaaaacaagaaaagctatgagaaataatgtgcccagggaccgtggagacacagccatggaagttggaatctatgcaaatatccttgaaaaacaagcaaaggaggaatctgtgccagaagtgggatccaggccgtgtgtttccacagcccaagatgaggccaaacactcccaggagctacagtatgccacccccgtgttccaggaggtggcaccaagagagcaagaagcctgtgattcttataaatctggatatgtctattctgaactcaacttctgaaatttacagaaacaaactacatctcaggtagagacagggttttgccatgttggccaggctggtcttcaactcctgacctcaagtgatccgcccacctcggactcccaaagtgctgggattacaggcgtgagccacctcgcctggccctccatttcctgatctagtcttatatccacgctcaccacctcagcacgctcagacccacgctgctgtgggctcctctggctcctggaagagtgcgtccg

SEQ ID NO: 14498 - DNA, 2297 bp, Homo sapiens
ccacgcgtccgttcggcagctccagttcagctcgctcggcgcacccacgcctcgctgccccgcttcctgccctcaacctgggcatgcgccccccacccttccggccccccagaacccgcgccatcccccggagcctccccagagctggccgcgcaggatgggcgccctcaggcccacgctgctgccgccttcgctgccgctgctgctgctgctaatgctaggaatgggatgctgggcccgggaggtgctggtccccgaggggcccttgtaccgcgtggctggcacagctgtctccatctcctgcaatgtgaccggctatgagggccctgcccagcagaacttcgagtggttcctgtataggcccgaggccccagatactgcactgggcattgtcagtaccaaggatacccagttctcctatgctgtcttcaagtcccgagtggtggcgggtgaggtgcaggtgcagcgcctacaaggtgatgccgtggtgctcaagattgcccgcctgcaggcccaggatgccggcatttatgagtgccacaccccctccactgatacccgctacctgggcagctacagcggcaaggtggagctgagagttcttccagatgtcctccaggtgtctgctgcccccccagggccccgaggccgccaggccccaacctcacccccacgcatgacggtgcatgaagggcaggagctggcactgggctgcctggcgaggacaagcacacagaagcacacacacctggcagtgtcctttgggcgatctgtgcccgaggcaccagttgggcggtcaactctgcaggaagtggtgggaatccggtcagacttggccgtggaggctggagctccctatgctgagcgattggctgcaggggagcttcgtctgggcaaggaagggaccgatcggtaccgcatggtagtagggggtgcccaggcaggggacgcaggcacctaccactgcactgccgctgagtggattcaggatcctgatggcagctgggcccagattgcagagaaaagggccgtcctggcccacgtggatgtgcagacgctgtccagccagctggcagtgacagtggggcctggtgaacgtcggatcggcccaggggagcccttggaactgctgtgcaatgtgtcaggggcacttcccccagcaggccgtcatgctgcatactctgtaggttgggagatggcacctgcgggggcacctgggcccggccgcctggtagcccagctggacacagagggtgtgggcagcctgggccctggctatgagggccgacacattgccatggagaaggtggcatccagaacataccggctacggctagaggctgccaggcctggtgatgcgggcacctaccgctgcctcgccaaagcctatgttcgagggtctgggacccggcttcgtgaagcagccagtgcccgttcccggcctctccctgtacatgtgcgggaggaaggtgtggtgctggaggctgtggcatggctagcaggaggcacagtgtaccgcggggagactgcctccctgctgtgcaacatctctgtgcggggtggccccccaggactgcggctggccgccagctggtgggtggagcgaccagaggacggagagctcagctctgtccctgcccagctggtgggtggcgtaggccaggatggtgtggcagagctgggagtccggcctggaggaggccctgtcagcgtagagctggtggggccccgaagccatcggctgagactacacagcttggggcccgaggatgaaggcgtgtaccactgtgcccccagcgcctgggtgcagcatgccgactacagctggtaccaggcgggcagtgcccgctcagggcctgttacagtctacccctacatgcatgccctggacaccctatttgtgcctctgctggtgggtacaggggtggccctagtcactggtgccactgtccttggtaccatcacttgctgcttcatgaagaggcttcgaaaacggtgatcccttactcctcaggtcttgcaggtgtcgactgtcttccggcccagctccaagccctcctctggttgcctggacaccctctccctctgtccactcttcctttaatttatttgacctcccactacccagaatgggagacgtgcctccccttccccactccttccctcccaagcccctccctctggccttctgttcttgatctcttagggatcctatagggaggccatttcctgtcctggaattagtttttctaaaatgtgaataaacttgttttataaaaagcaaaaaaaaaaaaaaa

SEQ ID NO: 14499 - DNA, 5826 bp, Homo sapiens
gaggaggagacggcatccagtacagaggggctggacttggacccctgcagcagccctgcacaggagaagcggcatataaagccgcgctgcccgggagccgctcggccacgtccaccggagcatcctgcactgcagggccggtctctcgctccagcagagcctgcgcctttctgactcggtccggaacactgaaaccagtcatcactgcatctttttggcaaaccaggagctcagctgcaggaggcaggatggtctggaggctggtcctgctggctctgtgggtgtggcccagcacgcaagctggtcaccaggacaaagacacgaccttcgaccttttcagtatcagcaacatcaaccgcaagaccattggcgccaagcagttccgcgggcccgaccccggcgtgccggcttaccgcttcgtgcgctttgactacatcccaccggtgaacgcagatgacctcagcaagatcaccaagatcatgcggcagaaggagggcttcttcctcacggcccagctcaagcaggacggcaagtccaggggcacgctgttggctctggagggccccggtctctcccagaggcagttcgagatcgtctccaacggccccgcggacacgctggatctcacctactggattgacggcacccggcatgtggtctccctggaggacgtcggcctggctgactcgcagtggaagaacgtcaccgtgcaggtggctggcgagacctacagcttgcacgtgggctgcgacctcatagacagcttcgctctggacgagcccttctacgagcacctgcaggcggaaaagagccggatgtacgtggccaaaggctctgccagagagagtcacttcaggggtttgcttcagaacgtccacctagtgtttgaaaactctgtggaagatattctaagcaagaagggttgccagcaaggccagggagctgagatcaacgccatcagtgagaacacagagacgctgcgcctgggtccgcatgtcaccaccgagtacgtgggccccagctcggagaggaggcccgaggtgtgcgaacgctcgtgcgaggagctgggaaacatggtccaggagctctcggggctccacgtcctcgtgaaccagctcagcgagaacctcaagagagtgtcgaatgataaccagtttctctgggagctcattggtggccctcctaagacaaggaacatgtcagcttgctggcaggatggccggttctttgcggaaaatgaaacgtgggtggtggacagctgcaccacgtgtacctgcaagaaatttaaaaccatttgccaccaaatcacctgcccgcctgcaacctgcgccagtccatcctttgtggaaggcgaatgctgcccttcctgcctccactcggtggacggtgaggagggctggtctccgtgggcagagtggacccagtgctccgtgacgtgtggctctgggacccagcagagaggccggtcctgtgacgtcaccagcaacacctgcttggggccctccatccagacacgggcttgcagtctgagcaagtgtgacacccgcatccggcaggacggcggctggagccactggtcaccttggtcttcatgctctgtgacctgtggagttggcaatatcacacgcatccgtctctgcaactccccagtgccccagatggggggcaagaattgcaaagggagtggccgggagaccaaagcctgccagggcgccccatgcccaatcgatggccgctggagcccctggtccccgtggtcggcctgcactgtcacctgtgccggtgggatccgggagcgcacccgggtctgcaacagccctgagcctcagtacggagggaaggcctgcgtgggggatgtgcaggagcgtcagatgtgcaacaagaggagctgccccgtggatggctgtttatccaacccctgcttcccgggagcccagtgcagcagcttccccgatgggtcctggtcatgcggctcctgccctgtgggcttcttgggcaatggcacccactgtgaggacctggacgagtgtgccctggtccccgacatctgcttctccaccagcaaggtgcctcgctgtgtcaacactcagcctggcttccactgcctgccctgcccgccccgatacagagggaaccagcccgtcggggtcggcctggaagcagccaagacggaaaagcaagtgtgtgagcccgaaaacccatgcaaggacaagacacacaactgccacaagcacgcggagtgcatctacctgggccacttcagcgaccccatgtacaagtgcgagtgccagacaggctacgcgggcgacgggctcatctgcggggaggactcggacctggacggctggcccaacctcaatctggtctgcgccaccaacgccacctaccactgcatcaaggataactgcccccatctgccaaattctgggcaggaagactttgacaaggacgggattggcgatgcctgtgatgatgacgatgacaatgacggtgtgaccgatgagaaggacaactgccagctcctcttcaatccccgccaggctgactatgacaaggatgaggttggggaccgctgtgacaactgcccttacgtgcacaaccctgcccagatcgacacagacaacaatggagagggtgacgcctgctccgtggacattgatggggacgatgtcttcaatgaacgagacaattgtccctacgtctacaacactgaccagagggacacggatggtgacggtgtgggggatcactgtgacaactgccccctggtgcacaaccctgaccagaccgacgtggacaatgaccttgttggggaccagtgtgacaacaacgaggacatagatgacgacggccaccagaacaaccaggacaactgcccctacatctccaacgccaaccaggctgaccatgacagagacggccagggcgacgcctgtgaccctgatgatgacaacgatggcgtccccgatgacagggacaactgccggcttgtgttcaacccagaccaggaggacttggacggtgatggacggggtgatatttgtaaagatgattttgacaatgacaacatcccagatattgatgatgtgtgtcctgaaaacaatgccatcagtgagacagacttcaggaacttccagatggtccccttggatcccaaagggaccacccaaattgatcccaactgggtcattcgccatcaaggcaaggagctggttcagacagccaactcggaccccggcatcgctgtaggttttgacgagtttgggtctgtggacttcagtggcacattctacgtaaacactgaccgggacgacgactatgccggcttcgtctttggttaccagtcaagcagccgcttctatgtggtgatgtggaagcaggtgacgcagacctactgggaggaccagcccacgcgggcctatggctactccggcgtgtccctcaaggtggtgaactccaccacggggacgggcgagcacctgaggaacgcgctgtggcacacggggaacacgccggggcaggtgcgaaccttatggcacgaccccaggaacattggctggaaggactacacggcctataggtggcacctgactcacaggcccaagactggctacatcagagtcttagtgcatgaaggaaaacaggtcatggcagactcaggacctatctatgaccaaacctacgctggcgggcggctgggtctatttgtcttctctcaagaaatggtctatttctcagacctcaagtacgaatgcagagatatttaaacaagatttgctgcatttccggcaatgccctgtgcatgccatggtccctagacacctcagttcattgtggtccttgtggcttctctctctagcagcacctcctgtcccttgaccttaactctgatggttcttcacctcctgccagcaaccccaaacccaagtgccttcagaggataaatatcaatggaactcagagatgaacatctaacccactagaggaaaccagtttggtgatatatgagactttatgtggagtgaaaattgggcatgccattacattgctttttcttgtttgtttaaaaagaatgacgtttacatataaaatgtaattacttattgtatttatgtgtatatggagttgaagggaatactgtgcataagccattatgataaattaagcatgaaaaatattgctgaactacttttggtgcttaaagttgtcactattcttgaattagagttgctctacaatgacacacaaatcccattaaataaattataaacaagggtcaattcaaatttgaagtaatgttttagtaaggagagattagaagacaacaggcatagcaaatgacataagctaccgattaactaatcggaacatgtaaaacagttacaaaaataaacgaactctcctcttgtcctacaatgaaagccctcatgtgcagtagagatgcagtttcatcaaagaacaaacatccttgcaaatgggtgtgacgcggttccagatgtggatttggcaaaacctcatttaagtaaaaggttagcagagcaaagtgcggtgctttagctgctgcttgtgccgctgtggcgtcggggaggctcctgcctgagcttccttccccagctttgctgcctgagaggaaccagagcagacgcacaggccggaaaaggcgcatctaacgcgtatctaggctttggtaactgcggacaagttgcttttacctgatttgatgatacatttcattaaggttccagttataaatattttgttaatatttattaagtgactatagaatgcaactccatttaccagtaacttattttaaatatgcctagtaacacatatgtagtataatttctagaaacaaacatctaataagtatataatcctgtgaaaatatgaggcttgataatattaggttgtcacgatgaagcatgctagaagctgtaacagaatacatagagaataatgaggagtttatgatggaaccttaaatatataatgttgccagcgattttagttcaatatttgttactgttatctatctgctgtatatggaattcttttaattcaaacgctgaaaagaatcagcatttagtcttgccaggcacacccaataatcagtcatgtgtaatatgcacaagtttgtttttgtttttgttttttttgttggttggtttgtttttttgctttaagttgcatgatctttctgcaggaaatagtcactcatcccactccacataaggggtttagtaagagaagtctgtctgtctgatgatggatagggggcaaatctttttcccctttctgttaatagtcatcacatttctatgccaaacaggaacaatccataactttagtcttaatgtacacattgcattttgataaaattaattttgttgtttcctttgaggttgatcgttgtgttgttgttttgctgcactttttacttttttgcgtgtggagctgtattcccgagaccaacgaagcgttgggatacttcattaaatgtagcgactgtcaacagcgtgcaggttttctgtttctgtgttgtggggtcaaccgtacaatggtgtgggagtgacgatgatgtgaatatttagaatgtaccatattttttgtaaattatttatgtttttctaaacaaatttatcgtataggttgatgaaacgtcatgtgttttgccaaagactgtaaatatttatttatgtgttcacatggtcaaaatttcaccactgaaaccctgcacttagctagaacctcatttttaaagattaacaacaggaaataaattgtaaaaaaggttttctatacatgaaaaaaaaaaaaaaaaaa

SEQ ID NO: 14500 - DNA, 2509 bp, Homo sapiens
ttccagcgttgcgagacggtcggttccaagtgggcctgggcgcgggggagaggcgggtctgtcctcgggaactgcaaggccctgtgagcgggaggactgggatcccggccgcggctgctggaagcgtcgaagctcagcgggccgcggacatgacctgtgcttagaactcatcctggcccgcagagcctgccgcgagtccctggcgtcccctgtggcgggctcttggagccactttcccgagcggaagtcagcccgcggctcggactccggcgggacctgctcggaggaatggcgccgccgggttcaagcactgtcttcctgttggccctgacaatcatagccagcacctgggctctgacgcccactcactacctcaccaagcatgacgtggagagactaaaagcctcgctggatcgccctttcacaaatttggaatctgccttctactccatcgtgggactcagcagccttggtgctcaggtgccagatgcaaagaaagcatgtacctacatcagatctaaccttgatcccagcaatgtggattccctcttctacgctgcccaggccagccaggccctctcaggatgtgagatctctatttcaaatgagaccaaagatctgcttctggcagctgtcagtgaggactcatctgttacccagatctaccatgcagttgcagctctaagtggctttggccttcccttggcatcccaagaagcactcagtgcccttactgctcgtctcagcaaggaggagactgtgctggcaacagtccaggctctgcagacagcatcccacctgtcccagcaggctgacctgaggagcatcgtggaggagattgaggaccttgttgctcgcctggatgaactcgggggcgtgtatctccagtttgaagaaggactggaaacaacagcgttatttgtggctgccacctacaagctcatggatcatgtggggactgagccatccattaaggaggatcaggtcatccagctgatgaacgcgatcttcagcaagaagaactttgagtccctctccgaagccttcagcgtggcctctgcagctgctgtgctctcgcataatcgctaccacgtgccagttgtggttgtgcctgagggctctgcttccgacactcatgaacaggctatcttgcggttgcaagtcaccaatgttctgtctcagcctctgactcaggccactgttaaactagaacatgctaaatctgttgcttccagagccactgtcctccagaagacatccttcacccctgtaggggatgtttttgaactaaatttcatgaacgtcaaattttccagtggttattatgacttccttgtcgaagttgaaggtgacaaccggtatattgcaaataccgtagagctcagagtcaagatctccactgaagttggcatcacaaatgttgatctttccaccgtggataaggatcagagcattgcacccaaaactacccgggtgacatacccagccaaagccaagggcacattcatcgcagacagccaccagaacttcgccttgttcttccagctggtagatgtgaacactggtgctgaactcactcctcaccagacatttgtccgactccataaccagaagactggccaggaagtggtgtttgttgccgagccagacaacaagaacgtgtacaagtttgaactggatacctctgaaagaaagattgaatttgactctgcctctggcacctacactctctacttaatcattggagatgccactttgaagaacccaatcctctggaatgtggctgatgtggtcatcaagttccctgaggaagaagctccctcgactgtcttgtcccagaaccttttcactccaaaacaggaaattcagcacctgttccgcgagcctgagaagaggccccccaccgtggtgtccaatacattcactgccctgatcctctcgccgttgcttctgctcttcgctctgtggatccggattggtgccaatgtctccaacttcacttttgctcctagcacgattatatttcacctgggacatgctgctatgctgggactcatgtatgtctactggactcagctcaacatgttccagaccttgaagtacctggccatcctgggcagtgtgacgtttctggctggcaatcggatgctggcccagcaggcagtcaagagaacagcacattagttccagaagaaagatggaaattctgaaaactgaatgtcaagaaaaggagtcaagaacaattcacagtatgagaagaaaaatggaaaaaaaaaactttatttaaaaaagaaaaaagtccagattgtagttatacttttgcttgtttttcagtttccccaacacacagcagatacctggtgagctcagatagtctctttctctgacactgtgtaagaagctgtgaatattcctaacttacccagatgttgcttttgaaaagttgaaatgtgtaattgttttggaataaagagggtaacaataggaacaaaaaaaaaaaaaaaaaaaa

SEQ ID NO: 14501 - DNA, 7482 bp, Homo sapiens
gcggcagctcttttccttcttcctccacttcccctaccctccaccgtccgggagccgccgccaccgccgccgaggagtcaggaagttcaagatggccgccgcggagacccagtcgctacgggagcagccagagatggaagatgctaattctgaaaagagtataaatgaagaaaatggagaagtatcagaagaccagtctcaaaataagcacagtcgtcacaaaaaaaagaagcataaacacagaagtaaacataagaaacataaacattcctcagaagaagacaaggataaaaaacataaacataagcataaacataagaaacacaaaagaaaagagattattgatgcttctgataaagagggtatgtctccagcaaaaagaactaaacttgatgatttagctttgctagaagacttggaaaaacagagagccttgattaaggccgaacttgataatgagttaatggaaggaaaggtccagtctggtatggggctcattttgcaaggttatgagtctggctctgaagaagagggggaaattcatgaaaaggcaagaaatggaaataggtctagtactagatcttcaagtacaaaggggaaacttgaacttgtggacaataaaattactacaaagaaacgaagtaaaagcagatccaaagaacggactagacataggtctgataaaaagaaaagtaaggggggtattgaaatcgttaaagagaaaacaactaggagcaagtcaaaggagaggaaaaaatctaaaagcccatccaaaagaagtaagtctcaagatcaagcaaggaaatcaaaatcccctacccttagaaggcgatctcaagagaaaattggtaaggccagatctcctactgatgataaggttaaaattgaagataaaagtaaatcaaaagataggaaaaaatccccaattataaatgaaagtagaagtcgcgatcgaggtaaaaaatccagatccccagttgatttaagaggtaaatccaaagacagaaggtcacggtccaaagagagaaaatcaaaacggtctgaaactgataaagaaaagaagccaattaaatctccctctaaagatgcttcatctgggaaagaaaataggtcacccagcagaagacctggtcgtagtcctaaaagaagaagtttgtctccaaaaccacgtgataaatcaagaagaagcaggtctccacttttgaatgatagaagatctaagcagagcaaatccccctcgcggacactgtctcctgggagaagagccaagagccgatccttagaaagaaaacgacgagaaccagagaggagacgactttcttctccaagaacacgacctcgagatgatatcctcagtagacgtgaaagatcaaaagatgccagccccatcaatagatggtctccaacccgaagaagaagtagatctcccattagaaggaggtctcgttccccactcagacgtagcaggtctccaagaagaagaagcagatctcctcggagaagggacagaggtcggaggagcagatcacgcttgcgaaggcggtctcgatcacgcggtggtcgtagacgaaggagcagaagcaaagtaaaggaagataaatttaaaggaagtctttctgaaggaatgaaagttgagcaggaatcttcgtctgatgataaccttgaagactttgatgtagaggaagaagatgaagaagccctaatagaacagagaagaatccaaaggcaggcaattgttcagaaatataaataccttgctgaagatagcaacatgtctgtgccatctgaaccaagcagcccccagagcagtacgagaacacgatcaccatctccagatgacattctggagcgagtagctgctgatgttaaagagtatgaacgggaaaatgttgatacatttgaggcctcagtgaaagccaagcataatctaatgacagttgaacagaataatggttcatctcagaagaagttgttggcacctgatatgtttacagaatctgatgatatgtttgctgcgtattttgatagtgctcgtcttcgggccgctggcattggaaaagatttcaaagagaatcccaacctcagagataactggaccgatgcagaaggctattatcgtgtgaacataggtgaagtcctagataaacgttacaatgtgtatggctacactgggcaaggtgtattcagtaatgttgtacgagccagagataatgcaagagccaaccaagaagtggctgtaaagatcatcagaaacaatgagctcatgcaaaagactggtttaaaagaattagagttcttgaaaaaacttaatgatgctgatcctgatgacaaatttcattgtctgagactcttcaggcacttctatcacaagcagcatctttgtctggtattcgagcctctcagcatgaacttacgagaggtgttaaaaaaatatggtaaagatgttggtcttcatattaaagctgtaagatcctatagtcagcagttgttcctggcattgaaactccttaaaagatgcaatatcctacatgcagatatcaagccagacaatatcctggttaatgaatccaaaactattttaaagctttgcgattttgggtcggcttcacatgttgcggataatgacataacaccttatcttgtcagtagattttatcgtgctcctgaaatcattataggtaaaagctatgactatggtatagatatgtggtctgtaggttgcaccttatacgaactctatactggaaaaattttattccctggcaaaaccaataaccatatgctgaagcttgcaatggatctcaaaggaaagatgccaaataagatgattcgaaaaggtgtgttcaaagatcagcattttgatcaaaatctcaacttcatgtacatagaagttgataaagtaacagagagggagaaagttactgttatgagcaccattaatccaactaaggacctgttggctgacttgattgggtgccagagacttcctgaagaccaacgtaagaaagtacaccagctaaaggacttgttggaccagattctgatgttggacccagctaaacgaattagcatcaaccaggccctacagcacgccttcatccaggaaaaaatttaaacaagatgaagaaactccaagggtttgagtaaatacaaagactgaagaaatttcacagcagtttattaatgtatataaacttataaatatttctccagcaaatttgaggaagcatgatatatttgaattaacaccaagggtgatatttcttttagagatgttagttaatctgttttgtgtcttacgtgaaatttcactgtagactgttttaaattgccaagactgcacaaaattacagtgctaatgtatatggttgcagttcacataaagacaaaagcatctgttatgaaatgagtagtaatattgggtggttgatttgttcttagcagacttggcttcattttggtcttgagataaaatggccagcataaatgctgtttatattcacgttttcctaggtgtgtgtgtgcaggccacagcagcatgcccttggtgtagtcagtgccgaaaggggtctgttccttcttgagcctgcctgcagggatggtctccttttaaagcaggttgtgtgcagcattcagtacactgaaggtaagctaaaccatcaacatctctggtgttttaagatgttattttattggaacaactgacaaatgagggatgttagctttgtggcagaattccctgcatgtgtgataactgatcttgttttattttttggcattgcaactgtggcatagttacaatttctgtttgttcatcacatttaaaattggaagagaacgcgcttgatggatagagcgccttcagtgtactgtttcttattaactttactttttttaaatcaacttgctatagactttatatacattttgttaaatatagttcctagtgacatagaaacgatgcgtagttttcatttactaattacaaatgttgaggcctaattctgaaagtcctcatatttaaaggctagacaacgtaatgaaatttttaactatttgtatgtcattttgaaagtgtactgctttatggtaaaagtgtttttcatttgttcattgttttcattatttgtgatcatgttgtctttcaatacaggcataaaccttccactcttgaacaaagcagctgctttttaaaagcggtaattgcttctttaccttttatttcttttgtaaatgaagcttttctttaagaatgtgactttaaagtgttgtctattgcataaaacagttgacactcacttattgtaaagtgaagattgttctactgcatgtgaagtggaccatgcagatttctgtatgttctcagtatgcatcactagataataaagtcttttgtgaacaaggcatttgtagccatttttaaaagtttttgtcttcagtgctggtaagtcaggtaaaccataaatagttaaaagcaaccttttgtttttttcctgaaagtttttaattgaaagtattattagttaaagatgtaaacctagccaaaattaccagtttattaataattaggatcctaattatttcaaaaaatcctacaaatattgtcagctttcagtgtagtgagattattcctgtaggttatggggtataattcaggatttaactaatgtttctgctattttctcacttttccttttgatggtgcggaaagagaaaaaggaaaacggggcacaggccattcgacgccttctccaaggggtctgatttgctgagacaccagcttcaccttcttaacaaggttatttctgacagcatgtgtagataaacatttagcaacaatttaagacaaaatcgtttaaatcagcttggttttgcaacacaaaggaatttgtattattaacatggtagaagagaatttttcagaaatatatgtaatctttgctgtttggggggtaaaattaatgcttgtctccctgaggaatatggaaaataatcagattttaggggtttaaataatatttttaaattgtaaatgggatttttttattcacccaggcacctaattacaacaagcatgcacattttggtgcattcaagaatggaaaatcagaatagcagcattgattcttctggtgggttttgctccatttaaagacatgaaatgaactacagccaggaaggtgatagatgatataataagccacctctgaacctacaccccgtctcttcacggtttagacttactaaaataaatacaaggtgattttcatcttcaggtagagtgaagccttttaattaaggcgtcacaggtgcagctattctaccttaatgaaatgggtagtgattttcccaccattatttatttcggtgataatatgctgcatattcaagtctcttgtagttattttcacccaaagtagttgacaatttgatgcttctggtgatgtttatggcttcattttatgtaattttttaagtaagttccactagaaacagttcatcttataccttcaaaactgttacctgttctttaaaaaacaaagttgcttgttacttgttctttgtgttttaggtgcagctcagtggaagatgatgacaaccagaagacatgagctaaggtttctgtcctataaaagatttattaaaaaacaatccttcatttattttttgtctaattttttagttttcagcattatgatttgggttttattggtgtttggtatttagaattagtgctgttgtggagtgcgtctgtaaagtgcttgttttatcatacttcctgcctctcccctcccccagtttctcctcccctaaaataaaaatagtggtcaactttagtaatataaaaggctgctggatgctgagattccacataacacatggttgtcaaaattggatgttaaggattcttagaaaaacagcaaccaccagaatagcatatatctgaaagtagtcttcagctttaggcagatgcaaaagaatacaaactggaatattaagaatactgttcaactcctttagtatctgttccccaacttaccctgtagaaacctcgttattaaccagtgttccagtcttaaagtagacaaaatattcagagccattttttttaagggaaatgaaaaagatactctgggttttttatactccccaatttagcatatctagactacctatttgaaaggaaccctatcaactgtcttatgtacgttacatgattttcctacactctgtaattttgctgaggtgcaatttggaactctgcaagacctactagattgaatttatttagtgaatgctcctgaataaatgtgcattcctcttttagagtagctgtatgcttttcaaatgctatctgccgtgaattttttgcttttattatactttatggcaaaagtgatatcaagtgattgtcagacttgagggctcatagaagtgttaggtacggctctcaaagatgttacagttttttctagggttgggagaatagttgagatctggaaagcatagacattttttacactctggatagactttattcttgaagatcatcagaaatgaggttggaatttcgaggttttgagcagggggagcatcttatattcacccttaaatcgttattaatacatcctgttttcttcattccctgatagctatctcatttcactctactgtctcaaaattttgttttaaaataatagaaatgttttgccattattaagtaccactttattcctaacaaaaataagtactcaggacttttttttcaaaatgaaatatttatgtactgttttatggtatgtggtagagtaagtaaaatgtaatgttctcagttttgttccatatttgcattcctcttatgctttacctgtattttatcatttgtaagcagaactctagctatatggggtagaaataaaatctctgagatgaaacaaaggaatcaacatgataaaatttaggcgaagtagttaagaaatggcccttttgaatgttgaagataggaaagaaagccatatattcaaatatgtaattttcctcatttagttataatgacatctttaccaattgggcttcataaatgtgtttctttcttaatagtatcctagttccagcatatattcaacatgaattttatcattctcctcctaatggaatgtcttccttatagaaatgttcacgacaaattcatttgtgttttttacatgtcaataatgtatgctaaattaaaatgttttccagttattctgatagatgtcattatggcatccttaatttttcttctccttctgtatatagggtaagggactgttctgaagaacctttccatttagtgatcaagatatggaagctgatttctgaaaatgctcagtgtgtactctaattatttatggtaccatttgaattgtaacttgcattttagcagtgcatgtttctaattgacttactgggaaactgaataaaatatgcctcttattatca

SEQ ID NO: 14502 - DNA, 3029 bp, Homo sapiens
ttaaattctaattagagatgcaggaatcaatgatagggaggttggacagctcagttccccagtgccagcccaatagacggatgagttattgtcatgtaaaaagcgccagcaataagaccaaccgctttgctattgtccaagtggaaagagccaagtttattatgaggactatatgctctagagacctcagacaaggcatctcataggaggctttttcataaaactaggctctgctggtagtaaggaggccagtttggaggcaggcgttgagctgtgcacatctccccactccagccaccttctccatatccatcttttatttcatttttccacttggctgagccatccagaaccttttcaatgtataaaatggaatattcttacctcaattcctctgcctacgagtcctgtatggctgggatggacacctcgagcctggcttcagcctatgctgacttcagttcctgcagccaggccagtggcttccagtataacccgataaggaccacttttggggccacgtccggctgcccttccctcacgccgggatcctgcagcctgggcaccctcagggaccaccagagcagtccgtacgccgcagttccttacaaactcttcacggaccacggcggcctcaacgagaagcgcaagcagcggcgcatccgcaccactttcaccagtgcccagctcaaagagctggaaagggtcttcgcggagactcactaccccgacatctacactcgggaggagctggccctgaagatcgacctcacagaggcgcgagtccaggtgtggttccagaaccgccgcgccaagtttcgcaagcaggagcgcgcagcggcagccgcagcggccgcggccaagaacggctcctcgggcaaaaagtctgactcttccagggacgacgagagcaaagaggccaagagcactgacccggacagcactgggggcccaggtcccaatcccaaccccacccccagctgcggggcgaatggaggcggcggcggcgggcccagcccggctggagctccgggggcggcggggcccgggggcccgggaggcgaacccggcaagggcggcgcagcagcagcggcggcggccgcggcagcggcggcggcggcagcggcagcggcggcagctggaggcctggctgcggctgggggccctggacaaggctgggctcccggccccggccccatcacctccatcccggattcgcttgggggtcccttcgccagcgtcctatcttcgctccaaagacccaacggtgccaaagccgccttagtgaagagcagtatgttctgatctggaatcctgcggcggcggcggcggcggcgacagcgggcgagccagggcccgggcgggcgagtgggcgagcgggtaggcccaaggctattgtcgtcgctgctgccatggctttttcattgagggcctaaagtaatcgcgctaagaataaagggaaaacggcgtcgccctcatttcaaccccactcctacccccttcctcaacccccaaacaaaacaaacaaacttccctggcttcgcacctgcctggggcctcgcagcggggccagggctccgcctgctgatcgggggttgtgagcagcgcggcctggacgcggggcactctcagggggctgtgtctgcgtgtcagtttgtgtctgtctcggggaatgtgtgtctgtggcccaagcaggtgacaggaagagatggggggcctcaaccaacttagtgacttgtttagaaaaaaaagacaaaaaagtaaaaataaaaacaaaaaagttggaaggcagaaaccattaaaaaacaaaaagccaacaacccagaaaggtttaaaaaacataaggaaaaaaaagacaaattaaaggaggggctaggggagaagctgcagctggagctgaaggctcgatcttgtgaacccctaaatccgctccctcctaacagcacggattctcttggggctcttcttcagggaagagtagggacgccgttccagccccccttcctatcgtgtccttgggttcgggtcactgcggcgacgacttgctcagactgtcccggcggccggagtgactttctcgcacccccttgcctgtcccacctcgctgaacaccatcccgccattagcgcatcggaaccccacacagttgcaactcccaaccccgaatctttgcagccgttcggccctgaaagatgccctatccatgagatgccttttcatctgcaaactctgcaaaatgtgtctcatgtttcgcaactctttttttccccctcgctcccgcctaccccgtcggcattttcttcttccaccagcttttactgaactttttggcactgctttggattggggtcaattgcagtccacgtaactggctgcagagaaatctaccgagcaaggaaaaggcacacacacacgtttgcaggggtgtctcggtttgcatttctgttggaatgatccgaactggactcacatcctgtatggtggatggactgtatattgagggttccattcttcgcgcagtttagacatctctgttttgattctttgttgttgtttttattttaaaaggcacaaactctagatattagttgaatgttgaggctttaactttttcggtgtctttctacaactgtgttctgtgactcaattgtatcgtgttaatatcagtgcagactgtctcctctacgtgaccgtataatgtttttctcgtcttgtagtctctatggcgtgtctttatggtgtaataaggttctcacggggtcaatcttttgtgtttagagaggccacggttcagacaatggtatatatttttgttatcaggtgcatgtctgtctgatttctttttttttcctgttggactatgtttgtgaacataattgtcataagttatgtttcagatttttgaatttatttatatgtgttataatgaatgcttctatttaaaagggaaatatttctacatgtgcttatagttttccaagagtgtaccattaacttgattgttgataataaaaaccaaaagcaagtct

SEQ ID NO: 14503 - DNA, 1472 bp, Homo sapiens
ggccactgagccggggtgcagtggcagcgggagagtacctggcgatggcgatatgagcggtgcgggggtggcggctgggacgcggccccccagctcgccgaccccgggctctcggcgccggcgccagcgcccctctgtgggcgtccagtccttgaggccgcagagcccgcagctcaggcagagcgacccgcagaaacggaacctggacctggagaaaagcctgcagttcctgcagcagcagcactcggagatgctggccaagctccatgaggagatcgagcatctgaagcgggaaaacaaggatctccattacaagctcataatgaatcagacatcacagaagaaagatggcccctcaggaaaccacctttccagggcctctgctcccttgggcgctcgctgggtctgcatcaacggagtgtgggtagagccgggaggacccagccctgccaggctgaaggagggctcctcacggacacacaggccaggaggcaagcgtgggcgtcttgcgggcggtagcgccgacactgtgcgctctcctgcagacagcctctccatgtcaagcttccagtctgtcaagtccatctctaattcaggcaaggccaggccccagcccggctccttcaacaagcaagattcaaaagctgacgtctcccagaaggcggacctggaagaggagcccctacttcacaacagcaagctggacaaagttcctggggtacaagggcaggccagaaaggagaaagcagaggcctctaatgcaggagctgcctgtatggggaacagccagcaccagggcaggcagatgggggcgggggcacaccccccaatgatcctgccccttcccctgcgaaagcccaccacacttaggcagtgcgaagtgctcatccgcgagctgtggaataccaacctcctgcagacccaagagctgcggcacctcaagtccctcctggaagggagccagaggccccaggcagccccggaggaagctagctttcccagggaccaagaagccacgcatttccccaaggtctccaccaagagcctctccaagaaatgcctgagcccacctgtggcggagcgtgccatcctgcccgcactgaagcagaccccgaagaacaactttgccgagaggcagaagaggctgcaggcaatgcagaaacggcgcctgcatcgctcagtgctttgagccaccccaatctggtcagtgccaggcccaccaacctgcagctggagactggctctctatagcatttcctgatacttccgctacttttaggcctggctaaattccaagacagataacactcaagatagataaagtacttgatctccaaactgacaaactgtttattttctagctgttattttgctatttggcatttacataaaagcacacgatgaagcaggtatcgccttacctgttgaaactgaaaataaagcttgtttatttccaaaaaaaaaaaaaaaaa

SEQ ID NO: 14504 - DNA, 3756 bp, Homo sapiens
agaaagccgagggtttccgtcgcgaacccccctccccactcgctcagggctctccaatccgcagctctgcgtgcgggggcgcgcgcatccccccgccgtccgtccgtcagctgtctgtctgggtgtctatgcgggcgcagcagtgcacccttccccagcctcgggcgctgcgcagggacagacaaggcattcgcagcgccctgcccgcgctccacgcccgcagccgccagacggcagcgcctgcgtccgtgcccgccccagccggtgcgcgggagccgcgggggcaaaggcgcagtggccagcggaccatctctcgtgccctcgctctctgcgctccggggcagctgagccccggccacccgctctccaagatgaagaagctccagggagctcacctccgcaagcctgtcaccccagacctgctgatgacccccagtgaccagggcgatgtcgacctggatgtggactttgctgcacaccgggggaactggacaggcaagctggacttcctgctgtcctgcattggctactgtgtaggcctggggaatgtctggcgcttcccctatcgagcgtacaccaatggaggaggcgccttcctcgtgccctacttcctcatgctggccatctgtggcatccccctcttcttcctggagctctccctgggccagttctccagcctagggcccctggctgtctggaaaatcagccctctcttcaaaggcgccggcgcagccatgctgctcatcgtgggcttggtggccatctactacaacatgatcatcgcctacgtgctcttctacctcttcgcctccctcaccagcgacctaccctgggagcactgtggcaactggtggaacacagaactctgcctggagcacagagtctccaaggacggcaacggggccctgcccctcaacctcacctgcaccgtcagccccagcgaggagtactggagccgctacgtcctccacatccaaggcagccagggcatcggcagccctggggagatccgctggaacctctgcctctgcctgctgctggcctgggtcatcgtgttcctctgtatcctcaagggtgtgaagtcttcgggcaaggtggtgtatttcacggccacgttcccctacctcatcctgctcatgctgctggtccgcggagtcaccctcccaggggcctggaagggcatccagttctatctcaccccccagttccaccacttgttgtcttccaaggtgtggattgaagctgctcttcagatcttctattccctgggtgtgggcttcggggggctcctcacctttgcctcctacaacacgtttcaccagaacatctatagagacactttcatcgtcactctgggcaacgccatcaccagcatcctggctggctttgccatcttctccgtgctgggctacatgtctcaggagctgggcgtgcctgtggaccaagtagccaaagcaggccctggcctggcctttgtcgtctacccacaggccatgaccatgctgcctctgtcacccttctggtcctttctcttcttcttcatgcttctgactctcggcctagatagccagtttgcttttctggagaccattgtgacagctgtgacagatgagttcccatactacctgcggcccaagaaggcggtgttctcagggctcatctgcgtggccatgtacctgatggggctgatcctcaccactgatgggggcatgtactggctggtccttctggatgactacagcgccagcttcgggctgatggtggtggttatcaccacgtgccttgccgtgacacgggtgtatggcattcagaggttctgccgagacatccacatgatgctgggcttcaagccgggcctctacttcagggcctgctggctgttcctgtccccagccacgctcttggccctcctggtgtatagcatcgtcaagtaccagccctcggagtatggcagttaccgcttcccgccctgggctgagctgctgggcatcctgatgggcctgctgtcctgcctcatgatcccagctggcatgctggtggctgtgcttcgagaagagggctcactctgggagcggctccaacaggccagccggccggccatggactggggaccatcgctggaggagaaccggacgggcatgtatgtggccacgctggctgggagccagtcaccaaagccactgatggtgcacatgcgcaagtacgggggcatcaccagcttcgagaacacggccatcgaggtggaccgtgagattgcagaggaggaggagtcgatgatgtgaggcaggaggcaggcgggcagaaggccctgcccgggacctcacagtcccttcttagaagcctgcaaaggtcagctgtgccctctgggattctgagaggctatgggggggcctgccatagggatgccagtcccccagtgggggtcccttctgcagcctctgcctctcctgaaacctctgacaaccccctacacacacacacaggcatactcagacccactcaaagctgagaatgatccaactcagccctactttgcggatggacatattaaggccaggaggggagggacttgccccaggtcgcatggcagaggggacttgaacccacgcctcctgaccagccagctccctttcccatggggcagccggcaccaccttctcatctctattcagggcctacacccctccctttttggggggagcctgtccccacacaccttagcacaaccagaatcttgagttgggcagggaaggtcagggctacagaggctcttgaggctccgaggccctggggatcaaaggtcaatgagttaggtggggagaaagatccctgggggctcctgtatgcaggactcctgaaggaggtgggagctgagggccctggaggatggggaaggtttgcagagagaggaagaagagggcagggtggggaggagctctgggccagaggatgctgagctgcctgggcagagaccaagagggttggagacactagttttaccaggttacaggagggttcaagacagaaggaaaactaacagagggggagccagggatgatggggtgggcaggggatttgcatgatgaggagtatcattccagatctgtgcagagcggatcggacgggacagggtggagcggggaggcctgtgcaaagtgggaaagagctgccggtggcctgagccagggtgctggggctgcgggtggggaaaggaggccccagcacttcagacaaagaccaccccttcacccactggaccccaagccgcaaaagctggggaggtaggaagggtcactgtgagggcccagggcccctctcttcccatctcccttgtcctggtggccttcagtgtctcttccagttccaggagctgctgggaagctggccttcattgttggtgacagggcaaccatgggactaggaggtggcccatacacatggctggctggtcctgaggccacccaccttgttccaggacatgggcccgggcccggtgtgggggtagacgcagagggcagagggtagcccttggtactgtgggtccctcaaagaggagagtggggtgcagaaatgcctcagcatggctcatgcacacagcattctcccgtggggcagggttccctcatgcaacaggcctccctgtggccagcctctctgcctgtctctcgctgtgtccccccaaccccttgtgttctattggttcattgttaataaatatcaaatgaggtcacgctccttaaaaaaaaaaaaaaaaaa

SEQ ID NO: 14505 - DNA, 2486 bp, Homo sapiens
cactgccattggtccacgggacggcccttccaggagccagtggctgggagcagtgctggaggatcaaggaagcagagatggacggtgaggcagtccgcttctgcacagataaccagtgtgtctccctgcacccccaagaggtggactctgtggcaatggctcctgcagcccccaagataccgaggctcgttcaggctaccccggcatttatggctgtgaccttggtcttctctcttgtgactctctttgtagtggttcaacagcagacaagacctgttccgaagcctgtgcaagccgtaattctgggagacaacattactgggcatttaccttttgaacccaacaatcatcaccactttggcagggaggcagaaatgcgagagcttatccagacatttaaaggccacatggagaattccagtgcctgggtagtagaaatccagatgttgaagtgcagagtggacaatgtcaattcgcagctccaggtgctcggtgatcatctgggaaacaccaatgctgacatccagatggtaaaaggagttctaaaggatgccactacattgagtttgcagacacagatgttaaggagttccctggagggaaccaatgctgagatccagaggctcaaggaagaccttgaaaaggcagatgctttaactttccagacgctgaatttcttaaaaagcagtttagaaaacaccagcattgagctccacgtgctaagcagaggcttagaaaatgcaaactctgaaattcagatgttgaatgccagtttggaaacggcaaatacccaggctcagttagccaatagcagtttaaagaacgctaatgctgagatctatgttttgagaggccatctagatagtgtcaatgacttgaggacccagaaccaggttttaagaaatagtttggaaggagccaatgctgagatccagggactaaaggaaaatttgcagaacacaaatgctttaaactcccagacccaggcctttataaaaagcagttttgacaacactagtgctgagatccagttcttaagaggtcatttggaaagagctggtgatgaaattcacgtgttaaaaagggatttgaaaatggtcacagcccagacccaaaaagcaaatggccgtctggaccagacagatactcagattcaggtattcaagtcagagatggaaaatgtgaataccttaaatgcccagattcaggtcttaaatggtcatatgaaaaatgccagcagagagatacagaccctaaaacaaggaatgaagaatgcttcagccttaacttcccagacccagatgttagacagcaatctgcagaaggccagtgccgagatccagaggttaagaggggatctagagaacaccaaagctctaaccatggaaatccagcaggagcagagtcgcctgaagaccctccatgtggtcattacttcacaggaacagctacaaagaacccaaagtcagcttctccagatggtcctgcaaggctggaagttcaatggtggaagcttatattatttttctagtgtcaagaagtcttggcatgaggctgagcagttctgcgtgtcccagggagcccatctggcatctgtggcctccaaggaggagcaggcatttctggtagagttcacaagtaaagtgtactactggatcggtctcactgacaggggcacagagggctcctggcgctggacagatgggacaccattcaacgccgcccagaacaaagcgcctggttccaagggatcctgcccactcagaaagtatattattgtgaattctgggatgggagcttgcagcttcatagacacccctccctgtccctggatcctcagtaactaagagcaacctgagcacagacaccctcagggtactccttctcccagccctgtcctcatcctagggccactaggggatgaaggacccatctcaagtcagctccctagactcatcccatgtcagctccctaggagccacagcaccaggaagggatgctgccttcatctaacagtataaagccctgttgtcttcgggttttgggaaaagaatcagtctgacaactggcggcacaagaatgggcagactgaagactgtgtccaaattcagcagaagtggaatgacatgacctgtgacaccccctatcagtgggtgtgcaagaagcccatgggccagggtgtggcctgagggcaggccagagctgaggggctgctcctgcttgccaatactgaccctcctcctcgatgccttcggagcctctgagctctgcttgttctctgggaccttccgttggccttgtggacttcctgccttgttctttgattcagccctttcaaacatgcttacctcgagtgacccagtgacatcagtggcttctcaagggaagagccttgctgtgcccctgtagcctcagcacccagcacaggcctgtcagacagcaggtcctcaataaatactcgctggatcaacaaaaaaaaaaaaaaa

SEQ ID NO: 14506 - DNA, 3946 bp, Homo sapiens
cgtttaaaagccatcagatttgagagcaataagtcttcaaaaccgggaatttacattgtttttcagctgaccgacttccaggaaaaggactcaaccgcatctacccaaataccgtggcactgcttgcgctctttgccaccggatactccccttccaatgagactttctgattgtgtctaccaactctcctattaggaaacccgtgggttgcatgcagctattctgttgtattctcattctcactctccctcccttctctcactctcactcttgctggaggcgagccactaccattctgctgagaaggaaaagcccgcaactactttaagagattaagacaatatgcgcaatcctcgcctttcctagcaatcactatttaaatctggcaagaactgacaacagtctttgcaagaatggaatccgtaaaacaaaggattttggccccaggaaaagaggggctaaagaattttgctggaaaatcactcggccagatctacagggtgctggagaagaagcaagacaccggggagacaatcgagctgacggaggatgggaagcccctagaggtgcccgagaggaaggcgccgctgtgcgactgcacgtgcttcggcctgccccgccgctacattatcgccatcatgagcggcctgggcttctgcatctccttcggtatccgctgcaacctgggcgtggccattgtggacatggtcaacaacagcaccatccaccgcgggggcaaggtcatcaaggagaaagccaaattcaactgggacccggaaaccgtggggatgatccacggttccttcttttggggctacatcatcactcagattccgggaggctacatcgcgtctcggctggcagccaacagggttttcggagctgccatacttcttacctctaccctaaatatgctaattccatcagcagccagagtgcattatggatgtgtcatctttgtcagaatactgcagggacttgttgagggtgtgacctacccagcatgtcatgggatatggagcaaatgggccccacctctagagaggagtagactggcaaccacctccttttgtggttcctatgccggagctgtgattgcaatgcctttagctggcattcttgtgcagtacactggctggtcttcagtgttttatgtctacggaagctttggaatggtctggtacatgttttggcttttggtgtcttatgaaagtcctgcaaagcatcctactattacagatgaagaacgtaggtacatagaagaaagcattggagagagtgcaaatcttttaggtgcaatggaaaaattcaagactccatggaggaagttttttacatccatgccagtctatgcaataattgttgcaaacttctgcagaagctggactttttatttattgcttattagtcagccagcatattttgaggaagtctttggatttgaaattagcaaggttggtatgctatctgctgtgccacacttagtaatgacaattattgtgcctattgggggacaaattgcagattttctaagaagcaagcagattctttcaactacgacagtgagaaagatcatgaattgtggtggttttggcatggaagccacactgctcctggtcgttggctattctcatactagaggggtagcaatctcattcttggtacttgcagtgggattcagtggatttgctatatctggtttcaatgttaaccacttggatatcgctccaagatatgccagtatcttaatgggcatttcgaatggtgttggcacattgtcaggaatggtttgtcctatcattgttggtgcaatgacaaagaataagtcacgtgaagagtggcagtatgtcttcctgatcgctgccctagtccactatggtggagttatattttatgcaatatttgcctcaggagagaaacaaccctgggcagacccggaggaaacaagtgaagaaaaatgtggatttattcatgaagatgaactcgatgaagaaacaggggacattactcaaaattatataaattatggtaccaccaagtcttatggtgccacaacacaggccaatggaggttggcctagtggttgggaaaagaaagaggaatttgtacaaggagaagtacaagactcacatagctataaggaccgagttgattattcataacaaaactaattactggatttatttttagtgtttgtgattaaattcattgtgattgcacaaaaattttaaaaacacgtgatgtaaacttgcaagcatatcaaccaggcaagtcttgctgtaaaaatgaaaacaaaacaaacccatgaggttaccatcaagtgcaatctgtaaaattgtgaagttccatcatttccattcaagtcatccattcttgcatttgtgacttaaaggttgactggtcaaaattgtagaaacaagtagttacccattggattcatatgagctaaaactcatcactatttactaaagcacaacatctcatcctacaaaagttaagaagccaaagctacttgatcatgcaaaatgcacttatatatttgttacactgtattgcaagatagcacacagaagttggctgcgtcaagtagaggcgacatttattaagtgaaaatcatggagttgggatatctctcaattaaagaaatacattgtgaactatcagctacaaagttgtactgaataactattagaattgcataatgtgagatattttgttagtcctcaaaaggaatatcttgcagtgttttctatgaaatgcttgggcacaaacacttatttctgtgaaagagaacatgtaagttgaggggtatgcttcatgttcttccatccatttacctaatagtatgaaacagttcacatttcaataaaatcaaacttttcatgtagcgtatcacataacttttttgcaaaaaatataaaaagaaataaacttcaatgtattttttattacaactttgtactggttgtaacttgcattagaaaaaaaaaagagatatataaaccacaaagaatctaataagaaatttattatggagatatagcccttaaaatgcaatattaagaacaaagaaatagaaaatggtttagatatctttcttccttcataattaaatactatatgaaacttgtgccacagagctatatgtaatatgaaaagattaacttcatagagatattgtaagtaggtaattttattatttaaagtcctattaagaaatatttgtcttaaatatataggacaatacattatattaaaatggtctctctctatatatatctgtatatcttatacatgtccatacacagaaacataataaacaatcttcacacgaaaccaaaaatagcatacacctaatgttgggttagggaattgcaatttctactttcatagagtcatagaattttaggtggggaagaggcattttgcttgtcatttcttaatataactcaacaagaattgcaacatttgtgtaccaagcaataagtgcaatgcataaaatttcctgtctgtatattaccttcattttgcttgtagtagctgtttgggtggttggaataattttatttttcttttaaaaaagctaacatcagacccctttataatgtcctaaaattatgataatacatttcccaattcaactcaaaatattattggtgtattttgtctattctggatatttgatctgtttaatgtactgtgctagtgactggaggccctgctactgcaaatataaaacctaaagtttgtttaaaaaaatgcaaatcattctttaccttaagaaaaaaaaaataccctttgctttgtgcctcaaagtgatgtaatgtgatcacagcttttgttgtgttgaatgaaaatatgtggactgtcattttgttgcagcaaaaaagtgttaataaaatgctctatttatccttttttaaaaaaaaaaaaaaaaaaaaaaaaa

SEQ ID NO: 14507 - DNA, 3727 bp, Homo sapiens
gtcgcggtgtgctaagcgaggagtccgagtgtgtgagcttgagagccgcgcgctagagcgacccggcgagggatggcggccaccgggaccgcggccgccgcagccacgggcaggctcctgcttctgctgctggtggggctcacggcgcctgccttggcgctggccggctacatcgaggctcttgcagccaatgccggaacaggatttgctgttgctgagcctcaaatcgcaatgttttgtgggaagttaaatatgcatgtgaacattcagactgggaaatgggaacctgatccaacaggcaccaagagctgctttgaaacaaaagaagaagttcttcagtactgtcaggagatgtatccagagctacagatcacaaatgtgatggaggcaaaccagcgggttagtattgacaactggtgccggagggacaaaaagcaatgcaagagtcgctttgttacacctttcaagtgtctcgtgggtgaatttgtaagtgatgtcctgctagttccagaaaagtgccagtttttccacaaagagcggatggaggtgtgtgagaatcaccagcactggcacacggtagtcaaagaggcatgtctgactcagggaatgaccttatatagctacggcatgctgctcccatgtggggtagaccagttccatggcactgaatatgtgtgctgccctcagacaaagattattggatctgtgtcaaaagaagaggaagaggaagatgaagaggaagaggaagaggaagatgaagaggaagactatgatgtttataaaagtgaatttcctactgaagcagatctggaagacttcacagaagcagctgtggatgaggatgatgaggatgaggaagaaggggaggaagtggtggaggaccgagattactactatgacaccttcaaaggagatgactacaatgaggagaatcctactgaacccggcagcgacggcaccatgtcagacaaggaaattactcatgatgtcaaagctgtctgctcccaggaggcgatgacggggccctgccgggccgtgatgcctcgttggtacttcgacctctccaagggaaagtgcgtgcgctttatatatggtggctgcggcggcaacaggaacaattttgagtctgaggattattgtatggctgtgtgtaaagcgatgattcctccaactcctctgccaaccaatgatgttgatgtgtatttcgagacctctgcagatgataatgagcatgctcgcttccagaaggctaaggagcagctggagattcggcaccgcaaccgaatggacagggtaaagaaggaatgggaagaggcagagcttcaagctaagaacctccccaaagcagagaggcagactctgattcagcacttccaagccatggttaaagctttagagaaggaagcagccagtgagaagcagcagctggtggagacccacctggcccgagtggaagctatgctgaatgaccgccgtcggatggctctggagaactacctggctgccttgcagtctgacccgccacggcctcatcgcattctccaggccttacggcgttatgtccgtgctgagaacaaagatcgcttacataccatccgtcattaccagcatgtgttggctgttgacccagaaaaggcggcccagatgaaatcccaggtgatgacacatctccacgtgattgaagaaaggaggaaccaaagcctctctctgctctacaaagtaccttatgtagcccaagaaattcaagaggaaattgatgagctccttcaggagcagcgtgcagatatggaccagttcactgcctcaatctcagagacccctgtggacgtccgggtgagctctgaggagagtgaggagatcccaccgttccaccccttccaccccttcccagccctacctgagaacgaagacactcagccggagttgtaccacccaatgaaaaaaggatctggagtgggagagcaggatgggggactgatcggtgccgaagagaaagtgattaacagtaagaataaagtggatgaaaacatggtcattgacgagactctggatgttaaggaaatgattttcaatgccgagagagttggaggcctcgaggaagagcgggaatccgtgggcccactgcgggaggacttcagtctgagtagcagtgctctcattggcctgctggtcatcgcagtggccattgccacggtcatcgtcatcagcctggtgatgctgaggaagaggcagtatggcaccatcagccacgggatcgtggaggttgatccaatgctcaccccagaagagcgtcacctgaacaagatgcagaaccatggctatgagaaccccacctacaaatacctggagcagatgcagatttaggtggcagggagcgcggcagccctggcggagggatgcaggtgggccggaagatcccacgattccgatcgactgccaagcagcagccgctgccaggggctgcgtctgacatcctgacctcctggactgtaggactatataaagtactactgtagaactgcaatttccattcttttaaatgggtgaaaaatggtaatataacaatatatgatatataaaccttaaatgaaaaaaatgatctattgcagatatttgatgtagttttcttttttaaattaatcagaaaccccacttccattgtattgtctgacacatgctctcaatatataataaatgggaaatgtcgattttcaataatagacttatatgcaggctgtcgttccggttatgttgtgtaagtcaactcttcagcctcattcactgtcctggcttttatttaaagaaaaaaaaggcagtattccctttttaaatgagctttcaggaagttgctgagaaatggggtggaatagggaactgtaatggccactgaagcacgtgagagaccctcgcaaaatgatgtgaaaggaccagtttcttgaagtccagtgtttccacggctggatacctgtgtgtctccataaaagtcctgtcaccaaggacgttaaaggcattttattccagcgtcttctagagagcttagtgtatacagatgagggtgtccgctgctgctttccttcggaatccagtgcttccacagagattagcctgtagcttatatttgacattcttcactgtctgttgtttacctaccgtagctttttaccgttcacttccccttccaactatgtccagatgtgcaggctcctcctctctggactttctccaaaggcactgaccctcggcctctactttgtcccctcacctccaccccctcctgtcaccggccttgtgacattcactcagagaagaccacaccaaggaggggccgcggctggcccaggagagaacacggggaggtttgtttgtgtgaaaggaaagtagtccaggctgtccctgaaactgagtctgtggacactgtggaaagctttgaacaattgtgttttcgtcacaggagtctttgtaatgcttgtacagttgatgtcgatgctcactgcttctgctttttctttctttttattttaaaaaatctgaaggttctggtaacctgtggtgtatttttattttcctgtgactgtttttgttttgtttttttcctttttcctcccctttagccctattcatgtctctacccactatgcacagattaaacttcacctacaaactccttaatatgatctgtggagaatgtacacagtttaaacacatcaataaatactttaacttccaa

SEQ ID NO: 14508 - DNA, 3144 bp, Homo sapiens
aatctcggaaaggcgagaaagaagctgtctccatcttgtctgtatccgctgctcttgtgacgttgtggagatggggagcgtcctggggctgtgctccatggcgagctggataccatgtttgtgtggaagtgccccgtgtttgctatgccgatgctgtcctagtggaaacaactccactgtaactagattgatctatgcacttttcttgcttgttggagtatgtgtagcttgtgtaatgttgataccaggaatggaagaacaactgaataagattcctggattttgtgagaatgagaaaggtgttgtcccttgtaacattttggttggctataaagctgtatatcgtttgtgctttggtttggctatgttctatcttcttctctctttactaatgatcaaagtgaagagtagcagtgatcctagagctgcagtgcacaatggattttggttctttaaatttgctgcagcaattgcaattattattggggcattcttcattccagaaggaacttttacaactgtgtggttttatgtaggcatggcaggtgccttttgtttcatcctcatacaactagtcttacttattgattttgcacattcatggaatgaatcgtgggttgaaaaaatggaagaagggaactcgagatgttggtatgcagccttgttatcagctacagctctgaattatctgctgtctttagttgctatcgtcctgttctttgtctactacactcatccagccagttgttcagaaaacaaggcgttcatcagtgtcaacatgctcctctgcgttggtgcttctgtaatgtctatactgccaaaaatccaagaatcacaaccaagatctggtttgttacagtcttcagtaattacagtctacacaatgtatttgacatggtcagctatgaccaatgaaccagaaacaaattgcaacccaagtctactaagcataattggctacaatacaacaagcactgtcccaaaggaagggcagtcagtccagtggtggcatgctcaaggaattataggactaattctctttttgttgtgtgtattttattccagcatccgtacttcaaacaatagtcaggttaataaactgactctaacaagtgatgaatctacattaatagaagatggtggagctagaagtgatggatcactggaggatggggacgatgttcaccgagctgtagataatgaaagggatggtgtcacttacagttattccttctttcacttcatgcttttcctggcttcactttatatcatgatgacccttaccaactggtacaggtatgaaccctctcgtgagatgaaaagtcagtggacagctgtctgggtgaaaatctcttccagttggattggcatcgtgctgtatgtttggacactcgtggcaccacttgttcttacaaatcgtgattttgactgagtgagacttctagcatgaaagtcccactttgattattgcttatttgaaaacagtattcccaacttttgtaaagttgtgtatgtttttgcttcccatgtaacttctccagtgttctggcatgaattagattttactgcttgtcattttgttattttcttaccaagtgcattgatatgtgaagtagaatgaattgcagaggaaagttttatgaatatggtgatgagttagtaaaagtggccactattgggcttattctctgctctatagttgtgaaatgaagagtgaaaacaaatttgtttgactattttaaaattatattagaccttaagctgttttagcaagcattaaagcaaatgtatggctgccttttaaaatatttgatgtgttgcctggcaggatactgcaaagaacatggtttattttaaaatttataaacaagtcacttaaatgccagttgtctgaaaaatcttataaggttttacccttgatacggaatttacacaggtagggagtgtttagtggacaatagtgtaggttatggatggaggtgtcggtactaaattgaataacgagtaaataatcttacttgggtagagatggcctttgccaacaaagtgaactgttttggttgttttaaactcatgaagtatgggttcagtggaaatgtttggaactctgaaggatttagacaaggttttgaaaaggataatcatgggttagaaggaagtgtttgaaagtcactttgaaagttagttttgggccagcacggtagctcacccttgtaatcccagcactttgggaggctgaggtgggtagattacttgagcccaggaattcaagaccagcctgggcaacatggtgaaaccctgtttctataaaaaataatctgggctttgtagcatatgcctgtggtcccagctactgaggaggctgaggtgggaggattgcttgagcccaggaggcagaggttgcagtgagccaaggtcacgtcactgcactctagcctgggcaacagagtaagacaaaaaaatatatatatattgaaaatcaaaggaggcaaaattttgacagggaaggaagtaactgcaaaacactaggctttagtaggtacttatataaaatctagtccagttctctcatttaaaaaaatgaagacactgaagtacagacttaaatagctcagatagctaattaggaaatttcaagttggccaataatagcattctctctgacatttaaaaataatttctattcaaaatacatgcataattgattttacacctcattactggtggataatttatgtgatgtggattgctggtgtccagcatgacccataaacaggtcagaagaatgatggaatgttttagaataaactcctgcttatagtatactacacagttcaaaagatgtttaaaatgcttttgtatttactgccatgtaattgaaatatatagattattgtaacctttcaacctgaaaatcaagcagtatgagagtttagttatttgtatgtgtcactagtgtctaatgaagcttttaaaatctacaatttcttctttaaaaatatttattaatgtgaatggaatataacaattcagcttaattccccaaccttattctgtgtgtagacattgtattccacaattttgaatggctgtgttttacctctaaataaatgaattcagagaaagtgaaaaaaaaaaaaaaaa

SEQ ID NO: 14509 - DNA, 3363 bp, Homo sapiens
agtgtgggctacccggccactgccctggagctgtggtgactgctgcgtttttctcccatgcacttgcacgtccaggactcctgggagaacttgggccacactccttccttgccctcttgagctcattcgtcaccctgttgggtgagcacagccctagctcaggccactgggcaagccacaccatccaaagaggaggtcctctgccccaggacccccacaccaccccagctccctgttttgctgaggcctggagcccccatggcctcactgagccgagccctacgtgtggctgctgcccaccctcgccagagccctacccggggcatggggccatgcaacctgtccagcgcagctggccccacagccgagaagagtgtgccatatcagcggaccctgaaggagggacagggcacctcggtggtggcccaaggcccaagccggcccctgcccagcacggccaacgtggtggtcattggtggaggcagcttgggctgccagaccctgtaccacctggccaagctgggcatgagtggggcggtgctgctggagcgggagcggctgacctccgggaccacctggcacacggcaggcctgctgtggcagctgcggcccagtgacgtggaggtggagcttctggcccacactcggcgggtggtgagccgggagctggaggaggagacgggactacacacgggctggatccagaatgggggcctcttcatcgcgtccaaccggcagcgcctggacgagtacaagaggctcatgtcgctgggcaaggcgtatggtgtggaatcccatgtgctgagcccggcagagaccaagactctgtacccgctgatgaatgtggacgacctctacgggaccctgtatgtgccgcacgacggtaccatggaccccgctggcacctgtaccaccctcgccagggcagcttctgcccgaggagcacaggtcattgagaactgcccagtgaccggcattcgtgtgtggacggatgattttggggtgcggcgggtcgcgggtgtggagactcagcatggttccatccagacaccctgcgtggtcaactgtgcaggagtgtgggcaagtgctgtgggccggatggctggagtcaaggtcccgctggtggccatgcaccatgcctatgtcgtcaccgagcgcatcgaggggattcagaacatgcccaatgtccgtgatcatgatgcctctgtctacctccgcctccaaggggatgccttgtctgtgggtggctatgaggccaaccccatcttttgggaggaggtgtcagacaagtttgccttcggcctctttgacctggactgggaggtgttcacccagcacattgaaggcgccatcaacagggtccccgtgctggagaagacaggaatcaagtccacggtctgcggccctgaatccttcacgcccgaccacaagcccctgatgggggaggcacctgagctccgagggttcttcctgggctgtggcttcaacagcgcaggaatgatgctgggtggtggctgtgggcaggagctggcccactggatcatccatgggcgcccggagaaggacatgcatggctatgacatcaggcgcttccatcactcgctcacggaccacccccgctggatccgagagcgaagccatgagtcctacgccaagaactactccgtcgtcttcccccacgatgagccgctggccgggcgcaacatgaggagagacccgctgcatgaggaactccttggacaaggctgcgtgttccaggagcggcatggctgggagcgaccgggatggtttcatccccgaggcccagctccggtcctcgagtacgactactacggggcttacgggagccgcgcgcacgaggactacgcctaccgcaggctgctggcagacgagtacaccttcgccttcccgccccaccacgacacgatcaagaaggagtgcctggcctgcagaggggccgccgctgtgtttgacatgtcctacttcgggaagttctacctggtggggctggatgcaaggaaggctgccgactggctcttctccgcagatgtcagccgacccccaggctccaccgtgtacacgtgcatgctcaaccaccgtgggggcaccgagagtgacctgactgtcagccgcctggcacccagccaccaggcctccccgctggcccccgcctttgaaggggacggttactacctggccatgggcggggccgtggcccagcacaactggtcccacatcaccaccgtgctgcaggaccagaagtcccagtgccagctcatcgacagctccgaggacctgggtatgatcagtatccagggcccagccagccgagccattttgcaggaggtgctggacgcagacctgagcaacgaggccttcccgttctccacccacaagctactgagagccgcagggcacctggtccgagccatgcggctgtcctttgtgggggagctgggctgggagctgcacattccaaaggcgtcctgcgtgcctgtgtaccgggctgtgatggccgcgggtgccaagcacggcctcatcaacgcagggtaccgcgccatcgactccctgagcattgagaaaggctaccggcactggcacgcggacctgcggccagacgacagccccctggaggcaggcctggccttcacctgcaagctcaagtcgccggtgcccttcctggggagggaggccctggagcagcagcgggccgcaggcctccgccggcgcctggtgtgcttcaccatggaggacaaagtacccatgtttggcctggaggccatctggaggaacggccaagtggtgggccatgtccggagggctgactttgggttcgccatcgacaagaccatcgcctacggttacatccatgaccccagcggtgggccggtctcgctggactttgtgaagagcggggactatgccctggagagaatgggggtgacctatggtgcccaggctcacctgaagtcgcccttcgaccccaacaacaagagggtgaagggaatctactgagggctcagaccacatgccccatcccatgctgtccatccattctcacaggtcccaaatggccctgggtcccaggaccctggacccagccagaacttgtgccctccctgtccttagcctaggcctagtcctgcgaaaacccccaaaccagatacggacagagaccaagatggcccatcctgtggtcactgactggaaggcagtctctaatccaccccaatcctcccagaaagcaaacctgtaagtgtcttgggctcagggaccatggcttgtagccctttccaagcttctaaaaggtgcttagtaaatacttgataagccccacgtgaaaaaaaaaaaaaaaaaaaaaaa

SEQ ID NO: 14510 - DNA, 2558 bp, Homo sapiens
atcgatgccccgcccccgccccacagccaacctcccgggcaccgttgcccgcccggggcccgctaccggcccaggccccgcctcgcgagtcctcctccccgggtgcctgcccgcagcccgctcggcccagagggtgggcgcggggctgcctctaccggctggcggctgtaactcagcgaccttggcccgaaggctctagcaaggacccaccgaccccagccgcggcggcggcggcgcggactttgcccggtgtgtggggcggagcggactgcgtgtccgcggacgggcagcgaagatgttagccttcgctgccaggaccgtggtgaagcctctgggcttcctgaagcccttctccttgatgaaggcttccagccgcttcaaggcacaccaggatgcactgccacggctgcccgtgccccctctccagcagtccctggaccactacctgaaggcgctgcagcccatcgtgagtgaggaggagtgggcccacaccaagcagctggtggatgagtttcaggcctcaggaggtgtaggggagcgcctgcagaaggggctggagcgtcgggccaggaagacggagaactggctgtctgagtggtggctcaagaccgcctacctccagtaccgccagcctgtggtcatctactcgagcccaggcgtgatgctacccaagcaggacttcgtggacctgcagggtcagctccgatttgctgccaaactcattgagggtgtgttggatttcaaggtcatgattgacaacgagaccctgcccgtggagtacctgggggggaagccactgtgcatgaaccagtactatcagatcttgtcctcctgccgagtgccgggccccaagcaggacacagtcagcaacttcagcaagaccaagaagcctcccacgcacatcaccgtggtacacaactaccagttttttgagctggatgtgtaccacagtgacgggacacccctcactgcggatcagatctttgtgcagctggagaagatctggaactcatccctacagaccaacaaggagcctgtgggcatcctcacctccaaccaccgcaactcctgggccaaggcatacaacaccctcatcaaagacaaggtgaaccgggattccgtgcgctccatccagaagaaacccgagcttgtgcggtctcccatggtgcccctgcccatgcccaagaagctgcggttcaacatcacccccgagatcaagagcgacatcgagaaggccaagcagaacctcagcatcatgatccaggacctggatatcaccgtgatggtgttccaccattttggaaaagacttccccaagtcggagaagctaagcccagatgccttcatccagatggctttgcagctggcctactacaggatctacggacaggcatgtgccacctatgaaagtgcctccctgcgcatgtttcacctgggccgcaccgacaccatccgctcggcttccatggactcactcacctttgtcaaggccatggatgactccagcgtcacggagcaccagaaggtggagctgctgcggaaggccgtgcaggcccaccgaggctacaccgaccgggccatccgcggggaggcctttgatcgacacctgctgggcctgaagctgcaggccatcgaggacctggtgagcatgcccgacatcttcatggacacctcctacgccatcgccatgcacttccacctctccaccagccaggtccctgccaagacagactgtgtcatgttcttcgggcccgtggtccccgacggctacggtgtctgctataaccccatggaggcccacatcaacttctccctgtcggcctacaacagctgcgcggagaccaacgccgcccgcctggcgcattacctggagaaggcgctcctggacatgcgtgccctgctgcagagccacccccgggccaagctctgagcccctaggactcaggcctgccaatgccacagccaagcccaccctgggatgggccacccaccagggctcagctccttggttccctcttccttggttccctcttccctggtccccccaaatctactgagccacggaccgcatcctccagggggcctgcaggccccagccaagtgccttccgtgggtcatcccagcacctgccagggcccgacctggggctgagtgcagaggctgagcaggacgttaggcccgggcccctggcacgtcctccaccggtgcctcctctggggaagggaaccagccctccagagcaggagactggcaagagctctttgtctcaccagctcagccccggccactccctgccaactccatgaccaggccaccatctgtaccctgcttcccaaactcccaggacctggagacaggattgtctggggccgaggggccagggtgtgaggtttcacctccgttgcggctgtgctcctgtggataacattgctagcgagccgcctctggttccactcagcttggttcctgcccccgccctgctgtatgatattaatgtggaaggtcatcaataaaggggaattgtgttggtgaaaaaaaaaaaaaaaaaaaaaaaaaaa

SEQ ID NO: 14511 - DNA, 2600 bp, Homo sapiens
cttctagagtccaggagcttcccctgccactgccacaacccccgatgccaccacagccatcgccactgccacctgcctcccgctgaatcttggctcttgtcttctctttccagcccaggtgaagcctctgggcttcctgaagcccttctccttgatgaaggcttccagccgcttcaaggcacaccaggatgcactgccacggctgcccgtgccccctctccagcagtccctggaccactacctgaaggcgctgcagcccatcgtgagtgaggaggagtgggcccacaccaagcagctggtggatgagtttcaggcctcaggaggtgtaggggagcgcctgcagaaggggctggagcgtcgggccaggaagacggagaactggctgtctgagtggtggctcaagaccgcctacctccagtaccgccagcctgtggtcatctactcgagcccaggcgtgatgctacccaagcaggacttcgtggacctgcagggtcagctccgatttgctgccaaactcattgagggtgtgttggatttcaaggtcatgattgacaacgagaccctgcccgtggagtacctgggggggaagccactgtgcatgaaccagtactatcagatcttgtcctcctgccgagtgccgggccccaagcaggacacagtcagcaacttcagcaagaccaagaagcctcccacgcacatcaccgtggtacacaactaccagttttttgagctggatgtgtaccacagtgacgggacacccctcactgcggatcagatctttgtgcagctggagaagatctggaactcatccctacagaccaacaaggagcctgtgggcatcctcacctccaaccaccgcaactcctgggccaaggcatacaacaccctcatcaaagacaaggtgaaccgggattccgtgcgctccatccagaagagcatcttcaccgtgtgcctagatgcaaccatgcccagggtctcagaagacgtgtaccgcagccacgtggcaggccagatgctgcatgggggcggcagcaggctcaacagcggcaaccgctggttcgacaagacgctgcagttcatcgtggcagaagatggctcctgtgggcttgtgtacgagcatgctgcagcggaggggccccctattgtcacccttctggactatgtcatcgagtacacgaagaaacccgagcttgtgcggtctcccatggtgcccctgcccatgcccaagaagctgcggttcaacatcacccccgagatcaagagcgacatcgagaaggccaagcagaacctcagcatcatgatccaggacctggatatcaccgtgatggtgttccaccattttggaaaagacttccccaagtcggagaagctaagcccagatgccttcatccagatggctttgcagctggcctactacaggatctacggacaggcatgtgccacctatgaaagtgcctccctgcgcatgtttcacctgggccgcaccgacaccatccgctcggcttccatggactcactcacctttgtcaaggccatggatgactccagcgtcacggagcaccagaaggtggagctgctgcggaaggccgtgcaggcccaccgaggctacaccgaccgggccatccgcggggaggcctttgatcgacacctgctgggcctgaagctgcaggccatcgaggacctggtgagcatgcccgacatcttcatggacacctcctacgccatcgccatgcacttccacctctccaccagccaggtccctgccaagacagactgtgtcatgttcttcgggcccgtggtccccgacggctacggtgtctgctataaccccatggaggcccacatcaacttctccctgtcggcctacaacagctgcgcggagaccaacgccgcccgcctggcgcattacctggagaaggcgctcctggacatgcgtgccctgctgcagagccacccccgggccaagctctgagcccctaggactcaggcctgccaatgccacagccaagcccaccctgggatgggccacccaccagggctcagctccttggttccctcttccttggttccctcttccctggtccccccaaatctactgagccacggaccgcatcctccagggggcctgcaggccccagccaagtgccttccgtgggtcatcccagcacctgccagggcccgacctggggctgagtgcagaggctgagcaggacgttaggcccgggcccctggcacgtcctccaccggtgcctcctctggggaagggaaccagccctccagagcaggagactggcaagagctctttgtctcaccagctcagccccggccactccctgccaactccatgaccaggccaccatctgtaccctgcttcccaaactcccaggacctggagacaggattgtctggggccgaggggccagggtgtgaggtttcacctccgttgcggctgtgctcctgtggataacattgctagcgagccgcctctggttccactcagcttggttcctgcccccgccctgctgtatgatattaatgtggaaggtcatcaataaaggggaattgtgttggtgaaaaaaaaaaaaaaaaaaaaaaaaaaa

SEQ ID NO: 14512 - DNA, 2804 bp, Homo sapiens
atcgatgccccgcccccgccccacagccaacctcccgggcaccgttgcccgcccggggcccgctaccggcccaggccccgcctcgcgagtcctcctccccgggtgcctgcccgcagcccgctcggcccagagggtgggcgcggggctgcctctaccggctggcggctgtaactcagcgaccttggcccgaaggctctagcaaggacccaccgaccccagccgcggcggcggcggcgcggactttgcccggtgtgtggggcggagcggactgcgtgtccgcggacgggcagcgaagatgttagccttcgctgccaggaccgtggtgaagcctctgggcttcctgaagcccttctccttgatgaaggcttccagccgcttcaaggcacaccaggatgcactgccacggctgcccgtgccccctctccagcagtccctggaccactacctgaaggcgctgcagcccatcgtgagtgaggaggagtgggcccacaccaagcagctggtggatgagtttcaggcctcaggaggtgtaggggagcgcctgcagaaggggctggagcgtcgggccaggaagacggagaactggctgtctgagtggtggctcaagaccgcctacctccagtaccgccagcctgtggtcatctactcgagcccaggcgtgatgctacccaagcaggacttcgtggacctgcagggtcagctccgatttgctgccaaactcattgagggtgtgttggatttcaaggtcatgattgacaacgagaccctgcccgtggagtacctgggggggaagccactgtgcatgaaccagtactatcagatcttgtcctcctgccgagtgccgggccccaagcaggacacagtcagcaacttcagcaagaccaagaagcctcccacgcacatcaccgtggtacacaactaccagttttttgagctggatgtgtaccacagtgacgggacacccctcactgcggatcagatctttgtgcagctggagaagatctggaactcatccctacagaccaacaaggagcctgtgggcatcctcacctccaaccaccgcaactcctgggccaaggcatacaacaccctcatcaaagacaaggtgaaccgggattccgtgcgctccatccagaagagcatcttcaccgtgtgcctagatgcaaccatgcccagggtctcagaagacgtgtaccgcagccacgtggcaggccagatgctgcatgggggcggcagcaggctcaacagcggcaaccgctggttcgacaagacgctgcagttcatcgtggcagaagatggctcctgtgggcttgtgtacgagcatgctgcagcggaggggccccctattgtcacccttctggactatgtcatcgagtacacgaagaaacccgagcttgtgcggtctcccatggtgcccctgcccatgcccaagaagctgcggttcaacatcacccccgagatcaagagcgacatcgagaaggccaagcagaacctcagcatcatgatccaggacctggatatcaccgtgatggtgttccaccattttggaaaagacttccccaagtcggagaagctaagcccagatgccttcatccagatggctttgcagctggcctactacaggatctacggacaggcatgtgccacctatgaaagtgcctccctgcgcatgtttcacctgggccgcaccgacaccatccgctcggcttccatggactcactcacctttgtcaaggccatggatgactccagcgtcacggagcaccagaaggtggagctgctgcggaaggccgtgcaggcccaccgaggctacaccgaccgggccatccgcggggaggcctttgatcgacacctgctgggcctgaagctgcaggccatcgaggacctggtgagcatgcccgacatcttcatggacacctcctacgccatcgccatgcacttccacctctccaccagccaggtccctgccaagacagactgtgtcatgttcttcgggcccgtggtccccgacggctacggtgtctgctataaccccatggaggcccacatcaacttctccctgtcggcctacaacagctgcgcggagaccaacgccgcccgcctggcgcattacctggagaaggcgctcctggacatgcgtgccctgctgcagagccacccccgggccaagctctgagcccctaggactcaggcctgccaatgccacagccaagcccaccctgggatgggccacccaccagggctcagctccttggttccctcttccttggttccctcttccctggtccccccaaatctactgagccacggaccgcatcctccagggggcctgcaggccccagccaagtgccttccgtgggtcatcccagcacctgccagggcccgacctggggctgagtgcagaggctgagcaggacgttaggcccgggcccctggcacgtcctccaccggtgcctcctctggggaagggaaccagccctccagagcaggagactggcaagagctctttgtctcaccagctcagccccggccactccctgccaactccatgaccaggccaccatctgtaccctgcttcccaaactcccaggacctggagacaggattgtctggggccgaggggccagggtgtgaggtttcacctccgttgcggctgtgctcctgtggataacattgctagcgagccgcctctggttccactcagcttggttcctgcccccgccctgctgtatgatattaatgtggaaggtcatcaataaaggggaattgtgttggtgaaaaaaaaaaaaaaaaaaaaaaaaaaa

SEQ ID NO: 14513 - DNA, 2136 bp, Homo sapiens
gcagagcggcggcttctctcgcgaggacggacgccattatcgcatctccccgacaaacaccacgagaattccgcagcccacacggtgaccaaaagccagccccactgtgagttgaactctttcgtgttgaccggccactctccgtgctctggatgatgtcggaacacgacctggccgatgtggttcagattgcagtggaagacctgagccctgaccacccagttgttttggagaatcatgtagtgacagatgaagacgaacctgctttgaaacgccagcgactagaaatcaattgccaggatccatctataaagtcattcctgtattccatcaaccagacaatctgcttgcggttggatagcattgaagccaaattgcaagccctggaggctacttgtaaatccttagaagaaaagctggatctggtcacgaacaagcagcacagccccatccaggtccccatggtggccggctcccctctcggggcaacccagacgtgcaacaaagtgcgatgcgctgtgcctgggcgtcggcagaacaccattgtggtgaaggtgccgggccaagaagacagccaccacgaggacggggagagcggctcggaggccagcgactctgtgtccagctgtgggcaggcgggcagtcagagcatcgggagcaacgtcacgctcatcaccctgaactcggaagaggactaccccaatggcacctggctgggcgacgagaacaaccccgagatgcgggtacgctgcgccatcatcccctccgacatgctgcacatcagcaccaactgccgcacggccgagaagatggcgctaacgctgctggactacctcttccaccgcgaggtgcaggctgtgtccaacctctcggggcagggcaagcacgggaagaagcagctggacccgctcaccatctacggcatccggtgtcaccttttctataaatttggcatcacagaatccgactggtaccgaatcaagcagagcatcgactccaagtgccgcacggcgtggcggcgcaagcagcggggccagagcctggcggtcaagagcttctcgcggagaacgcccaactcgtcctcctactgcccttcagagccgatgatgagcaccccacctcctgccagcgagctcccgcagccacagccgcagccgcaggccctgcactacgcgctggccaacgcacagcaggtgcagatccaccagatcggagaagacggacaggtgcaagtaatcccacagggacacctccacatcgcccaggtgccgcagggggagcaagtccagatcacgcaggacagcgagggcaacctccagatccatcacgtggggcaggacggtcaggtgctgcagggtgcacagctgatcgccgtggcctcctcggaccccgcggcggcgggcgtggatgggtcgccactccagggcagcgacatccaggttcagtacgtgcagctggcgccagtgagtgaccacacggccggggcacagacggccgaagccctgcagcccacgctacagccggagatgcagctcgagcacggggccatccagattcagtgagcggtgcccatggcaccaggagcccctcgccggctccgcctacggcccggcccccacgcgccctgctctcacggcctcggcacaggcagcggctgcacgtgttctgctgaagtgcgtctgaaggccgctgcctccgcggggaacagcatcctatgaactgaaagagcagccgccgccgcccccagccggagacccctttcgtttgagtcctgctgttggtgtcggagcacgaggggaggcacggtgcggagagcgtcgcatatgcgcgggaaatcaagaactatgatatttttctgtttaaacagctttttttaatttgctatggtgtttataacaaaaaagaaaatttgaaaaaaaaaatcccaggggagtagcaggagccctttgctgtgtgctctgtccagtgtcatgagacgggagccctttgctgtgtgctctgtccagtgtcatgaggcaggtgtttgcaaagccagctctcggttccgatggggtattgctgacctacttttctaggggaaatgctcttaaacactgtaattatgcatttctaatgaaataaaatgtatttatgacc

SEQ ID NO: 14514 - DNA, 2127 bp, Homo sapiens
gcagagcggcggcttctctcgcgaggacggacgccattatcgcatctccccgacaaacaccacgagaattccgcagcccacacggtgaccaaaagccagccccactgtgagttgaactctttcgtgttgaccggccactctccgtgctctggatgatgtcggaacacgacctggccgatgtggttcagattgcagtggaagacctgagccctgaccacccagttgttttggagaatcatgtagtgacagatgaagacgaacctgctttgaaacgccagcgactagaaatcaattgccaggatccatctataaagtcattcctgtattccatcaaccagacaatctgcttgcggttggatagcattgaagccaaattgcaagccctggaggctacttgtaaatccttagaagaaaagctggatctggtcacgaacaagcagcacagccccatccaggtccccatggtggccggctcccctctcggggcaacccagacgtgcaacaaagtgcgatgcgctgtgcctgggcgtcggcagaacaccattgtggtgaaggtgccgggccaagaagacagccaccacgaggacggggagagcggctcggaggccagcgactctgtgtccagctgtgggcaggcgggcagtcagagcatcgggagcaacgtcacgctcatcaccctgaactcggaagaggactaccccaatggcacctggctgggcgacgagaacaaccccgagatgcgggtacgctgcgccatcatcccctccgacatgctgcacatcagcaccaactgccgcacggccgagaagatggcgctaacgctgctggactacctcttccaccgcgaggtgcaggctgtgtccaacctctcggggcagggcaagcacgggaagaagcagctggacccgctcaccatctacggcatccggtgtcaccttttctataaatttggcatcacagaatccgactggtaccgaatcaagcagagcatcgactccaagtgccgcacggcgtggcggcgcaagcagcggggccagagcctggcggtcaagagcttctcgcggagaacgcccaactcgtcctcctactgcccttcagagccgatgatgagcaccccacctcctgccagcgagctcccgcagccacagccgcagccgcaggccctgcactacgcgctggccaacgcacagcaggtgcagatccaccagatcggagaagacggacaggtgcaagtaggacacctccacatcgcccaggtgccgcagggggagcaagtccagatcacgcaggacagcgagggcaacctccagatccatcacgtggggcaggacggtcaggtgctgcagggtgcacagctgatcgccgtggcctcctcggaccccgcggcggcgggcgtggatgggtcgccactccagggcagcgacatccaggttcagtacgtgcagctggcgccagtgagtgaccacacggccggggcacagacggccgaagccctgcagcccacgctacagccggagatgcagctcgagcacggggccatccagattcagtgagcggtgcccatggcaccaggagcccctcgccggctccgcctacggcccggcccccacgcgccctgctctcacggcctcggcacaggcagcggctgcacgtgttctgctgaagtgcgtctgaaggccgctgcctccgcggggaacagcatcctatgaactgaaagagcagccgccgccgcccccagccggagacccctttcgtttgagtcctgctgttggtgtcggagcacgaggggaggcacggtgcggagagcgtcgcatatgcgcgggaaatcaagaactatgatatttttctgtttaaacagctttttttaatttgctatggtgtttataacaaaaaagaaaatttgaaaaaaaaaatcccaggggagtagcaggagccctttgctgtgtgctctgtccagtgtcatgagacgggagccctttgctgtgtgctctgtccagtgtcatgaggcaggtgtttgcaaagccagctctcggttccgatggggtattgctgacctacttttctaggggaaatgctcttaaacactgtaattatgcatttctaatgaaataaaatgtatttatgacc

SEQ ID NO: 14515 - DNA, 3165 bp, Homo sapiens
ggggatttggctagaaggctgggccggcagcggttgtgaggagttagctcgcggcattgcaggctctgagaggaggggacccggttcccgggtgagtgtccaggcatgccagcggaacggcccgcgggcagcggcggctcggaggctccagcaatggttgaacaactggacactgctgtgattaccccggccatgctagaagaggaagaacagcttgaagctgctggactagagagagagcggaagatgctggaaaaggctcgcatgtcttgggatagagagtcgacagaaattcggtaccgtagacttcaacatttgcttgaaaaaagcaatatatactccaaatttttattgacgaaaatggaacagcaacaattagaggaacagaagaagaaagaaaaattggagagaaaaaaggagtctttaaaagttaaaaagggtaaaaattcaattgatgcaagtgaagagaagccagttatgaggaaaaaaagaggaagagaagatgaatcatacaatatttcagaggtcatgtcaaaagaggaaattttgtctgtggctaaaaaaaataaaaaggagaatgaggatgaaaactcctcctctactaatctctgtgtggaagatcttcagaaaaataaagattcgaatagtataattaaagatagattgtctgaaacggttaggcagaatactaaattcttttttgacccagtccggaagtgtaatggtcagccagtaccttttcaacaaccaaagcacttcactggaggagtgatgcgatggtaccaagtagaaggcatggaatggcttaggatgctttgggaaaatggaattaatggcattttagcagatgaaatgggattgggtaagacagttcagtgcattgctactattgcattgatgattcagagaggagtaccaggaccttttcttgtctgtggccctttgtctacacttcctaactggatggctgaattcaaaagatttacaccagatatccctacaatgttatatcatggaacccaggaggaacgtcaaaaattggtaagaaatatttacaaacggaaagggactttgcagattcatcctgtggtaatcacgtcatttgaaatagccatgagagaccgaaatgcgttacagcattgctattggaaatacttaatagtagatgaaggacacaggattaagaatatgaagtgccgtctaatcagggagttaaaacgattcaatgctgataacaaacttcttttgactggtactcccttgcaaaacaatttatcagaactttggtcattgctaaactttttgttgccagatgtatttgatgacttgaaaagctttgagtcttggtttgacatcactagtctttctgaaactgctgaagatattattgctaaagaaagagaacagaatgtattgcatatgctgcaccagattttaacacctttcttattgagaagactgaagtctgatgttgctcttgaagttcctcctaaacgagaagtagtcgtttatgctccactttcaaagaagcaggagatcttttatacagccattgtgaaccgtacaattgcaaacatgtttggatccagtgagaaagaaacaattgagttaagtcctactggtcgaccaaaacgacgaactagaaaatcaataaattacagcaaaatagatgatttccctaatgaattggaaaaactgatcagtcaaatacagccagaggtggaccgagaaagagctgttgtggaagtgaatatccctgtagaatctgaagttaatctgaagctgcagaatataatgatgctacttcgtaaatgttgtaatcatccatatttgattgaatatcctatagaccctgttacacaagaatttaagatcgatgaagaattggtaacaaattctgggaagttcttgattttggatcgaatgctgccagaactaaaaaaaagaggtcacaaggtgctgcttttttcacaaatgacaagcatgttggacattttgatggattactgccatctcagagatttcaacttcagcaggcttgatgggtccatgtcttactcagagagagaaaaaaacatgcacagcttcaacacggatccagaggtgtttatcttcttagtgagtacacgagctggtggcctgggcattaatctgactgcagcagatacagttatcatttatgatagtgattggaacccccagtcggatcttcaggcccaggatagatgtcatagaattggtcagacaaagccagttgttgtttatcgccttgttacagcaaatactatcgatcagaaaattgtggaaagagcagctgctaaaaggaaactggaaaagttgatcatccataaaaatcatttcaaaggtggtcagtctggattaaatctgtctaagaatttcttagatcctaaggaattaatggaattattaaaatctagagattatgaaagggaaataaaaggatcaagagagaaggtcattagtgataaagatctagagttgttgttagatcgaagtgatcttattgatcaaatgaatgcttcaggaccaattaaagagaagatggggatattcaagatattagaaaattctgaagattccagtcctgaatgtttgttttaaagtggagctcaagaatagcttttaaaagttcttatttacatctagtgatttccctgtattgggtttgaaatactgattgtccacttcaccttttttattatatcagttgacatgtaactagtaccatgcgtacttaaatagatggtaattttctgagccttaccaagaacaaagaagtatccatattaagtttagattttcagttaatttttgagactgagtagtattcttggatacaggctgatgtgtacttaaccacttccagatttatacagtcttcctgtggaagtttagtaaatgtctttttccctcctttcttctagtaatgcagttcatgggctttaggtacttcagttatgaagtaggcttttcatggggagagattgggattatgctctctgttgtttaagaaactgtttgattttagagtctatttctatgagatagtttaccaaataaatgttccttataagatgaaaaaaaaaaaaaaaaaaaaaaaaaaaaaaaaaaaaaaaaaaaaaaaaaaaaaaaaaaaaaaaaaaa

SEQ ID NO: 14516 - DNA, 3054 bp, Homo sapiens
gccccgcggggctgtgggagccgaacgccgcggggtcagggcgtgcagtctgggacgcgggatgcttggcgctctacctcgccgcccctgagccttcccgtccgcctcgccacgcgcccggacggcctggggttgctgcccgtcagtctcgaaaggtgtttttggggaaaaaaatcacaatctggacgtgagaaaggacatgaggagactaaagacctgggattttgtcaatcagaatgaaaccaatgttgaaagacttttcaaatctattgttggtggtactctgtgactatgttcttggagaagctgaatatcttctcttgagagagccaggccatgtagcactaagcaacgacacagtgtatgtggatttccagtattttgatggtgctaatgggacactgaggaatgtatctgtcctgctgttggaggccaacaccaatcagactgtaactaccaagtacctcctgaccaaccagtcccagggaacactaaagtttgagtgcttctatttcaaggaggctggtgactactggttcacaatgactccagaagcaacagacaacagcactccattcccctggtgggagaaaagtgcctttctgaaggtggaatggcctgtctttcacgttgacttgaataggagtgccaaggcagcagaaggcaccttccaagtgggcctatttaccagtcaaccactgtgcccgtttcctgtggacaagcccaacatcgtagtggatgtcatcttcaccaacagtcttcctgaggcaagaagaaattcaagacagccgctggaaataagaaccagcaaaaggacagaacttgctcaaggtcagtgggttgagtttggctgtgcacccttggggccagaagcctatgtcaccgtggtgctgaagctgcttgggcgagactcagtcattacctccacaggacccattgacctggcccagaaatttggatacaaactggtgatggtgccagaactcacatgtgagtccggggtagaggtgacagtgctgcctccaccatgcaccttcgtccaaggagtggtcactgtcttcaaggaggcccccagataccctgggaagaggaccattcacttggctgaaaacagcctgcccctgggagagaggaggacaatttttaactgtactttgtttgacatggggaagaataagtactgctttgactttggcatttcaagcagaagccatttttctgcaaaggaggagtgcatgctaattcagagaaatacagaaacttggggactgtggcagccatggagccagtgtagtgccacatgtggggatggtgtcagagagcgtcgccgagtgtgtctcacttccttcccctccagtcctgtctgccctggaatgtccttggaggcctccctgtgttccctggaggagtgtgctgctttccagccatccagcccatctcctcttcagccccagggtccagtgaagtccaacaacatcgtgactgtcactggtatatccttgtgcttgttcatcatcattgccactgtgctcatcacgctgtggaggaggttcggccggccagccaagtgcagcacacctgctcgacacaactccatccactcccccagcttccggaagaactcggacgaggagaatatctgcgagctgagcgagcagcgcgggagcttctcggatgggggagacgggcccacggggagtccaggggacacaggcatccctctgacctacaggcggagcgggccggtacctcccgaggatgatgcctctggcagcgagagcttccagtccaacgcccagaagataatcccacctctgttcagctaccgccttgcccagcagcagttaaaggagatgaaaaagaaaggtctgacggaaactaccaaagtgtatcacgtgtctcagagtcccctgacagacactgccattgatgcggcccccagcgctcccttagatttggaaagcccggaagaagctgcagcaaacaagttccggatcaaatccccatttccggagcagcccgcggtcagtgccggggaaaggcctccctccaggctggatctaaatgtgactcaggccagttgtgccataagccccagccagactctgatccgcaagtcacaggcaaggcacgtgggcagcagagggggcccgtccgaaaggagccatgccaggaacgcccatttcaggaggacagcgagtttccatgaagccaggcaggcccggccgttccgagagaggagcatgtccactctgactccacggcaggcccctgcctacagctctaggacgcggacctgcgagcaggcagaggacagatttaggcctcagagtcgaggtgcccacctgtttcctgaaaaactggagcatttccaagaggcaagtggaacccgtggtccattaaaccctctccctaaatcctacactttggggcagcccttgaggaaaccagaccttggggatcaccaggcaggattagtggccggaattgagagaacagagccccacagagctcgtcggggaccgtcccccagtcacaagagtgtctcaaggaagcagtcttctcccatatcccccaaagataactaccagagggtcagttctctgagcccttctcagtgtagaaaagacaagtgtcaaagcttccccactcaccctgagtttgccttctatgacaatacgtcgtttggcctcactgaggctgagcagaggatgctggacctcccaggatattttgggtcaaatgaagaggatgaaaccacaagtacacttagcgtggagaagctggtgatctagactgagaatcagcctgagctttacacagctggggtctgctactcgcgttttgtagacttttgtgtaactatttgtaccgtaggacagaatgtgaggaggaagtaacacacagaggaggatgtgtgtgtatgcatgtgtttgaattcacaaggaagaaattatttatcttgagctttttcctttgttattcaatttctattgatttattagtaataacaatgataataaaatgtaaatgagcaaaaaaaaaaaaaaaaaa

SEQ ID NO: 14517 - DNA, 1896 bp, Homo sapiens
cccacgcgtccgcggacgcgtgggcgcgcgggagctgggaggctgcgagatccctaccgcagtagccgcctctgccgccgcggacttcccgaacctcttcagccgcccggagccgctcccggagcccggccgtagaggctgcaatcgcagcgggagcccgcagcccgcgccccgagcccgccgccgcccttcgagggcgcccaggccgcgccatggtgaaggtgacgttcaactccgctctggcccagaaggaggccaagaaggacgagcccaagagcggcgaggaggcgctcatcatcccccccgacgccgtcgcggtggactgcaaggacccagatgatgtggtaccagttggccaaagaagagcctggtgttggtgcatgtgctttggactagcatttatgcttgcaggtgttattctaggaggagcatacttgtacaaatattttgcacttcaaccagatgacgtgtactactgtggaataaagtacatcaaagatgatgtcatcttaaatgagccctctgcagatgccccagctgctctctaccagacaattgaagaaaatattaaaatctttgaagaagaagaagttgaatttatcagtgtgcctgtcccagagtttgcagatagtgatcctgccaacattgttcatgactttaacaagaaacttacagcctatttagatcttaacctggataagtgctatgtgatccctctgaacacttccattgttatgccacccagaaacctactggagttacttattaacatcaaggctggaacctatttgcctcagtcctatctgattcatgagcacatggttattactgatcgcattgaaaacattgatcacctgggtttctttatttatcgactgtgtcatgacaaggaaacttacaaactgcaacgcagagaaactattaaaggtattcagaaacgtgaagccagcaattgtttcgcaattcggcattttgaaaacaaatttgccgtggaaactttaatttgttcttgaacagtcaagaaaaacattattgaggaaaattaatatcacagcataaccccaccctttacattttgtgcagtgattattttttaaagtcttctttcatgtaagtagcaaacagggctttactatcttttcatctcattaattcaattaaaaccattaccttaaaatttttttctttcgaagtgtggtgtcttttatatttgaattagtaactgtatgaagtcatagataatagtacatgtcaccttaggtagtaggaagaattacaatttctttaaatcatttatctggatttttatgttttattagcattttcaagaagacggattatctagagaataatcatatatatgcatacgtaaaaagggaccacagtgacttatttgtagttgttagttgcccctgctaccctagtttgttaggtgcatttgagcacacattttaattttcctctaattaaaatgtgcagtattttcagtgtcaaatatatttaactatttagagaatgatttccacctttatgttttaatatcctaggcatctgctgtaataatattttagaaaatgtttggaatttaagaaataacttgtgttactaatttgtataacccatatctgtgcaatggaatataaatatcacaaagttgtttaactagactgcgtgttgtttttcccgtataataaaaccaaagaatagtttggttcttcaaatcttaagagaatccacataaaagaagaaactattttttaaaaattcacttctatatatacaatgagtaaaatcacagattttttctttaaataaaaataagtcattttaataactaaaccagattctttgtggatactattaaagtaacatttaagcctcaaaaaaaaaaaaaaa

SEQ ID NO: 14518 - DNA, 4458 bp, Homo sapiens
gaggtgccggcggctggcggccgcggagtcttcggcgagacctaccgggccctgtctgtgccggccgtgagctgcggcaggacggctggagattacttctctaacaggatcaccagtttgctccacaaagcacaatgtctcgatcacgacaacccccccttgtgaccggcatctctccaaatgaagggataccatggacgaaggtcacaatcaggggagaaaatctggggactggccccaccgacctcataggcttgaccatttgtggacataattgcctcctgacggcagaatggatgtctgcaagtaaaatagtatgtcgagtgggacaagccaaaaatgacaaaggagacattattgtcaccactaagtcaggtggcagaggaacctcaacagtctctttcaagctactcaaacctgagaaaataggcattttggatcagtctgctgtgtgggttgatgaaatgaattattatgatatgcgcactgacaggaacaaaggaattccgcccttgtccttacgtcctgctaacccgcttggcattgagattgaaaaaagtaaattttcgcagaaggacttagaaatgctattccatggaatgagtgctgattttacaagtgagaatttctcagcagcctggtatcttatagagaatcactcaaacaccagttttgagcagctcaaaatggcagtcaccaacctaaagagacaggctaacaagaagagtgagggcagcctggcctatgtgaaaggcggtctcagtacattcttcgaagcacaggatgccctctcagccatccatcaaaaactagaagcagatggaacggaaaaagtagaaggatccatgacgcagaaactggagaatgttctgaacagagcaagtaatactgcagacacattgtttcaagaagtattaggtcggaaagacaaggcagattccactagaaatgcactcaatgtgcttcagcgatttaagtttcttttcaaccttcctctaaatattgaaaggaatattcaaaagggtgattatgatgtggttattaatgattatgaaaaggccaagtcactttttgggaaaacggaggtgcaagttttcaagaaatattatgctgaagtagaaacaaggattgaagctttaagagaattacttctggataaattgcttgagacaccatcaactttacatgaccaaaaacgttacataaggtacctgtctgaccttcatgcgtctggtgaccctgcttggcaatgcattggagcccaacacaagtggatccttcagctcatgcacagttgcaaagagggctacgtgaaagatctgaaaggtaacccaggcctgcacagtcccatgttggatcttgataatgatacacgtccctcagtgttgggccatctcagtcagacagcgtccctgaagaggggcagcagctttcagtctggtcgagacgacacgtggagatacaaaactccccacagggtggcctttgttgaaaaattgacaaaactcgtcttgagccagctgcctaacttctggaaactctggatctcctacgttaatggaagcctcttcagtgagactgctgagaagtcaggccagattgaaagatcaaagaatgtaaggcaaagacaaaatgattttaagaaaatgattcaggaagtaatgcactccctggtgaagcttacccgcggagccctgcttcccctcagcatccgggatggggaagccaagcagtacggaggctgggaggtgaagtgcgagctctccggacagtggctcgctcacgccatccagactgtaagacttactcatgaatcgttgactgcccttgaaattcctaatgacctgttacagactatccaggatctcatcttggatctccgagtacgttgcgtaatggccacgttgcagcacacggcggaagaaataaagagattagctgaaaaagaagactggattgttgacaatgaaggactgacttctctaccatgtcagtttgaacagtgcatcgtgtgttctctgcagtcactgaagggggttctggagtgcaagccgggagaggccagtgtcttccaacaacctaaaacacaggaggaggtttgccagctaagcatcaatataatgcaggtttttatatactgtctggaacagttgagcaccaagcctgatgcagatatagatactacacatctctctgttgatgtttcttcccctgacttgtttggaagtatccatgaagacttcagcttgacctcagaacagcgccttttgatagtcctaagtaattgctgctatctagaacgtcacaccttcctaaatatcgcagaacattttgaaaagcacaacttccagggaatagaaaaaatcacacaggttagcatggcctcattgaaagaactagatcaaagactctttgaaaattacatcgagttgaaagcagatcccatcgttggctccttagaacctggaatttatgcaggatattttgattggaaggactgcctgcctccaacaggtgtcagaaactatttaaaagaagcactggtgaatataattgccgtgcatgcagaggtgttcaccatttccaaagaactggtccctcgggtactatccaaggtgatagaagcagtttctgaagagctcagtcgactgatgcagtgtgtttcatccttcagcaaaaatggagctttacaggcgagacttgaaatctgtgctttgagggacactgtggctgtttacctgacacccgaaagcaagtcaagttttaagcaggctttggaagccctgccccagctttccagtggagcagataaaaagttactggaagagctcctgaacaagttcaagagtagcatgcacttgcagctcacctgtttccaagcagcttcttcaaccatgatgaaaacataaatatctgccacataaaagaagtccaggaaaataacacgtaataagactgttcactctctaagtaccctaaaggtatttggtgtattaaacattgggtttgccatttttctcttttttcttcctctgacttcgaaaattgttggtatacatttcaaccaaaatgacctcatttgaaatgcccaggaagtatttgttttgccattcttactagatcagatcctgtatgactttaaaatacattttaaaatatattttgcatctcagcagaaggttgagtgctgcaggaagagctgcttctgcagggagttttctggaatggcgtggcacatattgaagcatttctcagtgtcccgttcacggaagcgcaggcagctcccacgacacacggagagactgactgatacgagatttggaaagctatgtagacatctttggagctcttactgtcctaaactgtacagctgtgcttaaaaccctcatttcatataaatggccttaagttttctaattcaagcgggtttttggaaaaatttatggtctccattaaaatacatattacaactggggtagattatttgtggtccaggtgtctgtgatttaactttgcgttttgctatctgatttttatttttcacagggctaagcatgagctttcattctcactcactcttaatttgtcgtgcgtcactacacatgcacgtgttgcagtccctgaggccctgtgtgttatctgtgatggagtgtgaatgtgtaacgggcactgtgttacactctgaggtgttggcggggcggtcgcagacttcagggtcccctaacggaaaggccaggctccgcgtggacggccaactccctgcccgctccttcagcaggtgactgtctctgccacttcttacctgctgaaggatcttgctcagtagctggaacaatgctgctgtcacacagtctcttctctgaaacttcaggatgctccttggtcaccaggcaatgggagctgtagaccagccgcatgcacttgccccacattcactgctgactggcttcactggaataggttcaggtcaccgggacttctctcagagtcagcggcccacccaactccctcataccgtcgcatctgaaaattttcagagaggaattctctttgtagtcggcttgtcagggttttcaagtttttctatggttatttttaaatctctttttttaaatgctaaaattaatgtcctcattaatgcaagtaattttagagcacagtgtagccatgtacagtttccattatttaaaataaataaatgtgttggttcatttggtgtatggggggacatcatggtaactggaaatgaaagtttaatctttcacaaatgtgcttgataaagctgttaagaattgtctttcctaagtatgttaactgttgtatctaactcaactgtgagctaagtttaaaaactgcaatcatgaatgtttgtgatattttaaatatctactacagcacattcagccaataaagaatctgcctttaatgtaagttgtaatttaaaaaaaaaaaaaaaaa

SEQ ID NO: 14519 - DNA, 10692 bp, Homo sapiens
gaggagagagcagagtataccgcagacatcatttctactacagtggcggagccgtacaggacctgtttcactgcagggggatccaaaacaagccccgtggagcagcagccagagcaacagcagccgcaagacattgtttctctccctctgcccccccttccccacgcaaccccagatccatttacactttacagttttacctcacaaaaactactacaagcaccaagctccctgatggaaaggagcatcgtgcatcaagtcaccagggtggtccattcaagctgcagatttgtttgtcatccttgtacagcaatctcctcctccactgccactacagggaagtgcatcacatgtcagcatactggagcatagtgaaagagtctattttgaagcttcaaacttagtgctgctgcagaccaggaacaagagagaaagagtggatttcagcctgcacggatggtcttgaaacacaaatggtttttggtctaggcgttttacactgagattctccactgccaccctttctactcaagcaaaatcttcgtgaaaagatctgctgcaaggaactgatagcttatggttctccattgtgatgaaagcacatggtacagttttccaaagaaattagaccattttcttcgtgagaaagaaatcgacgtgctgttttcatagggtatttctcacttctctgtgaaaggaagaaagaacacgcctgagcccaagagccctcaggagccctccagagcctgtgggaagtctccatggtgaagtataggctgaggctacctgtgaacagtacgcagtgaatgttcatccagagctgctgttggcggattgtacccacggggagatgattcctcatgaagagcctggatcccctacagaaatcaaatgtgactttccgtttatcagactaaaatcagagccatccagacagtgaaacagtcaccgtggaggggggacggcgaaaaatgaaatccaaccaagagcggagcaacgaatgcctgcctcccaagaagcgcgagatccccgccaccagccggtcctccgaggagaaggcccctaccctgcccagcgacaaccaccgggtggagggcacagcatggctcccgggcaaccctggtggccggggccacgggggcgggaggcatgggccggcagggacctcggtggagcttggtttacaacagggaataggtttacacaaagcattgtccacagggctggactactccccgcccagcgctcccaggtctgtccccgtggccaccacgctgcctgccgcgtacgccaccccgcagccagggaccccggtgtcccccgtgcagtacgctcacctgccgcacaccttccagttcattgggtcctcccaatacagtggaacctatgccagcttcatcccatcacagctgatccccccaaccgccaaccccgtcaccagtgcagtggcctcggccgcaggggccaccactccatcccagcgctcccagctggaggcctattccactctgctggccaacatgggcagtctgagccagacgccgggacacaaggctgagcagcagcagcagcagcagcagcagcagcagcagcagcatcagcatcagcagcagcagcagcagcagcagcagcagcagcagcagcagcacctcagcagggctccggggctcatcaccccggggtcccccccaccagcccagcagaaccagtacgtccacatttccagttctccgcagaacaccggccgcaccgcctctcctccggccatccccgtccacctccacccccaccagacgatgatcccacacacgctcaccctggggcccccctcccaggtcgtcatgcaatacgccgactccggcagccactttgtccctcgggaggccaccaagaaagctgagagcagccggctgcagcaggccatccaggccaaggaggtcctgaacggtgagatggagaagagccggcggtacggggccccgtcctcagccgacctgggcctgggcaaggcaggcggcaagtcggttcctcacccgtacgagtccaggcacgtggtggtccacccgagcccctcagactacagcagtcgtgatccttcgggggtccgggcctctgtgatggtcctgcccaacagcaacacgcccgcagctgacctggaggtgcaacaggccactcatcgtgaagcctccccttctaccctcaacgacaaaagtggcctgcatttagggaagcctggccaccggtcctacgcgctctcaccccacacggtcattcagaccacacacagtgcttcagagccactcccggtgggactgccagccacggccttctacgcagggactcaaccccctgtcatcggctacctgagcggccagcagcaagcaatcacctacgccggcagcctgccccagcacctggtgatccccggcacacagcccctgctcatcccggtcggcagcactgacatggaagcgtcgggggcagccccggccatagtcacgtcatccccccagtttgctgcagtgcctcacacgttcgtcaccaccgcccttcccaagagcgagaacttcaaccctgaggccctggtcacccaggccgcctacccagccatggtgcaggcccagatccacctgcctgtggtgcagtccgtggcctccccggcggcggctccccctacgctgcctccctacttcatgaaaggctccatcatccagttggccaacggggagctaaagaaggtggaagacttaaaaacagaagatttcatccagagtgcagagataagcaacgacctgaagatcgactccagcaccgtagagaggattgaagacagccatagcccgggcgtggccgtgatacagttcgccgtcggggagcaccgagcccaggtcagcgttgaagttttggtagagtatcctttttttgtgtttggacagggctggtcatcctgctgtccggagagaaccagccagctctttgatttgccgtgttccaaactctcagttggggatgtctgcatctcgcttaccctcaagaacctgaagaacggctctgttaaaaagggccagcccgtggatcccgccagcgtcctgctgaagcactcaaaggccgacggcctggcgggcagcagacacaggtatgccgagcaggaaaacggaatcaaccaggggagtgcccagatgctctctgagaatggcgaactgaagtttccagagaaaatgggattgcctgcagcgcccttcctcaccaaaatagaacccagcaagcccgcggcaacgaggaagaggaggtggtcggcgccagagagccgcaaactggagaagtcagaagacgaaccacctttgactcttcctaagccttctctaattcctcaggaggttaagatttgcattgaaggccggtctaatgtaggcaagtagaggcagcgtgggggaaaggaaacgtggctctcccttatcatttgtatccagattactgtactgtaggctaaaataacacagtatttacatgttatcttcttaattttaggtttctgttctaaccttgtcattagagttacagcaggtgtgtcgcaggagactggtgcatatgctttttccacgagtgtctgtcagtgagcgggcgggaggaagggcacagcaggagcggtcagggctccaggcatccccggggaagaaaggaacggggcttcacagtgcctgccttctctagcggcacagaagcagccgggggcgctgactcccgctagtgtcaggagaaaagtcccgtgggaagagtcctgcaggggtgcagggttgcacgcatgtgggggtgcacaggcgctgtggcggcgagtgagggtctctttttctctgcctccctctgcctcactctcttgctatcggcatgggccgggggggttcagagcagtgtcctcctggggttcccacgtgcaaaatcaacatcaggaacccagcttcagggcatcgcggagacgcgtcagatggcagatttggaaagttaaccatttaaaagaacatttttctctccaacatattttacaataaaagcaacttttaattgtatagatatatatttccccctatggggcctgactgcactgatatatattttttttaaagagcaactgccacatgcgggatttcatttctgctttttactagtgcagcgatgtcaccagggtgttgtggtggacagggaagcccctgctgtcatggccccacatggggtaaggggggttgggggtgggggagagggagagagcgaacacccacgctggtttctgtgcagtgttaggaaaaccaatcaggttattgcattgacttcactcccaagaggtagatgcaaactgcccttcagtgagagcaacagaagctcttcacgttgagtttgcgaaatctttttgtctttgaactctagtactgtttatagttcatgactatggacaactcgggtgccactttttttttttttcagattccagtgtgacatgaggaattagattttgaagatgagcatatattactatctttaagcatttaaaaatactgttcacactttattaccaagcatcttggtctctcattcaacaagtactgtatctcactttaaactctttggggaaaaaacaaaaacaaaaaaaactaagttgctttctttttttcaacactgtaactacatttcagctctgcagaattgctgaagagcaagatattgaaagtttcaatgtggtttaaagggatgaatgtgaattatgaactagtatgtgacaataaatgaccaccaagtactacctgacgggaggcacttttcactttgatgtctgagaatcagttcaaggcatatgcagagttggcagagaaactgagagaaaagggatggagaagagaatactcatttttgtccagtgtttttctttttaagatgaacttttaaagaaccttgcgatttgcacatattgagtttataacttgtgtgatattcctgcagtttttatccaataacattgtgggaaaggtttgggggactgaacgagcataaataaatgtagcaaaatttctttctaacctgcctaaactctaggccattttataaggttatgttcctttgaaaattcattttggtctttttaccacatctgtcacaaaaagccaggtcttagcgggctcttagaaactctgagaattttcttcagattcattgagagagttttccataaagacatttatatatgtgagcaagattttttttaaacaattactttattattgttgttattaatgttattttcagaatggcttttttttttctattcaaaatcaaatcgagatttaatgtttggtacaaacccagaaagggtatttcatagtttttaaacctttcattcccagagatccgaaatatcatttgtgggttttgaatgcatctttaaagtgctttaaaaaaaagttttataagtagggagaaatttttaaatattcttacttggatggctgcaactaaactgaacaaatacctgacttttcttttaccccattgaaaatagtactttcttcgtttcacaaattaaaaaaaaaatctggtatcaacccacattttggctgtctagtattcatttacatttagggttcaccaggactaatgatttttataaaccgttttctggggtgtaccaaaaacatttgaataggtttagaatagctagaatagttccttgactttcctcgaatttcattaccctctcagcatgcttgcagagagctgggtgggctcattcttgcagtcatactgcttatttagtgctgtattttttaaacgtttctgttcagagaacttgcttaatcttccatatattctgctcagggcacttgcaattattaggttttgtttttctttttgttttttagcctttgatggtaagaggaatacgggctgccacatagactttgttctcattaatatcactatttacaactcatgtggactcagaaaaacacacaccaccttttggcttacttcgagtattgaattgactggatccactaaaccaacactaagatgggaaaacacacatggtttggagcaataggaacatcatcataatttttgtggttctatttcaggtataggaattataaaataattggttctttctaaacacttgtcccatttcattctcttgcttttttagcatgtgcaatactttctgtgccaatagagtctgaccagtgtgctatatagttaaagctcattcccttttggctttttccttgtttggttgatcttccccattctggccagagcagggctggagggaaggagccaggagggagagagcctcccacctttcccctgctgcggatgctgagtgctggggcggggagccttcaggagccccgtgcgtctgccgccacgttgcagaaagagccagccaaggagacccgggggaggaaccgcagtgtcccctgtcaccacacggaatagtgaatgtggagtgtggagaggaaggaggcagattcatttctaagacgcactctggagccatgtagcctggagtcaacccattttccacggtcttttctgcaagtgggcaggcccctcctcggggtctgtgtccttgagacttggagccctgcctctgagcctggacgggaagtgtggcctgttgtgtgtgtgcgttctgagcgtgttggccagtggctgtggaggggaccacctgccacccacggtcaccactcccttgtggcagctttctcttcaaataggaagaacgcacagagggcaggagcctcctgtttgcagacgttggcgggccccgaggctcccagagcagcctctgtcaccgcttctgtgtagcaaacattaacgatgacaggggtagaaattcttcggtgccgttcagcttacaaggatcagccatgtgcctctgtactatgtccactttgcaatatttaccgacagccgtcttttgttctttctttcctgttttccatttttaaactagtaacagcaggccttttgcgtttacaatggaacacaatcaccaagaaattagtcagggcgaaaagaaaaaaataatactattaataagaaaccaacaaacaagaacctctctttctagggatttctaaatatataaaatgactgttccttagaatgtttaacttaagaattatttcagtttgtctgggccacactggggcagaggggggagggagggatacagagatggatgccacttacctcagatcttttaaagtggaaatccaaattgaattttcatttggactttcaggataattttctatgttggtcaacttttcgttttccctaactcacccagtttagtttgggatgatttgatttctgttgttgttgatcccatttctaacttggaattgtgagcctctatgttttctgttaggtgagtgtgttgggttttttccccccaccaggaagtggcagcatccctccttctcccctaaagggactctgcggaacctttcacacctctttctcagggacggggcaggtgtgtgtgtggtacactgacgtgtccagaagcagcactttgactgctctggagtagggttgtacaatttcaaggaatgtttggatttcctgcatcttgtggattactccttagataccgcatagattgcaatataatgctgcatgttcaagatgaacagtagctcctagtaatcataaaatccactctttgcacagtttgatctttactgaaatatgttgccaaaatttatttttgttgttgtagctctggattttgttttgttttgttttttaaggaaacgattgacaataccctttaacatctgtgactactaaggaaacctatttctttcatagagagaaaaatctccaatgcttttgaagacactaataccgtgctatttcagatatgggtgaggaagcagagctctcggtaccgaaggccgggcttcttgagctgtgttggttgtcatggctactgtttcatgaaccacaagcagctcaacagactggtctgttgccttctgaaaccctttgcacttcaatttgcaccaggtgaaaacagggccagcagactccatggcccaattcggtttcttcggtggtgatgtgaaaggagagaattacactttttttttttttaagtggcgtggaggcctttgcttccacatttgtttttaacccagaatttctgaaatagagaatttaagaacacatcaagtaataaatatacagagaatatacttttttataaagcacatgcatctgctattgtgttgggttggtttcctctcttttccacggacagtgttgtgtttctggcatagggaaactccaaacaacttgcacacctctactccggagctgagatttcttttacatagatgacctcgcttcaaatacgttaccttactgatgataggatcttttcttgtagcactataccttgtgggaatttttttttaaatgtacacctgatttgagaagctgaagaaaacaaaattttgaagcactcactttgaggagtacaggtaatgttttaaaaaattgcacaaaagaaaaatgaatgtcgaaatgattcattcagtgtttgaaagatatggctctgttgaaacaatgagtttcatactttgtttgtaaaaaaaaaaaagcagagaagggttgaaagttacatgtttttttgtatatagaaatttgtcatgtctaaatgatcagatttgtatggttatggcctggaagaattactacgtaaaaggctcttaaactatacctatgcttattgttatttttgttacatatagccctcgtctgagggaggggaactcggtattctgcgatttgagaatactgttcattcctatgctgaaagtacttctctgagctcccttcttagtctaaactcttaagccattgcaacttctttttcttcagagatgatgtttgacattttcagcacttcctgttcctataaacccaaagaatataatcttgaacacgaagtgtttgtaacaagggatccaggctaccaatcaaacaggactcattatggggacaaaaaaaaaaattatttcaccttctttccccccacacctcatttaaatggggggagtaaaaacatgatttcaatgtaaatgcctcattttattttagttttattttgatttttatttaatataaagaggccagaataaatacggagcatcttctcagaatagtattcctgtccaaaaatcaagccggacagtggaaactggacagctgtggggatattaagcacccccacttacaattcttaaattcagaatctcgtcccctcccttctcgttgaaggcaactgttctggtagctaactttctcctgtgtaatggcgggagggaacaccggcttcagtttttcatgtccccatgacttgcatacaaatggttcaactgtattaaaattaagtgcatttggccaataggtagtatctatacaataacaacaatctctaagaatttccataacttttcttatctgaaaggactcaagtcttccactgcagatacattggaggcttcacccacgttttctttccctttagtttgtttgctgtctggatggccaatgagcctgtctccttttctgtggccaatctgaaggccttcgttggaagtgttgtttacagtaatccttaccaagataacatactgtcctccagaataccaagtattaggtgacactagctcaagctgttgtcttcagagcagttaccaagaagctcggtgcacaggttttctctggttcttacaggaaccacctactctttcagttttctggcccaggagtggggtaaatcctttagttagtgcatttgaacttgatacctgtgcattcagttctgtgaatactgccctttttggcggggtttcctcatctccccagcctgaactgctcaactctaaacccaaattagtgtcagccgaaaggaggtttcaagatagtcctgtcagtatttgtggtgaccttcagattagacagtcttcatttccagccagtggagtcctggctccagagccatctctgagactcgtactactggatgttttaatatcagatcattacccaccatatgcctcccacaggccaagggaaaacagacaccagaacttgggttgagggcactaccagactgacatggccagtacagaggagaactagggaaggaatgatgttttgcaccttattgaaaagaaaattttaagtgcatacataatagttaagagcttttattgtgacaggagaacttttttccatatgcgtgcatactctctgtaattccagtgtaaaatattgtacttgcactagcttttttaaacaaatattaaaaaatggaagaattcatattctattttctaatcgtggtgtgtctatttgtaggatacactcgagtctgtttattgaattttatggtccctttctttgatggtgcttgcaggttttctaggtagaaattatttcattattataataaaacaatgtttgattcaaaatttgaacaaaattgttttaaataaattgtctgtataccagtacaagtttattgtttcagtatactcgtactaataaaataacagtgccaattgcaaaaaaaaaaaaaaaaaaaaaaaaaaaaaaaaaaaaaaaaaaaaaaaaaaaaaaaaa

SEQ ID NO: 14520 - DNA, 6364 bp, Homo sapiens
ctcgtggggaaaaggcagggagggggtggtgtccccagccggtttggggggtgcgttgcccggagacggaaagtttgggagcccgagcaggctcggctgcagcctcggggagggggtccagcgggtggcggccctggggatggggaaggagcaggagctgctggaggcggcccgcaccgggcacctcccggcggtggagaagctgctgtccgggaagcggctctcctcaggctttgggggcggcggcggcggtggctctgggggcggcggcggcggcagcggcggcggcggcggcggcctcggctcttccagccaccccctctccagtctgctcagcatgtggagagggccaaatgtgaactgtgttgacagcactggctacacacccctgcaccatgctgctttgaatggccataaggatgtggtcgaggttcttctgaggaacgatgcgctgaccaacgtggctgactcaaaaggctgctaccctctgcatttggcagcctggaaaggagatgcccagatagtgcggttgctcatccatcaagggccttcacacaccagagtcaatgaacagaacaatgacaacgagacagccctgcattgtgcagcgcagtatggccacacagaggtggtgaaggtgctcttagaggagctgacggaccccaccatgcgcaacaacaaattcgagacccctttggacctggcagcactgtacgggcgactggaggtggtgaaaatgctccttaatgcacaccccaacctcctgagctgcaacactaagaagcacacccctctgcacttggcagcaaggaatggccacaaagccgtggtccaggtcctcctcgatgctggcatggacagcaactaccagacggagatgggcagtgctttgcatgaggctgctttgtttggcaagaccgatgtggtgcaaatcctgctggctgcaggaactgacgtcaacataaaagataaccatggactgactgccctagacactgttcgggaactgccttctcaaaagagccagcaaatagcagcattaattgaagatcacatgactggaaaaagaagtacaaaagaagtagataaaacccccccaccccagccacctctcatctccagtatggactccatatcacagaagtctcagggtgacgtggagaaagcagtgactgaactgattatagattttgatgcaaatgctgaagaagagggtccctacgaagctctgtataatgccatctcctgccattcgttggacagcatggccagcgggcgatcatctgaccaagactccacgaacaaggaggctgaggcagcaggagtgaaacctgctggagtgaggcctagggaacgtccaccacctccagcaaagccaccgcccgatgaagaggaagaagaccacatagataagaagtattttcccttgacagcttctgaggttctgtccatgagacctaggattcatgggagtgcagcccgggaagaagacgaacacccttatgaactgttgttaacagcagagacaaagaaagtggtgttggtggatggaaaaacaaaagaccacaggcggagcagcagcagccggagccaggactctgcggaggggcaggacgggcaggtcccagagcagttctcaggcctcctccacggctcctccccggtgtgcgaggtggggcaggaccctttccagctgctctgtaccgctggccagagccatccagacgggtccccccagcagggcgcctgccacaaggccagcatgcagctggaggagacgggtgtgcatgctcctggagcctcccagcccagtgccctggaccagagcaagagagtgggctacctcacaggcctgcccaccaccaacagccgctcgcaccctgaaactttgactcacacagcatctccgcaccctggtggtgctgaggaaggagaccggagtggggccaggagccgagcgcctcccactagcaaacccaaagctgaactcaaactcagccgcagcttgtccaagtctgactctgatctcctgacctgctcacccacagaggacgctaccatggggagtcggagtgagtccttatccaactgcagcattgggaagaaaaggctagagaagtcaccctccttcgcctcggagtgggatgagattgagaaaatcatgagttctattggagaagggattgacttttctcaggaacggcagaagatctcaggttcacggacgctggagcagagtgtcggggagtggctggagtcgattgggctgcagcagtatgagagcaagttgcttctgaatggctttgacgatgtccacttcctggggtctaatgtgatggaagagcaggacctgcgggacatcggcatcagcgacccacagcaccggcggaagctgctccaggcggcacgctccctacccaaggtgaaggctctgggttatgacgggaacagcccccctagcgtgccctcctggctggactccctggggctgcaggactacgtccattccttcttgtcaagtggttacagctccattgacaccgtgaagaacctctgggagctagagctcgtcaatgtcctgaaggtccagctgctcggccatcgcaagcgcatcatcgcctccctcgcagacagaccgtacgaggagccgccccagaagccccccagattctcccagctgaggtgccaagatttgctctcccagacgtcatccccactgagtcagaatgattcctgcactgggcggtcggcagatctgctgctgcctccaggggacacaggcaggaggcgccatgacagtctccatgaccctgcggcaccctcccgagcggagcgcttcaggatccaggaggagcaccgtgaggccaagctgaccctgcggcccccgagcctggcagccccctacgccccagtgcagagttggcaacaccagccagagaaactcatcttcgagtcctgtggttatgaagccaattatctgggctccatgctgatcaaagatctgcgagggacagaatccacgcaagacgcctgtgccaagatgcggaaatctacggagcacatgaagaagatccccaccatcatcctgtccatcacatacaaaggtgtcaagttcatcgatgcctccaacaagaacgtcattgcagagcacgagatccggaacatttcctgtgcggcccaggacccggaggacctctgtacctttgcctacatcaccaaggacctgcagaccagccaccactattgccatgtgttcagcaccgtggatgtgaacctgacctacgagatcatcctgacgctggggcaggccttcgaagtggcctatcagttggccctgcaggcccagaagtccagggcgacgggcgcctctgcagctgagatgattgaaacaaaatcttccaaaccggtgcctaagcctcgggtcggcgtgaggaaatccgcactggaaccacctgatatggaccaagatgcccaatcccatgccagtgtctcctgggttgtggaccccaaaccagactctaagcggagcctcagcaccaactgagccactgaggaaccacactgtgctgcggaaacatagacgtgggggcataggctcccactgccaccaccgccatcgcctcacctgcagctctgaagacccaggcctcacctccgcctgcaggacctcctcttggccacttggcctgggcctgccaccaccacgtcctgcagaacgagccctgccttggctgtggagaagcactccaggccgctagcagatgggactggcattccagagggtcaagaagtgacttgttcagaacacattgtttttaacagaaaaaaaatctttttataaaatgaacttttaacacttggctcaaacctctaggtcatactgccaatctttagacaaatggccatggggcagaggacaggggagctgaggttggttcagaggccagcctgcatagcctctgtcctcaggacggaacttgggtgcagctcagtgggtcggaagagaaggcggtggcctgtgggtgaggggaacggagcaggctcaggcagaattgagtacggtgcgtctgcttttcaaacccaaccatatcagctgctgctctttatgaactgcccaacttcctgtccctttcaggggctagacacaggcttctcgtaagaacacagccttagaggcacctgagcaactcaaaggtttccggtccatttctggggttcccgatgggaaggttcagtggccaaatgaagataagtgtgcagtttctagtgctgggaagtcttagccagcaccagagcgccaggcctctccctggcctcttacctgtcagtgatcggagcactgccctgggctggccggcgccgtactgcctgcgttgtgtcagagaataggaaaagcagctttgtttggggcattaatgcttggagtggggtcagctaaggttgctacttgccaatttgtgatttgtctaatcagcctgtgtgattggggctcattttgattctctgaattatcggtttgacggttacacttggctgctgggcccatccctggcccccggtgtggaaaaggctaaataaggtgacagtgcatcgatgctcccccgcgtggcctttggggcaggctggcatcccggtgcgcctctgcttcttaagctttcctgctgctcgctttgtttttaaaagtaacttgggttgcattcttccctctggactagagtagaaatgcaggggaaactgctgtggatttgagaggcaaagttggctcagctgtgtgcccagttcctcctgtgggcactttagcaggctccgagctttcctggcataggtcaatcaggtcccaggatgaataatccaggcttcagcaacactcctctttcccagccagcaaaggctgtgaatttgaattctttgttggtatgtatgtgcagggagtactgttaggcacattcttaacccatgtggttggccagaaatcagaagtggggctgtgtctctgactggctagaggccaggccttgtgggtttctatctgctaagcacccagcaggttggggcctgggactcagctctctctgcggtagaggcaggccctcctccacttcttggtactaaacgaagatctcgacaccttgcagttttacttcatttcctgcccctttcagggcctgtgaggatgcccatgagctaccgctgtacagttctcggccccggctttcttccaagagttgaccaggaaccctaaagcatccagagtagactgcgctgccactgcgcacatgctggtgcccgtcttcctcctaaggggccaggccacatccaagtgggcctctgtcgggggcggggcggtaggtccgaaagaaaccgcagacactacgatgcactcctcaagctgtcttttgtgcttagatcatccataggtgtttcttctgcttgaagctgctatatcatctttatttattcagggtattttcatattggaagccttggctagtctgctctagctctgggttctgtttagagattggtttatttctgaatattcaagaaaggaaaatgactgggcctttctttcttttcttctcctctgggatgggtagtctccctttcctagaaaggttattataactttaaggacaggcttcaagtgggaaggcccctacttttgcacttctccaagtgcaggtcacaccaggggcagaccctgtcgctgcgtttctgaactgtgaaggagcccattcgggtgggagacttcagatgggctcagtacctgtcccagccacaggcttcttgtccacctcttctcccctgcccaccagctgctcagcgcataagaccttcccgacaggctctgcgtgtgcagctctctgcgtccctcctgggccctccagcgtcagacactaatgggagttcccgagatgctcgggtttgagcagggagcaggcagagctgcagtcagagacattagaaaaccagtctgaattgggtctgtctttgagatgcccaggccagcagaaagcagctcagaagtattgttgctcatggtgtggcaatggactgaactgtaatgaaaatgttatttaatctttgtctctgtattttgatacttgaatgactttcccttttgttttactgtatataaaattgttaatctgtctgattttgtctgaattataaacactttgaggtaccaaacataaccaatctgtgcaacaacatagactgacctcagtacccaagagagtgtaaatatttctgggcttccagctttggttttgttattttcataactgtacacaacttagaacagactgaattaataaatgagaagcgacatgaacgcagccttaaaaaaaaaaaaaaaaaa

SEQ ID NO: 14521 - DNA, 6839 bp, Homo sapiens
gccccggcccctcctgcccatggcggtggccgagctgtacacgcagtacaacagggtctggattcccgatcctgaagaagtttggaagtctgctgaaatagccaaggactacagagttggtgacaaggtcctgcgactcctgctggaggatggaacggagctggattattctgtcaatccagaatctctgcctccacttcggaatcctgacatcctcgtgggcgagaatgacctcacggctctcagctatcttcacgagcccgcggtgctccacaacctcagaatccgctttgcagaatccaaactcatttacacctacagtggaatcattttggtggccatgaatccttacaagcagttgccaatatacggagatgccatcatccacgcctacagcgggcagaacatgggcgatatggacccacacatatttgccgtggcagaagaggcatacaagcagatggccagaaacaacagaaaccagtccataattgtaagtggggagtcaggtgctggaaagacagtgtcggctcgctatgccatgaggtactttgccaccgtcagcaaatcgggcagcaacgctcacgtggaagacaaggtcctggcatccaatcccatcaccgaggccgttggaaatgccaagaccacccgcaatgacaatagtagtcggtttgggaaatacacagaaatcagttttgatgaacaaaatcaaattataggagccaacatgagcacttacctcctggagaaatccagagttgtctttcaatcggaaaatgaacgaaattaccacattttctatcagctttgtgcatctgcacagcagtcggaatttaaacatcttaaattggggagtgccgaagaatttaattatacaagaatgggaggcaatactgtcattgagggtgtgaatgatcgagctgaaatggtagagactcaaaagaccttcacgcttctgggtttcaaggaggattttcagatggacgtttttaaaatcctggcagccatcctacatctgggcaacgtgcagatcaccgcggtgggcaacgagaggtcctcagttagtgaggatgacagtcacctgaaggtgttctgtgagctcctgggcctggagagtggcagagttgctcagtggctgtgcaatcgcaaaatcgtcacaagctctgagacggtggtaaaacccatgaccaggcctcaggctgtcaacgccagggatgcactggccaaaaagatctatgctcacctgttcgacttcattgtggagagaattaaccaagcgttgcagttttcaggcaagcagcacacttttattggtgttttggacatttatggttttgaaacctttgatgtgaacagctttgaacaattttgcatcaattacgctaatgaaaaactgcaacaacagtttaacatgcatgtcttcaaactggaacaagaagaatacatgaaggaagatataccttggacgctgatagatttttatgacaatcaaccagttattgacctgattgaagcaaaaatgggaattctggagttactggatgaagaatgtttgttaccacatggaactgatgaaaactggcctcaaaagctgtataataattttgtcaacaggaaccctttgtttgaaaagcctagaatgtcaaacacatcctttgtcatccagcactttgctgataaggtagagtataaatgtgaaggtttcctggagaaaaacagagacaccgtctatgacatgctggttgaaatcctgagagcaagcaagtttcatctctgtgccaacttttttcaagaaaatccaactcctccttctccttttggttcaatgattacagttaaatctgcaaagcaagtcatcaagccaaacagcaagcatttccgaaccacagttgggagcaagttccgcagctctctgtacttgctcatggagaccctcaatgcgacgacgccccactacgttcgatgcatcaagccaaatgatgagaagttaccctttgaatttgactccaaaagaattgttcagcagctgcgagcctgcggcgttttagaaacgattcgcattagtgcacagagctacccttccaggtggacatacatcgagttctacagtcgctacggcattctcatgaccaagcaagagctttccttcagcgataaaaaggaggtgtgcaaggtggttttacacagactcatccaggattctaatcagtaccagtttggtaaaaccaaaattttcttcagagcaggacaagtggcttatttagagaaacttcgattggataaactgaggcagagttgtgttatggtacaaaagcacatgcgtggctggctccagaggaaaaaattcctccgagagagacgagccgccctgataatccagcagtacttccggggtcagcaaactgtgaggaaagctattactgcagtggccttaaaagaagcttgggcagccataatcattcagaagcactgccgtgggtatcttgttcgcagcctgtatcagttgattcgcatggccaccatcacaatgcaggcctacagccgaggattcctggcaaggaggaggtatcgaaagatgctggaggaacataaggctgtgatcctacagaaatacgcacgggcgtggctggccagacgcagattccagagtatccgacgattcgtgcttaatattcagcttacttacagggtccagcgtttgcagaaaaagctggaagatcagaacaaagaaaaccatgggctggtggagaagctgactagcctggctgctcttcgagctggggatgtggaaaagattcagaagctggaagcagaactagaaaaagcagccactcacaggcgaaattacgaggagaaggggaagagatacagggatgctgtggaagagaaattggcaaagcttcagaagcataattcagaactggaaacacagaaagaacaaatacagctgaagcttcaagagaagactgaagagttaaaagaaaaaatggacaacctcaccaagcagctctttgatgatgtacaaaaggaagaacggcaaagaatgcttcttgaaaaaagttttgaactgaaaacacaagactatgagaagcagattcagtctttgaaagaagaaattaaagctctcaaggatgagaagatgcaactccaacacctggtggagggggagcacgtcacttctgatggcttgaaggcggaagtggcccgcctgagcaagcaggtcaagacaatctctgagttcgaaaaagagatagaactacttcaggcacagaagatagatgtggagaaacatgtgcagtcacaaaaacgggaaatgagagaaaagatgtcagagatcaccaaacaacttctcgaaagctatgacattgaagatgtaagaagcaggctctctgtggaagatctggaacatttaaatgaggatggagaactttggtttgcttatgaaggactaaagaaagcaacacgtgttttggagagccatttccagtctcagaaggattgctatgaaaaggagattgaagctttgaacttcaaagtggtgcatctcagtcaagaaatcaaccacctgcagaagttattcagagaagaaaatgacatcaatgaaagcatccgtcatgaagttaccaggctaacatcagagaacatgatgatcccagactttaaacagcaaatttcagaattggagaaacagaagcaagatcttgaaatccgcctgaatgaacaagctgagaaaatgaaaggaaaactagaagaattgtctaatcagttacatcgcagtcaagaggaggaaggaacacaaagaaaggccttggaagcccaaaatgaaatacataccaaagagaaggagaagctgattgataagattcaagaaatgcaggaggccagtgaccacttgaagaaacaatttgaaactgaaagtgaagtcaagtgtaacttccggcaggaagcatcccggctcactttggaaaacagggatcttgaagaagaattagacatgaaagacagagtgattaaaaagctacaagatcaagtcaagacactaagcaagacaattggaaaagccaatgatgtgcactcgtcctcaggacccaaggagtaccttggaatgctgcaatacaagagagaagacgaggccaagctcattcagaacctcattcttgacttgaagccccgtggcgtggtggtgaacatgatccccgggctgccggctcatatcctgttcatgtgtgtgcgctacgcagactctctgaatgatgccaacatgctgaagtccctcatgaacagcaccattaatggcatcaagcaggtggttaaggaacatttagaagactttgaaatgctgtccttttggctttccaacacttgtcattttctcaattgcctgaagcagtacagcggagaagaggaattcatgaagcataatagtccacagcagaataagaattgcttgaacaattttgacctttcagaatacagacagattctcagtgatgtggctatacgaatatatcatcaatttattatcataatggaaaagaatatccaaccgataatagttccgggaatgctggagtatgagagcctgcagggcatttccggcctgaagcccacaggcttccggaagcgctcctctagcatagacgacacggacggctacaccatgacctccgtcctgcaacagctgagctacttttacaccaccatgtgccagaacggcctggaccccgagcttgtgaggcaggcggtgaagcagctcttcttcttgatcggggcggtcacgctgaacagcctcttcctgcgcaaggacatgtgctcctgcagaaaagggatgcagatcaggtgcaatatcagctacttagaagaatggcttaaagataagaacttgcagaacagcttagcaaaggaaactttggagcccctctctcaggcagcctggttgcttcaggtcaagaagaccacagacagtgatgccaaggagatctacgaacgctgcacctcactgtctgctgtgcagatcataaagatccttaattcatacacacctatagatgactttgagaagagagtgactccatcctttgttcgcaaagtacaggctctcctaaatagccgggaggattcatcacagctgatgttggataccaaatatctctttcaagtcacatttccttttaccccctctccacatgctctggaaatgattcagatccccagcagtttcaagctaggctttctgaataggttatagcaggagaaaaagtcaatgcactttttcttcaaaagctaagtgaaggttcaatatgagggatgtgttttattaattggcagtggaaattgggaatgtgatttaaggaagaaaacagacttttgctcaaatggaccacatcatctctcactcacagtgacaatgctgctcctgtaattttgtaagaattcacacacaccagctgtatttggaaaagccatgtctcactctcgaatctcagctggttttcactgaaattcctggagggctcatattttcttccacgtgcctcttgatctgttctgtcttgtggcagggctctaccaggagggagtgagatctggggacacagtggcttccaagttttctaaggttcatgtgaaacctgagtacatttacaaagctgcaagtggattctagtgctgagtcttccaggaaaaaatcccgtttggccaccgtgacctgccaaaagttctcttgccccatgcctgctggggacagaaggttttcatgaactctttttactgaaaatgccctgcatttaaaaatgtttattttagacccttctaaatttttttttttttttgagactccggagtctcgctctatcgccaggctggagtgtagtggcatgatctcggcttattgcaacctccgcttcctgggttcaaacaattctcctgcctcagcctcctgagtagctgggactacaggcacctgccaccacgcccagctaatttttgtatttttagtggagacaggtttcaccatgttggccaggatggcctcgatctcttgacctcgtgatccgcccacctcagcctcccaaagtgctaggattacaggcgtgtgccaccgcgcctggctgacccttttaatttttaagagtgttcaatccgagatgaatcatttgaagtatttttatatgtatatctatttaaaactaatatattattaaagcttaattgccatgccgtttatcttctctgaaagaacttcaaatcttacctgccaacatattcaccataatttttttattttttaatacctttcatacaataacttttttaaaacaacctcagattgaaaaagcaacctaaattactttcgctctctaatcagcatttcaatgtatttatttttaaattttctcaaaaagtaactaaaaaattgtgtcggaccctacttttgagaaatttacgtttcccaagttttatgggaactggctattccttgtcccggcacaccttctcattccttcctttcagagcctaaaacctcatttgataagcactcctagtctctggcctgtggatccagtgctattctgtcaccaacctaagaatcccaattgcaccttctgtttctgacagtcacaggtgacagctgtgattctataatacagactggtgtcttagaggtaggaataatacatgattatgaagcatcaccctgctaatacataataatgtctttttatattataagtgattgagtttagttcatttcaatacattgtacatgaaaaaatgaaaagtagaactttgtaatactttaatcaataaaattaattaccaaaaaaaaaaaaaaaaaa

SEQ ID NO: 14522 - DNA, 3344 bp, Homo sapiens
ggtacagctgcgcgtctgcgggaataggtgcagcgggcccttggcgggggactctgagggaggagctggggacggcgaccctaggagagttctttggggtgactttcaagatggactctactctaacagcaagtgaaatccggcagcgatttatagatttcttcaagaggaacgagcatacgtatgttcactcgtctgccaccatcccattggatgaccccactttgctctttgccaatgcaggcatgaaccagtttaaacccattttcctgaacacaattgacccatctcaccccatggcaaagctgagcagagctgccaatacccagaagtgcatccgggctgggggcaaacaaaatgacctggacgatgtgggcaaggatgtctatcatcacaccttcttcgagatgctgggctcttggtcttttggagattactttaaggaattggcatgtaagatggctctggaactcctcacccaagagtttggcattcccattgaaagactttatgttacttactttggcggggatgaagcagctggcttagaagcagatctggaatgcaaacagatctggcaaaatttggggctggatgacaccaaaatcctcccaggcaacatgaaggataacttctgggagatgggtgacacgggcccctgtggtccttgcagtgagatccactacgaccggattggtggtcgggacgccgcacatcttgtcaaccaggacgaccctaatgtgctggagatctggaaccttgtgttcatccagtataacagggaagctgatggcattctgaaacctcttcccaagaaaagcattgacacagggatgggcctggaacgactggtatctgtgctgcagaataagatgtccaactatgacactgacctttttgtcccttactttgaagccattcagaagggcacaggtgcccgaccatacactgggaaagttggtgctgaggatgccgatgggattgacatggcctaccgggtgctggctgaccatgctcggaccatcactgtggcactggctgatggtggccggcctgacaacacagggcgtggatatgtgttgagacggattctccgccgagctgtccgatacgcccatgaaaagctcaatgccagcaggggcttctttgctacgttagtggatgttgtcgtccagtccctgggagatgcatttcctgagctgaagaaggacccagacatggtgaaggacatcattaatgaagaagaggtgcagtttctcaagactctcagcagagggcgtcgcatcctggacaggaaaattcagagcctgggagacagcaagaccattcccggagacactgcttggctcctctatgacacctatgggtttccagtggatctgactggactgattgctgaagagaagggcctggtggtagacatggatggctttgaagaggagaggaaactggcccagctgaaatcacagggcaagggagctggtggggaagacctcattatgctggacatttacgctatcgaagagctccgggcacggggtctggaggtcacagatgattccccaaagtacaattaccatttggactccagtggtagctatgtatttgagaacacagtggctacggtgatggctctgcgcagggagaagatgttcgtggaagaggtgtccacaggccaggagtgtggagtggtgctggacaagacctgtttctatgctgagcaaggaggccagatctatgacgaaggctacctggtgaaggtggatgacagcagtgaagataaaacagagtttacagtgaagaatgctcaggtccgaggagggtatgtgctacacattggaaccatctacggtgacctgaaagtgggggatcaggtctggctgtttattgatgagccccgacgaagacccatcatgagcaaccacacagctacgcacattctgaacttcgccctgcgctcagtgcttggggaagctgaccagaaaggctcattggttgctcctgaccgcctcagatttgactttactgccaagggagccatgtccacccaacagatcaagaaggctgaagagattgctaatgagatgattgaggcagccaaggccgtctatacccaggattgccccctggcagcagcgaaagccatccagggcctacgggctgtgtttgatgagacctatcctgaccctgtgcgagtcgtctccattggggtcccggtgtccgagttgctggatgacccctctgggcctgctggctccctgacttctgttgagttctgtgggggaacgcacctgcggaactcgagtcatgcaggagcttttgtgatcgtgacggaagaagccattgccaagggtatccggaggattgtggctgtcacaggtgccgaggcccagaaggccctcaggaaagcagagagcttgaagaaatgtctctctgtcatggaagccaaagtgaaggctcagactgctccaaacaaggatgtgcagagggagatcgctgaccttggagaggccctggccactgcagtcatcccccagtggcagaaggatgaattgcgggagactctcaaatccctaaagaaggtcatggatgacttggaccgagccagcaaagccgatgtccagaaacgagtgttagagaagacgaagcagttcatcgacagcaaccccaaccagcctcttgtcatcctggagatggagagcggcgcctcagccaaggccctgaatgaagccttgaagctcttcaagatgcactcccctcagacttctgccatgctcttcacggtggacaatgaggctggcaagatcacgtgcctgtgtcaagtcccccagaatgcagccaatcggggcttaaaagccagcgagtgggtgcagcaggtgtcaggcttgatggacggtaaaggtggtggcaaggatgtgtctgcacaggccacaggcaagaacgttggctgcctgcaggaggcgctgcagctggccacttccttcgcccagctgcgcctcggggatgtaaagaactgagtggggaaggaggaggctcccactggatccatccgtccagccaagagctcttcatctgctacaagaacatttgaatcttgggacctttaaagagcccctcctaacccagcagtaactggaacacacttgggagcagtcctatgtctcagtgccccttaaatttctgccctgagccctccacgtcagtgccatcggtctagaaccactaaccccgcattgctgttgatcgtcacgctcgcatctatagataacggctctccagacctgagctttccgcgtcagcaagtaggaatcgtttttgctgcagagaataaaaggaccacgtgc

SEQ ID NO: 14523 - DNA, 8458 bp, Homo sapiens
gctggcccgggagggggcgcggggcacggttgatgccggcccaggatggatcagacctgtgaactacccagaagaaattgtctgctgcccttttccaatccagtgaatttagatgcccctgaagacaaggacagccctttcggtaatggtcaatccaatttttctgagccacttaatgggtgtactatgcagttatcgactgtcagtggaacatcccaaaatgcttatggacaagattctccatcttgttacattccactgcggagactacaggatttggcctccatgatcaatgtagagtatttaaatgggtctgctgatggatcagaatcctttcaagaccctgaaaaaagtgattcaagagctcagacgccaattgtttgcacttccttgagtcctggtggtcctacagcacttgctatgaaacaggaaccctcttgtaataactcccctgaactccaggtaaaagtaacaaagactatcaagaatggctttctgcactttgagaattttacttgtgtggacgatgcagatgtagattctgaaatggacccagaacagccagtcacagaggatgagagtatagaggagatctttgaggaaactcagaccaatgccacctgcaattatgagactaaatcagagaatggtgtaaaagtggccatgggaagtgaacaagacagcacaccagagagtagacacggtgcagtcaaatcgccattcttgccattagctcctcagactgaaacacagaaaaataagcaaagaaatgaagtggacggcagcaatgaaaaagcagcccttctcccagcccccttttcactaggagacacaaacattacaatagaagagcaattaaactcaataaatttatcttttcaggatgatccagattccagtaccagtacattaggaaacatgctagaattacctggaacttcatcatcatctacttcacaggaattgccattttgtcaacctaagaaaaagtctacgccactgaagtatgaagttggagatctcatctgggcaaaattcaagagacgcccatggtggccctgcaggatttgttctgatccgttgattaacacacattcaaaaatgaaagtttccaaccggaggccctatcggcagtactacgtggaggcttttggagatccttctgagagagcctgggtggctggaaaagcaatcgtcatgtttgaaggcagacatcaattcgaagagctacctgtccttaggagaagagggaaacagaaagaaaaaggatataggcataaggttcctcagaaaattttgagtaaatgggaagccagtgttggacttgcagaacagtatgatgttcccaaggggtcaaagaaccgaaaatgtattcctggttcaatcaagttggacagtgaagaagatatgccatttgaagactgcacaaatgatcctgagtcagaacatgacctgttgcttaatggctgtttgaaatcactggcttttgattctgaacattctgcagatgagaaggaaaagccttgcgctaaatctcgagccagaaagagctctgataatccaaaaaggactagtgtgaaaaagggccacatacaatttgaagcacataaagatgaacggaggggaaagattccagagaaccttggcctaaactttatctctggggatatatctgatacgcaggcctctaatgaactttccaggatagcaaatagcctcacagggtccaacactgccccaggaagttttctgttttcttcctgtggaaaaaacactgcaaagaaagaatttgagacttcaaatggtgactctttattgggcttgcctgagggtgctttgatctcaaagtgttctcgagagaagaataaaccccaacgaagcctggtgtgtggttcaaaagtgaagctctgctatattggagcaggtgatgaggaaaagcgaagtgattccattagtatctgtaccacttctgatgatggaagcagtgacctggatcccatagaacacagctcagagtctgataacagtgtccttgaaattccagatgctttcgatagaacagagaacatgttatctatgcagaaaaatgaaaagataaagtattctaggtttgctgccacaaacactagggtaaaagcaaaacagaagcctctcattagtaactcacatacagaccacttaatgggttgtactaagagtgcagagcctggaaccgagacgtctcaggttaatctctctgatctgaaggcatctactcttgttcacaaaccccagtcagattttacaaatgatgctctctctccaaaattcaacctgtcatcaagcatatccagtgagaactcgttaataaagggtggggcagcaaatcaagctctattacattcgaaaagcaaacagcccaagttccgaagtataaagtgcaaacacaaagaaaatccagttatggcagaacccccagttataaatgaggagtgcagtttgaaatgctgctcttctgataccaaaggctctcctttggccagcatttctaaaagtgggaaagtggatggtctaaaactactgaacaatatgcatgagaaaaccagggattcaagtgacatagaaacagcagtggtgaaacatgttttatccgagttgaaggaactctcttacagatccttaggtgaggatgtcagtgactctggaacatcaaagccatcaaaaccattacttttctcttctgcttctagtcagaatcacatacctattgaaccagactacaaattcagtacattgctaatgatgttgaaagatatgcatgatagtaagacgaaggagcagcggttgatgactgctcaaaacctggtctcttaccggagtcctggtcgtggggactgttctactaatagtcctgtaggagtctctaaggttttggtttcaggaggctccacacacaattcagagaaaaagggagatggcactcagaactccgccaatcctagccctagtgggggtgactctgcattatctggcgagttgtctgcttccctacctggcttactgtccgacaagagagacctccctgcttctggtaaaagtcgttcagactgtgttactaggcgcaactgtggacgatcaaagccttcatccaaattgcgagatgctttttcagcccaaatggtaaagaacacagtgaaccgtaaagccttaaagaccgagcgcaaaagaaaactgaatcagcttccaagtgtgactcttgatgctgtactgcagggagaccgagaacgtggaggttcattgagaggtggggcagaagatcctagtaaagaggatccccttcagataatgggccacttaacaagtgaagatggtgaccatttttctgatgtgcatttcgatagcaaggttaagcaatctgatcctggtaaaatttctgaaaaaggactctcttttgaaaacggaaaaggcccagagctggactctgtaatgaacagtgagaatgatgaactcaatggtgtaaatcaagtggtgcctaaaaagcggtggcagcgtttaaaccaaaggcgcactaaacctcgtaagcgcatgaacagatttaaagagaaagaaaactctgagtgtgcctttagggtcttacttcctagtgaccctgtgcaggaggggcgggatgagtttccagagcatagaactccttcagcaagcatacttgaggaaccactgacagagcaaaatcatgctgactgcttagattcagctgggccacggttaaatgtttgtgataaatccagtgccagcattggtgacatggaaaaggagccaggaattcccagtttgacaccacaggctgagctccctgaaccagctgtgcggtcagagaagaaacgccttaggaagccaagcaagtggcttttggaatatacagaagaatatgatcagatatttgctcctaagaaaaaacaaaagaaggtacaggagcaggtgcacaaggtaagttcccgctgtgaagaggaaagccttctagcccgaggtcgatctagtgctcagaacaagcaggtggacgagaattctttgatttcaaccaaagaagagcctccagttcttgaaagggaggctccgtttttggagggccccttggctcagtcagaacttggaggtggacatgctgagttgccgcagctgaccttgtctgtgcctgtggctccggaagtctctccacggcctgcccttgagtctgaggaattgctagttaaaacgccaggaaattatgaaagtaaacgtcaaagaaaaccaactaagaaacttcttgaatccaatgatttagaccctggatttatgcccaagaagggggaccttggcctttctaaaaagtgctatgaagctggtcacctggagaatggcataactgaatcttgtgccacatcttattcaaaagattttggtggaggcactaccaagatatttgacaagccaaggaagcgaaaacgacagaggcatgctgcagccaagatgcagtgtaaaaaagtgaaaaatgatgactcgtcaaaagagattccaggctcagagggagaactaatgcctcacaggacggccacaagccccaaggagactgttgaggaaggtgtagaacacgatcccgggatgcctgcctctaaaaaaatgcagggtgaacgcggtggaggagctgcactcaaggagaatgtctgtcagaattgtgaaaaattgggtgagctgctgttatgtgaggctcagtgctgtggggctttccacctggagtgccttggattgactgagatgccaagaggaaaatttatctgcaatgaatgtcgcacaggaatccatacctgttttgtatgtaagcagagtggggaagatgttaaaaggtgccttctacccttgtgtggaaagttttaccatgaagagtgtgtccagaagtacccacccactgttatgcagaacaagggcttccggtgctccctccacatctgtataacctgtcatgctgctaatccagccaatgtttctgcatctaaaggtcggttgatgcgctgtgtccgctgtcctgtggcataccacgccaatgacttttgcctggctgctgggtcaaagatccttgcatctaatagtatcatctgccctaatcactttacccctaggcggggctgccgaaatcatgagcatgttaatgttagctggtgctttgtgtgctcagaaggaggcagccttctgtgctgtgattcttgccctgctgcttttcatcgtgaatgcctgaacattgatatccctgaaggaaactggtattgcaatgactgtaaagcaggcaaaaagccacactacagggagattgtctgggtaaaagttggacgatacaggtggtggccagctgagatctgccatcctcgagctgttccttccaacattgataagatgagacatgatgtgggagagttcccagtcctcttttttggatctaatgactatttgtggactcaccaggcccgagtcttcccttacatggagggtgacgtgagcagcaaggataagatgggcaaaggagtggatgggacatataaaaaagctcttcaggaagctgcagcaaggtttgaggaattaaaggcccaaaaagagctaagacagctgcaggaagaccgaaagaatgacaagaagccaccaccttataaacatataaaggtaaaccgtcctattggcagggtacagatcttcactgcagacttatctgaaataccccgttgcaactgtaaagctactgatgagaacccctgtgggatagactctgaatgcatcaaccgcatgctgctctatgagtgccaccccacagtgtgtcctgccggagggcgctgtcaaaaccagtgcttttccaagcgccaatatccagaggttgaaattttccgcacattacagcggggttggggtctacggacaaaaacagatattaaaaagggtgaatttgtgaatgagtatgtgggtgagcttatagatgaagaagaatgcagagctcgaattcgctatgctcaagaacatgatatcactaatttctatatgctcaccctagacaaagaccgaatcattgatgctggtcccaaaggaaactatgctcggttcatgaatcattgctgccagcccaactgtgaaacacagaagtggtctgtgaatggagatacccgtgtaggcctttttgcactaagtgacattaaagcaggcactgaacttaccttcaactacaacctagaatgtcttgggaatggaaagactgtttgcaaatgtggagccccgaactgcagtggcttcttgggtgtaaggccaaagaatcaacccattgccacggaagaaaagtcaaagaaattcaagaagaagcaacagggaaagcgcaggacccagggtgaaatcacaaaggagcgagaagatgagtgttttagttgtggggatgctggccagctcgtctcctgcaagaaaccaggctgcccaaaagtttaccacgcagactgtctcaatctgaccaagcgaccagcagggaaatgggaatgtccgtggcatcagtgtgacatctgcgggaaggaagcagcctccttctgtgagatgtgccccagctccttttgtaagcagcatcgagaagggatgcttttcatttccaaactggatgggcgtctgtcttgtactgagcatgacccctgtgggcccaatcctctggaacctggggagatccgtgagtatgtgcctcccccagtaccgctgcctccagggccaagcactcacctggcagagcaatcaacaggaatggctgctcaggcacccaaaatgtcagataaacctcctgctgacaccaaccagatgctgtcgctctccaaaaaagctctggcagggacttgtcagaggccactgctacctgaaagacctcttgagagaactgactccaggccccagcctttagataaggtcagagacctcgctgggtcagggaccaaatcccaatccttggtttccagccagaggccactggacaggccaccagcagtggcaggaccaagaccccagctaagcgacaaaccctctccagtgaccagcccaagctcctcaccctcagtcaggtcccaaccactggaaagacctctggggacggctgacccaaggctggataaatccataggtgctgccagcccaaggccccagtcactggagaaaacctcagttcccactggcctgagacttccgccgccagacagactgctcattactagcagtcccaaaccccagacttcagacaggcctactgacaaaccccatgcctctttgtcccagagactcccacctcctgagaaagtactatcagctgtggtccagacccttgtagctaaagaaaaagcactgaggcctgtggaccagaatactcagtcaaaaaatagagctgctttggtgatggatctcatagacctaactcctcgccagaaggagcgggcagcttcacctcatcaggtcacaccacaggctgatgagaagatgccagtgttggagtcaagttcatggcctgccagcaaaggtctggggcatatgccgagagctgttgagaaaggctgtgtgtcagatcctcttcagacatctgggaaagcagcagccccttcagaggacccctggcaagctgttaaatcactcacccaggccagacttctttctcagcctcctgccaaggcctttttatatgagccaacaactcaggcctcaggaagagcttctgcaggggctgagcagaccccagggcctcttagccaatccccgggcctggtgaagcaggcgaagcagatggtcggaggccagcaactacctgcacttgccgccaagagtgggcaatcttttaggtctctcgggaaggccccagcctccctccccactgaagaaaagaagttggtaaccacagagcaaagtccctgggccctgggaaaagcctcatcacgggcagggctctggcccatagtggctggacagacactggcacagtcttgctggtctgctgggagcacacagacattggcacagacttgctggtctcttggaagagggcaagaccccaaaccagagcaaaatacacttccagctcttaaccaggctccttccagtcacaagtgtgcagaatcagaacagaagtagtaccaatcaatgtcacatgaacaaacaagctgcccccagggtaccatttggggaggggaaatcttttctttctttcccccttaaaaaaaaacacatctgccccgaacactttcccactgttattctttcctcatatcccaacactcagaactcttgtgacattagccagtgggggcttatggttgtgtgaaccatgtatgaaaatccagtgggccccaaccaaggagacagacagacttgggtctctttcccccaacttttccacatggtcatcgtgaaataaaaagtccactctggagtcaaaaaaaaaaaaaaaaaaaaa

SEQ ID NO: 14524 - DNA, 7693 bp, Homo sapiens
caggttgatgccggcccaggatggatcagacctgtgaactacccagaagaaattgtctgctgcccttttccaatccagtgaatttagatgcccctgaagacaaggacagccctttcggatgatccagattccagtaccagtacattaggaaacatgctagaattacctggaacttcatcatcatctacttcacaggaattgccattttgtcaacctaagaaaaagtctacgccactgaagtatgaagttggagatctcatctgggcaaaattcaagagacgcccatggtggccctgcaggatttgttctgatccgttgattaacacacattcaaaaatgaaagtttccaaccggaggccctatcggcagtactacgtggaggcttttggagatccttctgagagagcctgggtggctggaaaagcaatcgtcatgtttgaaggcagacatcaattcgaagagctacctgtccttaggagaagagggaaacagaaagaaaaaggatataggcataaggttcctcagaaaattttgagtaaatgggaagccagtgttggacttgcagaacagtatgatgttcccaaggggtcaaagaaccgaaaatgtattcctggttcaatcaagttggacagtgaagaagatatgccatttgaagactgcacaaatgatcctgagtcagaacatgacctgttgcttaatggctgtttgaaatcactggcttttgattctgaacattctgcagatgagaaggaaaagccttgcgctaaatctcgagccagaaagagctctgataatccaaaaaggactagtgtgaaaaagggccacatacaatttgaagcacataaagatgaacggaggggaaagattccagagaaccttggcctaaactttatctctggggatatatctgatacgcaggcctctaatgaactttccaggatagcaaatagcctcacagggtccaacactgccccaggaagttttctgttttcttcctgtggaaaaaacactgcaaagaaagaatttgagacttcaaatggtgactctttattgggcttgcctgagggtgctttgatctcaaagtgttctcgagagaagaataaaccccaacgaagcctggtgtgtggttcaaaagtgaagctctgctatattggagcaggtgatgaggaaaagcgaagtgattccattagtatctgtaccacttctgatgatggaagcagtgacctggatcccatagaacacagctcagagtctgataacagtgtccttgaaattccagatgctttcgatagaacagagaacatgttatctatgcagaaaaatgaaaagataaagtattctaggtttgctgccacaaacactagggtaaaagcaaaacagaagcctctcattagtaactcacatacagaccacttaatgggttgtactaagagtgcagagcctggaaccgagacgtctcaggttaatctctctgatctgaaggcatctactcttgttcacaaaccccagtcagattttacaaatgatgctctctctccaaaattcaacctgtcatcaagcatatccagtgagaactcgttaataaagggtggggcagcaaatcaagctctattacattcgaaaagcaaacagcccaagttccgaagtataaagtgcaaacacaaagaaaatccagttatggcagaacccccagttataaatgaggagtgcagtttgaaatgctgctcttctgataccaaaggctctcctttggccagcatttctaaaagtgggaaagtggatggtctaaaactactgaacaatatgcatgagaaaaccagggattcaagtgacatagaaacagcagtggtgaaacatgttttatccgagttgaaggaactctcttacagatccttaggtgaggatgtcagtgactctggaacatcaaagccatcaaaaccattacttttctcttctgcttctagtcagaatcacatacctattgaaccagactacaaattcagtacattgctaatgatgttgaaagatatgcatgatagtaagacgaaggagcagcggttgatgactgctcaaaacctggtctcttaccggagtcctggtcgtggggactgttctactaatagtcctgtaggagtctctaaggttttggtttcaggaggctccacacacaattcagagaaaaagggagatggcactcagaactccgccaatcctagccctagtgggggtgactctgcattatctggcgagttgtctgcttccctacctggcttactgtccgacaagagagacctccctgcttctggtaaaagtcgttcagactgtgttactaggcgcaactgtggacgatcaaagccttcatccaaattgcgagatgctttttcagcccaaatggtaaagaacacagtgaaccgtaaagccttaaagaccgagcgcaaaagaaaactgaatcagcttccaagtgtgactcttgatgctgtactgcagggagaccgagaacgtggaggttcattgagaggtggggcagaagatcctagtaaagaggatccccttcagataatgggccacttaacaagtgaagatggtgaccatttttctgatgtgcatttcgatagcaaggttaagcaatctgatcctggtaaaatttctgaaaaaggactctcttttgaaaacggaaaaggcccagagctggactctgtaatgaacagtgagaatgatgaactcaatggtgtaaatcaagtggtgcctaaaaagcggtggcagcgtttaaaccaaaggcgcactaaacctcgtaagcgcatgaacagatttaaagagaaagaaaactctgagtgtgcctttagggtcttacttcctagtgaccctgtgcaggaggggcgggatgagtttccagagcatagaactccttcagcaagcatacttgaggaaccactgacagagcaaaatcatgctgactgcttagattcagctgggccacggttaaatgtttgtgataaatccagtgccagcattggtgacatggaaaaggagccaggaattcccagtttgacaccacaggctgagctccctgaaccagctgtgcggtcagagaagaaacgccttaggaagccaagcaagtggcttttggaatatacagaagaatatgatcagatatttgctcctaagaaaaaacaaaagaaggtacaggagcaggtgcacaaggtaagttcccgctgtgaagaggaaagccttctagcccgaggtcgatctagtgctcagaacaagcaggtggacgagaattctttgatttcaaccaaagaagagcctccagttcttgaaagggaggctccgtttttggagggccccttggctcagtcagaacttggaggtggacatgctgagttgccgcagctgaccttgtctgtgcctgtggctccggaagtctctccacggcctgcccttgagtctgaggaattgctagttaaaacgccaggaaattatgaaagtaaacgtcaaagaaaaccaactaagaaacttcttgaatccaatgatttagaccctggatttatgcccaagaagggggaccttggcctttctaaaaagtgctatgaagctggtcacctggagaatggcataactgaatcttgtgccacatcttattcaaaagattttggtggaggcactaccaagatatttgacaagccaaggaagcgaaaacgacagaggcatgctgcagccaagatgcagtgtaaaaaagtgaaaaatgatgactcgtcaaaagagattccaggctcagagggagaactaatgcctcacaggacggccacaagccccaaggagactgttgaggaaggtgtagaacacgatcccgggatgcctgcctctaaaaaaatgcagggtgaacgcggtggaggagctgcactcaaggagaatgtctgtcagaattgtgaaaaattgggtgagctgctgttatgtgaggctcagtgctgtggggctttccacctggagtgccttggattgactgagatgccaagaggaaaatttatctgcaatgaatgtcgcacaggaatccatacctgttttgtatgtaagcagagtggggaagatgttaaaaggtgccttctacccttgtgtggaaagttttaccatgaagagtgtgtccagaagtacccacccactgttatgcagaacaagggcttccggtgctccctccacatctgtataacctgtcatgctgctaatccagccaatgtttctgcatctaaaggtcggttgatgcgctgtgtccgctgtcctgtggcataccacgccaatgacttttgcctggctgctgggtcaaagatccttgcatctaatagtatcatctgccctaatcactttacccctaggcggggctgccgaaatcatgagcatgttaatgttagctggtgctttgtgtgctcagaaggaggcagccttctgtgctgtgattcttgccctgctgcttttcatcgtgaatgcctgaacattgatatccctgaaggaaactggtattgcaatgactgtaaagcaggcaaaaagccacactacagggagattgtctgggtaaaagttggacgatacaggtggtggccagctgagatctgccatcctcgagctgttccttccaacattgataagatgagacatgatgtgggagagttcccagtcctcttttttggatctaatgactatttgtggactcaccaggcccgagtcttcccttacatggagggtgacgtgagcagcaaggataagatgggcaaaggagtggatgggacatataaaaaagctcttcaggaagctgcagcaaggtttgaggaattaaaggcccaaaaagagctaagacagctgcaggaagaccgaaagaatgacaagaagccaccaccttataaacatataaaggtaaaccgtcctattggcagggtacagatcttcactgcagacttatctgaaataccccgttgcaactgtaaagctactgatgagaacccctgtgggatagactctgaatgcatcaaccgcatgctgctctatgagtgccaccccacagtgtgtcctgccggagggcgctgtcaaaaccagtgcttttccaagcgccaatatccagaggttgaaattttccgcacattacagcggggttggggtctacggacaaaaacagatattaaaaagggtgaatttgtgaatgagtatgtgggtgagcttatagatgaagaagaatgcagagctcgaattcgctatgctcaagaacatgatatcactaatttctatatgctcaccctagacaaagaccgaatcattgatgctggtcccaaaggaaactatgctcggttcatgaatcattgctgccagcccaactgtgaaacacagaagtggtctgtgaatggagatacccgtgtaggcctttttgcactaagtgacattaaagcaggcactgaacttaccttcaactacaacctagaatgtcttgggaatggaaagactgtttgcaaatgtggagccccgaactgcagtggcttcttgggtgtaaggccaaagaatcaacccattgccacggaagaaaagtcaaagaaattcaagaagaagcaacagggaaagcgcaggacccagggtgaaatcacaaaggagcgagaagatgagtgttttagttgtggggatgctggccagctcgtctcctgcaagaaaccaggctgcccaaaagtttaccacgcagactgtctcaatctgaccaagcgaccagcagggaaatgggaatgtccgtggcatcagtgtgacatctgcgggaaggaagcagcctccttctgtgagatgtgccccagctccttttgtaagcagcatcgagaagggatgcttttcatttccaaactggatgggcgtctgtcttgtactgagcatgacccctgtgggcccaatcctctggaacctggggagatccgtgagtatgtgcctcccccagtaccgctgcctccagggccaagcactcacctggcagagcaatcaacaggaatggctgctcaggcacccaaaatgtcagataaacctcctgctgacaccaaccagatgctgtcgctctccaaaaaagctctggcagggacttgtcagaggccactgctacctgaaagacctcttgagagaactgactccaggccccagcctttagataaggtcagagacctcgctgggtcagggaccaaatcccaatccttggtttccagccagaggccactggacaggccaccagcagtggcaggaccaagaccccagctaagcgacaaaccctctccagtgaccagcccaagctcctcaccctcagtcaggtcccaaccactggaaagacctctggggacggctgacccaaggctggataaatccataggtgctgccagcccaaggccccagtcactggagaaaacctcagttcccactggcctgagacttccgccgccagacagactgctcattactagcagtcccaaaccccagacttcagacaggcctactgacaaaccccatgcctctttgtcccagagactcccacctcctgagaaagtactatcagctgtggtccagacccttgtagctaaagaaaaagcactgaggcctgtggaccagaatactcagtcaaaaaatagagctgctttggtgatggatctcatagacctaactcctcgccagaaggagcgggcagcttcacctcatcaggtcacaccacaggctgatgagaagatgccagtgttggagtcaagttcatggcctgccagcaaaggtctggggcatatgccgagagctgttgagaaaggctgtgtgtcagatcctcttcagacatctgggaaagcagcagccccttcagaggacccctggcaagctgttaaatcactcacccaggccagacttctttctcagcctcctgccaaggcctttttatatgagccaacaactcaggcctcaggaagagcttctgcaggggctgagcagaccccagggcctcttagccaatccccgggcctggtgaagcaggcgaagcagatggtcggaggccagcaactacctgcacttgccgccaagagtgggcaatcttttaggtctctcgggaaggccccagcctccctccccactgaagaaaagaagttggtaaccacagagcaaagtccctgggccctgggaaaagcctcatcacgggcagggctctggcccatagtggctggacagacactggcacagtcttgctggtctgctgggagcacacagacattggcacagacttgctggtctcttggaagagggcaagaccccaaaccagagcaaaatacacttccagctcttaaccaggctccttccagtcacaagtgtgcagaatcagaacagaagtagtaccaatcaatgtcacatgaacaaacaagctgcccccagggtaccatttggggaggggaaatcttttctttctttcccccttaaaaaaaaacacatctgccccgaacactttcccactgttattctttcctcatatcccaacactcagaactcttgtgacattagccagtgggggcttatggttgtgtgaaccatgtatgaaaatccagtgggccccaaccaaggagacagacagacttgggtctctttcccccaacttttccacatggtcatcgtgaaataaaaagtccactctggagtcaaaaaaaaaaaaaaaaaaaaa

SEQ ID NO: 14525 - DNA, 4507 bp, Homo sapiens
tcagcggcagcagccgccgccgagatgtcccggcgaaagcaaagcaaaccccggcagatcaaacggccgcttgaagatgccattgaagatgaggaagaagaatgtccatcagaggaaacagacatcatctccaaaggagactttccattggaggaaagcttttccacagaatttgggcctgaaaatctgagctgcgaagaagtggaatacttttgtaacaaaggtgatgatgaaggaatccaggagacagcagaatcagatggggacacacagtcagagaaaccggggcaacctggagttgagacagacgactgggatggaccaggagagctggaggtgtttcagaaagatggggaacgaaaaattcagagtcgacagcaacttccagtgggaacaacctgggggccgtttcctgggaagatggacttgaataataattctttgaagacaaaggctcaggtcccaatggtgctgactgctggtcccaagtggttgctggatgtgacttggcaaggagtggaagacaacaaaaacaactgcattgtgtacagcaaagggggtcagctttggtgtacaactacgaaggccatctctgagggtgaagagctaattgcctttgtggtggattttgactcaaggctacaagctgccagtcagatgactctcacagaagggatgtaccctgcacgcctgctggactcaattcagctgcttcctcagcaagctgccatggcttctattttgcccacagctattgtcaataaggatatattcccttgcaagtcctgtggcatctggtatcggagtgagcggaatctgcaggcccatttgatgtactactgcagtgggaggcaaagagaagctgctccggtgtcagaggaaaatgaagacagtgcccatcagatttccagcctgtgccccttcccacagtgcaccaagagcttttcaaatgctcgagctctagaaatgcacctgaattcacacagtggagtgaaaatggaagaattcctgccccctggtgctagtctaaaatgcaccgtctgtagctacactgctgattccgtgatcaactttcaccaacacctgttctcccatctcactcaagctgccttccgatgtaatcactgccatttcggcttccagactcagagggagttattgcagcaccaggagctccatgtccctagcggcaaacttcccagagaaagtgacatggaacactctccaagtgcaactgaagacagcttacagccagccacagacttattgaccagaagcgaacttccccagagccaaaaggccatgcagactaaagatgcgagctctgacacagagctggacaagtgtgagaaaaagactcagctctttctcacgaaccagagaccagagatacagcctacaacaaataaacaaagcttttcttacacaaaaataaagtctgagccctctagcccaagacttgcctcatctccagttcagcctaatattgggccttctttccctgtgggccctttcctatctcagttttctttcccccaagatatcaccatggtccctcaagcttcagagatcttagctaagatgtctgaactggtgcatcggcgactgaggcatggcagtagtagctaccctcccgtcatttacagccctttgatgcccaagggggctacttgttttgagtgtaacataacattcaataatttggataattatctagtgcacaaaaagcattattgcagcagccgatggcagcagatggctaagtccccagagttccctagtgtgtcagaaaagatgcctgaagctttgagtcccaacactggccaaacctccataaaccttctcaacccagctgctcattctgctgatcctgagaatccacttcttcaaacatcttgcatcaattcttccactgtcttagatttaattgggccaaatgggaagggccatgacaaggacttttccactcaaactaagaagctctccacctccagtaacaatgatgacaaaattaatggaaaacctgttgatgtgaaaaatcccagtgtccccttagtggatggggaaagtgacccaaataagactacctgtgaagcttgcaacattaccttcagccggcacgaaacatacatggtccacaaacagtattactgtgctacacgccacgaccctccactgaagaggtctgcttccaacaaagtgcctgccatgcagagaaccatgcgcacacgcaagcgcagaaagatgtatgagatgtgcctacctgagcaggaacaaaggcctccactggttcagcagagatttcttgacgtagccaacctcaataatccttgtacctccactcaagaacccacagaagggctaggagagtgctaccacccaagatgtgatatctttccaggaattgtctctaaacacttggaaacttctctgacgatcaacaagtgtgttccagtttccaaatgtgatactactcattccagtgtttcctgcctagagatggacgtgcccatagatctcagcaaaaagtgtttatctcagtctgagcggacgaccacgtctcccaaaaggctgctggactatcacgagtgcactgtgtgcaagatcagtttcaataaggtagaaaactatctggcccacaagcagaatttctgcccggttactgcacatcagcgtaatgacctgggtcaactggacggcaaagtgtttccgaatccagaaagcgaacgaaacagccctgatgtcagctacgaaagaagcataataaaatgtgagaaaaatgggaatttgaagcagccttcccccaatggaaacttattttcatcccacctagcaaccccgcaaggcttgaaggtctttagtgaagctgctcagctcattgctacaaaagaagaaaacagacatttgtttcttccacaatgcctttaccctggagcaataaagaaagcaaaaggagccgaccagctttctccatattatggaatcaagccaagtgattatatttctggttctcttgtcatccataacactgacatcgagcaaagcagaaatgcagaaaatgaatctcctaaaggccaggcttcctcaaatgggtgtgctgcgctgaagaaagattctctgccattgttgcccaaaaatcgaggaatggtaatagtgaatggtggactgaaacaagatgagagacctgctgccaacccacagcaagagaacatttcccagaatcctcagcacgaagacgaccacaaatctccctcgtggatctctgagaacccattagctgccaatgagaatgtctcaccaggaattccctcagcagaggaacagttgtctagtatagcaaaaggtgtgaatggttccagccaggctccaaccagtgggaaatattgccggctatgtgatatccagttcaacaacctttcaaactttataactcacaagaagttttattgctcatcacatgcagcagaacatgtcaaatgaactaactaaacatcagtcacctttggtatcagtgtttagtatgttgttctaaccagtccagaaaaaaaaataagctgtttgaattacatctgggcaatcaggagataattcattatggctgagttgaagacttaaggtgtaatttcattacagtccattagtaaagtgtattattggtgccattttcaaaaaaattaatttattttaccagcagtattcatagctgtggttatgttattttttatttaaaaactttatattaaagtcatttgtaatgttattgtatagttattgtgtagcacatatggtttgcactgtatagtagcttttaaagaaaatagtcacaatacagaaaagcattttagaaatagcttcaaaagcacttgtgtatcttgattttttcttatatgctgttgcagatatatgtatatgctaaaatataacttgcaaagatgttctaaatacacatgctataagttcgccttaagatttcaattcttggataatcaggctctgtttgcactttatattttagcagatacagtctcttagtcactaggctttgcatttgtatgtagctgtatgtttccgtccattttcttaatcctgaacctgtatgttaaatgaagatggcaatttttttcttgtatagtacttgtattttctttcgctgatgcagctctgtctcaatttttaaacctttgctgttaaatgcaatactttataaagaatgaacaaaattactggaagcagtattgtaagtaatgaggtagtattaatcagttttatcttttgaaaggcacagtctaaatcgaaaccctaaactcaatgctgcaagtatgaatttaattcatatataagatctatttaaatataagagtagcaatactgcacctggtgatcacaaagataatgttctacttctgatagaaataatttctcaacaaatgttgttactatgcatgtatatggatggaataaaattccagattgttggagaaaaaaaaaaaaaaaaaaaaaaaaaaaa

SEQ ID NO: 14526 - DNA, 2866 bp, Homo sapiens
gagtagcggaaagatctgctcgaggcctgggtgctttggtgtcggagatccgagagtcggagatcggagagtcggacacaggacagtcggacaccggacagtcaaacaccggagagttagactgggcttctcggtggggagaggctctgggataactactgttacagctttgaagggtcaagggtgtgcgctttttgtttcatccttccctttcctgctgcagggcgaggccggtctgtagcggatcacttcctttcgcccacacattggcggaggagaaaccggaaagttaatcactgccctgctctgagaactcgggcctttaggggcacgttcgcctgctgaccggtcttctgatctccccattcttttccatgcaggaggattggccaccaaagcctgtttattagcagctgccatttgttgaaagaaatttggattattttagaaacaaatttggaaagaaaaagaatggcgtccgtttcagctctaactgaggaactggattctataaccagtgagctacatgcagtagaaattcaaattcaagaacttacggaaaggcaacaagagcttattcagaaaaaaaaagtcctgacaaagaaaataaagcagtgtttagaggattctgatgccggggcaagcaatgaatatgattcttcacctgccgcttggaataaagaagattttccatggtctggtaaagttaaagatattctgcaaaatgtctttaaactggaaaagttcagaccacttcagcttgaaactattaacgtaacaatggctggaaaggaggtatttcttgttatgcctacaggaggtggaaagagcttatgttaccagttaccagcattatgttcagatggttttacactcgtcatttgcccattgatctctcttatggaagaccaattaatggttttaaaacaattaggaatttcagcaaccatgttaaatgcttctagttctaaggagcatgttaaatgggttcatgctgaaatggtaaataaaaactccgagttaaagctgatttatgtgactccagagaaaattgcaaaaagcaaaatgtttatgtcaagactagagaaagcctatgaagcaaggagatttactcgaattgctgtggatgaagttcactgctgtagtcagtggggacatgatttcagacctgattataaggcacttggtatcttaaagcggcagttccctaacgcatcactaattgggctgactgcaactgcaacaaatcacgttttgacggatgctcagaaaattttgtgcattgaaaagtgttttacttttacagcttcttttaataggccaaatctatattatgaggttcggcagaagccctcaaacactgaagattttattgaggatattgtaaagctcattaatgggagatacaaagggcaatcaggaatcatatattgtttttctcagaaagactctgaacaagttacggttagtttgcagaatctgggaattcatgcaggtgcttaccatgccaatttggagccagaagataagaccacagttcatagaaaatggtcagccaatgaaattcaggtagtagtggcaactgttgcatttggtatgggaattgataagccagatgtgaggtttgttatccatcattcaatgagtaaatccatggaaaattattaccaagagagtggacgtgcaggtcgagatgacatgaaagcagactgtattttgtactacggctttggagatatattcagaataagttcaatggtggtgatggaaaatgtgggacagcagaagctttatgagatggtatcatactgtcaaaacataagcaaatgtcgtcgtgtgttgatggctcaacattttgatgaagtatggaactcagaagcatgtaacaaaatgtgcgataactgctgtaaagacagtgcatttgaaagaaagaacataacagagtactgcagagatctaatcaagatcctgaagcaggcagaggaactgaatgaaaaactcactccattgaaactgattgattcttggatgggaaagggtgcagcaaaactgagagtagcaggtgttgtggctcccacacttcctcgtgaagatctggagaagattattgcacactttctaatacagcagtatcttaaagaagactacagttttacagcttatgctaccatttcgtatttgaaaataggacctaaagctaaccttctgaacaatgaggcacatgctattactatgcaagtgacaaagtccacgcagaactctttcagggctgaatcgtctcaaacttgtcattctgaacaaggtgataaaaagatggaggaaaaaaattcaggcaacttccagaagaaggctgcaaacatgcttcagcagtctggttctaagaatacaggagctaagaaaagaaaaatcgatgatgcctgatatgaatgttactaaattttctaattaaagatggtttatgcatgtatatgccattatttttgtagttagacaatagtttttaaaagaatttcatagatattttatatgtatggatctatattttcagagcttatctctgaagatctaaacttttgagaatgtttgaaaattagagatcatgaattatataattttccagtataaaacaagggaaaaatttttatgtaaaaccctttaaatgtaaaatatttgagaataagttcatacaatcgtcttaagttttttatgcctttatatacttagctatattttttcttttgacataactatctttttgaaagcaatattatactgacagaggctcactgagtgatactttaagttaaatatgtagatcaagggatgtccaatcttttggcttccctgagccagcgaattgtgcaca

SEQ ID NO: 14527 - DNA, 2286 bp, Homo sapiens
gagtagcggaaagatctgctcgaggcctgggtgctttggtgtcggagatccgagagtcggagatcggagagtcggacacaggacagtcggacaccggacagtcaaacaccggagagttagactgggcttctcggtggggagaggctctgggataactactgttacagctttgaagggtcaagggaggattggccaccaaagcctgtttattagcagctgccatttgttgaaagaaatttggattattttagaaacaaatttggaaagaaaaagaatggcgtccgtttcagctctaactgaggaactggattctataaccagtgagctacatgcagtagaaattcaaattcaagaacttacggaaaggcaacaagagcttattcagaaaaaaaaagtcctgacaaagaaaataaagcagtgtttagaggattctgatgccggggcaagcaatgaatatgattcttcacctgccgcttggaataaagaagattttccatggtctggtaaagttaaagatattctgcaaaatgtctttaaactggaaaagttcagaccacttcagcttgaaactattaacgtaacaatggctggaaaggaggtatttcttgttatgcctacaggaggtggaaagagcttatgttaccagttaccagcattatgttcagatggttttacactcgtcatttgcccattgatctctcttatggaagaccaattaatggttttaaaacaattaggaatttcagcaaccatgttaaatgcttctagttctaaggagcatgttaaatgggttcatgctgaaatggtaaataaaaactccgagttaaagctgatttatgtgactccagagaaaattgcaaaaagcaaaatgtttatgtcaagactagagaaagcctatgaagcaaggagatttactcgaattgctgtggatgaagttcactgctgtagtcagtggggacatgatttcagacctgattataaggcacttggtatcttaaagcggcagttccctaacgcatcactaattgggctgactgcaactgcaacaaatcacgttttgacggatgctcagaaaattttgtgcattgaaaagtgttttacttttacagcttcttttaataggccaaatctatattatgaggttcggcagaagccctcaaacactgaagattttattgaggatattgtaaagctcattaatgggagatacaaagggcaatcaggaatcatatattgtttttctcagaaagactctgaacaagttacggttagtttgcagaatctgggaattcatgcaggtgcttaccatgccaatttggagccagaagataagaccacagttcatagaaaatggtcagccaatgaaattcaggtagtagtggcaactgttgcatttggtatgggaattgataagccagatgtgaggtttgttatccatcattcaatgagtaaatccatggaaaattattaccaagagagtggacgtgcaggtcgagatgacatgaaagcagactgtattttgtactacggctttggagatatattcagaataagttcaatggtggtgatggaaaatgtgggacagcagaagctttatgagatggtatcatactgtcaaaacataagcaaatgtcgtcgtgtgttgatggctcaacattttgatgaagtatggaactcagaagcatgtaacaaaatgtgcgataactgctgtaaagacagtgcatttgaaagaaagaacataacagagtactgcagagatctaatcaagatcctgaagcaggcagaggaactgaatgaaaaactcactccattgaaactgattgattcttggatgggaaagggtgcagcaaaactgagagtagcaggtgttgtggctcccacacttcctcgtgaagatctggagaagattattgcacactttctaatacagcagtatcttaaagaagactacagttttacagcttatgctaccatttcgtatttgaaaataggacctaaagctaaccttctgaacaatgaggcacatgctattactatgcaagtgacaaagtccacgcagaactctttcagggctgaatcgtctcaaacttgtcattctgaacaaggtgataaaaagatggaggaaaaaaattcaggcaacttccagaagaaggctgcaaacatgcttcagcagtctggttctaagaatacaggagctaagaaaagaaaaatcgatgatgcctgatatgaatgttactaaattttctaattaaagatggtttatgcaaaaaaaaaaaaaaaaaaaaa

SEQ ID NO: 14528 - DNA, 6031 bp, Homo sapiens
gctgggtcctaggccaggtctggggtaacctggaacttccacctgggctctgcgctaggtctctgtttcactccctccccgcggggcgcgcagctcgcgggtctttggacaccaccggtcctgagtccgcggactgccattttcattaagaactgccacttagaggtaccaaaataaagggtatttgctacctttaatacttgccagttcaggttggaggcacaggcagcagcaagaatggaaagaaatgttcttacaacattttcacaggaaatgtcccagttaattttgaatgaaatgccaaaagctgaatattccagtttattcaatgattttgttgaatctgaattttttttgattgatggggattcattacttatcacatgtatctgtgagatatcatttaagcctgggcagaacctccatttcttctatctggttgaacgctatcttgtggatcttattagcaaaggaggacaattcaccatagttttcttcaaggatgccgagtatgcgtatttcaacttccctgaacttctttctttgagaactgctttaattcttcatcttcagaagaataccaccattgatgttcgaacaacattttcgagatgcttatcaaaagagtggggaagtttcttggaagagagttacccatatttcctgatagttgcagacgaaggcctgaacgatctacaaacacagcttttcaactttttaatcattcattcttgggcaaggaaggtcaacgttgtactttcctcagggcaagaatctgatgttctttgcctttatgcataccttcttccaagcatgtacagacaccagattttttcctggaagaataagcagaacattaaagatgcttatacaaccctgcttaaccagttggaaagatttaagctttcagcattagcacctctttttggaagtttaaaatggaataatattacggaagaggcacacaagactgtatctctgcttacacaagtctggccagaaggatctgacattcggcgtgtcttttgtgttacttcatgctcattatctttgagaatgtaccatcgctttttaggaaacagagagccctcctctggtcaggaaactgagatccaacaggtgaacagtaattgcttaaccctgcaggagatggaagatttgtgtaaactgcattgtctcactgtggtttttctactccatctgcctctttctcaaagagcttgtgctagagtcatcacttcacattgggctgaggacatgaagcctttattacaaatgaaaaagtggtgtgaatatttcatcttaagaaatatacatacttttgaattttggaatctgaatttaattcacctttctgacttaaatgatgagcttttgttgaagaatattgctttttactatgaaaatgaaaatgtaaaaggcctacatttgaatttgggagataccattatgaaagattatgaatatctctggaataccgtatcaaagttggtcagagactttgaggttggacagccatttcctctgagaacaacaaaagtttgttttcttggaaagaaaccatcaccaatcaaagacagctccaatgaaatggtgcccaatttgggttttattccaacgtcatcttttgtggttgataaatttgctggagatattttgaaagatttgccttttctaaagagtgatgatcctattgttacttcactggttaaacaaaaggaatttgatgaacttgtgcactggcattctcataaacccctgagtgatgattatgacaggtccaggtgtcagtttgatgaaaaatctagagaccctcgtgttcttagatctgtgcaaaagtatcatgttttccaacggttttatgggaattcattagaaacagtctcttcgaaaatcatcgtgactcaaactattaagtcaaagaaggattttagtgggcccaagagcaaaaaggcacacgagaccaaggctgaaataattgctagagagaataagaaaaggttatttgccagggaagaacaaaaggaagagcaaaagtggaatgctttgtcattttctattgaagagcaattgaaagaaaatttacactctggaataaagagcctggaagattttttgaaatcctgtaaaagtagctgtgtgaaacttcaggttgaaatggtggggttaactgcttgcttgaaagcctggaaagaacattgccgaagtgaagaaggtaaaaccacgaaagatttaagtatagctgttcaggtgatgaaaaggatccactccttgatggaaaaatactcagaacttttacaagaagatgatcggcaactcatagccagatgccttaagtatttaggatttgatgagttggcaagttctttacatccagcccaggatgcagaaaatgatgtaaaagtgaagaaaaggaataaatattcaattggcattgggccagctcggttccaactgcaatacatgggccattatttgatacgagatgagagaaaagacccagatcccagggtccaggattttattcccgacacatggcagcgagagctccttgatgttgtggataagaatgagtcagcagtgattgttgccccaacgtcctcaggcaaaacatatgcctcctactactgtatggagaaagtgctgaaggagagcgacgacggggtggtcgtgtacgttgcacccacaaaggcccttgttaatcaagtggcagcaactgttcagaatcgttttacgaaaaatctgccaagtggtgaagttctctgtggtgttttcaccagggagtatcgtcatgatgccttaaactgtcaggtacttattacagtgcctgcctgctttgaaattctgctgcttgctcctcatcgccaaaactgggtgaaaaagatcagatatgttatatttgatgaggttcattgtcttggtggagaaattggagcagaaatctgggaacatctccttgtcatgatccgatgtccctttttggctctttcagctaccataagtaatcctgaacatctcaccgagtggctacaatcggtaaaatggtactggaaacaagaagacaaaataattgaaaataataccgcttctaaaagacatgtgggtcgtcaggccggctttcccaaagactacttgcaagtaaaacaatcgtataaagttagacttgtgctctatggagagaggtataatgatctagagaagcatgtatgttcaataaaacatggtgacattcattttgatcattttcacccatgtgctgcactaacaacagatcatattgaaaggtatggattccctcctgatcttaccctttcacctcgagaaagcatccagctgtatgatgccatgtttcaaatttggaaaagttggcctcgggcccaggaactgtgcccagaaaacttcattcattttaacaataaattagtcattaaaaagatggatgctaggaaatatgaagagagtctaaaggcagaattaacaagttggattaaaaatggcaacgtagagcaggccagaatggtacttcagaatcttagtcctgaagcagatttgagtccagaaaacatgatcaccatgtttccacttctagttgaaaaactaaggaaaatggagaagttacctgcactattttttttattcaagttaggagctgtagaaaacgcagctgaaagtgtgagcactttcctaaagaaaaagcaggagacaaaaaggcctcccaaagctgataaagaagcccatgtcatggctaacaaacttcgaaaagttaaaaaatccatagagaaacaaaagatcatagatgaaaagagccagaaaaaaaccagaaatgtggatcaaagcctaatacatgaagctgaacatgataatctagtgaagtgtctagagaagaacctggaaatcccacaggactgcacatatgctgatcaaaaagcagtggacactgagactttgcagaaggtatttggtcgagtaaaatttgaaagaaaaggtgaagaattgaaagccttggcagaaaggggtattggatatcatcacagtgctatgagtttcaaagaaaaacaattagttgaaatcctctttagaaaaggatatcttagggtggtgacagctactggaacacttgctttaggtgtcaacatgccttgtaaatctgtggtttttgctcaaaactcagtctatctggatgcgttgaattatagacagatgtctggccgtgctggaagaagaggtcaagacctgatgggagatgtatatttctttgatattccattccccaaaataggaaaactcataaaatccaatgttcctgagctgagaggacacttccctctcagcataaccctggtcctgcgactcatgctgctggcttccaagggagatgacccagaggataccaaggcaaaggtgctatcagtgctaaagcattcattgctgtccttcaagcaacccagagtcatggacatgttaaaactttacttcctgttttctttgcagttcctggtgaaagagggctatttagatcaagaaggtaatcctatggggtttgctggacttgtatcacatttgcattatcatgaaccttctaatcttgtttttgtcagttttcttgtaaatggactcttccatgatctctgtcagccaaccaggaaaggctcaaaacatttttctcaagacgttatggaaaagctagtattagtattggcacatctctttggaagaagatattttccaccaaagttccaagatgcacacttcgagttttatcaatcaaaggtgttccttgatgatctccctgaggattttagtgatgctttagatgaatataacatgaaaattatggaggactttaccactttcctacgaattgtttccaaactggctgatatgaatcaggaatatcaactcccattgtcaaaaatcaaattcacaggtaaagaatgtgaagactctcaactcgtatctcatttgatgagctgcaaggaaggaagagtagcaatttcaccatttgtttgtctgtctgggaactttgatgatgatttgcttcgactagaaactccaaaccatgttactctaggcacaatcggtgtcaatcgctctcaggctccagtgctgttgtcacagaaatttgataaccgaggaaggaaaatgtcgcttaatgcctatgcactggatttctacaaacatggttccttgataggattagtccaggataacaggatgaatgaaggagatgcttattatttgttgaaggattttgcactcaccattaaatctatcagtgtttccttgcgtgagctatgtgaaaatgaagacgacaacgttgtcttagcctttgaacaactgagtacaactttttgggaaaagttaaacaaagtctaaaaacaaagtctatgcaaaccacttaaaaataattccatagtagtttttcaggtcacgtttttgattcttatgcttcttgccagaaatacattatgataaagtggaaatacattacgatgaagtggaaagagcaaacactttggaatcaaacagagttgcaatcaaacctgcaatgttctgtcatgaatactcacaaattatttagtatacctgaatcttggtttctttttataactgagtaataatggttacatctcaggtagtttgaggattgactaaaaaaatgcgagaatgttgtatgtgactgaataacaatttttactctgcgaagccaaagtaaatataatattatcagtaactttatccccagtgtcagtatttataaaatgtttattaaggctagaaaaaatgaatacaatatcctgaaggtgaaatatattctcttcaattagcataaatatgatttacataagttagctatacagctattgagatagtactttctagtaaacttaaactactttttaaacatacattttgtgatgatttaacaaaaatatagagaatgatttgctttattgtaattgtatataagtgactggaaaagcacaaagaaataaagtgggttcgatctgttaaataaaaaaaaaaaaaa

SEQ ID NO: 14529 - DNA, 5470 bp, Homo sapiens
ccgcctctgtcgccactctctccccctgttccgcgtctgcgtcgccaccaccgccgggggtatccggggggtcgcttaccgggctggccccgcgccacagccgtagctttaacctccccgtcagcggccgccccaggaagaggcttctcggccgcggagccacttggggcctcagttctcgccctcttgccgtcgccgcgggtcctggagaagcggccgcggccagggaacggggcatcgcggttccaacgattaactgctgaagtactgatcgagttctgcatttcttcaatgaggaactacaggctgatcttctgccataatctcaaacagccataaatgacaaaagaatgcttgctcagtgagggtagctggtgcagaagccattttttaaacttaggtatttaagtactgaaagaaaagacagctttgatttctggctgcaaaaaagatatgaggaagagctcctccccttccttgagtaactgcaactccgttcttgctaacaaaatatttggaattccacttgatgagctgcagcagggaggacatccagacattgaggttccattcatagtccgccacgttgtggactatattgaggaacatggaggtctggagcaacaaggactttttcaagtcaatggaaatgctgagacagtggagtggcttcggcagagatacgacagcggagaagaggtggatttggttaaggaagcagatgttccctcagctattagccttcttagattttttcttcaagaacttcctgaacctgttatccctggcagtttacatattcacttgatgcagctttctcaagattataataatgaagatgaatttggaagaaagttgaggttcctcttgcaacagcttccacctgttaattatagtttgttaaagtttctgtgtagatttttagccaatgtagcatcacatcatgaagaaatttggtctgcaaattctttggctgctgtctttggtccagatgtcttccacatttacacagatgtggaagacatgaaagagcaagaaatagtgagcaggataatggctggacttctggaaaactactatgagttttttgagaatgaagaggaagatttttcatctaatgatttgagttcaattactgaacaggttaatgaactttctgaggaagaagaggaagatgaaaagctggaacatattgaagaacttccagaagagggtgcagaaaaatcaaatgacatgccagaggtggtacaattaaggatgactgaaaacatcctggaatcaaatagtgttacggcaacaagcacccatatatctcccatcagcatcctaccagcctctacagatattttagaaagaacaattagagcagctgtggaacagcacctttttgatcttcagagcagcatagatcatgatcttaagaatttacaacagcaaagtgtggtgtgtaataatgaagcagaaagtattcattgtgatggggaaggatctaataaccagattgatattgctgatgatattattaatgccagtgaaagtaacagagactgttcaaaacctgtggctagcactaatttagacaatgaagctatgcagcaagattgtgtatttgagaatgaagaaaatacccagtctgtaggtatattgttagagccatgcagtgaccgtggtgatagtgaagatggctgtcttgagagggaagaatatttgttatttgacagtgataaattgtcacacttgattctggattctagtagcaagatatgtgatttgaatgccaacactgaatcagaagtaccaggaggtcagagtgttggtgttcaaggggaagcagcgtgtgtcagtattccacatttagatctgaagaatgtttctgatggtgataaatgggaagagccatttcctgcttttaagtcttggcaggaggactctgagtctggagaagctcagctgtctccacaagctggaagaatgaatcatcaccccttggaagaggactgtcctccagtattatcacaccgcagtttagattttggtcaaagccagcgtttcctacatgatccagaaaagttggattcctcatctaaagcactgtcttttactagaattcgaagatcatcctttagttcaaaagatgaaaagagagaggacagaacaccttatcagctggtcaagaaacttcagaagaaaatcagacaatttgaggaacagtttgaaagggaaagaaatagcaagccctcctacagtgatattgctgccaatccaaaggtattaaaatggatgacagagcttacaaaactgcggaagcaaattaaagatgcaaaacacaaaaattctgatggagaatttgtacctcagacacgtccacgtagtaacacacttccaaaaagctttggctcttctctagaccatgaagatgaagagaatgaagatgaacccaaggtcattcagaaggagaaaaaaccatctaaagaagcaacccttgaacttattcttaaaagactgaaagaaaaacgtattgagaggtgtcttccagaagatatcaagaaaatgaccaaagatcatttggtagaagagaaagcttctcttcagaaaagtcttctttactatgaaagtcaacatggaaggccggtgaccaaggaagaaaggcacattgttaaacctctctatgatagatacaggcttgtaaaacaaatgctgacaagagctagcatcactcctgtccttggatctccatccaccaagcgaaggggtcagatgttacagccaatcatagaaggagaaactgcacatttttttgaagaaatcaaggaggaagaagaagatggtgttaatctgtcctctgagttaggtgatatgttgaaaactgcagtacaggtacagtcttcattagaaaactctgaatctgatgttgaagaaaatcaagaaaaactggctctggatctccgattgtcaagttctcgagcagcttctatgcctgaattattggaacaactttggaaagccagagctgaaaaaaagaaactacgcaaaacgttgcgggaatttgaagaagcattttatcaacaaaatggaaggaatgcccagaaagaggatcgtgttccagtgcttgaggagtacagagagtacaagaaaattaaagccaagcttaggcttcttgaagttcttataagcaaacaagattcttcaaaatccatataagatacgttccttgaaaattcatatcataaagtcagttgtattccttgaagctatcatcgtgtgtacttggctggtacttaaattcgttttgtcaggcactcagagaatctcattttgtacttggttgtggtgccactaaacaaaacaaatgatgggagagtaagtaggccctctcaagggagcgtaagtgatgttccatattaaccacagactgtcctctccacctttagcaaacatatggtttacttcattgttttgtactacagatacatccttttagcaaaagactggaattttatcctttcaacttcaagaactttggaaatgcaagctttttgttattaccaactttttgtttctcattactgaagaaaattggaggaaaatcttcatactgaattcttctgttgcctttttcttacagaatgactgaaaatttgaaagaaaagcctataaaagtgcacatacgcaactgtgttctctgttttcctagaaaaccaaaatcaaactgagatttcaagtcgtactatggaacacctttctgtttaattcccaaagtgacatcttctcacaggtagtatgttagtaaaattttgcaattcgctggtcacacagctcccggatgaagataacagttggtagaccaaaaggtgacctcgcttagtatattgaaaacacacaccacacatcacacacagaactgaatcataccacatgctgcctatgggacttcagttactgtttcctgagttactgtttatccgctggcaatggtgtgatttgtctggatcagatccgcgctattccccaacccacctccagataatgtgagaaaatagccatgtcagtatgtaggaactctgatggtgctcagatttgtgtgttcaatcaatgggcttaaatcagcaaaatattatgcctaaagtaaatctgttcttaacaagggctctaccactgcattttcacatgtaccttcagggggttatctttttttttttcccctcctattttaatcagcaaaatccataccaaaacaacgacaacaacgccctcttaagggaccaccctttggtcaatcataacatgctgtttaaagcagctgtttacaggatgtgtagtggtatgccccttgtcatatactcttagcatatctttttttcctttggctttgcatggcttttcttcaggtactgtctcggtatcattctgctaatcattgttacagaatggtgacttcatttgtgctaacagtacaacagcagatttgggtcaggcttaatctaagtgttaacttttttttctggtgcttttttggattgatgactgtctcactttgactatacccatgttttgcatgcaatgactcatgcatggttttcttaactagctaatattaacaatttattccatataaaaatggaattttgcaacatcctttaataaggtgagggaagcatgaacctcagacttctggcactattacatagtaagcacatgaagtagtttgataataaatagcagttctagtacttcacatttcacccgtgtgtgcaatgcctttttctggggggtggggggtgagggaaaacctggtagtgaatgtgtagttggggaataaagaaaagcactaaatcctgccctttttgtgtggtttccttttgatacaactaggttattcataatgtatacctagaaaagtgaaattgaaaataccaaaagatgtatcatttttatttgaatccatcatgcagtgtacatttcagataatttccttcagtctccagataggagtgtatccaaacatctaattttatgtgcactgtgtatcttatatgaatgttttattttttataccacatgcaaaaatgtccatatgcactatttaaatgttttaaataatatattccttctttataatgctaaatctatatgagtaccatatttttataagtcagtggtctgactggtttcattttagaattaacagctgcttcaatatgttattcaatgttaatgtttggctgtgagtagaatatgtaaaagtggcatggcagcacttatgctctgtgacagtattgtgtgtcatagttgagcagtagctggtagaattaggcagttggtgatagttttactttggtacaaataaaaactgtatatctatatacaaataatatatagatatatatgtccaccagtataatggcattgctgtgtctggcacttcattgtacagacttttataataaaagaacttgaaagttctaaaaaa

SEQ ID NO: 14530 - DNA, 10052 bp, Homo sapiens
ttcctccctctcagggctgcgcgcccaggtctgcgccgcgctccgcctccagccgcgcgcagacttgcgcacgcgtcgtgagagcgaccgcctccgtctctcgctgggctcgctagggctgcgcgttgggccagcgggggcgccgcagctgaagccgccccggagccggtgaaccgaattacctcgagggaggggcgtggggaaggcggcgggaggaggagcgcacgggccggctgccgtgcccaccacggctgaggaacatggttttcgagtcggtggtcgtggacgtgttgaaccggttcttgggggactatgtggtggacttggacacgtcccagctctctctgggcatctggaaaggagctgtggccctcaagaatcttcaaattaaagaaaatgccctgagtcaactggatgtaccatttaaagttaaagttggtcacataggtaatcttaaacttataattccatggaaaaacctttatactcaacctgttgaagccgtattggaagaaatttatttacttatagtgccttcttctagaataaaatatgatcctttaaaagaagagaaacaactcatggaagcaaagcaacaggaactgaaaagaatagaagaagcaaaacaaaaagtagttgatcaagaacaacatctgccggaaaaacaggacacttttgcagaaaaattagttacacagatcataaaaaatcttcaggtgaaaatttccagtatccatattcgttatgaagatgatatcacaaatcgggacaaaccgctgtcatttggtatttcccttcaaaatctgagcatgcagacaactgatcaatactgggttccatgtttacatgatgaaactgagaaactggttcgtaagttaatccgattggataacctgtttgcctattggaatgtgaagtctcagatgttttatcttagtgattatgataactccttggacgacttgaagaatggcattgtcaatgaaaatattgttccagaaggttatgattttgtatttcgtcccatatctgctaatgccaaacttgtgatgaatcgccgatctgattttgacttttctgcccccaaaataaacttggaaattgagttacataacatagcaattgaatttaataaaccacagtatttcagtattatggagcttcttgaatcagttgatatgatggcacaaaatctgccatataggaagttcaaacctgatgtgcctcttcaccaccatgccagagaatggtgggcttatgctatacatggcgttcttgaagtaaatgtttgccccaggttatggatgtggtcatggaagcatattagaaaacataggcaaaaagtgaagcaatataaagaactgtataaaaaaaagttaacaagtaagaagccacctggtgaacttctcgtgtctttggaggagttggaaaaaaccttggatgtctttaatataactatagctagacagacggcagaagttgaggtaaagaaagctggatacaaaatttacaaagaaggagtaaaagatccagaggataataaagggtggtttagctggctatggtcttggtcagaacaaaatactaatgaacagcaaccagatgttcaacctgaaactcttgaagaaatgttgacacctgaagaaaaagctttactctatgaagcaattggctatagtgaaacagcagttgatccaactttactaaaaacatttgaagccttgaagttttttgtccacttgaaaagtatgtctattgttctaagagaaaatcatcaaaaacctgagctggtagatattgtaatagaagaatttagcaccttaattgtgcaaagaccaggagcacaagcaataaaatttgaaactaaaatagattcatttcatattactggcttaccagataattcagaaaaaccccgcctcctgtcttcattggatgatgcaatgtcacttttccaaattacatttgagataaatccattagatgaaactgtttctcagaggtgtatcatagaagctgaacctttagaaatcatatatgatgcaaggacagtgaatagtatagtggaattcttcagacctccaaaagaggtacatctagcacagctcactgcagcaactttgacaaaactggaagaatttcgcagtaagacagcaacaggtctactgtatattattgaaacacagaaagttcttgatctcaaaattaatttgaaggcttcatatattattgtcccacaagatggaatttttagtcctacatcaaatctgcttcttttggaccttggtcatctaaaggtgacgagtaaaagtcgttctgaattaccagatgtgaaacaaggtgaggccaatcttaaagagataatggatagagcttatgattcatttgatattcaacttacaagtgtacagctgctttacagtagagttggtgataattggagagaagcacgaaaactcagtgtatctacccagcatattttggtacccatgcacttcaatttggaactgtctaaggccatggttttcatggatgtaaggatgcccaaattcaagatttatggaaagttacctcttatttctttacgaatctcagataaaaaactacaagggattatggaattgattgaaagcattccaaaacctgaaccagtaactgaagtatctgcccctgtcaaatcattccagattcaaacatctacttctttgggaacatcacagatttcacagaaaataattcctctcttggaacttccatctgtttctgaagatgattcagaggaggaattttttgatgcaccatgtagtcccttggaagaacctcttcagtttccaactggagttaaaagtattcgaaccagaaagttacaaaagcaggattgttcagtaaatatgactacatttaaaataagatttgaagtaccaaaggttttgatcgagttttatcaccttgttggagattgtgaactatctgtggtagaaattcttgttttaggattgggtgcagaaattgagattagaacatacgatttgaaagcaaatgcctttttgaaagagttctgcttaaaatgcccagaatacttggatgaaaacaagaaaccagtttatttggttacaaccctggataacacaatggaagacctgttaacgctggaatatgtaaaggctgaaaagaatgtacccgacttgaaaagtacctataacaatgttttacaattgattaaggtaaatttttcctctttggatattcatttacacactgaagcacttctgaatacaataaattatcttcataatatccttccgcaatcagaggaaaaatcagccccagtgtccactacagagactgaagacaaaggagatgtcattaaaaaattagctttaaaactatccacaaatgaagatatcattactttgcagattttagcagaattatcgtgtttacagatctttattcaagatcagaaatgtaacatttctgaaattaagattgaagggcttgattctgagatgattatgaggccttcagaaactgaaataaacgcaaagctaaggaatataattgttttagattctgatataacagctatatacaaaaaggctgtttatatcactggaaaagaagttttcagcttcaaaatggtttcttacatggatgcaactgctggttctgcatacacagatatgaatgtggttgacattcaggttaatttaatagttggttgcattgaagtagtttttgtcacgaaatttctatattctatattggcttttatagataattttcaggcagctaaacaagccttggctgaggcaactgttcaggcagctggaatggctgctactggtgtaaaagaactcgcacaaaggagttccagaatggcactggatattaacatcaaagccccagttgtggtcatcccgcagtctccagtttctgaaaatgtttttgttgctgattttggactaattacaatgacaaatacctttcatatgataacagagagccagagctctcccccacctgttattgatttgataacaataaagctgagtgaaatgcgactatacagatctcgatttattaatgatgcataccaggaagtactggatctactcctgccattaaatcttgaggttgtggttgaacgaaatttatgctgggagtggtaccaggaagttccttgttttaatgtaaatgctcagctgaaaccaatggagttcattcttagtcaagaagatataacaactatttttaaaacattgcatggcaatatatggtatgaaaaagatggtagtgcctcacctgctgtaacaaaagaccaatacagtgccactagtggagttactactaatgcttcacaccattcaggaggagcaactgtggtgacagctgctgtggtagaagtacattcacgtgccttactagttaagacaacactaaacataagcttcaaaactgatgatctcaccatggtgctgtatagtccaggtcctaaacaggcttcctttacagatgttcgtgatccttctctgaaacttgctgaatttaaattggagaatattataagtactttaaaaatgtatacagatggctcaacattttcttccttctcattaaaaaactgtattttagatgataaaagacctcatgtcaagaaagcaactcctcgaatgataggactgacagttggttttgacaaaaaagacatgatggatataaagtacaggaaagtcagagatggttgtgtgactgatgcggtctttcaagaaatgtatatttgtgcaagcgtagaatttctgcagactgttgcaaatgtctttcttgaggcctacaccacaggcactgctgtagaaaccagtgtgcaaacatggactgctaaggaagaagtacctacacaggaatcagtgaagtgggaaattaatgttattattaaaaatcctgaaattgtgtttgtagctgacatgacaaaaaatgatgctcctgctttagtcattacaacacaatgtgaaatttgctataaaggtaaccttgaaaatagtacaatgactgctgccattaaagatctccaagtgagagcctgcccgtttcttccagtcaagagaaaaggcaaaatcactactgttttgcagccctgtgacttgttttatcaaactactcagaaaggtacagatccacaagtgatcgatatgtcagtaaaatccctgacactaaaggtttcaccagttattataaatactatgattaccataacttcagcactgtatacaactaaggaaaccatcccagaagaaacggcttcttctactgcacatttatgggaaaagaaggatacaaagactttaaaaatgtggtttcttgaagaatcaaatgaaactgaaaaaatagctcccacaactgaattggtacccaaaggcgagatgataaaaatgaacattgattctatttttatagttcttgaggctggaattggtcatagaacagtacctatgcttctggcaaagtcacgtttttcaggggaaggcaaaaactggagttccctaataaatctgcactgtcagcttgagctagaagtgcattattataatgaaatgtttggtgtatgggagcctttgcttgaacccttagaaattgatcagactgaggattttagaccatggaatcttggtatcaagatgaaaaagaaagcaaaaatggccattgttgagtcagatcctgaagaagaaaactacaaagtgccagaatataaaactgtcatcagtttccattcaaaagaccaattaaacattacattatccaaatgtggtcttgtaatgttaaacaatttagtcaaggcatttacagaagctgccactggatcttcagctgacttcgtaaaggatctagcaccatttatgattttaaattcccttggacttactatttctgtttcgccaagtgattcttttagtgtactcaacattcctatggcaaaatcatatgtattgaaaaatggagaaagtttaagtatggattatatccgaaccaaggacaatgatcatttcaatgcaatgaccagcctaagcagcaaactcttcttcattcttcttacacctgttaaccattctactgctgataagattcctttaacaaaagtgggacgacgtctgtacactgtaagacacagagagtctggcgttgaaagatctattgtttgtcaaattgatacagtagaaggaagtaagaaggtcacaattcgctccccagtgcagataagaaatcatttttcagtcccactgtctgtttacgaaggggataccttattgggaactgcctcacctgaaaatgaattcaacataccattaggatcttaccgatcattcatttttctgaagccagaagatgagaactatcaaatgtgtgaaggaattgactttgaagagattataaaaaatgatggtgctcttctaaagaagaaatgtagatctaaaaacccttctaaggaatcatttctcattaatattgttccagaaaaagataatttaacatctctatcagtgtattcagaagatggttgggatttaccatacataatgcatttgtggccacctatcctgctccgaaatcttcttccttacaaaattgcttattatatagagggaattgaaaattcggtttttactctaagtgaaggacattcagcccagatttgtactgcacagttgggtaaagccaggctacatttaaaattacttgactatctcaatcacgattggaaaagtgaatatcacataaagcctaatcagcaagacattagttttgtcagttttacttgtgttacagaaatggaaaagactgatttagatattgctgtccatatgacttacaatactggtcagacagttgtggcatttcatagtccttattggatggtcaataaaactggccgcatgttacagtacaaagcagacggaattcatcgaaagcatccacctaattataaaaagccagttctcttttcttttcagccaaatcacttttttaataacaataaggttcaacttatggtaactgatagtgagttgtccaatcagttttcaattgatactgttggtagtcatggagctgttaaatgtaaaggcctgaaaatggactatcaagttggtgtcactatagacctgagcagttttaacattactagaattgtgacatttacccctttttatatgattaaaaacaaaagcaaataccatatatcagtggctgaagaaggaaatgataaatggctctctcttgatttggagcagtgtatccccttttggcctgagtatgcttctagtaaacttcttattcaagtcgaaaggagtgaagatcctcccaaaaggatatattttaacaagcaggaaaattgtattctattgcgtctagataacgagcttggaggtattatagcagaagtgaatttggccgagcattctacagttattacatttttagattatcatgatggagcagctacattcctcttaataaatcacacaaagaatgaacttgttcaatacaatcaaagttctctcagtgaaatagaagattccctccctcctggtaaagccgtgttttatacatgggctgatccggtgggctctagaaggctgaagtggagatgtagaaaaagccatggtgaagtaacacagaaggatgatatgatgatgcctatagatttgggggaaaagacaatatatttagtttcattctttgaaggtttacaacgcattattttattcactgaagatccaagggtatttaaagtaacatatgaaagtgagaaagcagagttagcagagcaagaaattgcagtggcattacaagatgttggaatttctcttgtcaacaattacacgaagcaagaagtagcctatataggcattacaagttctgatgtggtttgggaaacaaagcccaagaagaaggcaagatggaagccaatgagtgtaaagcacactgagaagttagagagagaatttaaggaatatactgaatcttctccttcagaagataaggttattcagttggacactaatgttccggttcgcctaacccctactggtcataacatgaaaattctgcagccgcatgtaatagctctacgaagaaattatcttccagcattaaaagtggaatataacacatctgcacatcaatcatcatttagaattcagatttacagaatacagatccaaaatcagatacatggtgctgtatttccctttgtgttttatcctgttaaacctccaaagtcggtcaccatggattcagcaccaaagccctttacagatgtcagtattgtcatgagatctgcaggacattcccagatatcacgtattaagtatttcaaagtattgattcaagaaatggatctcaggttagatcttgggtttatctatgctttaacagaccttatgacagaagctgaggtgactgaaaatacagaggttgagctttttcataaagatatagaagctttcaaagaagaatataaaacagcctcattagtagatcaatcacaagtcagcctctatgaatattttcatatatctcctatcaagttacatttaagtgtttcactgagttccggcagagaagaagctaaagattcaaaacaaaatggaggactgattccagttcattctttaaatcttttgctgaagagtattggtgccacactgacagatgtacaagatgtagtttttaagcttgcattttttgaactcaactatcagttccatacaacatccgatctacagtctgaagtcataagacactattcaaaacaggccattaagcagatgtatgtactcattcttggacttgatgttttgggaaatccatttggcttaattagagaattttctgaaggtgtagaagcatttttttatgaaccttaccagggagccatccagggtcctgaagagtttgtggaaggaatggcactaggacttaaggcactagttggtggagctgttggtggattggctggtgctgcctccaaaatcaccggtgctatggctaagggggtagcagctatgaccatggatgaagactaccaacagaagagaagagaagccatgaataagcaaccagctggttttagagaaggcatcactcgtggaggaaaaggcttagtttctggatttgttagtggcataacaggaattgttacaaaaccaatcaaaggagctcaaaaaggaggagcagctggtttctttaaaggtgttgggaaaggtttagtaggagcggtagcaaggccaactggaggcatcatagacatggctagcagtacatttcagggaataaaaagagctacagagacttctgaagtggagagtctgcgacctcctcggttcttcaatgaagatggagttatcagaccgtacaggttgagggatgggactggaaatcaaatgttacagaaaattcaattctacagggagtggattatgactcacagtagcagtagtgatgatgatgatgatgatgatgatgatgatgagtcagatctaaaccattaaaattcatatgttctttattttacttggaatgtttcattaacatgttttgtatgacttataccataatgcccatatgtccatttatagggaggtaaaacacattttcttttaaaatgttttcctacacattttcataaagcaaaataattgtattatttaagcacagaaaaaaatgtatcttacatccaaagtagggagggcatccaacatattatagatttgcttttatatattttatagctttgtattgcatagtttgtctttaagagttcaagttagacttaaatataattttgatgttcactggttttattttaaattgccttcttatttgttagcaaaatgcctttttttaatggtctctgtaaattttctgggctttaatgtaatgccactgtgtaaaaaaaaaggaagaaaatagtaatagccatttaatgttttatatttatcattttaaagatatttttgtcaaatttcttttaataataataaacatatgtaatc

SEQ ID NO: 14531 - DNA, 11262 bp, Homo sapiens
ttcctccctctcagggctgcgcgcccaggtctgcgccgcgctccgcctccagccgcgcgcagacttgcgcacgcgtcgtgagagcgaccgcctccgtctctcgctgggctcgctagggctgcgcgttgggccagcgggggcgccgcagctgaagccgccccggagccggtgaaccgaattacctcgagggaggggcgtggggaaggcggcgggaggaggagcgcacgggccggctgccgtgcccaccacggctgaggaacatggttttcgagtcggtggtcgtggacgtgttgaaccggttcttgggggactatgtggtggacttggacacgtcccagctctctctgggcatctggaaaggagctgtggccctcaagaatcttcaaattaaagaaaatgccctgagtcaactggatgtaccatttaaagttaaagttggtcacataggtaatcttaaacttataattccatggaaaaacctttatactcaacctgttgaagccgtattggaagaaatttatttacttatagtgccttcttctagaataaaatatgatcctttaaaagaagagaaacaactcatggaagcaaagcaacaggaactgaaaagaatagaagaagcaaaacaaaaagtagttgatcaagaacaacatctgccggaaaaacaggacacttttgcagaaaaattagttacacagatcataaaaaatcttcaggtgaaaatttccagtatccatattcgttatgaagatgatatcacaaatcgggacaaaccgctgtcatttggtatttcccttcaaaatctgagcatgcagacaactgatcaatactgggttccatgtttacatgatgaaactgagaaactggttcgtaagttaatccgattggataacctgtttgcctattggaatgtgaagtctcagatgttttatcttagtgattatgataactccttggacgacttgaagaatggcattgtcaatgaaaatattgttccagaaggttatgattttgtatttcgtcccatatctgctaatgccaaacttgtgatgaatcgccgatctgattttgacttttctgcccccaaaataaacttggaaattgagttacataacatagcaattgaatttaataaaccacagtatttcagtattatggagcttcttgaatcagttgatatgatggcacaaaatctgccatataggaagttcaaacctgatgtgcctcttcaccaccatgccagagaatggtgggcttatgctatacatggcgttcttgaagtaaatgtttgccccaggttatggatgtggtcatggaagcatattagaaaacataggcaaaaagtgaagcaatataaagaactgtataaaaaaaagttaacaagtaagaagccacctggtgaacttctcgtgtctttggaggagttggaaaaaaccttggatgtctttaatataactatagctagacagacggcagaagttgaggtaaagaaagctggatacaaaatttacaaagaaggagtaaaagatccagaggataataaagggtggtttagctggctatggtcttggtcagaacaaaatactaatgaacagcaaccagatgttcaacctgaaactcttgaagaaatgttgacacctgaagaaaaagctttactctatgaagcaattggctatagtgaaacagcagttgatccaactttactaaaaacatttgaagccttgaagttttttgtccacttgaaaagtatgtctattgttctaagagaaaatcatcaaaaacctgagctggtagatattgtaatagaagaatttagcaccttaattgtgcaaagaccaggagcacaagcaataaaatttgaaactaaaatagattcatttcatattactggcttaccagataattcagaaaaaccccgcctcctgtcttcattggatgatgcaatgtcacttttccaaattacatttgagataaatccattagatgaaactgtttctcagaggtgtatcatagaagctgaacctttagaaatcatatatgatgcaaggacagtgaatagtatagtggaattcttcagacctccaaaagaggtacatctagcacagctcactgcagcaactttgacaaaactggaagaatttcgcagtaagacagcaacaggtctactgtatattattgaaacacagaaagttcttgatctcaaaattaatttgaaggcttcatatattattgtcccacaagatggaatttttagtcctacatcaaatctgcttcttttggaccttggtcatctaaaggtgacgagtaaaagtcgttctgaattaccagatgtgaaacaaggtgaggccaatcttaaagagataatggatagagcttatgattcatttgatattcaacttacaagtgtacagctgctttacagtagagttggtgataattggagagaagcacgaaaactcagtgtatctacccagcatattttggtacccatgcacttcaatttggaactgtctaaggccatggttttcatggatgtaaggatgcccaaattcaagatttatggaaagttacctcttatttctttacgaatctcagataaaaaactacaagggattatggaattgattgaaagcattccaaaacctgaaccagtaactgaagtatctgcccctgtcaaatcattccagattcaaacatctacttctttgggaacatcacagatttcacagaaaataattcctctcttggaacttccatctgtttctgaagatgattcagaggaggaattttttgatgcaccatgtagtcccttggaagaacctcttcagtttccaactggagttaaaagtattcgaaccagaaagttacaaaagcaggattgttcagtaaatatgactacatttaaaataagatttgaagtaccaaaggttttgatcgagttttatcaccttgttggagattgtgaactatctgtggtagaaattcttgttttaggattgggtgcagaaattgagattagaacatacgatttgaaagcaaatgcctttttgaaagagttctgcttaaaatgcccagaatacttggatgaaaacaagaaaccagtttatttggttacaaccctggataacacaatggaagacctgttaacgctggaatatgtaaaggctgaaaagaatgtacccgacttgaaaagtacctataacaatgttttacaattgattaaggtaaatttttcctctttggatattcatttacacactgaagcacttctgaatacaataaattatcttcataatatccttccgcaatcagaggaaaaatcagccccagtgtccactacagagactgaagacaaaggagatgtcattaaaaaattagctttaaaactatccacaaatgaagatatcattactttgcagattttagcagaattatcgtgtttacagatctttattcaagatcagaaatgtaacatttctgaaattaagattgaagggcttgattctgagatgattatgaggccttcagaaactgaaataaacgcaaagctaaggaatataattgttttagattctgatataacagctatatacaaaaaggctgtttatatcactggaaaagaagttttcagcttcaaaatggtttcttacatggatgcaactgctggttctgcatacacagatatgaatgtggttgacattcaggttaatttaatagttggttgcattgaagtagtttttgtcacgaaatttctatattctatattggcttttatagataattttcaggcagctaaacaagccttggctgaggcaactgttcaggcagctggaatggctgctactggtgtaaaagaactcgcacaaaggagttccagaatggcactggatattaacatcaaagccccagttgtggtcatcccgcagtctccagtttctgaaaatgtttttgttgctgattttggactaattacaatgacaaatacctttcatatgataacagagagccagagctctcccccacctgttattgatttgataacaataaagctgagtgaaatgcgactatacagatctcgatttattaatgatgcataccaggaagtactggatctactcctgccattaaatcttgaggttgtggttgaacgaaatttatgctgggagtggtaccaggaagttccttgttttaatgtaaatgctcagctgaaaccaatggagttcattcttagtcaagaagatataacaactatttttaaaacattgcatggcaatatatggtatgaaaaagatggtagtgcctcacctgctgtaacaaaagaccaatacagtgccactagtggagttactactaatgcttcacaccattcaggaggagcaactgtggtgacagctgctgtggtagaagtacattcacgtgccttactagttaagacaacactaaacataagcttcaaaactgatgatctcaccatggtgctgtatagtccaggtcctaaacaggcttcctttacagatgttcgtgatccttctctgaaacttgctgaatttaaattggagaatattataagtactttaaaaatgtatacagatggctcaacattttcttccttctcattaaaaaactgtattttagatgataaaagacctcatgtcaagaaagcaactcctcgaatgataggactgacagttggttttgacaaaaaagacatgatggatataaagtacaggaaagtcagagatggttgtgtgactgatgcggtctttcaagaaatgtatatttgtgcaagcgtagaatttctgcagactgttgcaaatgtctttcttgaggcctacaccacaggcactgctgtagaaaccagtgtgcaaacatggactgctaaggaagaagtacctacacaggaatcagtgaagtgggaaattaatgttattattaaaaatcctgaaattgtgtttgtagctgacatgacaaaaaatgatgctcctgctttagtcattacaacacaatgtgaaatttgctataaaggtaaccttgaaaatagtacaatgactgctgccattaaagatctccaagtgagagcctgcccgtttcttccagtcaagagaaaaggcaaaatcactactgttttgcagccctgtgacttgttttatcaaactactcagaaaggtacagatccacaagtgatcgatatgtcagtaaaatccctgacactaaaggtttcaccagttattataaatactatgattaccataacttcagcactgtatacaactaaggaaaccatcccagaagaaacggcttcttctactgcacatttatgggaaaagaaggatacaaagactttaaaaatgtggtttcttgaagaatcaaatgaaactgaaaaaatagctcccacaactgaattggtacccaaaggcgagatgataaaaatgaacattgattctatttttatagttcttgaggctggaattggtcatagaacagtacctatgcttctggcaaagtcacgtttttcaggggaaggcaaaaactggagttccctaataaatctgcactgtcagcttgagctagaagtgcattattataatgaaatgtttggtgtatgggagcctttgcttgaacccttagaaattgatcagactgaggattttagaccatggaatcttggtatcaagatgaaaaagaaagcaaaaatggccattgttgagtcagatcctgaagaagaaaactacaaagtgccagaatataaaactgtcatcagtttccattcaaaagaccaattaaacattacattatccaaatgtggtcttgtaatgttaaacaatttagtcaaggcatttacagaagctgccactggatcttcagctgacttcgtaaaggatctagcaccatttatgattttaaattcccttggacttactatttctgtttcgccaagtgattcttttagtgtactcaacattcctatggcaaaatcatatgtattgaaaaatggagaaagtttaagtatggattatatccgaaccaaggacaatgatcatttcaatgcaatgaccagcctaagcagcaaactcttcttcattcttcttacacctgttaaccattctactgctgataagattcctttaacaaaagtgggacgacgtctgtacactgtaagacacagagagtctggcgttgaaagatctattgtttgtcaaattgatacagtagaaggaagtaagaaggtcacaattcgctccccagtgcagataagaaatcatttttcagtcccactgtctgtttacgaaggggataccttattgggaactgcctcacctgaaaatgaattcaacataccattaggatcttaccgatcattcatttttctgaagccagaagatgagaactatcaaatgtgtgaaggaattgactttgaagagattataaaaaatgatggtgctcttctaaagaagaaatgtagatctaaaaacccttctaaggaatcatttctcattaatattgttccagaaaaagataatttaacatctctatcagtgtattcagaagatggttgggatttaccatacataatgcatttgtggccacctatcctgctccgaaatcttcttccttacaaaattgcttattatatagagggaattgaaaattcggtttttactctaagtgaaggacattcagcccagatttgtactgcacagttgggtaaagccaggctacatttaaaattacttgactatctcaatcacgattggaaaagtgaatatcacataaagcctaatcagcaagacattagttttgtcagttttacttgtgttacagaaatggaaaagactgatttagatattgctgtccatatgacttacaatactggtcagacagttgtggcatttcatagtccttattggatggtcaataaaactggccgcatgttacagtacaaagcagacggaattcatcgaaagcatccacctaattataaaaagccagttctcttttcttttcagccaaatcacttttttaataacaataaggttcaacttatggtaactgatagtgagttgtccaatcagttttcaattgatactgttggtagtcatggagctgttaaatgtaaaggcctgaaaatggactatcaagttggtgtcactatagacctgagcagttttaacattactagaattgtgacatttacccctttttatatgattaaaaacaaaagcaaataccatatatcagtggctgaagaaggaaatgataaatggctctctcttgatttggagcagtgtatccccttttggcctgagtatgcttctagtaaacttcttattcaagtcgaaaggagtgaagatcctcccaaaaggatatattttaacaagcaggaaaattgtattctattgcgtctagataacgagcttggaggtattatagcagaagtgaatttggccgagcattctacagttattacatttttagattatcatgatggagcagctacattcctcttaataaatcacacaaagaatgaacttgttcaatacaatcaaagttctctcagtgaaatagaagattccctccctcctggtaaagccgtgttttatacatgggctgatccggtgggctctagaaggctgaagtggagatgtagaaaaagccatggtgaagtaacacagaaggatgatatgatgatgcctatagatttgggggaaaagacaatatatttagtttcattctttgaaggtttacaacgcattattttattcactgaagatccaagggtatttaaagtaacatatgaaagtgagaaagcagagttagcagagcaagaaattgcagtggcattacaagatgttggaatttctcttgtcaacaattacacgaagcaagaagtagcctatataggcattacaagttctgatgtggtttgggaaacaaagcccaagaagaaggcaagatggaagccaatgagtgtaaagcacactgagaagttagagagagaatttaaggaatatactgaatcttctccttcagaagataaggttattcagttggacactaatgttccggttcgcctaacccctactggtcataacatgaaaattctgcagccgcatgtaatagctctacgaagaaattatcttccagcattaaaagtggaatataacacatctgcacatcaatcatcatttagaattcagatttacagaatacagatccaaaatcagatacatggtgctgtatttccctttgtgttttatcctgttaaacctccaaagtcggtcaccatggattcagcaccaaagccctttacagatgtcagtattgtcatgagatctgcaggacattcccagatatcacgtattaagtatttcaaagtattgattcaagaaatggatctcaggttagatcttgggtttatctatgctttaacagaccttatgacagaagctgaggtgactgaaaatacagaggttgagctttttcataaagatatagaagctttcaaagaagaatataaaacagcctcattagtagatcaatcacaagtcagcctctatgaatattttcatatatctcctatcaagttacatttaagtgtttcactgagttccggcagagaagaagctaaagattcaaaacaaaatggaggactgattccagttcattctttaaatcttttgctgaagagtattggtgccacactgacagatgtacaagatgtagtttttaagcttgcattttttgaactcaactatcagttccatacaacatccgatctacagtctgaagtcataagacactattcaaaacaggccattaagcagatgtatgtactcattcttggacttgatgttttgggaaatccatttggcttaattagagaattttctgaaggtgtagaagcatttttttatgaaccttaccagggagccatccagggtcctgaagagtttgtggaaggaatggcactaggacttaaggcactagttggtggagctgttggtggattggctggtgctgcctccaaaatcaccggtgctatggctaagggggtagcagctatgaccatggatgaagactaccaacagaagagaagagaagccatgaataagcaaccagctggttttagagaaggcatcactcgtggaggaaaaggcttagtttctggatttgttagtggcataacaggaattgttacaaaaccaatcaaaggagctcaaaaaggaggagcagctggtttctttaaaggtgttgggaaaggtttagtaggagcggtagcaaggccaactggaggcatcatagacatggctagcagtacatttcagggaataaaaagagctacagagacttctgaagtggagagtctgcgacctcctcggttcttcaatgaagatggagttatcagaccgtacaggttgagggatgggactggaaatcaaatgttacaggtcatggaaaatggaagatttgcaaaatacaaatattttacccatgtcatgatcaataagacagatatgctaatgataaccagacgtggtgtattgtttgtaacaaagggaacatttggacaactcacgtgtgagtggcagtatagttttgatgaatttaccaaagagccattcattgttcatgggagaagattgcgcattgaagcaaaggaacgagtgaagtctgtatttcatgccagagagtttggaaaaataattaacttcaagaccccagaggatgccaggtggatcctcacaaagctacaagaagcaagagaaccttctccgagcctctgacagagaacactgcctgaagacacacagcaataagtgattacagctcctagactaccttccaaaacctgtttgggaagcatattacagaaatgatttcaagtaccctgtattctggatgctaaaaaacaaaaacaaacaaaaaaacaaaaacaaaaaaacaaaaccagaatcaggtaaaacagctatgtgattaaaatattttaattcttcagcaattacccggttttctaaattgaatcatgcatctatttataattctaattattttgtaaaagaagacaaaattatgaatcttaagtatttgctccatctttttctctgtaatggtggagaggctgcccataattcatctccacatggagccaagtttaatgtttctagttcacattttgtacttctgtcatgcttatttcaaactccctgagtgatgggtaagaaatcaaacattgcctcagtggtatcaagagaactttggtggtggtttcttcagaatcatgaagttcttttgccagataaatattttgatattattttcctttttaatataaaggataggtttgaattgtacttaaaatgcatagcattattaaaaacaatcttttaaaatataatttataacatagattgaagcctccccttaagaaaccttaaagaaataagtatcctactcaaaaaaggaagtctgtttcagaactttagggcctttgaaatatttcctcaagcctatttcatgagatctacttggtttacccaagtcatgtttttaatagactgctaatatcaaaggagaatttttaaagccttaacaatgcctactttccattcactgttaacatggaataaacacaattcccaacatcttagatagtgtattatgcttccaacagacagtccctctcatataaagtttatgtaccctaaaatctaacccaataacctgtcccgttgccaatagattgagaatttctggtttgcttactctacagttattcaaatgagagtcacgcttttaaatttacagctcatcacagaaatcatcagctatacattagtaaaaataaggacatgaggttttctttcttggtttttgtccaagatctttgcaccttaatattaatggactgtttcaggtaaaagagaatgaatgtatgattgtgaactgtgaagagaatgatgcaggatcctatttagttactgaataatacagagtattcaatgcatgttgtatgtgccaccaagttactattaactgtttttggaattgaagactctgtatagtcaatagttgtgaaattcttctcaggctccttaaaccctcgctttgttgtaaaagctaaaataaacagcatgctatattgtaattgtatttcttgctgaccaaatctactaaatgctattgatttctctctgattactaaaacacattgtttattctcagtagtttcccccaaaatgcttttttctttgctgaacttaa

SEQ ID NO: 14532 - DNA, 7100 bp, Homo sapiens
gacatactgagaataaatccaaagacattagtttctttgcacgaaatgaggttacatatccagtgacatttatttgagctatttaaacaacttaaacatctttttcttttcttaataagggacgtttcaagttgtggtctcagccaaaatgagtgataccccttctactggtttttccatcattcatcctacgtcttctgaaggtcaagttccaccccctcgccatttgagcctcactcatcctgttgtggccaagcgaatcagtttctacaagagcggagacccccaattcggcggggtcagggtggtggtcaaccctcgctcctttaagtcctttgatgctctgctggataacttgtccaggaaggtgcccctcccttttggagtgaggaacatcagcacccctcggggcaggcacagcatcacgcgcctggaggagctggaggacggcgagtcctacctatgttcccacggcaggaaggtgcagcctgtagacctggacaaagcccgtcggcgcccgcggccctggctcagcagccgggccattagcgcgcactcaccgccccaccccgtagccgtcgctgctcccggcatgccccgccccccacggagcctagtggtcttcaggaatggcgacccgaagacgaggcgtgcggttcttctgagcaggagggtcacccagagcttcgaggcatttctacagcacctgacagaggtcatgcagcgccctgtggtcaagctgtacgctacggacggaaggagggttcccagcctccaggcagtgatcctgagctctggagctgtggtggcggcaggaagggagccatttaaaccaggaaattatgacatccaaaaatacttgcttcctgctagattaccagggatctctcagcgtgtgtaccccaagggaaatgcaaagtcagaaagcagaaagataagcacacatatgtcttcaagctcaaggtcccagatttattctgtttcttctgagaaaacacataataatgattgctacttagactattcttttgttcctgaaaagtacttggccttagaaaagaatgattctcagaatttaccaatatatccttctgaagatgatattgagaaatcaattatttttaatcaagacggcactatgacagttgagatgaaagttcgattcagaataaaagaggaagaaaccataaaatggacaactactgtcagtaaaactggtccttctaataatgatgaaaagagtgagatgagttttccaggaagaacagaaagtcgatcatctggtttaaagcttgcagcatgttcattctctgcagatgtgtcacctatggagcgaagcagtaatcaagagggcagtttggcagaggagataaacattcaaatgacagatcaagtggctgaaacttgcagttctgctagttgggagaatgctactgtggacacagatatcatccagggaactcaagaccaagcaaagcatcgtttttataggccccctacacctggactaagaagagtgagacaaaagaaatctgtgattggcagtgtgaccttagtatctgaaactgaggttcaagagaaaatgattggacagttttcatatagtgaagaaagggaaagtggggaaaacaagtctgagtatcacatgtttacacattcttgcagtaaaatgtcatcagtatctaacaaaccagtacttgttcagatcaataacaatgatcaaatggaggagtcatcattagaaagaaaaaaggaaaacagtctgcttaagtcaagtgcaataagtgctggtgttatagaaattacaagtcagaagatgttagagatgtcacataataatggtttgccatcaactatatcaaataactcaattgtggaggaagatgtagttgattgtgtggtattggacaacaaaactggtatcaagaacttcaaaacttatggtaacaccaatgataggttcagtcctatttcagcagatgcaacccatttttcaagtaataactctggaactgacaaaaatatttctgaggctccagcttcagaagcatcctctactgtcactgcaagaattgacagactaattaatgaatttgctcagtgtggtttaacaaaacttccaaaaaatgaaaagaagattttgtcatctgttgccagcaaaaagaagaaaaaatctcgacagcaagcaataaattccaggtatcaagatggacagcttgcaaccaaaggaattcttaataagaatgagagaataaacacaaaaggtagaattacaaaggaaatgatagtgcaagattcagatagtccccttaaaggagggatactttgtgaggaagacctccagaaaagtgatactgtaattgaatcaaatactttttgttccaaaagtaatctcaattccacgatttccaagaatttccatagaaataaattaaatactactcaaaattccaaggttcaaggacttttaaccaaaagaaaatctagatcactaaataaaataagcttaggagcacctaaaaaaagagaaatcggtcaaagagataaagtgtttcctcacaatgaatctaaatattgcaaaagtacttttgaaaacaaaagtttatttcatgtatttaacatccttgagcaaaaacccaaagatttttatgcaccgcaatctcaagcagaagtggcatctgggtatttgagaggaatggcaaagaagagtttagtttcaaaagttactgattcacacataactttaaaaagccagaaaaaacgtaaaggggataaagtgaaagcaagtgctattttaagtaaacaacatgctacaaccagggcaaattctttagcttctttgaaaaaacctgattttcctgaggctattgctcatcattcaattcaaaattatatacagagttggttgcagaacataaatccatatccaactttaaagcctataaaatcagctccagtatgtagaaatgaaacgagtgtggtaaattgtagcaataatagtttttcagggaatgatccccatacaaattctggaaaaataagtaattttgttatggaaagtaataagcacataactaaaattgccggtttgacaggagataatctatgtaaagagggagataagtcttttattgccaatgacactggtgaagaagatctccatgagacacaggttggatctctgaatgatgcttatttggttcccctgcatgaacactgtactttgtcacagtcagctattaatgatcataatactaaaagtcatatagctgctgaaaaatcaggaccagagaaaaaacttgtttaccaggaaataaacctagctagaaaaaggcaaagtgtagaggctgccattcaagtagatcctatagaagaggaaactccaaaagacctcttaccagtcctgatgcttcaccaattgcaagcttcagttcctggtattcacaagactcagaatggagttgttcaaatgccaggttcacttgcaggtgttccctttcattctgcaatatgtaattcatccactaatctccttctagcttggctcttggtgctaaacctaaagggaagtatgaatagcttctgtcaagttgatgctcacaaggctaccaacaaatcttcagaaacacttgcattgttggagattctaaagcacatagctatcacagaggaagctgatgacttgaaagctgctgttgccaatttagtggagtcaactacaagccactttggactcagtgagaaagaacaagacatggttccaatagatctttctgcaaattgttccacggtcaacattcagagtgttcctaagtgcagtgaaaatgaaagaacacaaggaatctcctctttggatggaggttgctctgccagtgaggcatgtgcccctgaagtctgtgttttggaagtgacttgctctccatgtgagatgtgcactgtaaataaggcttattctccaaaagagacatgtaaccccagtgacactttttttcctagtgatggttatggtgtggatcagacttctatgaataaggcttgtttcctaggagaggtctgttcacttactgatactgtgttttctgataaggcttgtgctcaaaaggagaaccatacctatgagggagcttgcccaattgatgagacctacgttcctgtcaatgtctgcaataccattgactttttaaactccaaagaaaacacatatactgataacttggattcaactgaagagttagaaagaggtgatgacattcagaaagatctaaatattttgacagaccctgaatataaaaatggatttaatacattggtgtcacatcaaaatgtcagtaatttaagctcctgtggcctttgcctaagtgaaaaagaagcagaacttgataagaaacatagttctctagatgattttgaaaattgttcactaaggaagtttcaggatgaaaatgcatatacttcctttgatatggaagaaccacggacttctgaagaaccaggctcaataaccaacagcatgacatcaagtgaaagaaacatttcagaattggaatcttttgaagaattagaaaaccatgacactgatatctttaatacagtggtaaatggaggagagcaagccactgaagaattaatccaagaagaggtagaggctagtaaaactttagaattgatagacatctctagtaagaatattatggaagaaaaaagaatgaacggtataatttatgaaataatcagtaagaggctggcaacaccaccatctttagatttttgctatgattctaagcaaaatagtgaaaaggagaccaatgaaggagaaactaagatggtaaaaatgatggtgaaaactatggaaactggaagttattcagagtcctctcctgatttaaaaaaatgcatcaaaagtccagtgacttctgattggtcagactatcggcctgacagtgacagtgagcagccatataaaacatccagtgatgatcccaatgacagtggcgaacttacccaagagaaagaatataacataggatttgttaaaagggcaatagaaaaactgtacggtaaagcagatattatcaaaccatctttttttcctgggtctacccgcaaatctcaggtttgtccttataattctgtggaatttcagtgttccaggaaagcaagtctttatgattctgaagggcagtcatttggctcttctgaacaggtatctagtagttcatctatgttgcaggaattccaggaggaaagacaagataagtgtgatgttagtgctgtgagggacaattattgtaggggtgacattgtagaacctggtacaaaacaaaatgatgatagcagaatcctcacagacatagaggaaggagtactgattgacaaaggcaaatggcttctgaaagaaaatcatttgctaaggatgtcatctgaaaatcctggcatgtgtggcaatgcagacaccacatcagtggacaccctacttgataataacagcagtgaggtaccatattcacattttggtaatttggccccaggcccaacgatggatgaactctcctcttcagaactcgaggaactgactcaaccccttgaactaaaatgcaattactttaacatgcctcatggtagtgactcagaaccttttcatgaggacttgctggatgttcgcaatgaaacctgtgccaaggaaagaatagcaaatcatcatacagaggagaagggtagtcatcagtcagaaagagtatgcacatctgtcactcattcctttatttctgctggtaacaaagtctaccctgtctctgatgatgctattaaaaaccaaccattgcctggcagtaatatgattcatggtacacttcaggaagctgactctttggataaactgtatgctctttgtggtcaacattgcccaatactaactgttattatccaacccatgaatgaggaagaccgaggatttgcatatcgcaaagaatctgatattgaaaatttcttgggtttttatttatggatgaaaatacacccatatttacttcagacagacaaaaatgtgttcagggaagagaacaataaagcaagtatgagacaaaatcttattgataatgccattggtgatatatttgatcagttttatttcagtaacacatttgacttgatgggtaaaagaagaaaacaaaaaagaattaacttcttggggttagaggaagaaggtaatttaaagaaatttcaaccagatttgaaggaaaggttttgtatgaatttcttgcacacatcattgttagttgtgggtaatgtggattcaaatacacaagacctcagcggtcagacaaatgaaatctttaaagcagtcgatgagaataacaacttattaaataacagattccagggctcaagaacaaatctcaaccaagtagtaagagaaaatatcaactgtcattacttctttgaaatgcttggtcaagcttgcctcttagatatttgccaagttgagacctccttaaatattagcaacagaaatattttagaactttgtatgtttgagggtgaaaatcttttcatttgggaagaggaagacatattaaatttaactgatcttgaaagcagtagagaacaagaagatttataatttcaatatcagcacactcattctttgtcaattcattttttcccatgagatgaagcacatgtgacgaatacggactagataacctctaagaattttccacttcttcaaaatgaacttactctagaaagcttacccttggataaccagtttgactttcataatgtctctgttttttgtttttccaacaattacagactcaggttctcttattttggaagtttctatctggttttgttctgaacttacattttttttttttttggtatctatgattttttttgctcagggcatcaaaatgtgctaaggacaagaattatatcctttttaaaaaatgttgttagcttggtgtaaaatgtatattgactgtattggtgaataaattgaatagacataacctcaaagtacttcacttattctttttaactactgatttgataaaaagtatgattataagatatccacgacaatctcatagtttctt

SEQ ID NO: 14533 - DNA, 4953 bp, Homo sapiens
ggtttccggagctgcggcggcgcagactgggagggggagccgggggttccgacgtcgcagccgagggaacaagccccaaccggatcctggacaggcaccccggcttggcgctgtctctccccctcggctcggagaggcccttcggcctgagggagcctcgccgcccgtccccggcacacgcgcagccccggcctctcggcctctgccggagaaacaggatggcccaatggaatcagctacagcagcttgacacacggtacctggagcagctccatcagctctacagtgacagcttcccaatggagctgcggcagtttctggccccttggattgagagtcaagattgggcatatgcggccagcaaagaatcacatgccactttggtgtttcataatctcctgggagagattgaccagcagtatagccgcttcctgcaagagtcgaatgttctctatcagcacaatctacgaagaatcaagcagtttcttcagagcaggtatcttgagaagccaatggagattgcccggattgtggcccggtgcctgtgggaagaatcacgccttctacagactgcagccactgcggcccagcaagggggccaggccaaccaccccacagcagccgtggtgacggagaagcagcagatgctggagcagcaccttcaggatgtccggaagagagtgcaggatctagaacagaaaatgaaagtggtagagaatctccaggatgactttgatttcaactataaaaccctcaagagtcaaggagacatgcaagatctgaatggaaacaaccagtcagtgaccaggcagaagatgcagcagctggaacagatgctcactgcgctggaccagatgcggagaagcatcgtgagtgagctggcggggcttttgtcagcgatggagtacgtgcagaaaactctcacggacgaggagctggctgactggaagaggcggcaacagattgcctgcattggaggcccgcccaacatctgcctagatcggctagaaaactggataacgtcattagcagaatctcaacttcagacccgtcaacaaattaagaaactggaggagttgcagcaaaaagtttcctacaaaggggaccccattgtacagcaccggccgatgctggaggagagaatcgtggagctgtttagaaacttaatgaaaagtgcctttgtggtggagcggcagccctgcatgcccatgcatcctgaccggcccctcgtcatcaagaccggcgtccagttcactactaaagtcaggttgctggtcaaattccctgagttgaattatcagcttaaaattaaagtgtgcattgacaaagactctggggacgttgcagctctcagaggatcccggaaatttaacattctgggcacaaacacaaaagtgatgaacatggaagaatccaacaacggcagcctctctgcagaattcaaacacttgaccctgagggagcagagatgtgggaatgggggccgagccaattgtgatgcttccctgattgtgactgaggagctgcacctgatcacctttgagaccgaggtgtatcaccaaggcctcaagattgacctagagacccactccttgccagttgtggtgatctccaacatctgtcagatgccaaatgcctgggcgtccatcctgtggtacaacatgctgaccaacaatcccaagaatgtaaacttttttaccaagcccccaattggaacctgggatcaagtggccgaggtcctgagctggcagttctcctccaccaccaagcgaggactgagcatcgagcagctgactacactggcagagaaactcttgggacctggtgtgaattattcagggtgtcagatcacatgggctaaattttgcaaagaaaacatggctggcaagggcttctccttctgggtctggctggacaatatcattgaccttgtgaaaaagtacatcctggccctttggaacgaagggtacatcatgggctttatcagtaaggagcgggagcgggccatcttgagcactaagcctccaggcaccttcctgctaagattcagtgaaagcagcaaagaaggaggcgtcactttcacttgggtggagaaggacatcagcggtaagacccagatccagtccgtggaaccatacacaaagcagcagctgaacaacatgtcatttgctgaaatcatcatgggctataagatcatggatgctaccaatatcctggtgtctccactggtctatctctatcctgacattcccaaggaggaggcattcggaaagtattgtcggccagagagccaggagcatcctgaagctgacccaggcgctgccccatacctgaagaccaagtttatctgtgtgacaccaacgacctgcagcaataccattgacctgccgatgtccccccgcactttagattcattgatgcagtttggaaataatggtgaaggtgctgaaccctcagcaggagggcagtttgagtccctcacctttgacatggagttgacctcggagtgcgctacctcccccatgtgaggagctgagaacggaagctgcagaaagatacgactgaggcgcctacctgcattctgccacccctcacacagccaaaccccagatcatctgaaactactaactttgtggttccagattttttttaatctcctacttctgctatctttgagcaatctgggcacttttaaaaatagagaaatgagtgaatgtgggtgatctgcttttatctaaatgcaaataaggatgtgttctctgagacccatgatcaggggatgtggcggggggtggctagagggagaaaaaggaaatgtcttgtgttgttttgttcccctgccctcctttctcagcagctttttgttattgttgttgttgttcttagacaagtgcctcctggtgcctgcggcatccttctgcctgtttctgtaagcaaatgccacaggccacctatagctacatactcctggcattgcactttttaaccttgctgacatccaaatagaagataggactatctaagccctaggtttctttttaaattaagaaataataacaattaaagggcaaaaaacactgtatcagcatagcctttctgtatttaagaaacttaagcagccgggcatggtggctcacgcctgtaatcccagcactttgggaggccgaggcggatcataaggtcaggagatcaagaccatcctggctaacacggtgaaaccccgtctctactaaaagtacaaaaaattagctgggtgtggtggtgggcgcctgtagtcccagctactcgggaggctgaggcaggagaatcgcttgaacctgagaggcggaggttgcagtgagccaaaattgcaccactgcacactgcactccatcctgggcgacagtctgagactctgtctcaaaaaaaaaaaaaaaaaaaagaaacttcagttaacagcctccttggtgctttaagcattcagcttccttcaggctggtaatttatataatccctgaaacgggcttcaggtcaaacccttaagacatctgaagctgcaacctggcctttggtgttgaaataggaaggtttaaggagaatctaagcattttagacttttttttataaatagacttattttcctttgtaatgtattggccttttagtgagtaaggctgggcagagggtgcttacaaccttgactccctttctccctggacttgatctgctgtttcagaggctaggttgtttctgtgggtgccttatcagggctgggatacttctgattctggcttccttcctgccccaccctcccgaccccagtccccctgatcctgctagaggcatgtctccttgcgtgtctaaaggtccctcatcctgtttgttttaggaatcctggtctcaggacctcatggaagaagagggggagagagttacaggttggacatgatgcacactatggggccccagcgacgtgtctggttgagctcagggaatatggttcttagccagtttcttggtgatatccagtggcacttgtaatggcgtcttcattcagttcatgcagggcaaaggcttactgataaacttgagtctgccctcgtatgagggtgtatacctggcctccctctgaggctggtgactcctccctgctggggccccacaggtgaggcagaacagctagagggcctccccgcctgcccgccttggctggctagctcgcctctcctgtgcgtatgggaacacctagcacgtgctggatgggctgcctctgactcagaggcatggccggatttggcaactcaaaaccaccttgcctcagctgatcagagtttctgtggaattctgtttgttaaatcaaattagctggtctctgaattaagggggagacgaccttctctaagatgaacagggttcgccccagtcctcctgcctggagacagttgatgtgtcatgcagagctcttacttctccagcaacactcttcagtacataataagcttaactgataaacagaatatttagaaaggtgagacttgggcttaccattgggtttaaatcatagggacctagggcgagggttcagggcttctctggagcagatattgtcaagttcatggccttaggtagcatgtatctggtcttaactctgattgtagcaaaagttctgagaggagctgagccctgttgtggcccattaaagaacagggtcctcaggccctgcccgcttcctgtccactgccccctccccatccccagcccagccgagggaatcccgtgggttgcttacctacctataaggtggtttataagctgctgtcctggccactgcattcaaattccaatgtgtacttcatagtgtaaaaatttatattattgtgaggttttttgtcttttttttttttttttttttttggtatattgctgtatctactttaacttccagaaataaacgttatataggaaccgtaaaaa

SEQ ID NO: 14534 - DNA, 4978 bp, Homo sapiens
ggtttccggagctgcggcggcgcagactgggagggggagccgggggttccgacgtcgcagccgagggaacaagccccaaccggatcctggacaggcaccccggcttggcgctgtctctccccctcggctcggagaggcccttcggcctgagggagcctcgccgcccgtccccggcacacgcgcagccccggcctctcggcctctgccggagaaacagttgggacccctgattttagcaggatggcccaatggaatcagctacagcagcttgacacacggtacctggagcagctccatcagctctacagtgacagcttcccaatggagctgcggcagtttctggccccttggattgagagtcaagattgggcatatgcggccagcaaagaatcacatgccactttggtgtttcataatctcctgggagagattgaccagcagtatagccgcttcctgcaagagtcgaatgttctctatcagcacaatctacgaagaatcaagcagtttcttcagagcaggtatcttgagaagccaatggagattgcccggattgtggcccggtgcctgtgggaagaatcacgccttctacagactgcagccactgcggcccagcaagggggccaggccaaccaccccacagcagccgtggtgacggagaagcagcagatgctggagcagcaccttcaggatgtccggaagagagtgcaggatctagaacagaaaatgaaagtggtagagaatctccaggatgactttgatttcaactataaaaccctcaagagtcaaggagacatgcaagatctgaatggaaacaaccagtcagtgaccaggcagaagatgcagcagctggaacagatgctcactgcgctggaccagatgcggagaagcatcgtgagtgagctggcggggcttttgtcagcgatggagtacgtgcagaaaactctcacggacgaggagctggctgactggaagaggcggcaacagattgcctgcattggaggcccgcccaacatctgcctagatcggctagaaaactggataacgtcattagcagaatctcaacttcagacccgtcaacaaattaagaaactggaggagttgcagcaaaaagtttcctacaaaggggaccccattgtacagcaccggccgatgctggaggagagaatcgtggagctgtttagaaacttaatgaaaagtgcctttgtggtggagcggcagccctgcatgcccatgcatcctgaccggcccctcgtcatcaagaccggcgtccagttcactactaaagtcaggttgctggtcaaattccctgagttgaattatcagcttaaaattaaagtgtgcattgacaaagactctggggacgttgcagctctcagaggatcccggaaatttaacattctgggcacaaacacaaaagtgatgaacatggaagaatccaacaacggcagcctctctgcagaattcaaacacttgaccctgagggagcagagatgtgggaatgggggccgagccaattgtgatgcttccctgattgtgactgaggagctgcacctgatcacctttgagaccgaggtgtatcaccaaggcctcaagattgacctagagacccactccttgccagttgtggtgatctccaacatctgtcagatgccaaatgcctgggcgtccatcctgtggtacaacatgctgaccaacaatcccaagaatgtaaacttttttaccaagcccccaattggaacctgggatcaagtggccgaggtcctgagctggcagttctcctccaccaccaagcgaggactgagcatcgagcagctgactacactggcagagaaactcttgggacctggtgtgaattattcagggtgtcagatcacatgggctaaattttgcaaagaaaacatggctggcaagggcttctccttctgggtctggctggacaatatcattgaccttgtgaaaaagtacatcctggccctttggaacgaagggtacatcatgggctttatcagtaaggagcgggagcgggccatcttgagcactaagcctccaggcaccttcctgctaagattcagtgaaagcagcaaagaaggaggcgtcactttcacttgggtggagaaggacatcagcggtaagacccagatccagtccgtggaaccatacacaaagcagcagctgaacaacatgtcatttgctgaaatcatcatgggctataagatcatggatgctaccaatatcctggtgtctccactggtctatctctatcctgacattcccaaggaggaggcattcggaaagtattgtcggccagagagccaggagcatcctgaagctgacccaggtagcgctgccccatacctgaagaccaagtttatctgtgtgacaccaacgacctgcagcaataccattgacctgccgatgtccccccgcactttagattcattgatgcagtttggaaataatggtgaaggtgctgaaccctcagcaggagggcagtttgagtccctcacctttgacatggagttgacctcggagtgcgctacctcccccatgtgaggagctgagaacggaagctgcagaaagatacgactgaggcgcctacctgcattctgccacccctcacacagccaaaccccagatcatctgaaactactaactttgtggttccagattttttttaatctcctacttctgctatctttgagcaatctgggcacttttaaaaatagagaaatgagtgaatgtgggtgatctgcttttatctaaatgcaaataaggatgtgttctctgagacccatgatcaggggatgtggcggggggtggctagagggagaaaaaggaaatgtcttgtgttgttttgttcccctgccctcctttctcagcagctttttgttattgttgttgttgttcttagacaagtgcctcctggtgcctgcggcatccttctgcctgtttctgtaagcaaatgccacaggccacctatagctacatactcctggcattgcactttttaaccttgctgacatccaaatagaagataggactatctaagccctaggtttctttttaaattaagaaataataacaattaaagggcaaaaaacactgtatcagcatagcctttctgtatttaagaaacttaagcagccgggcatggtggctcacgcctgtaatcccagcactttgggaggccgaggcggatcataaggtcaggagatcaagaccatcctggctaacacggtgaaaccccgtctctactaaaagtacaaaaaattagctgggtgtggtggtgggcgcctgtagtcccagctactcgggaggctgaggcaggagaatcgcttgaacctgagaggcggaggttgcagtgagccaaaattgcaccactgcacactgcactccatcctgggcgacagtctgagactctgtctcaaaaaaaaaaaaaaaaaaaagaaacttcagttaacagcctccttggtgctttaagcattcagcttccttcaggctggtaatttatataatccctgaaacgggcttcaggtcaaacccttaagacatctgaagctgcaacctggcctttggtgttgaaataggaaggtttaaggagaatctaagcattttagacttttttttataaatagacttattttcctttgtaatgtattggccttttagtgagtaaggctgggcagagggtgcttacaaccttgactccctttctccctggacttgatctgctgtttcagaggctaggttgtttctgtgggtgccttatcagggctgggatacttctgattctggcttccttcctgccccaccctcccgaccccagtccccctgatcctgctagaggcatgtctccttgcgtgtctaaaggtccctcatcctgtttgttttaggaatcctggtctcaggacctcatggaagaagagggggagagagttacaggttggacatgatgcacactatggggccccagcgacgtgtctggttgagctcagggaatatggttcttagccagtttcttggtgatatccagtggcacttgtaatggcgtcttcattcagttcatgcagggcaaaggcttactgataaacttgagtctgccctcgtatgagggtgtatacctggcctccctctgaggctggtgactcctccctgctggggccccacaggtgaggcagaacagctagagggcctccccgcctgcccgccttggctggctagctcgcctctcctgtgcgtatgggaacacctagcacgtgctggatgggctgcctctgactcagaggcatggccggatttggcaactcaaaaccaccttgcctcagctgatcagagtttctgtggaattctgtttgttaaatcaaattagctggtctctgaattaagggggagacgaccttctctaagatgaacagggttcgccccagtcctcctgcctggagacagttgatgtgtcatgcagagctcttacttctccagcaacactcttcagtacataataagcttaactgataaacagaatatttagaaaggtgagacttgggcttaccattgggtttaaatcatagggacctagggcgagggttcagggcttctctggagcagatattgtcaagttcatggccttaggtagcatgtatctggtcttaactctgattgtagcaaaagttctgagaggagctgagccctgttgtggcccattaaagaacagggtcctcaggccctgcccgcttcctgtccactgccccctccccatccccagcccagccgagggaatcccgtgggttgcttacctacctataaggtggtttataagctgctgtcctggccactgcattcaaattccaatgtgtacttcatagtgtaaaaatttatattattgtgaggttttttgtcttttttttttttttttttttttggtatattgctgtatctactttaacttccagaaataaacgttatataggaaccgtaaaaa

SEQ ID NO: 14535 - DNA, 2279 bp, Homo sapiens
tgcggagcttcgtgatgcacgccccgatgcctgcggggctataaaaacgctcgcaagcgccaagtctcctcaggagccgccggcaagggggcaacgaggaagctcttaagagcgcggccggaaagcagttgagttacagacatcctgccaaaatgatttcttcaaagcccagacttgtcgtaccctatggcctcaagactctgctcgagggaattagcagagctgttctcaaaaccaacccatcaaacatcaaccagtttgcagcagcttattttcaagaacttactatgtatagagtagagaaatggtcagaaggaacgacaccacagaagaaattagaatgtttaaaagaaccaggaaaaacatctgtagaatctaaagtacctacccagatggaaaaatctacagacacagacgaggacaatgtaaccagaacagaatatagtgacaaaaccacccagtttccatcagtttatgctgtgccaggcactgagcaaacggaagcagttggtggtctttcttccaaaccagccacccctaagactactaccccaccctcatcaccacctccaacagctgtctcaccagagtttgcctacgtcccagctgacccagctcagcttgctgctcagatgttaggtaaagtttcatctattcattctgatcaatctgatgtgttaatggtggatgtggcaaccagtatgcctgttgttatcaaggaggtgccaagctcagaggctgctgaagatgtcatggtggctgctcctcttgtgtgttctggaaaggtgctagaagtgcaggttgtgaaccaaacatctgtccatgtagatttgggttctcaacctaaagaaaatgaggctgaaccatcaacggcttcctcagtccccttgcaggatgaacaagaacctcctgcttatgatcaagctcctgaggtcactttgcaggctgatattgaggttatgtcaactgttcatatatcatctgtctataacgatgtgcctgtgactgaaggagttgtttatatcgagcaactgccagaacaaatagttatcccttttactgatcaagttgcttgtcttaaagaaaatgagcagtcaaaagaaaatgagcagtcaccacgagttagtcccaaatctgtagtagaaaagaccacctctggcatgtctaaaaaatctgtagagtctgtaaaacttgcacagttggaggagaatgcaaaatattcctcagtatatatggaggcagaagcaacagctctgctctctgacacatctttgaaaggtcagcctgaggtacctgcacaactcctggatgcagaaggtgctatcaaaataggctctgaaaaatctctgcaccttgaagtggagatcacttcaatagtctctgacaatactgggcaggaggagtctggggaaaactctgtaccccaggagatggaaggcaaacctgtgctctctggggaagctgcagaagcagtgcactcaggtacatctgtaaagtcatctagtggccccttccctcctgctccagaaggccttactgcaccagaaattgaaccagaaggggaatcaacagctgaataaggtttgatgaagccagcaatggcaacaagtgaacgaggacaaccaccaccatgttctaacatgtggaccctttattgtctaactgataagaatcaacaaggtcacccatcaccgccacctgcacctgggccttttccccaagcaaccctctatttacctaatcctaaggatccacagtttcagcagcatccaccaaaagtcacttttccaacttatgtgatgggcgacaccaagaagaccagtgccccaccttttatcttagtaggctcaaatgttcaggaagcacagggatggaaacctcttcctggacatgctgtcgtttcacagtcagatgtcttgagatatgttgcaatgcaagtgcccattgctgttcctgcagatgagaaataccagaaacataccctaagtccccagaatgctaatcctccaagtggacaagatgtccccaggccaaaaagccctgttttcctttctgttgctttcccagtagaagatgtagctaaaaaaagttcaggatctggtgacaaatgtgctccctttggaagttacggtattgctggggaggtaaccgtgactactgctcacaaacgtcgcaaagcagaaactgaaaactgatccagaaatgacgctgtctgggtcaacatttcagggaggagtctgccaccagtgtaatgtatcaataaacttcatgcaagcata

SEQ ID NO: 14536 - DNA, 2333 bp, Homo sapiens
tgcggagcttcgtgatgcacgccccgatgcctgcggggctataaaaacgctcgcaagcgccaagtctcctcaggagccgccggcaagggggcaacgaggaagctcttaagagcgcggccggaaagcagttgagttacagacatcctgccaaaatgatttcttcaaagcccagacttgtcgtaccctatggcctcaagactctgctcgagggaattagcagagctgttctcaaaaccaacccatcaaacatcaaccagtttgcagcagcttattttcaagaacttactatgtatagagggaatactactatggatataaaagatctggttaaacaatttcatcagattaaagtagagaaatggtcagaaggaacgacaccacagaagaaattagaatgtttaaaagaaccaggaaaaacatctgtagaatctaaagtacctacccagatggaaaaatctacagacacagacgaggacaatgtaaccagaacagaatatagtgacaaaaccacccagtttccatcagtttatgctgtgccaggcactgagcaaacggaagcagttggtggtctttcttccaaaccagccacccctaagactactaccccaccctcatcaccacctccaacagctgtctcaccagagtttgcctacgtcccagctgacccagctcagcttgctgctcagatgttaggtaaagtttcatctattcattctgatcaatctgatgtgttaatggtggatgtggcaaccagtatgcctgttgttatcaaggaggtgccaagctcagaggctgctgaagatgtcatggtggctgctcctcttgtgtgttctggaaaggtgctagaagtgcaggttgtgaaccaaacatctgtccatgtagatttgggttctcaacctaaagaaaatgaggctgaaccatcaacggcttcctcagtccccttgcaggatgaacaagaacctcctgcttatgatcaagctcctgaggtcactttgcaggctgatattgaggttatgtcaactgttcatatatcatctgtctataacgatgtgcctgtgactgaaggagttgtttatatcgagcaactgccagaacaaatagttatcccttttactgatcaagttgcttgtcttaaagaaaatgagcagtcaaaagaaaatgagcagtcaccacgagttagtcccaaatctgtagtagaaaagaccacctctggcatgtctaaaaaatctgtagagtctgtaaaacttgcacagttggaggagaatgcaaaatattcctcagtatatatggaggcagaagcaacagctctgctctctgacacatctttgaaaggtcagcctgaggtacctgcacaactcctggatgcagaaggtgctatcaaaataggctctgaaaaatctctgcaccttgaagtggagatcacttcaatagtctctgacaatactgggcaggaggagtctggggaaaactctgtaccccaggagatggaaggcaaacctgtgctctctggggaagctgcagaagcagtgcactcaggtacatctgtaaagtcatctagtggccccttccctcctgctccagaaggccttactgcaccagaaattgaaccagaaggggaatcaacagctgaataaggtttgatgaagccagcaatggcaacaagtgaacgaggacaaccaccaccatgttctaacatgtggaccctttattgtctaactgataagaatcaacaaggtcacccatcaccgccacctgcacctgggccttttccccaagcaaccctctatttacctaatcctaaggatccacagtttcagcagcatccaccaaaagtcacttttccaacttatgtgatgggcgacaccaagaagaccagtgccccaccttttatcttagtaggctcaaatgttcaggaagcacagggatggaaacctcttcctggacatgctgtcgtttcacagtcagatgtcttgagatatgttgcaatgcaagtgcccattgctgttcctgcagatgagaaataccagaaacataccctaagtccccagaatgctaatcctccaagtggacaagatgtccccaggccaaaaagccctgttttcctttctgttgctttcccagtagaagatgtagctaaaaaaagttcaggatctggtgacaaatgtgctccctttggaagttacggtattgctggggaggtaaccgtgactactgctcacaaacgtcgcaaagcagaaactgaaaactgatccagaaatgacgctgtctgggtcaacatttcagggaggagtctgccaccagtgtaatgtatcaataaacttcatgcaagcata

SEQ ID NO: 14537 - DNA, 4222 bp, Homo sapiens
agtcgcggcgatcttctcctcgcttctggagtgttatcgtcaccatgtccctaatggtctcggctggccggggcctgggggccgtgtggtccccaacccacgtgcaggtgacggtgctgcaggcgcggggcctgcgggccaagggccccgggggcacgagcgacgcgtacgcggtgatccaggtgggcaaggagaagtacgccacctccgtgtcggagcgcagcctgggcgcgcccgtgtggcgcgaggaggccaccttcgagctgccatcgctgctgtcctccggacccgcggccgccgccaccctgcagctcaccgtgctgcaccgcgcgctgctcggcctcgacaagttcctgggccgcgccgaggtggacctgcgggatctgcaccgcgaccagggccgcaggaagacgcagtggtataagttgaaatccaaaccaggaaagaaggacaaggagcgaggagaaattgaggttgacatccagtttatgagaaacaacatgactgccagcatgtttgacctttctatgaaagacaagtctcggaatccatttggaaagctgaaggacaagatcaaggggaagaataaggacagtgggtcagacaccgcctccgccatcatccctagcacgacaccttcggtcgacagtgatgatgagtctgtggttaaagacaagaaaaagaaatcaaagatcaagaccttactttccaagtcaaatttgcagaagacgcctctttcccagtccatgtctgtcctgccgacttcaaagccagaaaaagtgctgcttcgtcccggagactttcagtcccagtgggatgaagatgacaatgaggatgagtcctcctcggcctcggatgtcatgtctcacaagagaacagcgagtacggatcttaagcaactgaaccaggtcaactttacccttcccaagaaggaaggactttcctttcttggtggccttcggtctaagaatgatgtcctttcccgctctaatgtctgcatcaatgggaaccatgtttacctggagcagccagaagccaagggtgagatcaaggatagcagcccgtcctcctccccatcccccaagggcttcagaaagaagcatttgttctcttctacagagaacctggcggctgggtcttggaaggagcctgctgaaggaggtgggctgtcttctgacaggcagctctccgaatcttccaccaaggactccttgaagtctatgaccctgccgtcctaccgacctgccccactggtcagtggggacctcagggaaaacatggcccccgcaaactcagaggccacaaaagaagctaaggagagcaagaagccagagagcaggaggtcctctttgctgtctctgatgacggggaagaaggatgtggctaagggcagtgaaggtgaaaaccctctcacggtcccagggagggagaaggaaggcatgctgatgggggttaagccgggggaggacgcatcggggcctgctgaagaccttgtgagaagatctgagaaagatactgcagctgttgtctccagacagggcagctccctgaacctctttgaagatgtgcagatcacagaaccagaagctgagccagagtccaagtctgaaccgagacctccaatttcctctccgagggctccccagaccagagctgtcaagccccgacttcatcctgtgaagccaatgaatgccacggccaccaaggttgctaactgcagcttgggaactgccaccatcatcagtgagaacttgaacaatgaggtcatgatgaagaaatacagcccctcggaccctgcatttgcatatgcgcagctgacccacgatgagctgattcagctggtcctcaaacagaaggaaacgataagcaagaaggagttccaggtccgcgagctggaagactacattgacaacctgcttgtcagggtcatggaagaaacccccaatatcctccgcatcccgactcaggttggcaaaaaagcaggaaagatgtaaatcagcagaaaaaaaacaccgagacgtttctgtgacttcactttcacctgctccaggggtcaaggacttgccttgcctgataaccagccagcaggctccgaatcaccatctccctcacatgttatccggcaagagtgaattctaccaatggaagccaggttaatgattacaattaatcttttactgtacattcccaaggctttagttttaaatgccactgtgcctttaacaaggttgtaaatattttatgcccaccagagatgtggtcataagatctgatcctgagccagagattcagatggcacaggaagtattcatgtattttaacactggggttttctttctttcatactgagattttttttcagtatgtatcctccagctcttaaagcttacctgagaaagctttaaatgagaaaaggaccatgcgattggtgctgtgttacatacacatactttcttggcttctgagtagctcaggtgtggcttttggctgcagatgttaaattttgataccatgtaaacctacccagcttctcagacttgggtcttgttttttgatgggaacagaggtgtttagagaaagcctctgagtatgcctttcagattttgaacaagcggccttttctaaacatcgacttctactactctctagccttaaaataccttctgcttagatccagggcccttctactggagataggaaaagtagaattcaggaattaaaagaattactctttattcaatttgaggaacttggtgaaagcccctcctcttatgacagccaggttcctgctggctagaccagcctattcagcgctttgctaggggattgggtggtccacgcactcgctaatacagttctccaggtgtggaatgatgtcaatacgattgcttggccttttccccctgtgcctttgctcggtgctctggtttcctcagcaacactccttgtaaggggcagagacagggtccaccaactccccaagatgaagaagccccttcaggccagtcgtggtggctcatgcctgtaatcccagcactttgcaaggccgaggagggtggatcacttgaggtcaggagttcgagaccagcctgaccaacatggcgaaaccccatctctactaaaaatacaaaaattagcttggcatggtggtgcgtgcctgtaatcccagctactcgggaggctggggcaggagaattgcttgaacttgggagatggaggctgcagcgagccaagatcgtgccactgcactccagcctgggcaagagtttttttaagactcttaaaaaaagagcctgggcaatttttttaagactctgtcttaaaaaaaactaaaaagaaaaaaagaagccccttcactctacaggggacaggagaccatggattggaccccaaagggattgaactgcatctgcatgtctgtcctttgaacactttctctccctgcccaaaaggaaacccaaattatttgtgggatactggggaaattgtagtgaagggcttaatgtagttaataaaagttaaaagtcagtagaaaacaggtgcctcagccttcaaatggttgctttttttccattttccctcatgaatagactcaccagcattttacccccttgttataaaactgtgcagagcaagaagatgatacttatttttgaatttgtatttttaaaactagatttatagactttttttttttttaactagggcacttgcttccttcttagctaaaagcaccagctgagatttttcaggtaattttgttgttactcacttaagactggaattagaatgtttctggtatttctcatttttttccctggctatgatagaatctcatctaatcttgacatctctcctaggggaagaatatcacaggctaatagcgtggttgggggtgaagatgatagcagttattaaatcaggaatctcttttatgtatgtccttgttacattgaggttaagagacaaaatcattggcagtgcaatctctttccaggatttcgtttgctgtggcattggttatatcagagcactttaatctgaaggatgatactgtaacttgatttatctaattagcttttaattatctacagctattttattttatttaattctctcctacagtactgggaccactgtaaacttctcagatgacttgtatttttgtagtgctatgaaatttatttacatacttataaagaaaactgtatgttcacttgaa

SEQ ID NO: 14538 - DNA, 2662 bp, Homo sapiens
aagtaggcggagaaagcagaggaggaccggcgggccaagctttcctagcctgacagcagccatttcggaacgtacgtcccagccctctttagctacttagcgcctctgggcccgagaacacctgctccttggctcagtctggcgccaccggcatcacggaactgtacttcccagagacgtcacaccgggagacttccgattcccgctcttgagattggactctcacgtgcaggagccagtcctcgctgggctctagcgggcttctgatggaggagctactcctctgggaggacagaaattagcagcagcctctgtcaccatccaaagattacaacccatgaaaccattgaatttgtgccttgtatcagaaagcaaaggagaatgaaaaagcacagctaacattgcttgaggatctaggcgattaattctttagactgtcatcatgggtatccgaggactaatgagttttgtggaagatcatagtaatgaattcttcactgatttgaagttgcgggacacaaaaattgtcattgatggttatgctcttttccaccgtctttgcttcagttcaaacttggatctccggtatggaggggactatgattcttttgcagatgttgtacaaaaattctttgaatcactgtttgcttgtaatatatgcccatatgttgtattagatggaggatgtgacatttcagataaaaagcttacaactttaaaggatagagctagagagaagatccagatggcccattccctttctgttggtgggagtgggtacgtatgtcccttactcatccgggaagtattcatacaggttttgatcaagctgcgggtgtgttttgtccagtgcttttcagaagcagatcgggacattatgacacttgctaaccattggaattgccctgtgttatcatcagatagtgacttttgcatttttgacctgaaaactgggttttgcccattgaatagctttcagtggagaaatatgaacactattaagggcacacaaaactatatccctgccaaatgcttttcccttgatgcattctgccatcacttcagcaatatgaataaagctctactacctctctttgcggtgctatgtggaaatgaccatgttaatctacccatcatggagacattcttaagtaaagcgcgtcttcctcttggagctaccagttctaaagggaggagacaccaccgaatcctgggacttctgaattggttgtctcattttgccaaccctaccgaagcactagataatgttctgaaatacctcccaaaaaaggatcgagaaaatgttaaggaacttctctgctgttccatggaagaataccaacagtcccaggtgaagctacaggacttcttccagtgtggtacttatgtctgtccagatgccttgaatcttggtttaccagaatgggtattagtggctttagctaaaggccagctatctcctttcatcagtgatgctttggtcctaagacggaccattcttcccacacaggtggaaaacatgcagcaaccaaatgcccacagaatatctcagcccatcaggcaaatcatctatgggcttcttttaaatgcctcaccacatctggacaagacatcctggaatgcattgcctcctcagcctctagctttcagtgaagtggaaaggattaataaaaatatcagaacctcaatcattgatgcagtagaactggccaaggatcattctgacttaagcagattgactgagctctccttgaggaggcggcagatgcttctgttagaaaccctgaaggtgaaacagaccattctggagccaatccctacttcactgaagttgcccattgctgtcagttgctactggttgcagcacaccgagaccaaagcaaagctacatcatctacaatccttactgctcacaatgctagtggggcccttgattgccataatcaacagccctggtaaggaagagctgcaggaagatggtgctaagatgttgtatgcagagttccaaagagtgaaggcgcagacacggctgggcacaagactggacttagacacagctcacatcttctgtcagtggcagtcctgtctccagatggggatgtatctcaaccagctgctgtccactcctctcccagagccagacctaactcgactgtacagtggaagcctggtgcacggactatgccagcaactgctagcatcgacctctgtagaaagtctcctgagcatatgtcctgaggctaagcaactttatgaatatctattcaatgccacaaggtcatatgcccccgctgaaatattcctaccaaaaggtagatcaaattcaaaaaaaaaaaggcagaagaaacagaataccagctgttctaagaacagagggagaaccactgcacacaccaagtgttggtatgagggaaacaaccggtttgggttgttaatggttgaaaacttagaggaacatagtgaggcctccaacattgaataaaactcagtttgcatcaaactagatgtatttaatataatccttacttaaaattcttccgttaccacccttgaaacaattagctttttctttaggactgacctgttaggggataaacatcacaataatctgaattccaagttattttgtattttgtttttaataaatacaacctgatttaag

SEQ ID NO: 14539 - DNA, 1583 bp, Homo sapiens
cgtgcgacagcgacccagccacccccggagcgcagtccccgaaggatgataatgaagataattcaaatgatgggacccagccatccaaaaggaggcgaatgggctcaggagatagttctaggagttgtgaaacttcaagtcaagatcttggttttagttactatccagcagaaaacttgatagagtacaaatggccacctgatgaaacaggagaatactatatgcttcaagaacaagtcagtgaatatttgggtgtgacctcctttaaaaggaaatatccagagcgacgagatttgtctcacaaggagaaactctacctgagagagctaaatgtcattactgaaactcagtgcactctaggcttaacagcattgcgcagtgatgaagtgattgatttaatgataaaagaatatccagccaaacatgctgagtattctgttattctacaagaaaaagaacgtcaacgaattacagaccattataaagagtattcccaaatgcaacaacagaatactcagaaagttgaagccagtaaagtgcctgagtatattaagaaagctgccaaaaaagcagcagaatttaatagcaacttaaaccgggaacgcatggaagaaagaagagcttattttgacttgcagacacatgttatccaggtacctcaagggaagtacaaagttttgccaacagagcgaacaaaggtcagttcttacccagtggctctcatccccggacagttccaggaatattataagaggtactcaccagatgagctgcggtatctgccattaaacacagccctgtatgagccccctctggatcctgagctccctgctctagacagtgatggtgattcagatgatggcgaagatggtcgaggtgatgagaaacggaaaaataaaggcacttcggacagctcctctggcaatgtatctgaaggggaaagccctcctgacagccaggaggactctttccagggaagacagaaatcaaaagacaaagctgccactccaagaaaagatggtcccaaacgttctgtactgtccaagtcagttcctgggtacaagccaaaggtcattccaaatgctatatgtggaatttgtctgaagggtaaggagtccaacaagaaaggaaaggctgaatcacttatacactgctcccaatgtgagaatagtggccatccttcttgcctggatatgacaatggagcttgtttctatgattaagacctacccatggcagtgtatggaatgtaaaacatgcattatatgtggacaaccccaccatgaagaagaaatgatgttctgtgatatgtgtgacagaggttatcatactttttgtgtgggccttggtgctattccatcaggtcgctggatttgtgactgttgtcagcgggcccccccaacacccaggaaagtgggcagaagggggaaaaacagcaaagagggataaaatagtttttgactctaatactgtatatgcatttaagtggaatatttggtgccatttacaacattattttcatgccaataaaagattttttttgcaaaaaaaaaaaaaaaaaaaaaaaaaaaaaaaaaaaaaaaa

SEQ ID NO: 14540 - DNA, 1549 bp, Homo sapiens
cgtgcgacagcgacccagccacccccggagcgcagtccccgaaggatgataatgaagataattcaaatgatgggacccagccatccaaaaggaggcgaatgggctcaggagatagttctaggagttgtgaaacttcaagtcaagatcttggttttagttactatccagcagaaaacttgatagagtacaaatggccacctgatgaaacaggagaatactatatgcttcaagaacaagtcagtgaatatttgggtgtgacctcctttaaaaggaaatatccagatttagagcgacgagatttgtctcacaaggagaaactctacctgagagagctaaatgtcattactgaaactcagtgcactctaggcttaacagcattgcgcagtgatgaagtgattgatttaatgataaaagaatatccagccaaacatgctgagtattctgttattctacaagaaaaagaacgtcaacgaattacagaccattataaagagtattcccaaatgcaacaacagaatactcagaaagttgaagccagtaaagtgcctgagtatattaagaaagctgccaaaaaagcagcagaatttaatagcaacttaaaccgggaacgcatggaagaaagaagagcttattttgacttgcagacacatgttatccaggtacctcaagggaagtacaaagttttgccaacagagcgaacaaaggtcagttcttacccagtggctctcatccccggacagttccaggaatattataagaggtactcaccagatgagctgcggtatctgccattaaacacagccctgtatgagccccctctggatcctgagctccctgctctagacagtgatggtgattcagatgatggcgaagatggtcgaggtgatgagaaacggaaaaataaaggcacttcggacagctcctctggcaatgtatctgaaggggaaagccctcctgacagccaggaggactctttccagggaagacagaaatcaaaagacaaagctgccactccaagaaaagatggtcccaaacgttctgtactgtccaagtcagttcctgggtacaagccaaaggtcattccaaatgctatatgtggaatttgtctgaagggtaaggagtccaacaagaaaggaaaggctgaatcacttatacactgctcccaatgtgagaatagtggccatccttcttgcctggatatgacaatggagcttgtttctatgattaagacctacccatggcagtgtatggaatgtaaaacatgcattatatgtggacaaccccaccatgaagaagaaatgatgttctgtgatatgtgtgacagaggttatcatactttttgtgtgggccttggtgctattccatcaggtcgctggatttgtgactgttgtcagcgggcccccccaacacccaggaaagtgggcagaagggggaaaaacagcaaagagggataaaatagtttttgactctaatactgtatatgcatttaagtggaatatttggtgccatttacaacattattttcatgccaataaaagattttttttgc

SEQ ID NO: 14541 - DNA, 3389 bp, Homo sapiens
agagcggccgcggctcccccgcacctgcggccatggatgaggagcgcgccctctacatcgtccgggccggcgaagcaggggctatcgagcgggtcctgagggattacagcgacaagcatagggctactttcaaatttgaatcaacagatgaagataaaagaaagaaactctgtgaaggcatatttaaagtccttataaaggacatcccaacaacatgtcaagtgtcctgcctggaagtactccgcattctctccagagacaaaaaggttttagttcctgtgacaactaaggaaaatatgcagatactgctgcgactagccaagctaaatgagttagatgattctttggagaaagtatcagagttcccagttattgtggagtcattaaaatgtctgtgtaatatagtgttcaacagtcagatggcacagcagctcagcctggaacttaatcttgctgcaaagctctgtaacctcctgagaaagtgcaaggaccggaaatttatcaatgacattaagtgctttgacttgcgcttgctcttccttctgtcacttttgcacaccgacatcaggtcacaattgcgctatgagctccagggactaccgctgctaacgcagatcttggaaagtgcctttagcatcaagtggaccgatgagtatgaatcggccatagaccataatggacctcctctctcacctcaggagacagactgtgccattgaggccctcaaagctctcttcaatgtgacggtagacagttggaaggtgcataaagagagtgattctcatcagttccgtgtaatggcagctgtccttcgtcattgtttactaatcgtaggtccaactgaagacaaaacagaagagctacacagcaatgcagtcaaccttttaagcaatgttccagtctcttgtttggatgttctcatttgtccgttaacccatgaagaaacagcccaagaggcaacgactctagatgaactgcccagtaataaaacagctgagaaagaaacagttttgaaaaacaataccatggtatacaatggtatgaatatggaggccattcatgttttactgaattttatggagaagagaatagacaagggaagcagctatagagagggtctaactccagttctcagcttattaaccgaatgttcccgagcccatcgaaacatccgaaaatttctcaaagatcaggttttaccaccgttgagggatgtgacaaatcgacctgaagttggctcaactgtgagaaataagctggtgcgcctcatgacacatgttgaccttggagtcaagcaaattgctgctgaattcctttttgtcctttgcaaagagagagtggatagtctgctgaaatacactggctatgggaatgctgcaggactgttggcggccaggggcctcttggctggaggaagaggagataattggtactcagaggatgaggacacagacactgaagaatacaaaaatgcaaaaccaaacattaatcttatcactggtcatttagaggaaccaatgccaaaccccatagatgaaatgacagaagaacaaaaagaatatgaagccatgaaacttgtcaacatgcttgataaactttccaggagagcagatgtgaaggacctgcaccaggatggtggttagcaacagtggcccgtgccaaagcacttaccaaagtgatgatgactaagaccctgtcattaattccatgtgtcaatactgccctgtagtacacagagcagacaagaaagaagagcccttgaaaacaagggaatgatttttgagtcgttatcaagctaagtggcaagcgggaagctgaaactcgtatagttgaacattcttggaggcttatctcttccctggccagatgcctgatcagatgagaagcccgccatgatactgtcacagtgcctagaatgggctctttatccagtagacaccactgtactttttgatacgagggcagtcttaacttgtgttaaggcctgtgtgtagcattgaagagaggagttgcttaaaccaatgggactaaaacctgatgggacaataacgcctttggaggaagcactcaaccagtactctgtcatcgaagagaccagctctgacacagactaaaagcatcacctgctcaactctcaatattgctttatcagcatcttttctctgtagctccaggggaatcttttctctaaaacatttatgcccttgctttggctagaaacacattaactggtttactcattgagaatccagcatatttaagaggtgaccctgtgttttttgtgatattgaggcattcatacagagctgcagttagacggggttacgggggctaaaagcagaaaaaaaattccatttcatcgggatggaactgaaggattttattctataaagcggccctggttgaatctggcaattctttttgccaagatccctagcagaagatttagccatgtccttcccctcacttgtgtgagtggccccttctgaatctctccagcagccagaggcacgtgagaagcagaaagagctggtaaataaagccttgggcaagcgacttcttagatcagaactcaccaaatggaagcctagcagctgctccataaacctagccccattcttcatatcaattttgtataaatatatagaaacacacacacagcctcagacttacaaactgattatactctaaaagtttgtatgtcagttagctaaaacttcagaatacatttctccctataaagagttataaatgatggtttagttctcaggcagctacaaatgcctatttattccctaatgtacctgaacactagtaccatagaactgaaccaccatctgtatcagcgcatggggagtgtgcattctgaggtctaacccggggtgccaggaacacacacatcctccatcccagcatagagaatggggactccctgagtaatgggagttctttcatggcctctgcttggggtgggggagtcagcagcacccatttgtacatataggtcattcatacatcacattttaaattggggactgtgtgtgctggtgtgtgtgtgagttctacgtttctaccatatgtgatcagtttaatagtaactttatttatttaaaaaaaagaaacacaattagttactgttaaactgataaagggtgtttatttttacttttagaattggtcctatgaagaagtagaaagtgagtcatgcactagacagtgggcctagctcatcagtggctaaagttgaaaaggggttggtttcctgtatatatatgtatgtatatacacacgtacatacattcatatatatacatatatacataatgtgcttaaccactgccttttaaaactttaaattaaataaaacattggggttgattcaatttggc

SEQ ID NO: 14542 - DNA, 3916 bp, Homo sapiens
gcttggggccgccatcttggcaagaggcgaagcggcagcggttcctgtcaagggggcagcaggtccagagctgctggtgctcccgttccccagaccctacccctatccccagtggagccggagtgcgggcgcgccccaccaccgccctcaccatggtgctgttggcagcagcggtctgcacaaaagcaggaaaggctattgtttctcgacagtttgtggaaatgacccgaactcggattgagggcttattagcagcttttccaaagctcatgaacactggaaaacaacatacgtttgttgaaacagagagtgtaagatatgtctaccagcctatggagaaactgtatatggtactgatcactaccaaaaacagcaacattttagaagatttggagaccctaaggctcttctcaagagtgatccctgaatattgccgagccttagaagagaatgaaatatctgagcactgttttgatttgatttttgcttttgatgaaattgtcgcactgggataccgggagaatgttaacttggcacagatcagaaccttcacagaaatggattctcatgaggagaaggtgttcagagccgtcagagagactcaagaacgtgaagctaaggctgagatgcgtcgtaaagcaaaggaattacaacaggcccgaagagatgcagagagacagggcaaaaaagcaccaggatttggcggatttggcagctctgcagtatctggaggcagcacagctgccatgatcacagagaccatcattgaaactgataaaccaaaagtggcacctgcaccagccaggccttcaggccccagcaaggctttaaaacttggagccaaaggaaaggaagtagataactttgtggacaaattaaaatctgaaggtgaaaccatcatgtcctctagtatgggcaagcgtacttctgaagcaaccaaaatgcatgctccacccattaatatggaaagtgtacatatgaagattgaagaaaagataacattaacctgtggacgagacggaggattacagaatatggagttgcatggcatgatcatgcttaggatctcagatgacaagtatggccgaattcgtcttcatgtggaaaatgaagataagaaaggggtgcagctacagacccatccaaatgtggataaaaaacttttcactgcagagtctctaattggcctgaagaatccagagaagtcatttccagtcaacagtgacgtaggggtgctaaagtggagactacaaaccacagaggaatcttttattccactgacaattaattgctggccctcggagagtggaaatggctgtgatgtcaacatagaatatgagctacaagaagataatttagaactgaatgatgtggttatcaccatcccactcccgtctggtgtcggcgcgcctgttatcggtgagatcgatggggagtatcgacatgacagtcgacgaaataccctggagtggtgcctgcctgtgattgatgccaaaaataagagtggcagcctggagtttagcattgctgggcagcccaatgacttcttccctgttcaagtttcctttgtctccaagaaaaattactgtaacatacaggttaccaaagtgacccaggtagatggaaacagccccgtcaggttttccacagagaccactttcctagtggataagtatgaaattctgtaataccaagaagagggagctgaaaaggaaaattttcagattaataaagaagacgccaatgatggctgaagagtttttcccagatttacaagccactggagaccccttttttctgatacaatgcacgattctctgcgcgcaaggaccctcgactcacccccatgtttcagtgtcacagagacattctttgataaggaaatggcacaaacataaagggaaaggctgctaattttctttggcagattgtattggccagcaggaaagcaagctctccagagaatgcccccagttaaatacctcctctacctttacctaagttgctcctttatttttattttattattattattattattattattttttgagatggagtctcactttgtaacccaggctggaatgcaatggcatgatctcagctcactgcaacctccgcctcctgggttcaagcaagtctcctgcctcagcctccgagtagctgggactacaggtgcacgccaccacgcctggctaattttttgtattttagtagagacggggtttcaccgtgttgcccaggctggtcgcgaactcctgagctcaggcaatccgcccacctcagcctcccaaagtgttgggattacaggcatgagccaccatgcccagctgctcctttattttaatccctaaatataatccctaaatatagttatatttcatacttagtttgtttttaaaaagttttctctgtagaaaattttaatcattcataccctttacctttaggtttttctttctatacattcagtcaggcactgggatcatctgtttacaggcattatatttatttggcactcctggaacaagtatatctaacccattcttgatttttggactattcaggtgaactatttgaggggtatggggtctagaagttaaaagatacgcatgtcttctgttcttttcccgtatcaattcattccttcatctctttgccaagttgttttcctttcagggcctgtccttccagtttagaacagtaccatgaatcccacttgtgtcaatattaaagatagctgagaagcacctttcaaatggcacagtccctcttcaagatgtctaaaagaatggttatgtctgtccagttagggatttcacatccacatgtaatcatgtctgctgctgttgctacccaaattttcatttctccacattttgggtacttaagctaaaacgtaatggccacagtctgtaatccattcacattcctcagtttcaccacctccctcttccagactgcactctctgtcatcagtcccctcctttctaacagaaatggggttatgattttgaaggctgtgggttcagggagtctttgccaatcctgttggccctaaactatcaaggaggctccatttcaccatttgattttttgcatttcaggaggcaactgattgtttcgatatgtacatattactcacgtataccccatttccttccagtcagcccaacattttccaccagtctgtccccatctctgaaatccttccttctctttccccctaagtcttttgagtgtcatcatgtactggtggtttctcggttccatctcatccatttccttttcaatggagactacagcgtcagccagctcagccttggcttttaactcaatattccagtccataggggtggttaaaagttgctgcaaggctgcaggcactggcagtgggaagaggcagacgactagatgacttctgcacttttagctggttgaaaagtaccactcccactctgaacatctggccgtccctgcaaagagtgtactgtgcttgaagcagagcactcacacataaatggctgtgtgtggaattgcttgccaaagaagtttctagcctttccctttcccctaactgcatcagggaagaattcttatctctagcttggtttccacatgaggtttttctgagaagggcttgggacaagaagtctgtcatgttagttaagcaggcaagaaatcctactaatccagttttgtttgaaagttgtttgtccgtatgattttttaaaagtcaagtttaatttcaaaaaaccttttttttctgagattacttttggggtaatatttaaaatgagagacattttgtaaccctgtaaaatacatagggaatataacattccagtgtatacaaagaaggcaaattctttaatcaaataaagcgtattataaaatgagaaaaaaaaaaaaaaaa

SEQ ID NO: 14543 - DNA, 1352 bp, Homo sapiens
ggggggaaacggaagtgagcggcggggtcgactgacggtaacggggcagagaggctgttcgcagagctgcggaagatgaatgccagaggacttggatctgagctaaaggacagtattccagttactgaactttcagcaagtggaccttttgaaagtcatgatcttcttcggaaaggtttttcttgtgtgaaaaatgaacttttgcctagtcatccccttgaattatcagaaaaaaatttccagctcaaccaagataaaatgaatttttccacactgagaaacattcagggtctatttgctccgctaaaattacagatggaattcaaggcagtgcagcaggttcagcgtcttccatttctttcaagctcaaatctttcactggatgttttgaggggtaatgatgagactattggatttgaggatattcttaatgatccatcacaaagcgaagtcatgggagagccacacttgatggtggaatataaacttggtttactgtaatagtgtgctgttcatggaaaccgagggctgcatcttgtttatagtcatctttgtactgtaatttgatgtacacaacattaaaagtactgacacctgagaatttctgctcaagtagtatcagtgatcatttaaaatttggaggggtctttggtttacagccatgtgacaattaaaagcactaaagggagatcatgttaaagctcttaatttatattaaaacagtagcctttgtctttaaaaaagttgttgctcatgaatattataaaatgatctacaggtttcaattcaacctgtttctaggtttttttgtaaatttagttttgattaagcattataagcatttgagtctataaactttatagtagcatctttcagaataaacatttttaattgatttcagtggcaactctcaaattgattacaatatgagatatatcagtgtcgtccattaacactcataagaataatatttactgtgtcagtgctattttaggattatagttattgtttgattatttcaggttgaaaagtagaagttccaaggttttgattttggtctggtctttaagtgaaaaattaaagcaaccagtagatgtaggttaaacttttacttcatagacttaatatgtgattaatatattgccaagcaacactgttaaagaaaagtaaaactcattttttcttgttcttaatttatatattacaagatactgtaaggtattctttatgaagttgatatataaaaatttacatttttagaacattagtgaatggatcatcttttacaattaaaagtatattttgattatcagtttcttagcaaaaaaaaaaaaaaaaaaaaaaaaaaaaaa

SEQ ID NO: 14544 - DNA, 3125 bp, Homo sapiens
ccgcgcccctcccctcacgggctctggccttaaccagagctcgcggactggcggggacaggtcccacctcctggctcccaggacgggtctgcaccaacctcagtttcggggctgcggctcacagaagtctaacctgcccgggacgcccgcaccaactcctgcgcgcggtccttccaaccctcctgctaccatgaagattgcagtgattggacagagcctgtttggccaggaagtttactgccacctgaggaaggagggccacgaagtggtgggtgtgttcactgttccagacaaggatggaaaggccgaccccctgggtctggaagctgagaaggatggagtgccggtattcaagtactcccggtggcgtgcaaaaggacaggctttgcctgatgtggtggcaaaataccaggctttgggggccgagctcaacgtcctgcccttctgcagccaattcatccccatggagataatcagtgccccccggcatggctccatcatctatcacccgtcactgctccctaggcaccgaggggcctcggccatcaactggaccctcattcacggagataagaaaggggggttttccatcttctgggcggatgatggtctggacaccggagacctgctgctgcagaaggagtgtgaggtgctcccggacgacaccgtgagcacgctgtacaaccgcttcctcttccctgaaggcatcaaagggatggtgcaggccgtgaggctgatcgctgagggcaaagcccccagactccctcagcctgaggaaggagccacctatgaggggattcagaagaaggagacagccaagatcaactgggaccagccggcagaggccattcacaactggatccgcgggaacgacaaggtgccgggagcctggacagaggcctgtgaacagaaactgacatttttcaactcaacgctgaacacttcaggcctggtgcccgagggagacgctttgcccatcccaggagcccatcggccaggggtggtcaccaaagcaggactcatcctctttgggaatgatgacaaaatgctgctggtgaagaatattcagctggaggatggcaaaatgatcctggcctcgaacttctttaagggggcagccagcagtgtccttgagctgacagaggcagagctggttactgcggaggctgtgcggagtgtttggcagcggatcctccccaaagtcctggaggttgaagactccactgatttcttcaagtcaggggccgcgtctgtggacgttgtgaggctggtggaggaagtgaaggagctgtgtgatggcctggagttagaaaatgaagatgtgtacatggcatccacctttggggacttcatccagctgttagtgaggaagctgcgaggggacgatgaggagggcgagtgcagcattgactacgtggaaatggcagtgaacaagcgcactgtccgcatgccccaccagctcttcattgggggggagttcgtggatgccgagggcgccaagacctctgagaccatcaatcccaccgatggaagtgtcatctgccaggtatccctggcccaagtcaccgacgtcgacaaggcagtggccgcagccaaggatgcctttgagaatggacggtgggggaagatcagtgcgcgggaccggggccggctgatgtacaggttggcagatctcatggagcagcaccaggaggagctggccaccattgaggccctggatgcgggtgccgtctacacgctggccctgaagacccacgtgggcatgtccatccagaccttccgctactttgctggctggtgtgacaagatccagggctccaccatccccatcaaccaggccagacccaaccgcaacctgaccttgaccaggaaggagcctgttggggtttgtggcatcatcatcccctggaactatcccctgatgatgctgtcctggaagacagctgcctgcctggctgccgggaacacagtggtgatcaagcctgctcaggtgaccccactcacagccttgaagtttgcagagctgacattaaaggccggcattcccaaaggtgtggttaacgtcctcccaggatctggctccctggtcggccagagactctcagaccatcctgatgtgaggaaaatcgggttcacaggctccacagaggtgggcaagcacatcatgaaaagctgtgccataagtaacgtgaagaaggtgtccctggaactgggcgggaagtcacccctcatcatctttgctgactgtgacctcaacaaggctgtgcagatggggatgagttctgttttcttcaacaaaggagagaattgcattgcagcaggccgactctttgtggaggactccattcatgatgagttcgtgcggagagtggtagaagaggtgcggaagatgaaggtgggcaacccgctggacagggacaccgaccacgggccgcagaatcaccatgcccaccttgtgaagctgatggagtactgccagcatggcgtgaaggaaggggccacactggtctgcggcgggaatcaggtccctcggccagggttcttctttgagccaactgttttcacagacgtggaagaccacatgttcatagccaaggaggagtccttcgggcctgtcatgatcatctctcggtttgctgatggggacttggatgccgtgctgtctcgggccaatgccacggaatttggcctggcttctggtgtcttcaccagggacatcaacaaggccctgtatgtcagtgacaagctccaggcaggcactgtgtttgtcaacacgtacaacaagaccgacgtggccgctcccttcggaggattcaaacagtctggatttggcaaagatctaggagaggcggctctgaacgagtacctgcgggtcaagacagtgaccttcgaatactgaagaaaggtctttgtgagaagaaagtccctgcccctccctcgtggctggggccccctccctcttgagcctgggtgcacagcacctcccacctggggggctagtggaagccctcctgcctgcacaccatgtctgcatcttggacgccctctgtccagtcagaagcagcccttggctgggtgaggtgtgcccctcccagggagaataaagcttctgaagagagaccgtc

SEQ ID NO: 14545 - DNA, 3662 bp, Homo sapiens
ctagccccacctgctccgtttcccgcccagctggagctctggagcctttgcttcctcaaatacgagcgggaactgcgttgagcgctggattccaggccgagtgctggcgaggcgcgcagttctctgctgtttaaaaagtatccctgtgctttgaagatactgctataatttgaaaatttgaaattagtgtttcagctgaaccatccgttcatcttcaagccatcatgagctgtaagaagcagaggtcacggaagcactcagtcaatgaaaaatgtaatatgaaaatcgagcactatttttctccggtctctaaagagcaacagaataattgcagtacttctctaatgaggatggagtctagaggagacccaagagccacaactaatacccaggctcaaagattccattcacctaagaaaaatccagaagaccagaccatgccccaaaataggacaatatatgttaccttgaaggtaaaccacaggagaaaccaagatatgaaacttaagctcacacatagtgagaatagtagcttatatatggctctcaacactctccaggctgtcagaaaagagatagaaactcaccaaggccaagaaatgcttgtgcgtggcacagaaggaatcaaagagtacataaaccttggaatgcccctcagttgtttccctgaaggtggccaggtggtcattacattttcccaaagtaaaagtaagcagaaggaagataaccacatatttggcaggcaggacaaagcatcgactgaatgtgtcaaattttacattcatgcaattggaattgggaagtgtaaaagaaggattgttaaatgtgggaagcttcacaaaaaggggcgcaaactctgtgtttatgctttcaaaggagaaaccatcaaggatgcactgtgcaaggatggcagatttctttcctttctggagaatgatgattggaaactcattgaaaacaatgacaccattttagaaagcacccagccagttgatgaattagaaggcagatactttcaggttgaggttgagaaaagaatggtccccagtgcagcagcttctcagaatcctgagtcagagaaaagaaacacctgtgtgttgagagaacaaatcgtggctcagtaccccagtttgaaaagagaaagtgaaaaaatcattgaaaacttcaagaaaaaaatgaaagtaaaaaatggggaaacattatttgaattgcatagaacaacgtttgggaaagtaacaaaaaattcttcttcgattaaagtagtgaaacttcttgtacgtctcagtgactcagttgggtacttattctgggacagtgcaactacgggttacgccacctgctttgtttttaaaggattgttcattttaacttgtcggcatgtaatagatagcattgtgggagacggaatagagccaagtaagtgggcaaccataattggtcaatgtgtaagggtgacatttggttatgaagagctaaaagacaaggaaacaaactacttttttgttgaaccttggtttgagatacataatgaagagcttgactatgctgtcctgaaactgaaggaaaatggacaacaagtacctatggaactatataatggaattactcctgtgccacttagtgggttgatacatattattggccatccatatggagaaaaaaagcagattgatgcttgtgctgtgatccctcagggtcagcgagcaaagaaatgtcaggaacgtgttcagtctaaaaaagcagaaagtccagagtatgtccatatgtatactcaaagaagtttccagaaaatagttcacaaccctgatgtgattacctatgacactgaatttttctttggggcttccggctcccctgtgtttgattcaaaaggttcattggtggccatgcatgctgctggctttgcttatacttaccaaaatgagactcgtagtatcattgagtttggctctaccatggaatccatcctccttgatattaagcaaagacataaaccatggtatgaagaagtatttgtaaatcagcaggatgtagaaatgatgagtgatgaggacttgtgagaattcagtctactggatttaagggaatggcttatggagttgttatttcataggcattgaaaatggttttctaaactccaaaatggtcatcttatcaataataataatattgaccatttcctatctgccaggcatttttctaagcacatgaagaaattagtcctaacaacactatgagatggactataacttgcccaaattttttttttttttttgagactgagtctcactctgtcgcctgggctggagtacagtggtgcgatctcagctcactgcaacttccacctcccaggttcaagcgattcttatgcctcagtctcctgagcagctgggattacaggcaaacgccaccacacccagctaaatttttttttttttttgtatttttagtagagacagggtttcaccatgttggtcaggcgggtctcgaactcctgacctcgtgatccacctgcctcggccttccaaagtgctgggattacaagtttgagccactgcacctggctaacttgccctattttaaagtcaagcaatgggaagaataacaagattatatagtaatcagtttcatgacactaaaagtcatatagtcatagggttttttcatctttcatatctttgcctaaattcatttgctacagtgcaggaaccaaaacttgttcatctcatgattccctacatctgacataaggaaagtaagtgctcagaaaaatgtgcaggtcaataagttgcaaaagttggggctgcaattaatgctaacataagagctaaatgcttgattagaaatgatctcaaaaccttttagaatttccaaaatcttcatattactgaaactgtcggaatatatgggtcttgaaattcagaagatgatagtcactcttcccatatttataggctattaaggcaagggatatcttaaacatcatattactttatttagatttctactactccaattattaatgttatgtatttctcattgttttacttcttcatggtattatgaagactatatagatgattcaaccaagcctgcaaatctccctcttgtggaattccactggacccaatctgttttccatttccattgcaatactactaaagccatacaatatcaagcaccctccctctaggtccagggactatcacagaagaagcaggcatgtaagattttaaggactggtttcgaggggtcgagtgtaggaaaacagcctgttgcattgtaagagtgatgtcatcttgaagagcagctggcatgatgactgctgtttgactcctgcataccaagatattctgcagcaatgtctttaaacagtgccggtagtacagataacccctcataaagatgcttatctaacctccccagtgttcaggtgtttcacaagaaagtctgagatatgactagctacacgttttgccaaaaatgcttgttatataaagggtacttttgggagggtgagtgccgccatttagtggctgctagaaacattgcttctgtttgtaagttcctattaaatgtttctttctgagaaaaaaaaaaaaaaaaaaaaaaaaaaaaaaaaaaaaaaaaaaaaaaaaaaaaaaaaaaaaaaaaaaaaaaaa

SEQ ID NO: 14546 - DNA, 3623 bp, Homo sapiens
ctagccccacctgctccgtttcccgcccagctggagctctggagcctttgcttcctcaaatacgagcgggaactgcgttgagcgctggattccaggccgagtgctggcgaggcgcgcagttctctgctgtttaaaaagtatccctgtgtgtttcagctgaaccatccgttcatcttcaagccatcatgagctgtaagaagcagaggtcacggaagcactcagtcaatgaaaaatgtaatatgaaaatcgagcactatttttctccggtctctaaagagcaacagaataattgcagtacttctctaatgaggatggagtctagaggagacccaagagccacaactaatacccaggctcaaagattccattcacctaagaaaaatccagaagaccagaccatgccccaaaataggacaatatatgttaccttgaaggtaaaccacaggagaaaccaagatatgaaacttaagctcacacatagtgagaatagtagcttatatatggctctcaacactctccaggctgtcagaaaagagatagaaactcaccaaggccaagaaatgcttgtgcgtggcacagaaggaatcaaagagtacataaaccttggaatgcccctcagttgtttccctgaaggtggccaggtggtcattacattttcccaaagtaaaagtaagcagaaggaagataaccacatatttggcaggcaggacaaagcatcgactgaatgtgtcaaattttacattcatgcaattggaattgggaagtgtaaaagaaggattgttaaatgtgggaagcttcacaaaaaggggcgcaaactctgtgtttatgctttcaaaggagaaaccatcaaggatgcactgtgcaaggatggcagatttctttcctttctggagaatgatgattggaaactcattgaaaacaatgacaccattttagaaagcacccagccagttgatgaattagaaggcagatactttcaggttgaggttgagaaaagaatggtccccagtgcagcagcttctcagaatcctgagtcagagaaaagaaacacctgtgtgttgagagaacaaatcgtggctcagtaccccagtttgaaaagagaaagtgaaaaaatcattgaaaacttcaagaaaaaaatgaaagtaaaaaatggggaaacattatttgaattgcatagaacaacgtttgggaaagtaacaaaaaattcttcttcgattaaagtagtgaaacttcttgtacgtctcagtgactcagttgggtacttattctgggacagtgcaactacgggttacgccacctgctttgtttttaaaggattgttcattttaacttgtcggcatgtaatagatagcattgtgggagacggaatagagccaagtaagtgggcaaccataattggtcaatgtgtaagggtgacatttggttatgaagagctaaaagacaaggaaacaaactacttttttgttgaaccttggtttgagatacataatgaagagcttgactatgctgtcctgaaactgaaggaaaatggacaacaagtacctatggaactatataatggaattactcctgtgccacttagtgggttgatacatattattggccatccatatggagaaaaaaagcagattgatgcttgtgctgtgatccctcagggtcagcgagcaaagaaatgtcaggaacgtgttcagtctaaaaaagcagaaagtccagagtatgtccatatgtatactcaaagaagtttccagaaaatagttcacaaccctgatgtgattacctatgacactgaatttttctttggggcttccggctcccctgtgtttgattcaaaaggttcattggtggccatgcatgctgctggctttgcttatacttaccaaaatgagactcgtagtatcattgagtttggctctaccatggaatccatcctccttgatattaagcaaagacataaaccatggtatgaagaagtatttgtaaatcagcaggatgtagaaatgatgagtgatgaggacttgtgagaattcagtctactggatttaagggaatggcttatggagttgttatttcataggcattgaaaatggttttctaaactccaaaatggtcatcttatcaataataataatattgaccatttcctatctgccaggcatttttctaagcacatgaagaaattagtcctaacaacactatgagatggactataacttgcccaaattttttttttttttttgagactgagtctcactctgtcgcctgggctggagtacagtggtgcgatctcagctcactgcaacttccacctcccaggttcaagcgattcttatgcctcagtctcctgagcagctgggattacaggcaaacgccaccacacccagctaaatttttttttttttttgtatttttagtagagacagggtttcaccatgttggtcaggcgggtctcgaactcctgacctcgtgatccacctgcctcggccttccaaagtgctgggattacaagtttgagccactgcacctggctaacttgccctattttaaagtcaagcaatgggaagaataacaagattatatagtaatcagtttcatgacactaaaagtcatatagtcatagggttttttcatctttcatatctttgcctaaattcatttgctacagtgcaggaaccaaaacttgttcatctcatgattccctacatctgacataaggaaagtaagtgctcagaaaaatgtgcaggtcaataagttgcaaaagttggggctgcaattaatgctaacataagagctaaatgcttgattagaaatgatctcaaaaccttttagaatttccaaaatcttcatattactgaaactgtcggaatatatgggtcttgaaattcagaagatgatagtcactcttcccatatttataggctattaaggcaagggatatcttaaacatcatattactttatttagatttctactactccaattattaatgttatgtatttctcattgttttacttcttcatggtattatgaagactatatagatgattcaaccaagcctgcaaatctccctcttgtggaattccactggacccaatctgttttccatttccattgcaatactactaaagccatacaatatcaagcaccctccctctaggtccagggactatcacagaagaagcaggcatgtaagattttaaggactggtttcgaggggtcgagtgtaggaaaacagcctgttgcattgtaagagtgatgtcatcttgaagagcagctggcatgatgactgctgtttgactcctgcataccaagatattctgcagcaatgtctttaaacagtgccggtagtacagataacccctcataaagatgcttatctaacctccccagtgttcaggtgtttcacaagaaagtctgagatatgactagctacacgttttgccaaaaatgcttgttatataaagggtacttttgggagggtgagtgccgccatttagtggctgctagaaacattgcttctgtttgtaagttcctattaaatgtttctttctgagaaaaaaaaaaaaaaaaaaaaaaaaaaaaaaaaaaaaaaaaaaaaaaaaaaaaaaaaaaaaaaaaaaaaaaaa

SEQ ID NO: 14547 - DNA, 3233 bp, Homo sapiens
tgcgactgagtcggtggcgaagacgggaacgcgacgatggcggagactctgcccgggtcgggcgactcgggccctggcacggcttctctcggcccgggcgttgcggagactgggacgaggcggctcagcgagctgcgggtgatcgatctgcgggcggagctgaagaagcggaacctggacacgggcggcaacaagagcgtcctgatggagcggctcaagaaggcggttaaagaagaggggcaagatcctgatgaaattggcatcgagttagaagccaccagcaagaagtcagccaagagatgtgttaaaggactgaagatggaggaggaaggcacagaagataatggcctggaagacgattccagagacgggcaggaggacatggaagcaagtctggagaacctgcagaatatgggcatgatggacatgagtgtgctagacgaaactgaagtggcgaatagcagtgctccagattttggggaggatggcacggacggccttctcgattccttttgtgatagtaaagaatacgtggctgcacagctgagacagctcccggctcagcccccagagcatgctgtggatggggaaggatttaagaacactttggaaacttcatcgttgaacttcaaagtaactccggacattgaagaatcccttttggagccagaaaatgagaaaatactcgacattttgggggaaacttgtaaatctgagccagtaaaagaagaaagttccgagctggagcagccatttgcacaggacacaagtagcgtggggccagacagaaagcttgcggaggaagaggacctatttgacagcgcccatccggaagagggtgatttagatttggccagcgagtcaacagcacacgctcagtcgagcaaggcagacagcctgttagcggtagtgaaaagggagcccgcggagcagccaggcgatggcgagaggacggactgtgagcctgtagggctagagccggcagttgagcagagtagtgcggcctccgagctcgcggaggcctctagcgaggagctcgcagaagcacccacggaagccccaagcccagaagccagagatagcaaagaagacgggaggaagtttgattttgacgcttgtaatgaagtccctccggctcctaaagagtcctcaaccagtgagggcgctgatcagaaaatgagctcttttaaggaagaaaaagatataaagccaatcattaaagatgaaaaaggtcgggtcggcagcggttctggtcggaacctgtgggtcagcgggctgtcctccacaacacgcgctacggatctcaagaaccttttcagcaagtatgggaaggttgtcggggccaaagtggtaacgaacgcccgcagcccgggggctcgatgctatggattcgtcaccatgtcgacatctgacgaggcgaccaagtgcatcagccatctccacagaactgagctgcatggacgaatgatctccgtagagaaggccaaaaatgagcctgctgggaaaaagctttccgacagaaaagagtgcgaagtgaagaaggaaaaattatcgagtgtcgacagacatcattctgtggagatcaaaattgaaaaaactgtaattaagaaggaagagaagattgagaagaaggaggaaaaaaagcctgaagacattaagaaggaagaaaaagaccaggatgagctgaaacccggacctacaaatcggtctagagtcaccaaatcaggaagcagaggaatggagcggacggtcgtgatggataaatcgaaaggagagcccgtcattagcgtgaaaaccacaagcaggtccaaagagagaagctccaagagtcaggatcgcaagtcagaaagcaaagaaaagagagacatcttgtcgtttgataaaatcaaagaacaaagggagagagagcgccagaggcagcgggaacgggagatccgcgaaacggagaggcggcgggagcgcgagcagcgggagcgggagcaacgcctcgaggccttccatgagcggaaggagaaggcccggctacagcgggaacgcctgcagctcgagtgccagcgccagcggctggagcgggagcgcatggagcgggagcggctggagcgcgagcgcatgcgcgtggagcgtgagcgcaggaaggagcaggagcgcatccaccgcgagcgcgaggagctgcggcgccagcaggagcagctgcgttacgagcaggagcggcggcccgggcggaggccctacgacctggaccgacgagatgatgcctattggccagaaggaaagcgtgtggcaatggaggaccgatatcgtgcagactttccccggccagaccaccgctttcacgacttcgatcatcgagaccggggccagtaccaggaccacgccatcgacaggcgggagggttcgaggccaatgatgggagaccaccgggatgggcagcactatggagatgaccgccatggccacggaggacccccagagcgccacggccgggactcccgtgatggctgggggggctacggctccgacaagaggctgagtgaaggccgggggctgccccctccccccaggggtggccgtgactggggagagcacaaccagcggctagaggagcaccaggcacgcgcctggcagggtgccatggacgcaggcgcggctagccgggagcacgccaggtggcaaggtggcgagaggggcctgtctgggccctcggggccggggcacatggcaagccgcggtggagtggcggggcgaggcggctttgcacaaggtggacattcccagggccacgtggtgccaggtggcggactggaaggtggcggagtggccagccaggaccggggcagcagagtccctcacccacaccctcatccccccccgtacccccacttcacccgccgctactaagtcccactcgctgtgagttttcgggtgggcagacgcactgttgaatctggtagccagggttccctcgaacttgggggatctttttaaaagcaaagtaaatcctgccaccatgttgtagctcaatacaatgtgaactcacttttttttttttttttaataaatgtgttcttgttctgccatttttaaatcaaggtttctgttaacgaggcattccattttccattaataaagtttaccattcgcaaaaaaaaaatgtgttcttgttctgccatttttaaatcaaggtttctgttaacgaggcattccattttccattaataaagtttaccattcgc

SEQ ID NO: 14548 - DNA, 4538 bp, Homo sapiens
tcgtgtttcggtgagtgtggcggagatggagagccgggatcccgcccagccgatgtcgcctggagaagcgacgcagagtggcgcccggcctgccgaccgctatggcctattgaagcacagtcgcgagttcttggacttcttctgggacattgcgaagcctgagcaggagacgcgacttgcggccacggagaagctgctggagtatctgcgtggcaggccgaaggggtccgagatgaaatatgccctgaagcgtctaatcacgggactcggggtcgggcgagaaacagcccggccctgctacagtttggccctggcacagctgttacagtcttttgaagacctccccttgtgcagcatcctgcagcagatacaagaaaaatatgacctgcatcaggtgaagaaggcaatgctgagacctgctctctttgcaaacctgtttggagtgctcgccctctttcagtcaggtcggctggtgaaggaccaggaggcactgatgaagtcggtgaagctgctgcaggccctggcccagtaccaaaaccacttgcaggagcagccccggaaggccctggtggacatcctctccgaggtctcgaaggccacattgcaggagatcctgccggaggtcctcaaagccgacttgaatataatactcagctcccctgaacagctagagctcttcctcctggcccagcagaaggtgccctccaagctcaagaagctggtgggatccgtgaacctattctcagatgagaatgtccccaggctggtgaatgtgctgaagatggccgcctcctctgtgaagaaggaccgcaagctgcccgccattgctctggacctgctccgcctggcgctcaaggaagacaagttcccacggttctggaaggaggtggtggaacaagggctgctgaagatgcagttctggccagccagctacctgtgtttccacctgctgggcgcggccctgcccctgctgaccaaggagcagctgcacctggtgatgcagggagacgtgatccgccattacggggagcacgtgtgcactgctaagctcccaaagcagttcaagtttgccccagagatggacgattacgtgggcaccttcctagaggggtgccaggatgaccctgagcggcagctggccgtgctagtggccttctcatctgtcaccaaccaaggcctccctgtcacgcctactttctggcgggtcgtgcggttcctgagccctccggccctgcagggctatgtggcctggctgcgggccatgtttctccagccagacctggactccttggttgacttcagcaccaacaaccagaagaaagcccaggattcatcgctccacatgcctgagcgagctgtgttccggctgaggaaatggatcatctttcgattggtgagcattgtggacagcctgcacctggagatggaggaggccttgactgagcaggtggccaggttttgtttgttccactcgttctttgtcacaaagaagcccacatcccagatccctgagacaaagcacccgttctccttccctttggaaaaccaggcccgagaggctgtcagcagtgccttcttcagtctgttgcagaccctcagcacgcagttcaagcaggcaccgggccagacccagggtgggcagccctggacctaccacctggtgcaattcgcagacctcctgttgaatcacagccacaacgtgaccaccgtgacacccttcactgcgcagcagcaccaggcctgggaccggatgctgcagactctgaaggagctggaggcccactccgcagaggccagggctgctgccttccagcaccttctgctcttcgtgggcatccacctcctcaagtcccctgcagagagctgtgacctgctgggtgacatccagacctgcatcaggaaaagtctgggagagaagccccgccggagccgcaccaagaccatcgacccccaggaacccccgtgggtagaggtgctggtggagatcttgctggccctgttggcccagcccagccacctcatgcgccaggtggcccggagcgtgtttggccacatctgctcccacctgaccccgcgtgccctgcagctaattctggatgtgctgaaccccgagaccagtgaggatgagaatgaccgtgtggtggtgacggacgattctgatgagcggcggctgaagggtgcagaggacaagagcgaggaaggtgaggacaacagaagctcagagagtgaagaggagagcgagggggaggagagcgaggaggaggagcgcgacggggacgtggatcagggcttccgggaacagctgatgaccgtgctgcaggctgggaaggcgctgggtggagaggacagtgagaacgaggaggagctgggggatgaggccatgatggccctggaccagagcctcgccagcctctttgccgagcagaagctgcgtatccaggcccggcgagacgagaagaacaagctgcagaaggagaaggctctgcggcgcgacttccagatccgggtgctggacctggtggaggtgctagtgaccaagcagcccgagaatgccctggtcctggagctgctggagccgctgctgagcatcatccggcgcagcctgcgcagcagcagctccaaacaggagcaggaccttctgcacaagacggcgcgcatcttcacgcatcacctgtgccgtgcccggcgctactgccacgacttgggtgagcgcgcaggggccctgcacgcccaggtggagcggttggtgcagcaggctggccgccagcccgactcccccaccgccctctaccacttcaacgcctctctctacctgctccgggtcttgaagggcaacactgctgagggctgcgtgcatgagacacaggagaagcagaaagctggcactgaccccagccacatgcccacgggcccgcaggctgccagctgcttggacttgaacctggtgacccgggtgtactcgacagcactgagctccttcctgaccaagcgcaacagccccctcacagttcccatgttcctcagcctcttctcccggcacccggtgctctgtcagagcctgctccccatcctggtccagcatatcacgggcccggtgcggccccgtcatcaggcctgcctgctgctccagaagaccctgtccatgcgggaggtgaggtcgtgctttgaggaccccgagtggaagcagctgatgggccaggtcctagcaaaggtcaccgagaacttgcgcgtgctgggggaggcgcagaccaaggcgcagcatcagcaggcactgtcctccctggagctgctcaacgttctcttcaggacctgcaaacatgagaagctgaccttggacctgacggtgctcctgggtgtgctgcaggggcaacagcagagcctacagcagggggcacactccaccggctccagccgcctgcacgacctctactggcaggccatgaaaaccctgggagtccagcgccccaagttggagaagaaggatgccaaggagatccccagtgccacccagagccccatcagtaagaagcggaagaaaaagggattcttgccagagacgaagaagcgcaagaaacgcaagtcagaggatggcacgccagcggaggatggcacacctgcagccaccggcgggagccagccccccagcatgggcaggaagaagaggaacaggacaaaggctaaggtcccagcccaggcaaacgggacgccaaccaccaagagtccagcccctggcgcccccacccggagccccagcacccctgccaaatccccaaaactgcagaagaaaaaccagaagccgtcccaggtgaatggagctcccgggtcccccacggaacctgcaggccaaaagcagcatcagaaggctcttcccaaaaagggggtcttgggcaaatcaccactgtccgcgctggcacggaaaaaggcaaggctgtctttggtcatcaggagtcccagcctgcttcagagtggggccaagaagaaagcacaggtgaggaaggcagggaagccctgagcacaggtacgggcccccctcagcccctgcctccatctgcctgagacgcctatttttttttttttaaaaccatgattttaatacgcaagctgtttctaaggcgctgccactggggagggtggctgttgccgcctgcccgggcatcctgctctggcaagcacagcctgagccattcctgcgggggtcccagggtgcagagacctccccacccccagttctgggctgggatcctggctccagggccatgtccagggctctggtgtttgcctgggttggtgcatgttgatgtgctggctgcaggcaggtgtgaccatctctcgtgcctgccacctctttgcccccaggcttttttgctgtgagggagccaccagggggtgatttaaataggtttatttcttcatttacaagaggaatatatttggcttctctcttaagactctgagattcacaatcagcagctctaaaaaataaaggagcagtttggcttccggaaggaagaggaggctaaaaaaaaaaaaaaaaaaaa

SEQ ID NO: 14549 - DNA, 2575 bp, Homo sapiens
gcatggccaaggccgggcggccgccttgcccccgcttcctttcacgctgtcgctgcccgtaggtggttgtggccactgtgcccggagggaggcggcggtggccagtaatgcctgggaaactcctctggggggacattatggagctggaagcacccttggaggagtccgagagccagaagaaggagaggcaaaagagtgacagaaggaagtcaaggcaccattatgactcggatgagaaatcagaaacaagagaaaatggtgttacagatgacctggatgctcccaaggccaaaaaatctaaaatgaaagagaagctaaatggagacactgaagaaggatttaatagactttcagatgaattctccaaatctcataagtcaagaagaaaagatctaccaaatggagatatagatgaatatgaaaaaaaatcaaagcgagtatcatctttagatacttctactcataaatcaagtgataataaactagaggagaccttaacacgtgaacagaaagaaggagccttctccaattttcctatttctgaagagactataaagcttctgaaaggtcgaggggtaacatatctctttcctattcaagttaagacctttggtcctgtatatgaaggaaaagatttaatagctcaagcacggacaggaacaggaaagacattctcttttgccatccccttaattgaaagactccaaagaaatcaagaaacaattaaaaaaagccgctcaccaaaggtacttgttttggctccaacaagggaactggcaaaccaagtagccaaagacttcaaagatataactaggaaactcagcgtggcgtgtttttatggtggaacatcatatcaaagccaaattaatcatattcgaaatggtattgacatcttggttggaacacctggtcgtatcaaagaccatctgcagagtggccgattggatctttctaaactgcgacatgttgtgcttgatgaagtggatcagatgttagatttaggtttcgctgaacaagttgaagatattattcatgaatcctacaaaactgattctgaagacaatcctcagactttacttttttctgcaacttgcccacagtgggtatacaaagttgcaaaaaaatacatgaaatccagatatgaacaggttgaccttgttggaaaaatgactcaaaaggctgcaactactgtggaacatttggccatccagtgtcattggtctcagaggccagcagttattggagatgtccttcaagtctacagtgggtctgaagggagggctattattttctgtgagaccaagaagaatgtaactgaaatggccatgaatccacacataaaacagaatgcccagtgtttacatggggacattgcacagtcacaaagagaaattacactaaaaggcttcagagaaggtagttttaaagttttggtggcaaccaatgtggctgcccgtggtttggacattcctgaagttgacctggtgattcaaagttctcctcctcaggatgttgagtcctatatccatcgctctggacgcacaggtagagctggacggacagggatttgtatatgtttttatcaaccaagagaaagaggtcaactaagatatgtggaacaaaaagcaggaattacttttaaacgtgtaggtgttccttctacaatggatttagttaaatctaaaagcatggatgccatcaggtctctggcttccgtttcttatgctgctgttgattttttccgaccatcagctcagagactgatagaagagaaaggtgcagtggatgcattggctgcagctttagcccacatttctggtgcatcaagctttgaaccacgatctttgatcacctctgataaggggtttgtgaccatgactctggaaagcctagaggaaatacaggatgtcagctgtgcttggaaagaacttaacagaaagctgagtagtaatgcagtgtctcagattaccagaatgtgcctcctgaaaggaaatatgggtgtttgctttgatgttcctacaactgagtcagaaaggttacaggcagagtggcatgattccgactggatactctcagtgccagccaaattacctgaaattgaagaatattatgatggaaacacatcttctaattccagacagaggagtggctggtcaagtggtcgatcaggccggtcaggccggtcaggtggtcgatctggcggccggtcaggtagacagagtcgacaaggaagtcgctcaggaagtcgacaagatggtagaagacgaagtgggaatagaaatcgatcaagaagtgggggccacaaacggagttttgactgagtatttgatagttaatctaccagtgtgagcttgcctatttctgcctaatcatgtacattatccaccaaaaattaggtcatcatagttgaggtatgtgtctgctatttgcaaagaagttggtcgtatttttttaaaaagtatttcacaagaatggaacaaatctacttatccagttatacctttgaataaaaaaacctccttttattgtctcttttcaaaaaaaaaaaaaaaaaaaaaaaaaaaaaaaaaaaaaa

SEQ ID NO: 14550 - DNA, 3734 bp, Homo sapiens
gcggagcgtgtgacgctgcggccgccgcggacctggggattaatgggaaaagttttggcaggagcgggagaattctgcggagcctgcgggacggcggcggtggcgccgtaggcagccgggacagtgttgtacagtgttttgggcatgcacgtgatactcacacagtggcttctgctcaccaacagatgaagacagatgcaccaacgaggctgatgggaaccaccctgtagaggtccatctgcgttcagacccagacgatgccagagctatgactgggcctgcaggtgtggcgccgaggggagatcagccatggagcagccacaggaggaagcccctgaggtccgggaagaggaggagaaagaggaagtggcagaggcagaaggagccccagagctcaatgggggaccacagcatgcacttccttccagcagctacacagacctctcccggagctcctcgccaccctcactgctggaccaactgcagatgggctgtgacggggcctcatgcggcagcctcaacatggagtgccgggtgtgcggggacaaggcatcgggcttccactacggtgttcatgcatgtgaggggtgcaagggcttcttccgtcgtacgatccgcatgaagctggagtacgagaagtgtgagcgcagctgcaagattcagaagaagaaccgcaacaagtgccagtactgccgcttccagaagtgcctggcactgggcatgtcacacaacgctatccgttttggtcggatgccggaggctgagaagaggaagctggtggcagggctgactgcaaacgaggggagccagtacaacccacaggtggccgacctgaaggccttctccaagcacatctacaatgcctacctgaaaaacttcaacatgaccaaaaagaaggcccgcagcatcctcaccggcaaagccagccacacggcgccctttgtgatccacgacatcgagacattgtggcaggcagagaaggggctggtgtggaagcagttggtgaatggcctgcctccctacaaggagatcagcgtgcacgtcttctaccgctgccagtgcaccacagtggagaccgtgcgggagctcactgagttcgccaagagcatccccagcttcagcagcctcttcctcaacgaccaggttacccttctcaagtatggcgtgcacgaggccatcttcgccatgctggcctctatcgtcaacaaggacgggctgctggtagccaacggcagtggctttgtcacccgtgagttcctgcgcagcctccgcaaacccttcagtgatatcattgagcctaagtttgaatttgctgtcaagttcaacgccctggaacttgatgacagtgacctggccctattcattgcggccatcattctgtgtggagaccggccaggcctcatgaacgttccacgggtggaggctatccaggacaccatcctgcgtgccctcgaattccacctgcaggccaaccaccctgatgcccagtacctcttccccaagctgctgcagaagatggctgacctgcggcaactggtcaccgagcacgcccagatgatgcagcggatcaagaagaccgaaaccgagacctcgctgcaccctctgctccaggagatctacaaggacatgtactaacggcggcacccaggcctccctgcagactccaatggggccagcactggaggggcccacccacatgacttttccattgaccagcccttgagcacccggcctggagcagcagagtcccacgatcgccctcagacacatgacacccacggcctctggctccctgtgccctctctcccgcttcctccagccagctctcttcctgtctttgttgtctccctctttctcagttcctctttcttttctaattcctgttgctctgtttcttcctttctgtaggtttctctcttcccttctcccttgccctccctttctctctccaccccccacgtctgtcctcctttcttattctgtgagatgttttgtattatttcaccagcagcatagaacaggacctctgcttttgcacaccttttccccaggagcagaagagagtggggcctgccctctgccccatcattgcacctgcaggcttaggtcctcacttctgtctcctgtcttcagagcaaaagacttgagccatccaaagaaacactaagctctctgggcctgggttccagggaaggctaagcatggcctggactgactgcagccccctatagtcatggggtccctgctgcaaaggacagtgggcaggaggccccaggctgagagccagatgcctccccaagactgtcattgcccctccgatgctgaggccacccactgacccaactgatcctgctccagcagcacacctcagccccactgacacccagtgtccttccatcttcacactggtttgccaggccaatgttgctgatggccccctgcactggccgctggacggcactctcccagcttggaagtaggcagggttccctccaggtgggcccccacctcactgaagaggagcaagtctcaagagaaggaggggggattggtggttggaggaagcagcacacccaattctgcccctaggactcggggtctgagtcctggggtcaggccagggagagctcggggcaggccttccgccagcactcccactgcccccctgcccagtagcagccgcccacattgtgtcagcatccagggccagggcctggcctcacatccccctgctcctttctctagctggctccacgggagttcaggccccactccccctgaagctgcccctccagcacacacacataagcactgaaatcactttacctgcaggctccatgcacctcccttccctccctgaggcaggtgagaacccagagagaggggcctgcaggtgagcaggcagggctgggccaggtctccggggaggcaggggtcctgcaggtcctggtgggtcagcccagcacctgctcccagtgggagcttcccgggataaactgagcctgttcattctgatgtccatttgtcccaatagctctactgccctccccttcccctttactcagcccagctggccacctagaagtctccctgcacagcctctagtgtccggggaccttgtgggaccagtcccacaccgctggtccctgccctcccctgctcccaggttgaggtgcgctcacctcagagcagggccaaagcacagctgggcatgccatgtctgagcggcgcagagccctccaggcctgcaggggcaaggggctggctggagtctcagagcacagaggtaggagaactggggttcaagcccaggcttcctgggtcctgcctggtcctccctcccaaggagccattctgtgtgtgactctgggtggaagtgcccagcccctgcccctacgggcgctgcagcctcccttccatgccccaggatcactctctgctggcaggattcttcccgctccccacctacccagctgatgggggttggggtgcttcctttcaggccaaggctatgaagggacagctgctgggacccacctccccctccccggccacatgccgcgtccctgccccgacccgggtctggtgctgaggatacagctcttctcagtgtctgaacaatctccaaaattgaaatgtatatttttgctaggagccccagcttcctgtgtttttaatataaatagtgtacacagactgacgaaactttaaataaatgggaattaaatatttaa

SEQ ID NO: 14551 - DNA, 2932 bp, Homo sapiens
ctggtgcccttaacctccaaagcaggcaacattgtgtgtccaggcctgtggaccagaaacacaggatgttttgtgactgacagagtgatccaaaatggagaaggatgaccccccacagttggtgactcccacatcagtgaaagccatcatcctgaggattgaggctgcccagctaactcgggctcaagaggatatttctacccagctctcagacattttggacaatgtcaattgtgtcatcaaccgcttccaggaagaattaggatatgatttaaaagaaaatgccaaatctcagcagagagatccaaagggcaagaagagattcatcttgctggaaaaaattgcctccttctccaaagatgctatgatgaaggagaagcacctgtatgacattctccgctggctgggtgactggggtgacactctgacctatgagattgggcccaggaagagtgaagaggaagcagcagctctggacgaatggattgaagtgacggagaaagtgttaccgctgtccctcattgccaccaaaagaggcatcgagtcactcactgccctttgctccactctcattgaaggacaaaagaaaaggtcacaagtgtccaaacgcaccttctggcagggctggcagggaagaagcccacagacatctccatcccatcctcagccactaagcccagaacagatgctccaggaccagcataccatgaacacgaaggcctcggaggtgacgtccatgctgcaggagctcctggactctaccatgttcagcaagggggaggtcagggccatcaggtacatggccactgtggtggagaacctcaacaaggccttgatcctccaacacaaggagaacaggagcctggagaccaaatacaggcacctgcaaatgcaggcgaccaaagagctcagcagccagaggctgcacttccagcagttcatggaggtccttgagagcaggagggatgctctgctgaagcaggtagagatcttagggggaaggtaccatgaccttctcctgatgaagcaggccttggagttccagctgaagaaggctcagaatgctacaggtcaggcagaagacctggctgaggtttctgttgactccccaggtccctctgagagagagaccctcccaaggaaagaaacagtcatggaggaaagccaacaggaaccgatgaaggaggagcagttgttctcgccacttcccccaagtcccatggccatgatacgggacagtggtgctatagctgcagggcaccagccactttccaccatgactgtgcgctcgagggtcgcagatgtgttcggcagcaaggacactgagagccttgagcctgtgcttttacccttagtagatcgcaggtttcctaagaaatgggaaagaccggtggcagaaagcttaggccacaaagacaaagaccaggaggactacttccagaagggaggactccaaattaagttccactgtagcaagcagctgtctctagagagctccaggcaggtgacctctgagagccaagaggagccctgggaggaggaattcggccgggagatgcggaggcagctgtggctggaggaggaggagatgtggcagcagcggcagaagaagtgggccctgctggagcaggagcatcaggagaagctgcggcagtggaatctggaagacctggccagggagcaacagcggagatgggtccagctagaaaaggagcaggagagcccacggagagagccagagcagctaggggaggatgtggagaggaggatcttcacacccaccagtcgatggagggacttggagaaggcagagctatcattagtgcctgccccaagccggacccaatctgctcaccaaagcaggaggccacacttgcccatgtctcctagtacccagcagcctgccctgggaaagcagagacctatgagttcagtggagtttacctacagaccacggacccgccgagttcccacaaagcccaagaaatctgcctcctttcctgtcactgggacatccatccgaaggctgacctggccctctttgcagatatcccctgcaaatattaagaagaaggtgtaccacatggacatggaggcccagaggaagaacctgcagctcctgagtgaggagtctgagttgaggctgccccactacctgcgcagcaaagcactggagctcaccaccaccaccatggagctgggcgcgctcaggctgcagtacctgtgccataagtacatcttctatagacgcctccagagcctccggcaagaagcgatcaaccatgtacaaatcatgaaagaaacggaggcttcctacaaggcccagaacctctacatcttcctggaaaacattgaccgcctgcagagtctcaggctgcaggcctggacggacaagcagaaggggctggaggagaagcaccgagagtgcctgagcagcatggtgaccatgttccccaagctccagctggagtggaacgttcacctgaacatccctgaggtcacctcgccaaagccaaagaaatgcaagttgcctgcagcctcaccccggcacatccgccccagtggccccacctacaagcagccctttctgtctaggcaccgggcatgtgtgcccctgcagatggcccgccaacaggggaagcagatggaggctgtctggaagaccgaggtggcctcctccagttacgcaatagaaaaaaagacccctgccagccttccccgggaccagctgaggggacacccagatattccccggctgttgacactggacgtgtagtcctcctgccacaaaagcctgaacttcctgaaggcccagtaaggtgcgaggctgatggtcaatgtggattctccccaataaatctctctccaggctttaaaaaaaaaaaaaaaaaaaaaaaaaaaaaaaaaaaaaaaaaaaaaaaaaaaaaaaaaa

SEQ ID NO: 14552 - DNA, 8252 bp, Homo sapiens
atgatgatggcaagaaagcaagatgtccgaattcccacctacaacatcagtgtggtgggattatctgggaccgagaaggaaaagggccagtgtgggattggaaagtcttgtttgtgcaaccgcttcgtgcgcccgagtgctgacgagtttcacttggaccatacctccgtcctcagcaccagtgactttggagggcgagtggtcaataatgaccactttctctactggggagaagttagccgctccctggaggattgtgtggaatgtaagatgcacattgtggagcagactgaatttattgatgatcagacttttcaacctcatcgaagcacggccctgcagccctatatcaagagagctgctgcgaccaagcttgcatcagctgaaaaactcatgtacttttgcactgaccagctggggctggagcaggactttgagcagaaacaaatgccagacggaaagctgctggttgatggttttcttcttggtattgatgttagcaggggcatgaataggaactttgatgaccagctcaagtttgtctccaatctctacaatcagcttgcaaaaacaaaaaagcccatagtggtggtcctgactaagtgtgacgaaggtgttgagcggtacattagagatgcacatacttttgccttaagcaaaaagaacctccaggttgtggagacctcagcgagatccaatgtaaacgtggacttggctttcagcaccttagtgcaactcattgataaaagtcggggaaagacaaaaatcattccttattttgaagctctcaagcagcagagtcagcagatagctacagcaaaagacaagtatgagtggctggtgagtcgcattgtgaaaaaccacaatgagaactggctgagtgtcagccgaaagatgcaggcctctccagaataccaggactatgtctacctggaagggactcagaaagccaagaagctgtttctacagcacatccaccgcctcaagcatgagcatatcgagcgtaggagaaagctgtacctggcagccctgccattagcttttgaagctcttatacctaatctagatgaaatagaccacctaagctgcataaaagccaaaaagctcttagaaaccaagccagaattcttgaagtggtttgttgtgcttgaagagaccccatgggatgccaccagtcacattgacaacatggaaaacgaacggattccctttgatttaatggataccgtccctgcagagcagctatacgaggcccacttagagaagctgaggaacgaaaggaaaagagttgagatgcgaagggcgtttaaagaaaacctggagacttctcctttcataactcccggaaagccttgggaagaggcccgtagttttattatgaatgaggatttctaccagtggctggaggaatctgtatacatggatatttatggcaaacaccaaaagcaaattatagataaagcaaaggaagaatttcaggagttgcttttggaatattcagaattgttttatgaactggagctggatgctaagcccagcaaggagaagatgggtgttattcaggatgttctgggagaggaacagcgatttaaagcattacaaaagctccaagcagagcgtgatgcccttattctgaaacacattcattttgtgtaccacccaacaaaggagacatgccccagctgcccagcttgtgtggacgctaagattgagcacttgattagttctcggtttatccggccgtctgaccggaatcagaaaaattcactctctgaccctaacattgatagaatcaacttggttatattgggcaaagacggccttgcccgagagttggccaatgagattcgagctctttgtacaaatgatgacaagtatgtgatagatggtaaaatgtatgagctttccctgaggccaatagaggggaatgtcaggcttcctgtgaactctttccagacgccaacatttcagccccacggctgtctctgcctttacaattcaaaggaatcgctatcctatgtagtggaaagtatagagaagagtagagagtccacgctgggccggcgggataatcatttagtccatctcccccttacattaattttggttaacaagagaggagacaccagtggagagactctgcatagcttaatacagcaaggtcaacaaattgctagcaaacttcagtgtgtctttctcgaccctgcttctgctggcattggttacggacgcaacattaatgaaaagcaaatcagtcaagttttgaagggactcctggactctaagcgtaacttaaacctggtcagttctactgctagcatcaaagatttggctgatgttgatctgcgaattgttatgtgtctgatgtgtggagatccttttagtgcagatgacatactttttcctgtccttcagtcccaaacctgtaaatcttcccattgtggaagcaacaactctgttttacttgaactaccaatcggactgcacaagaagcggattgaactgtctgttctttcataccattcctcctttagcatcagaaagagccggttggttcatgggtacattgttttttattcagccaaacgtaaggcctctttggctatgttacgtgcctttctttgtgaagtgcaggatattatccctattcagcttgtagcactcactgatggcgctgtagatgtcctggacaatgacttaagtagggaacagctaactgagggggaggagattgctcaagaaattgacggaaggttcacaagcatcccctgtagccaaccccagcataaacttgagatctttcacccattttttaaagatgtggtggaaaaaaagaacataatcgaggctactcatatgtacgataatgctgccgaggcctgtagcaccaccgaagaggtgtttaactccccccgggcaggatcaccgctctgcaactcaaacctgcaggattcagaagaagatatcgagccatcttacagcctgtttcgagaagacacatcactgccttctctgtccaaagaccattctaagctctctatggaactggagggaaatgatgggctgtctttcattatgagcaattttgagagtaaactgaacaacaaagtacctccgccagtcaaaccaaagcctcctgtccattttgaaattacaaagggggatctatcttatttagaccaaggccatagggatggacagaggaagtctgtgtcttctagcccctggctgcctcaggatgggtttgatccttctgactatgctgaacccatggatgctgtggtgaagccaaggaatgaagaagaaaacatatactccgtgccccatgacagcacccaaggcaaaatcatcaccattcggaatatcaacaaagcccagtccaacggcagcgggaatggttctgacagtgaaatggacaccagctctctagagcgagggcgcaaggtttccatcgtgagcaagccagtgctgtacaggacgagatgcacccggctggggcggtttgctagttaccggaccagcttcagcgtggggagtgatgatgagctggggcccatccggaagaaagaggaggatcaggcatcccagggttataaaggggacaatgctgtcattccatacgaaacagacgaagacccgcggaggaggaatattcttcgcagcctaaggaggaacactaagaaaccaaagcccaaaccccggccatccatcacaaaggcaacctgggagagtaactattttggggtgcccttaacaactgtcgtgactccagagaagccgatccccatttttattgaaagatgtattgagtacattgaagccacaggactgagcacggaaggcatctaccgggtcagcgggaacaagtctgagatggagagtctgcagagacagtttgatcaagaccacaacctggacctggcagagaaagactttacggtgaataccgtggctggtgccatgaagagctttttctcagaactgcctgaccccctggtcccgtataacatgcagatcgacttggtggaagcacacaaaatcaacgaccgggagcagaagttgcatgcccttaaggaggtattaaagaaatttccaaaggaaaaccacgaagtcttcaagtatgtcatctctcacctaaacaaggtcagccacaacaacaaggtgaatctcatgaccagcgagaacctctccatctgcttctggcccaccttgatgagacctgatttcagcactatggacgccctcacagccacgcgcacctaccagacaatcattgaactctttatccagcagtgccccttcttcttctacaatcggcccatcaccgagccccccggcgccaggcccagctccccctctgccgtggcttccaccgtccccttcctcacttccacgcctgtcacaagtcagccgtcgcccccacagtcgcctccacccaccccccagtccccaatgcagccactgcttccctccccgcttcatccccaccgtcccactccacagccttcccgaaacattccctggcaaacaaaggaacactaggagaaaaaatggaaaaacccttccagtaattaaaaaggaagaaaccacagaaagaaaactacagacctcaagattccactctgtgcccgcctctgccgggagggagggaggcacacaggtggagctgaccctcgtctttgtggcagcaaaaccaggatgcctggagctgtggcctgagggcctgctggggtcccactcacccacttaggtctagtcgctagatcccccgttttcccaagaagagggttcgagcccttggtggggacagctggggagatggcagtgcaggctggaacctgggctgccccagaacacagtccattacgatagaaacactaattgagcatgtgcgtggggtgggggtgtgtgtgcacatgtgagtgtgagtgtgtgtgggcgcttggtggggggttggggacagctggaaggtgccaggtgcacttggggttggggttggtgtgttgggtgttgaagtggaatcgtttcatcccagccatggaggccaccagcaggagtgttcatggggatgtgggcgaggtggggcactttgaaggaatggcggtctgctggtgccctcgaaggggcatccttcctggtcttcgctgacccagaggcgctgtgcctgcatatcatccaccaccaccctagcccagccttcccactgccccaggaaaagctcttctcctggccacctctgccccccagcacctcaaacttgcatggctgggctgtggcctctgcggccaggaagcctgacactaggcaccccccaggcgagagctagtggggtgcagagggccccatgccagacagcccttggggctcgttgcactttaagaaataggatctgtggtgtattccagggggcctgatggacacctttcccgggcgtctgcagctgccctgcccgtgcccgcctgcagtggttggagacgggagtggcccttcggctcccgagctccctctggggacggctggctcactgtctccagttctcaatggccaacgaaggtgcttggaaacacctaaccttgcaagttttaccgccttttgaggaacacaaatcggagaacaaacccagggttcaggcgtgttttctgtgaatgttggatgatgaatttttgtctcttctggtggagctgtgcctggccctgtaggcccagggttggctggaaggtgacatctgtgtttcgttttagctgaggttggcagaaacgttcccaaactcccccagccctggaccccagcagatgaggaaacggccccatttactgaccccgcccccttttcgaggttatgctcacctggtcagctcctcacgtaattgggggtggagggaaagcatggtggtgccctgggccgtccctgtgtgaacgcaggcaaaagcagcccagtccccctcactgcttgagctaacactgccacctcttttgtgtgagcacaaaagccacgtcccaagccacctggcccgattccacagatgtatgtgcggccagtgacttccccaggagtgtggagggggtggtgaggaggagcacctgggctctctacccctctcctcacagaagtacctgaaactaggtctggggcactcccaatgcagcgccttgtcagccaaggtgggcaggcagggactgtggcagcttatgtccaaagggagcccccatgcacaggaagccacagggttcctcttgtttcccccgctaacttcagcctctcatctgctgctccgggctgagggactagaggacatctcggtcgtttgaggggcatggccagtcgtggcaggccggccttcagcgtccggtcagggaagcgtgcagcccaaatgggcacttgcatgggagccacagaggagcgtccctggggattgttgggaccatgctgcccccactcccgcttttgttggggctctaagttctggaaggtgtgtgcacagagggtgctcatgggactcgcatgcagctctcagcactgggtgggagggcgttggcttgtccagaatggggacgtggggcagccacccctgcccagcgagagcgcagacaccgtgtgaggggacagcagcccttggtgcaaagccagagactgatcctggctctgacggctgaagagggaagacccaaggctgggtggcgtggctcgtgaatccacttagaattcttggcttgtgtcgcatactgggtgtcacggcacacatttactctgcattgtccccgtctttcccatcgcctagcgtttggggaggaacagggagagagcttcggggcgtctgtctccgtgctctcctgcctccaccgccttggttttgcttcctgctggaggcagggcacctgctgcgacccagattcttctgcaggatgtgtctgtctttgtcacggtggacagagggtgacatcataggagcagctcgctggccagaaggggatgggggcatccctgtgcctcactcagctcctgctgctcttagggaaaggaggcctgggtcaagccagcatccccttggtaaagacccccgcaggccaccaggcattctggacacgcacacacacacacacacacacacacacacacaaaacttcacagcaggccagctgcagtgacttgtcatcaagagtcacctcagctgcgcccccctcccatcctttcctatgagaagccactgctttgggggcgccggctagaaaaagtagggtgcggtggccaggagggcccctgccgcgcggggggctgggtctggttgagtcgctgctttcccgagggcagcgcagggatccggggaagctgcggcagggagcgggcgccggcttcgtggctctgaggtgtaacgggggtgggctccctccctcggaggacatcgtctgtgtccaggtcagaaagtggcccaggaagggggcagtttctgtcgcgggtccggtgggggcgcggccgcggtgcggtcggtgcagcgtggccaatgcgcggcgcgcgcgggggacagagcaggaggcggtctgtcacctcggccactgctgacctgggctggcctcccccagccctcccgtggcggagccggcagcgatgctacaggcctaagttattgtttgcataaaaagaatcatgttccctgtgtacatttaagaaaaaaacaaaaaaacggaaatgtcagaattgtatggaaataaaacttgtttgaaaatttggaatagtgctgctgccagcttatttttctggtacttgtattttcacatgttaaatgatctttatatatgttgaattaacaaatattttgagtttctgagaaaaaacaaaacatattaatggtattgaaatgtgttagtagtctggctgtgtgcccaaaattctgtttcgcagcaaaagtgaagacctgtatgtaaagaaagtataacaattatttctttgtattttaggggctttaaccggaacatcgtctagctggtgttaggaatgtttgcttaatttccagacttttttttaaaaacacatcgtgggttttttgaggctccaacctgattagtgcatggtcagccctcaatgaaggctgaggcatctctgactgaggtgtttttgtttggttttgttttttaaaatcatgtatttgctacaaagtattgtacttgtctcaatgggaatggtgtaaaaaacaaaaggccttatgtgatctgtatcatagttaataaatgaatcttgtaaaaaaccaaaaaaaaaaa

SEQ ID NO: 14553 - DNA, 477 bp, Homo sapiens
atggaaaaagcattgaaaattgacacacctcagcaggggagcattcaggatatcaatcatcgggtgtgggttcttcaggaccagacgctcatagcagtcccgaggaaggaccgtatgtctccagtcactattgccttaatctcatgccgacatgtggagacccttgagaaagacagagggaaccccatctacctgggcctgaatggactcaatctctgcctgatgtgtgctaaagtcggggaccagcccacactgcagctgaaggaaaaggatataatggatttgtacaaccaacccgagcctgtgaagtcctttctcttctaccacagccagagtggcaggaactccaccttcgagtctgtggctttccctggctggttcatcgctgtcagctctgaaggaggctgtcctctcatccttacccaagaactggggaaagccaacactactgactttgggttaactatgctgttttaa

SEQ ID NO: 14554 - DNA, 4857 bp, Homo sapiens
cagactcacgcagctccagcccatcttgctgacctaattcagaaaagaagtgctacagctctgtgcctgtcatctttgcagtgtagcattttcaggtgatctaggaaacagttatttttatgagcaaataagagaaacaggaatcatgatggggatatatttaacagacccagtactggataaaacttaaagccagtttctattcaacatagtgaaaaggtcaccttgcctggctgagaaaagcagcaaaatatcagctttgttggtttcagttaacctcttagcccgggctaatctcttttccttgatgttcaaaccaatttgggatatctaactctaaagagagacacactgtactcatggtagatgacaaggaaaagaacatgaaatgtctcaccttcttcttgatgcttccagagacggtaaagaacaggtccaagaaaagctcaaagaaagcaaataccagcagcagcagtagcaacagcagcaagttgccaccagtttgttatgaaataattaccttgaagactaaaaagaagaagatggctgctgatatattcccccgtaaaaagccagccaactccagcagcaccagcgtccagcagtaccaccagcagaatctcagtaacaacaaccttatcccggccccaaactggcagggtctttatcccaccattagagagagaaatgcgatgatgttcaataatgatttgatggcagatgtacattttgtggttgggccaccaggtgggactcaacggttgccaggacacaaatatgttttagctgttgggagctctgtgttccatgcgatgttttacggagaacttgcagaggacaaagatgaaatccgtataccagatgtcgaacctgctgcttttctcgctatgctgaaatatatctattgtgatgaaattgacttggctgctgacacagtgctggccacactttatgctgccaaaaagtacattgtccctcaccttgccagagcctgtgttaatttcctggagaccagcctgagtgccaagaatgcctgtgtgctcctctcccagagctgcctgttcgaggagccagacctgacccagcgttgctgggaggtgattgatgcccaggctgagttagctctcaagtctgagggattctgcgatattgacttccagacactagaaagtattctccgtagggaaactctgaatgccaaagaaattgtggtttttgaggcagctctcaactgggctgaagtagaatgccaacgacaagatctggcgttgagcattgaaaataaacgcaaggttctaggaaaggcactttacttgatccgcatacccacaatggccctcgatgattttgcaaatggtgctgcacagtccggggtattaactctcaatgagaccaacgacatcttcctctggtatactgcagccaaaaagcctgagcttcagtttgtgagtaaagcccgtaagggccttgtcccccagcgctgtcaccgtttccagtcgtgtgcctatcgaagcaaccaatggcgctatcgtggtcgctgtgacagcatccagtttgcagttgataaaagagtgttcattgctggctttgggctgtatggctccagctgtggttctgcagaatacagtgccaagattgaacttaagcggcagggcgttgtcctggggcagaacttgagcaagtacttctcagatgggtccagcaatacctttcccgtatggtttgaatacccagtgcagatcgagccagacaccttctacacagccagtgtgatactggatggcaatgaactcagctactttggacaagaaggcatgacagaagttcagtgtggcaaagtgactgtccagtttcagtgctcctcagatagcaccaatggcactggggtacagggagggcagatccctgaacttatattctatgcttgaaaactcacttcctgaagcagcttgagctccaaagtgcacatctggttccaacttgcctgatgcttagctcatctgcaaatatgtgatcagtgccggtaatttgtaatgaatgaagcggtaggcaggttctaatttcttttaaccttttaattatgtacaggcaaaaatgcagcattccgcttttaactatctgcttaaaagagctaacgttcttattaaggctttgtggtttttagagttgcatctatgaacctggggagattatgtgctttcccaagcgttccaccaccctctcagttttgtccctctgaagataattttggatcaccttgaatttccttttggacgttatttgatgaacagaaataaattgataacaagagttatttttaaacagaactcctcttaccccccaaaacagataaacctcagtgtacaattttgaaagaagttttgccttgtaatgagtaataatttagaaagtagacagtggttgtgtttggctctcgttttattccttttacatttgttgcttctgggatttaaaaaattactaaattcataagatagttaggtattaaacacttcagaatatcaatgtaaaattggaaaataaggaactgggggcatttgtttaggccatgacttctacaagcagatttcttttcttttagtttagaagacaaaaaatttcaatacagatacttcttttagaagtaaatttttagattttattgtcagtagaaaaaagttaaactcctactaatttaaactaagacagtttaaaaaggaagcctgaaaaagactcatactacaaataatttaattgatggcatataagaatatgcagtttgaaaaagccaaactcttctctccacttagcttttgatccccactgtttgcttatttgtataagtcatactgtgtagaatttctattttctttttccccattaaaagaggaccaaacaattctttatacaaatggagtagcaactagttttgtagcactacatttaatgtaatgagatacctttgttcatttttttaaatttgaaatatactttacctgatccactttgattgtatactatattctttgttaattttaattttgtcctgttcctagactgctagaatctggcccctggccatcttaaagtgccaacatatgcctgcagggtttataaaaaatggcctggagtgacacattttattatacctaatattcactgcatcagtatcacatctagctcccttacttgtccacagataatgtaaacaaaggagggaaaaacttattaaattctccttcgctgctggcttgtgctggtttagtgcctgtgtccctggcagtgtccagtgtgttcacttccagttgaagtatccatgtgtttctgggcagcttttctgctcagtgtgatcctgagatggcttccccgccgccacccagagtgtggtccttggccgcctcctgctcctgctctgcaagcctgaaactggcttgtctggagccaggagttagtcctggggtgtgtgtgtgcctgcgcacccatgcgcatgcaagtgtgtttgccagctcaggagctgtctcctctctacctggctagtaagaggtgggacagtaatggtcctcctgctggccccagcaaggcccatgagtgactgccctgacgtattcactgtgcctctgggccacttcttcccctgtagatgtgggcttgttgccttcagccggcttccctgagggaggagaacactggattattggaaatgttttaatcactcttgccattacctacatctattagcatagatgatgaaaagctgttactggtgattatagatgagtatttccaggacaacattctaaaagtacaattatttcttattggggagattacaggtagtttggcaaagcattgaagtacaaaggtacattttcaattaaaaagcacacttctacaaaagatttggtttttaaattatggttacacatttcagtaactcatagctgctgtgcaaattggtagaccttataagaaggcacttgtttgtaagccagagaagaaactttaattgcatcctatcagattgttgaggtgggtgtgatagtcttcaggtgcagtgcgttcattcactaacgctcactgtcagtgcccatgtttgctagctgcctccatgtgactagtgagctgctggtgaaagtcgtgtgaaatcctgtacactgtgtatagaacaatgtaattttatgttaattgttattactttaaaacatatctaccatctgattggctggtaccgagagctgtgggtaaaatttgaaaattgtatttagaataagaaattttacattttaaaccctattgtcctttatgcattttcaatgaaatggaatgaaggctaatatgcttgctttatttacttttgtaatcttggattttgtagcttttaaaactagaaaccattgttctaacaaagcaggcaactttattctataaacacaactttattaagcagaatacactgtagatgcttttccccaacgtatctggctggcagtctttgtcgttgttcattctggggataaaggggaactaggctagcagttctaatgtgacattctttaagcatatcttaaaatagtatttaagtaaatggtctaatttctacataattattgcactgaacttttttgtttattaaggtgtttaaataagctcagctaattcaagacactgtagtcacttgtgcatcagtgtgcttgaatttagtagcttacagcattatttatgaaggaaaaaatacataaatatgaagtacctcatgttgaatgttattgtactgtatttttaatgtaacagtgcagatcttgttagacacatgaatgtgtataatcatgttaaatgcaaataaaactagttcataga

SEQ ID NO: 14555 - DNA, 6101 bp, Homo sapiens
agccaggaggcggaagttcccgcgggcggtggggacggcgccctcaccgcgagtcacttgtcagcccttgtctgaggcggaggcagccccgcgccgcgccggacccgagcatatttcattttctgtcattggactttgagccattagaaccatgagcaactacagtgtgtcactggttggcccagctccttggggtttccggctgcagggcggtaaggatttcaacatgcctctgacaatctctagtctaaaagatggcggcaaggcagcccaggcaaatgtaagaataggcgatgtggttctcagcattgatggaataaatgcacaaggaatgactcatcttgaagcccagaataagattaagggttgtacaggctctttgaatatgactctgcaaagagcatctgctgcacccaagcctgagccggttcctgttcaaaagggagaacctaaagaagtagttaaacctgtgcccattacatctcctgctgtgtccaaagtcacttccacaaacaacatggcctacaataaggcaccacggccttttggttctgtgtcttcaccaaaagtcacatccatcccatcaccatcgtctgccttcaccccagcccatgcgaccacctcatcacatgcttccccttcacccgtggctgccgtcactcctcccctgttcgctgcatctggactgcatgctaatgccaatcttagtgctgaccagtctccatctgcactgagcgctggtaaaactgcagttaatgtcccacggcagcccacagtcaccagcgtgtgttccgagacttctcaggagctagcagagggacagagaagaggatcccagggtgacagtaaacagcaaaatggcccaccaagaaaacacattgtggagcgctatacagagttttatcatgtacccactcacagtgatgccagcaagaagagactgattgaggatactgaagactggcgtccaaggactggaacaactcagtctcgctctttccgaatccttgcccagatcactgggactgaacatttgaaagaatctgaagccgataatacaaagaaggcaaataactctcaggagccttctccgcagttggcttcctcggtagcttccacacggagcatgcccgagagcctggacagcccaacctctggcagaccaggggttaccagcctcacaactgcagctgccttcaagcctgtaggatccactggcgtcatcaagtcaccaagctggcaacggccaaaccaaggagtaccttccactggaagaatctcaaacagcgctacttactcaggatcagtggcaccagccaactcagctttgggacaaacccagccaagtgaccaggacactttagtgcaaagagctgagcacattccagcagggaaacgaactccgatgtgcgcccattgtaaccaggtcatcagaggaccattcttagtggcactggggaaatcttggcacccagaagaattcaactgcgctcactgcaaaaatacaatggcctacattggatttgtagaggagaaaggagccctgtattgtgagctgtgctatgagaaattctttgcccctgaatgtggtcgatgccaaaggaagatccttggagaagtcatcaatgcgttgaaacaaacttggcatgtttcctgttttgtgtgtgtagcctgtggaaagcccattcggaacaatgtttttcacttggaggatggtgaaccctactgtgagactgattattatgccctctttggtactatatgccatggatgtgaatttcccatagaagctggtgacatgttcctggaagctctgggctacacctggcatgacacttgctttgtatgctcagtgtgttgtgaaagtttggaaggtcagacctttttctccaagaaggacaagcccctgtgtaagaaacatgctcattctgtgaatttttgaaagtcaacagttcaggagaagagaaggaatttgaagagaaaaaggaaaattaaaattactaattaatttttagattcaatatttatatggagttttgaaaaataatagtggccctgaaggaataaattccagctttaaaaaccaagtctgaggaaatatttggcttcataaagtaaagagacggtttggcatttattattactttttcctgtattttatgcccataaaataagctttataaaaaccaatttcctgatggactattaaattcatcttagaataaattagtgaagaatttaattttagaataaataatccaatctgaaataattataccttctttccttgttaggtagttatgagtaaatctgcaaaaggcaatgaaaatgccttaaattttatcaataacagaattattgtatttaaaaaaaaactaatacttatctttaaaatagtaaataggattttaaacagagaattttatcagtaataggtgtcagtttttaaaaaattgcttgtaggctgagcgcggtggctcacgcctgtaatcccagcactttgggaggccaaggtgggtggaccacatgaggtcaggagtttgagatcagcctggccaacatggtgaaaccccatctctactaaaaatacaaaaattagccggacgcagtggcacgcgcctgtaatcccagctactcaagaggctgaggcacgagaatcacttgaacccgggagggagaggttgcagtgagccaagatcgtaccactgcactccagcctgggtgacagagtgagactctgtctccaaaaaaaaactttgcttgtatattatttttgccttacagtggatcattctagtaggaaaggacaataagattttttatcaaaatgtgtcatgccagtaagagatgttatattcttttctcatttcttccccacccaaaaataagctaccatatagcttataagtctcaaatttttgccttttactaaaatgtgattgtttctattcattgtgtatgcttcatcacctatattaggcaaattccatttttttcccttgtgctaaggtaaagatttaattaaataattttggcctctcatagttttctctctctttaaagagaataaatagagggccaggtgtggtggctcacgcctgtgatcccagcactttgggaggccaagacgggcggatcatgaggtcaagagatcaagatcatcctggccaacatggtgaaaccctgtctctactaaaaatacaaaaatgagctgggcatggtggggcgtgcctgtagtcccatgtacttgggaggctgaggcaggaaaattcttgaacccaggagacggaagttgcagtgagctgagatcacaccactgcactccagcctggtgacagagcaagactccggctcttaaaaaaaaaaaaaaaaaaaaaaaaagagagagagagaataaatagaaaagaatgtggctgggaattgtgaatcagaagattataccccccaattgtttttcaatccccttttctcaaataataaattagttaaatcagtttctgagttatgccactggctgatgaagagttgagaggtctctttgcagaatgatctttttgtttcgttttgtttcttcttctgcatttaaaaattaaaagattggtttgaggatgtgatgaaattgagactttttgtggttttctctcaataataagtgaaccaatttcaaatgtgatcacaaagtttggaaagcttttattcacagaggttgggtagtgttgggaggggagtttaattactcagattggcctgttatttgatttcctcctttgggaaaagaattatgtagataccacatggagacagggaaacaattgtggtaaaactgtggatcctgttgctatttgcccagtgagaaaacagattctggtatttgatttggtttttctctttgtttccagaatggatgaaagtccatgaacctcctaagttataatttaaatttgtttggggcaaggtgattttatagtcgagacagagccctaggtccttcctgccccatcactcacttacgacatcacttccattgtgtgcatgtttgttatagaggaggttttaggctacaatatttgtttaacctccctaagaactttcaaggcatctgtcctgaaagctgttaatttatggtctagcagatttatattatatgcagataataattaactggggataaaagaatggcaaggggtgacacaaagtagcaaactgaatacttctccaatagcaaccccaagctacctcctcaccctgcatcttggagggaggcaggaaatttcttttgaaataaagtgctggagctgaattctgcattatttatcgttgctgctgaaaccacctataaaagacttgctggctaatgtgcattgtcatataatgtacactgtcacatctttacagtcttgtatgttatagaatacaaaataagttgatggttttgtttggtgtgagctttttgtttgtttgtttagttttgccttcataggttatatgccaagatagtatttgataagtcaatgacatttggatgttttcttcaaagaattttatttgacccagatttcttataaagttatcttacattaaggatgtcattttcatcagaccttctttctacatattattcatgaagcataatgttgcatttctccaaattttatgcctgaaagggtagtgttgcttcctaaggtatcatgttgtctttgtgctttgtccatctcttccgtggcgaagctttatatctgttcctaaaacagttaatcctgtgaaataaatattgaacataatccagaagaatctctctgtttcccttggggaatgccatatttaattcaccagcagtaatcctttaataactggcagagcactttattcttctggtgagctccctgaatatttatttttctgattataaattttctatattagtagcattttttaattattacttcttcactatagagcatttacttttagtctctagatgtatattttggaatgctgtacttggcataacatagattaaaatcataatgcatgactaaaaactccttggatttatttcccattttaaaatttttagcggtaagttcagatttataatctttctctagacttccatggtctgaatgttgcctgctgaagtagcaacctaaaaagtatcccctgcttatgcttgtccagttggccctccatgtccataggcttcgcatctgtgattcagcccactgtgggtcaaaaatatttggggaaaaaaatggatggttgcgcctttgctgaacatgtacaaacttttttttgtcattaaacaatatagtataacaactatttacaaagcatttacattgtattagctattataggtaatctagagatgatttaaagtgtatggtaggatgtgcataggttatatgcaaatactacaccattttctataagggacttgaacatcatggactttagtatcctagggggttcttggaacccatcacccataggggcaccataggacaactatagtaccgtgtttatttcctattaattcaggttccgtttagagtctaaaactaaaacctaatcatttagtcacagtgtaaaaacaaatggaaataacagctcaaatcttcaaaatattactatagcattatgtttaaaataatctacaacaaaaatgtaccattttcaagcagtactacattaggagcccttttatagaaaataatttcttctttacccccgttccagtgtgaatctagtattctgttaacatttgtgtggcatttggagtttgtcatccccattgaagggagagccttctcagacatgaagcaagggaaacatactgaatagttttacacaaatttgatctggcttccatttgtccccctcatttcccaaatgtttaaatgtattggatttggattctcaatgtataagttgccttatctgttaatgtctatcttctgtctctttaattttgtatatctgctgttttgcttttggatacattttctaattagaagtcacatgataaatataatcagtatagtaataataccataatgtgcacatactcaataaataaatgactgcattgttgtaaatga

SEQ ID NO: 14556 - DNA, 2531 bp, Homo sapiens
agggagagaactctggaggaacgctgagctgagcagcaccgaggacagcgcccggcagcgcccgcgcccaggtctccctccgcagccctgactcgcgcacacgctgagcttttgctcactccccttcgcgcggacacagacacacgcatattcacacacccagacacacaccccgctgtacaatggcagaatcccacctgcagtcatccctcatcacagcctcacagtttttcgagatctggctccatttcgacgctgacggaagtggttacctggaaggaaaggagctgcagaacttgatccaggagctccagcaggcgcgaaagaaggctggattggagttatcacctgaaatgaaaacttttgtggatcagtatgggcaaagagatgatggaaaaataggaattgtagagttggctcacgtattacccacagaagagaatttcctgctgctcttccgatgccagcagctgaagtcctgtgaggaattcatgaagacatggagaaaatatgatactgaccacagtggcttcatagaaactgaggagcttaagaactttctaaaggacctgctagaaaaagcaaacaagactgttgatgacacaaaattagccgagtatacagacctaatgctgaaactatttgattcaaataatgatgggaagctggaattaactgagatggccaggttactaccagtgcaggagaattttcttcttaaattccagggaatcaaaatgtgtgggaaagagttcaataaggcttttgagctgtatgatcaggacggcaatggatacatagatgaaaatgaactggatgctttactgaaggatctgtgcgagaagaataaacaggatctggatattaataatattacaacatacaagaagaacataatggctttgtcggatggagggaagctgtaccgaacggatcttgctcttattctctgtgctggggataactagagttggtggccgcaaccacttgctagtgatacactgtatctaaaaaataactgtgcactataagggagtaggctgtattttcttttatatctgtaaatttaactgcatatagataattatccaggatgtgtggctcattcttttcagcttgtttctatactgtttgtaatatacagtttttgtaaccatatgattgaaaagaagaaagtctatgcttaggccagtcagtacacccaattttaaaaaataacatattcttgctttcacaaatatagttgaacaagatttccctaaaaattccaccaggattaatctctaaaattctagtctctgatttgcaaatgcacatttgtcactgaataatggaattatgtataacaagccaaacattcttattttagacaaccatagaactgtcccacaaaatatttctaagcttatttctaactattaggaggaatgtgcttttccatctaaaatactcaccaaaatatagttaattgtggctttatgaagttaacagtctcattacagatttagtttaccaatcaacagcatgtctactgcttggatccatacaaaactatcggttcaagttgatgtgacaagggaagggagcaccagatgacacataaatctgtctgattctatgcctgtatttccaacaaacttactgtcagagaatatgacctaaatccattttctaaactgttttcatgtgttgcaaattattctagtcaactgctgttttatgtcatactctgtgtaatctctgattaaatttaatatactgcatatcctggtgtctagtttgcatacttcctggattttctttctatgtagaactgttcatttccaccaagggtatctgctgcctctgaaaatatttttttctagctataacaactctattttttactacataattaaattttaatgtaaaattcatagcatcctgattattgaatgttatatcatcaatacttttgtgtattctgtggattctatatttcatattgagatcagcattcaaaatagttctatttctatctgcaaatagtttcaaatgagtttaaaaaaataacatctgaaaagaaatgctaatgtaatcatttatcttatctagcaagaagattctaaaacattctttaacatacatctaagtcagtttcacatatttgtagctagaatatcctatactggttatagttgatatgtaacagttggtgattttagatttctttgattgtgaaacagggagctatgagagatgtgtccatgtgaaatttacagttactgcctaggagttaatgatcgttctgggtcagcttgaatgtccccattctataaattcaacacttattttctgaattcataaaaataaccaaaaaatgtgagctataatgtttccctcaagaacaaacagaaacgagatttgccaaaaactaaaattcaacaaatgatgttgagtgggagattggctttgcctttagcgtgtaaatggaagcactgccattagactgaatttaactactaagaataaataaagaagaaaataacctt

SEQ ID NO: 14557 - DNA, 5019 bp, Homo sapiens
gcctccgctgcagtcgctgcgtctccaagcaacatggctgacaaggccaagcctgccaaagctgccaacaggacgccccccaagtccccgggggacccctcgaaggaccgggcagccaagaggctgtcgctggaatcggagggtgctggtgagggggcagccgcatcccctgagctcagtgccctggaggaggccttccggcgctttgccgtgcacggggacgccagggccaccgggagggagatgcacggcaagaactggtcgaagctgtgcaaggactgccaggtgatcgacggcaggaacgtgaccgtcactgacgtggacatcgtcttcagcaagatcaaagggaagtcttgccggaccatcacctttgagcagttccaggaggcgctggaggagctcgccaagaagcgattcaaagacaagagcagcgaggaggccgttcgcgaggtgcacaggctcatcgagggcaaggcgcccatcatctcaggggtgacgaaagccatctcgtcgcccacagtgtcgaggctcacggacaccaccaagttcacgggctcccacaaggagcgcttcgacccctctggcaagggcaagggcaaggctggccgcgtggatctggtggacgagtcaggctatgtgtccggctacaagcacgcaggcacctacgaccagaaggtgcaagggggcaagtagcccccgctccatgcctcgcggcactgccggtgtccccagagcagggactctgtcacctcgcacttcattacattcctgtactaactggggcagaactcagacgggtgccccagagggggctggggggcggccaggcccaggcctccctcctgcccctcctcctaccggatgcccccagcactcccctctcaaaccaggtttgggccccagttcgctgaccctcctaatacacctgcctcgtcctcagccatttccaaagtgtctcgcggatcacaccacactgggcacgtggtttgcaggtcaaaggggcgttttaaagcagctggctgtcatggcaacaggaggctgtgctgacctcctgagcggcagacaccttccaggagccctgagggtggcaggagctaaccccaaccagcaggcaactaacacggaattggccccacaccggacgtgggaggtgtctgtggggcccgaggcctgtcctgtgtgcagcggacaccacggggccttcctgctttcctgggcagagggcagagtgaggccacctggcgggggtgctgggcgcctggcacatgtgtggggaagccggtcacatggacacacctgtgcacacatgcctacaggccagctctgtgccaagggcaacctaggtaaaacgaaagccgtcaggggcagtgggcggcttcccggctgaccacagtggcttggactgtgagggtagagtaggctcgctttgctttcctgagaagatgcggtggctgcctatgttctcagagcgggtctgggaagattcagaatgtccggtccctgtggtgttgccaggcaagagacacgaagtgccgagacactcctcgcctcaccgcgtgacagagcctctgcccggccctcccgttcgcccgtcctcactagctgcaccctgtttgctcgcagacctcccattgccacagcccaagcaccttcttcaactctcccaaaatggctcagcctaacctctcctggccaatcccccccgccggagagcaggacactagggaggacccccagtcctgcagtgtctgtgggggtttctctgccagcagggggctgagcagagcccatccaggacactccacactgccaggacacacccaggcggcccgcccttgcctgtctgcacctggggagaagccggcgctcctgctccctcctggggaggctgacgggtgtggccacccgctgtcacaatggcacactgccactgtcccttggcacgcacacagccacagccacacgtgtgacctgctgggccgtggttctggagtctacctgcggatgagcctgcggcagtcctggggaaacttttccagagcctgttagcccgtggctacggtcaggctctggccagggcagagggctgcccagggccaggctcacagtacaggagggtggcgaggcccctccctcactggcacgcatgagcaccacccgcctccccgactcccaagagtgcacctgctgcggccacagctccgtggaaggactccccctacctgagcagagcagaagccccagggcggagctcccagccagcatggtccgctgagggctggggggcggtctccgaggcccctcaacagagaagcctccacctgaggatggggaggacctggcaggcagcttccacggcagggctgggaagttcagtgcctggaaataaagagcaaggaaaaatggacctcaggcttcgtggctcctttaggatgtcacctcaccggcctggggaaggcggggggtgcccaagcccagccctgtgcccccgctgaacctggctggaccgcgtgtgaaaggcagaactaacgtgcggaaacatttgaaaacaactctgaatgtgcggttcggaatcacccgatcacagacgagcggtcaccggaatcgcccggtcacagacgagcagtcatcggactcacccgatcacagacgagcggtcaccggaatcgcccgatcacagacgagcggccaccggaatcgcccaatcacagacaagcagtcatcggaatcacccgatcacagacgagcagtcatcggactcacccgatcacagacgagcggtcaccagactcgcccgatcacagacgagcagtcatcggaatcacccgatcacagacgagcagtcatcggactcacccgatcacagacgagcggtcaccagaatcgcccgatcacagacgagcagtcatcggaatcacccgatcacagacgagtggccaccggaatcacccgataacagcccatcacaactccaaagcccttgtgttgaaaaggccgaggacgagtggtcaccaaacagggtggctccccaggtcccgaagcctgagacccggaaggccctggcacccttacaccctcggactcctgccctcctcggcctccctggccccagcgcggctccaccctgggctgcgtctcctggtcacaggctgcgtttctcctttctgtccgtgggcagcccagtccccacagtcacggccaagccacgcagaacgaacatgactccagaggacctcgccctggagctgagcctggcgccgggtcaggacggagggaagggcgggttggggtccgcgggtcctcacaccgcacggcaggcacagaggctcgccaggccctgatccggtctgtggggacgagggacactgaggagaggtgctgggcaccaggacgctgcctcctggtccctggttggcctcagacaagcacggcctcgagaaaagagccaagcgcatcgggagcacaccagaaaccggccctgagcacgagaagagcctccgcccggcccgggcaccacccgacctcgcagggagcaggccctgtcaccgacgggtcacctcgcccacacggccagcaccgactcaccacagcccttcccagacctggctggagtggccggagcggcggggctcatggctcccatcttggcccctggaggtgagctcattcacagaagtggtcccttcactctgagagagaaaatcgtggcgtgcatcccaaaccctaggccacgcctgtgggtttcgtgaatgagatcgaggctgctgtggcaccctgcccgtcctggcctggagcaccctgggatcctggagggagaggccccacgcccccactctccctccacacttccagggttggtgcccacgagttagaggcacggcctcccccagcggccctcaggcttttctcagacatgcgggagccaggagagcacccttctccactcagctccaaagcgaatctttgaaaacacccactcggctcccatctctgtcacctagccaggaggggtagcaaaaataaagtcacgaggacatagtggtcaccactgtcagttacaacttgtctgtggaatccgtaattgcatctgtgtgccgcctccgaacacagaacattgtttggacggcagccccactgcacataacagacccgtgcatcttcctcagtcagtttctgaatattgtgaattcaggcaggtgtgtgttctcttctgcatgtttttatgcactgccaattagcttctactaaccacggttcaacagaaaataaatgtgtatttgtgaataacaaactgcacaacctgcaaaccaggagagagggacaggttctgtcaggggtgacaccaggacacagggacaggttctgtcgggggtgacaccaggacacagggacaggttctgtcatgggtgacacgaggacacagggacaggttctatcatgggtgacaccaggagagagggacaggttctgttgggggtgacaagaggagacagggacaggttctgtcgggggtgacaccaggagagagggacaggttctgtcaggggtgacaccaggagagagggacaggttctgttgggggtgacaccaggacacaggaataggttctgtcgggaggacagtgctgatcgtgtctcagcatcaggaaaggagaaaggcagagggagagcgctgagaagactgttcacgccagagtgcttatttatttttaatttactgctataggataagcaaccaggtagtgttcctaacaattagcgttaccaaaattaaagttcaaattatatgtttaaaatattgtagaagatatatatttatactggactacttttacaccttctaatatcctgtccaagtttgggcgcagatggtggagttgggctggcatcatgtcctgtggccgccccacttgcctgttggtgccactccatcccgggccccagggatgccagctcagggctgaccacagcagccctgcgtgggcatcacctcctaccccagcccccatcctgggctgct

SEQ ID NO: 14558 - DNA, 4714 bp, Homo sapiens
tgggttccaaggcggctggcggcggtagcgtctctgtttccttgtgggcgctcgcgcggccctgggtagtctgtagagaatgccaaatgagggaatcccccactcaagtcaaactcaggagcaagactgtttacagagtcaacctgtcagtaataatgaagaaatggcaatcaagcaagaaagtggtggtgatggggaggtggaggagtacctgtcctttcgttctgtgggtgacgggctgtccacctctgctgtggggtgcgcatcagcagctccgaggagagggccagccctgctgcacatcgaccgacatcagatccaggcagtagagcctagcgcccaggcccttgagctgcagggtttgggtgtggacgtctatgaccaggacgtgctggaacagggagtgcttcagcaggtggacaatgccatccatgaggccagccgtgcctcccagctcgttgacgtggagaaggagtatcggtcggtcctggatgacctcacgtcatgtacgacatccctaaggcaaatcaataaaattattgaacagcttagccctcaagctgccaccagcagagacatcaacaggaaactagattctgtaaaacgacagaagtataataaggaacaacagctaaaaaagatcactgcaaaacaaaagcatctccaggccatccttggaggagcagaggtgaaaattgaactagatcacgccagtctggaggaggatgcagagccggggccatccagtcttggcagcatgctcatgcctgtccaggagactgcctgggaagagctcatccgcactggccagatgacaccttttggtacccagatccctcagaaacaggagaaaaagcccagaaaaatcatgcttaatgaagcatcaggcttcgaaaagtatttggcagatcaagcaaaactgtcttttgaaaggaagaagcaaggttgtaataaaagagcagctagaaaagctccagccccagtcacgcctccagccccagtgcaaaataaaaacaaaccaaacaagaaagccagagttctgtccaaaaaagaggagcgtttgaaaaagcacatcaagaaactccagaagagggctttgcagttccaggggaaagtgggattgccaaaggcaaggagaccttgggagtcagacatgaggccagaggcagagggagactctgagggtgaagagtctgagtatttccccacagaggaggaggaagaggaggaagatgacgaggtggagggggcagaggcggacctgtctggagatggtactgactatgagctgaagcctctgcccaagggcgggaaacggcagaagaaagtgccagtgcaggagattgatgatgactttttcccaagttctggggaagaagctgaagctgcttctgtaggagaaggaggaggaggaggtcggaaagtgggaagataccgagatgatggagatgaagattattataagcagcggttaaggagatggaataaactgagactgcaggacaaagagaaacgtctgaagctggaggacgattctgaggaaagtgatgctgaatttgacgaaggttttaaagtgccaggttttctgttcaaaaagctttttaagtaccagcagacaggtgttaggtggctgtgggaattgcactgccagcaggcaggaggaattctgggagatgaaatgggattgggcaagaccatccagataattgccttcttggcaggtctgagctacagcaagatcaggactcgtggttcaaattacaggtttgaggggttgggtccaactgtaattgtctgtccaacaacagtgatgcatcagtgggtgaaggaatttcacacgtggtggcctccgttcagagtggcaattctacatgaaaccggttcctatacccacaaaaaggagaaactaattcgagatgttgctcattgtcatggaattttgatcacatcttactcctacattcgattgatgcaggatgacattagcaggtatgactggcactatgtgatcttggacgaaggacacaaaattcgaaatccaaatgctgctgtcacccttgcttgcaaacagtttcgcacccctcatcggatcattctgtctggctcaccgatgcaaaataacctccgagagctgtggtcgctctttgacttcatcttcccgggaaagttaggcacgttgcctgtgtttatggagcagttctccgtccccatcaccatggggggatattcaaatgcttccccagtacaggtcaaaactgcttacaagtgtgcatgtgtcttacgagataccataaatccatacctactgcggagaatgaagtcagatgtcaagatgagcctttctttgccagataaaaatgaacaggtcttattttgccgtcttacagatgagcagcataaagtctaccaaaatttcgttgattccaaagaagtttacaggattctcaatggagagatgcagattttctccggacttatagccctaagaaaaatttgcaaccaccctgatctcttttctggaggtcccaagaatctcaaaggtcttcctgatgatgaactagaagaagatcagtttgggtactggaaacgttctgggaaaatgattgttgttgagtctttgttgaaaatatggcacaagcagggtcagcgagtattgctgttttctcagtcaaggcagatgctggacatacttgaagtattccttagagcccaaaagtatacctatctcaagatggatggtaccactacaatagcttcaagacagccactgattacgagatacaatgaggacacatccatatttgtgtttcttctgaccacgcgggtgggcggcttaggtgtcaacctgacgggggcaaacagagttgtcatctatgacccagactggaacccaagcacggacacgcaggcccgggagcgagcatggagaataggccagaagaagcaagtgactgtgtacaggctcctgactgcgggcaccattgaagaaaagatctaccaccgacaaatcttcaagcagtttttgacaaatagagtgctaaaagacccaaaacaaaggcggtttttcaaatccaatgatctctatgagctatttactctgactagtcctgatgcatcccagagcactgaaacaagtgcaatttttgcaggaactggatcagatgttcagacacccaaatgccatctaaaaagaaggattcaaccagcctttggagcagaccatgatgttccaaaacgcaagaagttccctgcttctaacatatctgtaaatgatgccacatcatctgaagagaaatctgaggctaaaggagctgaagtaaatgcagtaacttctaatcgaagtgatcctttgaaagatgaccctcacatgagtagtaatgtaactagcaatgataggcttggagaagagacaaatgcagtatctggaccagaagagttgtcagtgattagtggaaatggggaatgttcaaattcttcaggaacaggcaaaacttctatgccatctggtgatgaaagcattgatgaaaagttaggtctttcttacaaaagagaaagacccagccaggctcaaacagaagctttttgggagaataaacaaatggaaaataatttttataagcacaagtcaaaaacaaaacatcatagtgtggcagaagaagagaccctggagaaacatctgagaccaaagcaaaagcctaagaactctaagcattgcagagacgccaagtttgaaggaactcgaattccacacctggtgaagaaaaggcgttaccagaagcaagacagtgaaaacaagagtgaggccaaggaacagagcaatgacgattatgttttggaaaagcttttcaaaaaatcagttggcgtgcacagtgtcatgaagcacgatgccatcatggatggagccagcccagattatgtactggtggaggcagaagccaaccgagtggcccaggatgccctgaaagcactgaggctctctcgtcagcggtgtctgggagcagtgtctggtgttcccacctggactggccacagggggatttctggtgcaccagcaggaaaaaagagtagatttggtaagaaaaggaattctaacttctctgtgcagcatccttcatcaacatctccaacagagaagtgccaggatggcatcatgaaaaaggagggaaaagataatgtccctgagcattttagtggaagagcagaagatgcagactcttcatccgggcccctcgcttcctcctcactcttggctaaaatgagagctagaaaccacctgattctgccagagcgtttagaaagtgaaagcgggcacctgcaggaagcttctgccctgctgcccaccacagaacacgatgaccttctggtggagatgagaaacttcatcgctttccaggcccacactgatggccaggccagcaccagggagatactgcaggagtttgaatccaagttatctgcatcacagtcttgtgtcttccgagaactattgagaaatctgtgcactttccatagaacttctggtggtgaaggaatttggaaactcaagccagaatactgctaaacaacattgcttcctaaactttcaagtccctttttctaacgggcatttctgattattaatttattattaataatcatgtttgtcaatggaagttggctgcacttgatgtttgtttgcatgatgtctacctcagaattaaaactttaaggaagg

SEQ ID NO: 14559 - DNA, 3748 bp, Homo sapiens
cttttgatttcaagagttaggagctcgagaaccgtttggcaatatgtacgacgcggatgaggatatgcaatatgatgaggatgatgatgaaatcaccccggatttgtggcaagaagcatgctggattgtaatcagttcctattttgacgagaaaggcttggttagacaacagctggattcttttgatgagtttattcagatgtctgttcaaagaattgtggaagacgctcctcctatagacctacaggctgaagctcagcatgctagtggagaagttgaagaaccgccacgatatttgctgaagtttgaacaaatttatctttccaagcctacccattgggaaagagatggtgctccttcaccaatgatgcccaatgaagctagattaaggaatctcacgtattctgctccgctttatgttgatataacaaaaacagtcattaaagaaggtgaagaacaacttcagactcagcatcagaaaacttttataggaaaaattccaattatgttgcggtcaacttactgccttttgaatggcttgacagatcgtgatctttgtgagttaaatgaatgccctttggatcctggtggctatttcattattaatggatcagaaaaggttctgattgcccaagagaaaatggcaacaaacacagtttatgtgtttgccaaaaaggattctaaatatgcctacacaggagagtgtagatcatgtcttgagaattcttcccgacccaccagtactatatgggttagcatgctggcaagaggaggacagggtgccaagaagagtgctattggtcagcgcattgtggcaactctaccatatatcaagcaagaagttcccatcattattgtgttcagagcattaggttttgtgtccgacagagatattttagaacatattatttatgattttgaagatccagagatgatggaaatggttaaaccttctctcgatgaagcttttgtcatccaagaacagaatgttgcactaaatttcattggttcacgaggagcaaagcctggtgttactaaagagaaaagaattaaatatgcaaaggaagttttacaaaaagaaatgctccctcatgttggtgtcagtgatttttgtgagaccaaaaaagcctatttcttgggatacatggttcataggttacttctggcagctttgggtagaagagaactagatgacagagatcactatggaaacaagagattggatcttgctgggccgctgcttgcattcttatttagaggtatgtttaagaatttgcttaaagaagtgcggatctatgcacagaaatttattgatcgaggaaaggattttaacttggagttggcaattaaaacacggatcatatctgatggcctaaaatactctttagctactggaaactggggtgatcaaaagaaagctcatcaagccagagctggagtatctcaggtgttaaaccgcctgacttttgcgtctactctttctcacctgcgtcgtttaaattctcctattggtagagacggcaagctagcaaaaccaagacagttgcataatacgttgtggggaatggtgtgtcctgccgagaccccagagggccatgctgtaggacttgtgaagaatttagccttgatggcgtatatttcagttggatctcaaccatctccaattctggaatttttagaagaatggagtatggaaaatttagaagaaatttctcctgcagctattgctgatgcaaccaagatttttgttaatggctgctgggttggaatacataaagatcccgaacaacttatgaacaccctaaggaaattgagacgtcagatggacatcattgtgtctgaagtttctatgatcagagatattcgagagagggagattcggatctatacggatgcaggccgtatttgtagaccacttctgattgtggaaaaacaaaagctacttttgaagaagaggcatattgaccaattgaaagagagagaatataacaactatagttggcaggatcttgtggccagtggggtagtggagtatattgataccctggaagaagaaacagtgatgcttgcaatgactccagatgatttacaggagaaagaagtagcttattgttccacatatacacactgtgagattcatccctcaatgatccttggtgtctgtgcatctattattccctttcctgatcataaccagtcccctagaaacacataccagtctgctatgggtaagcaggctatgggagtttacatcaccaacttccatgttcgcatggacacattggcccatgttctctattatcctcaaaagccacttgtgactacacggtctatggaatatctacgatttagagagctgccagcaggcatcaactcaattgtggccattgcatcatacactggatataatcaggaagactctgttatcatgaatcgttcagctgtagaccgcggcttcttcaggtctgttttctatcgctcatacaaagaacaggagtctaaaaaaggatttgatcaagaagaagtttttgagaagcctacacgtgaaacatgccagggcatgaggcatgccatttacgacaagctggatgatgatggtttgatagctccaggggttcgtgtatcaggagatgatgttattataggcaaaacagtcaccttgcctgaaaatgaagatgaattggagagcaccaatagacgctataccaagagagactgtagcacttttctcagaactagtgagacgggcattgtggatcaggttatggtaactctcaatcaggaaggatataaattttgtaaaataagggtacgctctgttaggattccacagattggagacaaatttgctagtcgacatggtcaaaagggtacttgtggtattcagtatagacaagaggatatgcctttcacctgtgaaggtatcacccctgatatcatcatcaatccccatgccatcccctctcgtatgactattggtcacttaattgaatgccttcaagggaaggtatcggctaacaagggtgaaattggtgatgccactccatttaatgatgctgttaacgtgcagaagatttctaatcttttatctgattatggctatcatctcagaggaaatgaggtcctgtacaatgggttcactggtcgaaaaatcacatcacaaatatttattggccccacttattaccagcgtttgaagcatatggtggatgataagattcactctcgtgctaggggacctattcagatcctcaatagacagcccatggagggtagatctcgtgatggtggcctgcgttttggagaaatggaacgagattgtcagattgcccatggagcagcccagtttttaagggaaagattgtttgaggcatcagatccatatcaggttcatgtttgcaatctttgtggaataatggcgattgccaacaccaggacccatacatatgaatgcaggggctgccgcaataaaacccagatttctttggtgcgaatgccttacgcatgcaaactattgtttcaggaacttatgtctatgagtattgcaccgcgaatgatgagtgtttagctattttacaggagtcaacaagataattaaatatcttggtgtcttgtttctattgtgtggctttataaaaatgacaaatatgtactgtgttgtgataaaaagtattttatttgtttaatgatatgcatgcttttcttctgtaaatatataataaatttttgtagatagtcttgatgtgtg

SEQ ID NO: 14560 - DNA, 4814 bp, Homo sapiens
gaattctagaggcggcggagggtggcgaggagctctcgctttctctcgctccctccctctccgactccgtctctctctctctctctctctctcccctccctctctttccctctgttccattttttccccctctaaatcctccctgccctgcgcgcctggacacagatttaggaagcgaattcgctcacgttttaggacaaggaagagagagaggcacgggagaagagcccagcaagatttggattgaaaccgagacaccctccggaggctcggagcagaggaaggaggaggagggcggcgaacggaagccagtttgcaattcaagttttgatagcgctggtagaagggggtttaaatcagatttttttttttttaaaggagagagactttttccgctctctcgctccctgttaaagccgggtctagcacagctgcagacgccaccagcgagaaagagggagaggaagacagatagggggcgggggaagaagaaaaagaaaggtaaaaagtcttctaggagaacctttcacatttgcaacaaaagacctaggggctggagagagattcctgggacgcagggctggagtgtctatttcgagctcagcggcagggctcgggcgcgagtcgagaccctgctcgctcctctcgcttctgaaaccgacgttcaggagcggctttttaaaaacgcaaggcacaaggacggtcacccgcgcgactatgtttgctgatttttcgccttgccctctttaaaagcggcctcccattctccaaaagacacttcccctcctccctttgaagtgcattagttgtgatttctgcctccttttcttttttctttcttttttgttttgctttttccccccttttgaattatgtgctgctgttaaacaacaacaaaaaaacaacaaaacacagcagctgcggacttgtccccggctggagcccagcgccccgcctggagtggatgagcctctccatgagagatccggtcattcctgggacaagcatggcctaccatccgttcctacctcaccgggcgccggacttcgccatgagcgcggtgctgggtcaccagccgccgttcttccccgcgctgacgctgcctcccaacggcgcggcggcgctctcgctgccgggcgccctggccaagccgatcatggatcaattggtgggggcggccgagaccggcatcccgttctcctccctggggccccaggcgcatctgaggcctttgaagaccatggagcccgaagaagaggtggaggacgaccccaaggtgcacctggaggctaaagaactttgggatcagtttcacaagcggggcaccgagatggtcattaccaagtcgggaaggcgaatgtttcctccatttaaagtgagatgttctgggctggataaaaaagccaaatacattttattgatggacattatagctgctgatgactgtcgttataaatttcacaattctcggtggatggtggctggtaaggccgaccccgaaatgccaaagaggatgtacattcacccggacagccccgctactggggaacagtggatgtccaaagtcgtcactttccacaaactgaaactcaccaacaacatttcagacaaacatggatttactttggccttcccaagtgatcacgctacgtggcaggggaattatagttttggtactcagactatattgaactccatgcacaaataccagccccggttccacattgtaagagccaatgacatcttgaaactcccttatagtacatttcggacatacttgttccccgaaactgaattcatcgctgtgactgcataccagaatgataagataacccagttaaaaatagacaacaacccttttgcaaaaggtttccgggacactggaaatggccgaagagaaaaaagaaaacagctcaccctgcagtccatgagggtgtttgatgaaagacacaaaaaggagaatgggacctctgatgagtcctccagtgaacaagcagctttcaactgcttcgcccaggcttcttctccagccgcctccactgtagggacatcgaacctcaaagatttatgtcccagcgagggtgagagcgacgccgaggccgagagcaaagaggagcatggccccgaggcctgcgacgcggccaagatctccaccaccacgtcggaggagccctgccgtgacaagggcagccccgcggtcaaggctcaccttttcgctgctgagcggccccgggacagcgggcggctggacaaagcgtcgcccgactcacgccatagccccgccaccatctcgtccagcactcgcggcctgggcgcggaggagcgcaggagcccggttcgcgagggcacagcgccggccaaggtggaagaggcgcgcgcgctcccgggcaaggaggccttcgcgccgctcacggtgcagacggacgcggccgccgcgcacctggcccagggccccctgcctggcctcggcttcgccccgggcctggcgggccaacagttcttcaacgggcacccgctcttcctgcaccccagccagtttgccatggggggcgccttctccagcatggcggccgctggcatgggtcccctcctggccacggtttctggggcctccaccggtgtctcgggcctggattccacggccatggcctctgccgctgcggcgcagggactgtccggggcgtccgcggccaccctgcccttccacctccagcagcacgtcctggcctctcagggcctggccatgtcccctttcggaagcctgttcccttacccctacacgtacatggccgcagcggcggccgcctcctctgcggcagcctccagctcggtgcaccgccaccccttcctcaatctgaacaccatgcgcccgcggctgcgctacagcccctactccatcccggtgccggtcccggacggcagcagtctgctcaccaccgccctgccctccatggcggcggccgcggggcccctggacggcaaagtcgccgccctggccgccagcccggcctcggtggcagtggactcgggctctgaactcaacagccgctcctccacgctctcctccagctccatgtccttgtcgcccaaactctgcgcggagaaagaggcggccaccagcgaactgcagagcatccagcggttggttagcggcttggaagccaagccggacaggtcccgcagcgcgtccccgtagacccgtcccagacacgtcttttcattccagtccagttcaggctgccgtgcactttgtcggatataaaataaaccacgggcccgccatggcgttagcccttccttttgcagttgcgtctgggaaggggccccggactccctcgagagaatgtgctagagacagcccctgtcttcttggcgtggtttatatgtccgggatctggatcagattctgggggctcagaaacgtcggttgcattgagctactgggggtaggagttccaacatttatgtccagagcaacttccagcaaggctggtctgggtctctgcccaccaggcggggaggtgttcaaagacatctccctcagtgcggatttatatatatatttttccttcactgtgtcaagtggaaacaaaaacaaaatctttcaaaaaaaaaatcgggacaagtgaacacattaacatgattctgtttgtgcagattaaaaactttatagggacttgcattatcggttctcaataaattactgagcagctttgtttggggagggaagtccctaccatccttgtttagtctatattaagaaaatctgtgtctttttaatattcttgtgatgttttcagagccgctgtaggtctcttcttgcatgtccacagtaatgtatttgtggtttttattttgaacgcttgcttttagagagaaaacaatatagccccctacccttttcccaatcctttgccctcaaatcagtgacccaagggagggggggatttaaagggaaggagtgggcaaaacacataaaatgaatttattatatctaagctctgtagcaggattcatgtcgttctttgacagttctttctctttcctgtatatgcaataacaaggttttaaaaaaataataaagaagtgagactattagacaaagtatttatgtaattatttgataactcttgtaaataggtggaatatgaatgcttggaaaattaaactttaatttattgacattgtacatagctctgtgtaaatagaattgcaactgtcaggttttgtgttcttgttttcctttagttgggtttatttccaggtcacagaattgctgttaacactagaaaacacacttcctgcaccaacaccaataccctttcaaaagagttgtctgcaacatttttgttttcttttttaatgtccaaaagtgggggaaagtgctatttcctattttcaccaaaattggggaaggagtgccactttccagctccacttcaaattccttaaaatataactgagattgctgtggggagggaggagggcagaggctgcggtttgactttttaatttttcttttgttatttgtatttgctagtctctgatttcctcaaaacgaagtggaatttactactgttgtcagtatcggtgttttgaattggtgcctgcctatagagatatattcacagttcaaaagtcaggtgctgagagatggtttaaagacaaattcatgaaggtatattttgtgttatagttgttgatgagttctttggttttctgtatttttccccctctctttaaaacatcactgaaatttcaataaatttttattgaaatgtctaaaaaaaaaaaaaaaaaaaaaaaaaaaaaaa

SEQ ID NO: 14561 - DNA, 3265 bp, Homo sapiens
agtttggtctggagcagctgaaaccggtttgagcgtggctgcttcctgccgctcgacgccgcggcaggccgcctgggggagcgctggcgaggcacggacggcgggcgcccggtacctctgcccgcggtcctcgctctcgggcggggcggcggcgacgcggacctgcggactagcgaacccggagcacgacatcataaaataaatccatcagaatgacaccttctcaggttgcctttgaaataagaggaactcttttaccaggagaagtttttgcgatatgtggaagctgtgatgctttgggaaactggaatcctcaaaatgctgtggctcttcttccagagaatgacacaggtgaaagcatgctatggaaagcaaccattgtactcagtagaggagtatcagttcagtatcgctacttcaaagggtactttttagaaccaaagactatcggtggtccatgtcaagtgatagttcacaagtgggagactcatctacaaccacgatcaataacccctttagaaagcgaaattattattgacgatggacaatttggaatccacaatggtgttgaaactctggattctggatggctgacatgtcagactgaaataagattacgtttgcattattctgaaaaacctcctgtgtcaataaccaagaaaaaattaaaaaaatctagatttagggtgaagctgacactagaaggcctggaggaagatgacgatgatagggtatctcccactgtactccacaaaatgtccaatagcttggagatatccttaataagcgacaatgagttcaagtgcaggcattcacagccggagtgtggttatggcttgcagcctgatcgttggacagagtacagcatacagacgatggaaccagataacctggaactaatctttgattttttcgaagaagatctcagtgagcacgtagttcagggtgatgcccttcctggacatgtgggtacagcttgtctcttatcatccaccattgctgagagtggaaagagtgctggaattcttactcttcccatcatgagcagaaattcccggaaaacaataggcaaagtgagagttgactatataattattaagccattaccaggatacagttgtgacatgaaatcttcattttccaagtattggaagccaagaataccattggatgttggccatcgaggtgcaggaaactctacaacaactgcccagctggctaaagttcaagaaaatactattgcttctttaagaaatgctgctagtcatggtgcagcctttgtagaatttgacgtacacctttcaaaggactttgtgcccgtggtatatcatgatcttacctgttgtttgactatgaaaaagaaatttgatgctgatccagttgaattatttgaaattccagtaaaagaattaacatttgaccaactccagttgttaaagctcactcatgtgactgcactgaaatctaaggatcggaaagaatctgtggttcaggaggaaaattccttttcagaaaatcagccatttccttctcttaagatggttttagagtctttgccagaagatgtagggtttaacattgaaataaaatggatctgccagcaaagggatggaatgtgggatggtaacttatcaacatattttgacatgaatctgtttttggatataattttaaaaactgttttagaaaattctgggaagaggagaatagtgttttcttcatttgatgcagatatttgcacaatggttcggcaaaagcagaacaaatatccgatactatttttaactcaaggaaaatctgagatttatcctgaactcatggacctcagatctcggacaacccccattgcaatgagctttgcacagtttgaaaatctactggggataaatgtacatactgaagacttgctcagaaacccatcctatattcaagaggcaaaagctaagggactagtcatattctgctggggtgatgataccaatgatcctgaaaacagaaggaaattgaaggaacttggagttaatggtctaatttatgataggatatatgattggatgcctgaacaaccaaatatattccaagtggagcaattggaacgcctgaagcaggaattgccagagcttaagagctgtttgtgtcccactgttagccgctttgttccctcatctttgtgtggggagtctgatatccatgtggatgccaacggcattgataacgtggagaatgcttagtttttattgcacagaggtcattttgggggcgtgcaccgctgttctgggtattcatttttcatcactgagcattgttgatctatgccttttgggcttctcagttcaatgaagcaataatgaagtatttaactctttcactacagttcttgcaagtatgctatttaaattacttggccaggtataattgccagtcagtctctttatagtgagaaaatttattggttagtaatataaatattttaaactaaatatataaatctataatgttaaacatatgttcattaaaagcatagcactttgaaattaactatataaatagctcatatttacacttacagcttttcatttgatcaggtctgaaatctttagcacttaaggaaaatgactatgcataattatacctgaccatgaaaaaaataagtacctcaaatgcatgcatttgcactggtgattccaactgcacaaatctttgtgccatcttgtatataggtattttttacatgggttgacatgcacacaacaccattttcattcagtatgaaccttgaggctgctgccatttttccacttaaccaaaccagcctgaaggtgaacctcgaaacttgtttcataaatctttcaaaagttgttttacatcaatgttaaaatttcaaaatgctgcagggtaatttaatgtataaaatattagtaagaaaaagtatgtattgcatacttagtagaatagatcacaacatacaaattcaattcagtgcatgctttaggtgttaagcatgagattgtacatgtttactgttaggtccttgcatctgtggtgctaggtgagtatgagaagatgtcaaggactggacgtattttgttgcctaaaaaaaaaaggctgtttgtaggcgttttaaatatgcttattttgtgtgtctctcactacctattacacactgttgctttgtgggtttgttttgtatgtgcgtgtgttatacagtagttaaatttccatgcagaaaaataaatgtcctgaattttcaaaaaaaaaaaaaaaa

SEQ ID NO: 14562 - DNA, 7710 bp, Homo sapiens
caaccaaccagtggttcatcccagccgtgaggggggacattccccctgggtgtgcagcctatggcttcgtgtgtgacgggactcgcctcctggtgtttggtgggatggtggagtatgggaaatacagcaatgacctctacgaactccaggcgagccggtgggagtggaagagactcaaagcaaagacgcccaaaaacgggccccctccgtgtcctcgactcgggcacagcttctcccttgtgggcaacaaatgctacctgtttgggggtctggccaatgatagcgaggacccaaagaacaacattccaaggtacctgaatgacttatatatcctggaattacggccaggctctggagtggtagcctgggacattcccatcacttacggggtcctaccaccaccccgggagtcacatactgccgtggtctacaccgaaaaagacaataagaagtccaagctggtgatctacggcgggatgagtggctgcaggctgggggacctgtggaccctagatattgacaccctgacgtggaataagcccagtctcagcggggtggcgcctcttcctcgcagtctccactcggcaaccaccatcggaaataaaatgtacgtgtttggtggctgggtgcctctcgtcatggatgacgtcaaagtggccacacacgagaaggagtggaagtgtaccaacacgctggcttgtctcaacctggataccatggcctgggagaccatcctgatggatacactggaggacaacatcccccgtgctcgggctggccactgcgcagtcgccatcaacacccgcctgtacatttggagtgggcgtgacggctaccgcaaggcctggaacaaccaggtctgctgcaaggacctctggtacctagagacagaaaagccaccacccccagcccgagtacaactggtacgcgccaacaccaactccctggaggtgagctggggggcagtggcaacagccgacagctaccttctccagctccagaaatatgacattcctgccacggctgctactgccacctcccctacacccaatccggtcccatctgtgcctgccaaccctcccaagagccctgccccagcagcagccgcacctgctgtgcagccgctgacccaagtaggcatcacgctcctgccccaggctgcccccgcacccccgaccaccaccaccatccaggtcttgccaacggtgcctggcagctccatttctgtgcccaccgcagccaggactcaaggtgtccctgctgttctcaaagtgaccggtcctcaggctacaacaggaactccattggtcaccatgcgacctgccagccaggctgggaaagcccctgtcaccgtgacctcccttcccgccggagtgcggatggttgtgccaacacagagtgcccagggaacggtgattggcagtagcccacagatgagtgggatggccgcactggccgctgcggccgctgccacccagaagatccccccttcctcgcgacccacggtgctgagtgtcccagcgggtaccaccatcgtgaagaccatggctgtgacacctggcactaccaccctcccagccactgtgaaggtggcctcctcgccagtcatggtgagcgtgagcaaccctgccactcgcatgctgaagactgcagccgcccaggtggggacatcggtttcctccgccaccaacacgtctacccgccctatcatcacagtgcacaagtcaggcactgtgacagtggcccagcaagcccaggtggtgaccacagttgtgggcggggtcaccaagaccatcaccctggtgaagagccccatctctgtcccaggaggcagtgctctgatttccaatctgggcaaagtgatgtcggtggtccagaccaaaccagttcagacttcagcagtcacaggccaggcgtccacgggtcctgtgactcagatcatccagaccaaagggcccctgccagcgggaacaatcctgaagctggtgacctcagcagatggcaagcccaccaccatcatcactaccacgcaggccagtggggcggggaccaagcccaccatcctgggcatcagcagcgtctcccccagtaccaccaagcccggcacgaccaccatcatcaaaaccatccccatgtcggccatcatcacccaggcgggcgccacgggtgtgaccagcagtcctggcatcaagtcacccatcaccatcatcaccaccaaggtgatgacttcaggaactggagcacctgcgaaaatcatcactgctgtccccaaaattgccactggccacgggcagcagggagtgacccaggtggtgcttaagggggccccgggacagccaggcaccatcctccgcactgtgcccatggggggtgttcgcctggtcacacccgtcaccgtctccgccgtcaagccagccgtcaccacgttggttgtgaaaggcaccacaggtgtcacgaccctaggcacagtgacaggcaccgtctccaccagccttgccggggcggggggccacagcactagtgcttccctggccacgcccatcaccaccttgggcaccattgccaccctctcaagccaggtgatcaaccccactgccatcactgtgtcggccgcacagaccacgctgacagcggcaggcgggctcacaaccccgaccatcaccatgcagcccgtgtcccagcccacccaggtaactctgatcacggcacctagtggggtggaggcccagcctgtgcatgacctccctgtgtccattctggcctccccgactacagaacagcccaccgccacagttaccatcgccgactcaggccagggtgatgtgcagcctggcactgtcaccttggtgtgctccaacccaccctgtgagacccacgagactggcaccaccaacacggccaccactactgttgtggctaaccttgggggacacccccagcccacccaagtgcagttcgtctgtgacagacaggaggcagctgcttctcttgtgacctcgactgtgggccagcagaatggtagcgtggtccgagtctgttcgaacccgccctgcgagacccacgagacgggcaccaccaacaccgccaccaccgccacctccaacatggccgggcagcatggctgctcaaacccaccctgcgagacccacgagacgggcaccaccaacactgccactacagccatgtcgagcgtcggcgccaaccaccagcgagatgcccgtcgggcctgtgcagctggcacccctgccgtgatccggatcagtgtggccactggggcgctggaggcagcccagggctctaagccccagtgccaaacccgccagaccagcgcgaccagcaccaccatgactgtgatggccaccggggccccgtgctcggccggcccactccttgggccgagcatggcacgggagcccgggggccgcagccctgcttttgtgcagttggcccctctgagcagcaaagtcaggctgagcagcccaagcattaaggaccttcctgcggggcgccacagccatgcggtcagcaccgctgccatgacccgttccagcgtgggtgctggggagccccgcatggcacctgtgtgcgagagcctccagggtggctcgcccagcaccacagtgactgtgacagccctggaggcactgctgtgcccctcggccaccgtgacccaagtctgctccaacccaccatgtgagacccacgagacaggcaccaccaacaccgccactacctcgaatgcaggcagcgcccagagggtgtgctccaacccgccatgcgagacccacgagacgggcaccacccacacggccaccaccgctacttcaaacgggggcacgggccagcccgagggtgggcagcagccccctgctggtcgcccctgtgagacacaccagaccacttccactggcaccaccatgtcggtcagcgtgggtgccctgcttcccgacgccacttcttcccacaggaccgtggagtctggcctagaggtggcggcggcacccagcgtcaccccccaggctggcaccgcgctgctggctcctttcccaacacagagggtgtgctccaaccccccctgtgagacccacgagacgggcaccactcacacggccaccactgtcacttccaacatgagttcaaaccaagaccccccacctgctgccagcgatcagggagaggtggagagcacccagggcgacagcgtgaacatcaccagctccagtgccatcacgacaaccgtgtcctccacactgacgcgggctgtgaccaccgtgacgcagtccacaccggtcccgggcccctctgtgccgcccccagaggaactccaggtgtcgccaggtcctcgccagcagctgccaccacggcagcttctgcagtcggcttccacagccctgatgggggagtccgccgaggtcctgtcagcctcccagacccctgagctcccggccgccgtggatctgagcagcacaggggagccatcttcgggccaggagtctgccggctctgcggtggtggccactgtggtggtccagccacccccacccacacagtccgaagtagaccagttatcacttccccaagagctaatggccgaggcccaagctggcaccaccaccctcatggtaacggggctcacccccgaggagctggcagtgacggctgctgcagaagcagctgcccaggccgcagccacggaggaagcccaggccctggccatccaggcggtgctccaggccgcgcagcaggccgtcatgggcaccggcgagcccatggacacctccgaggcagcagcaaccgtgactcaggcggagctggggcacctgtcggccgagggtcaggagggccaggccaccaccatacccattgtgctgacacagcaggagctggctgccctggtgcagcagcagcagctgcaggaggcccaggcccagcagcagcatcaccacctccccactgaggccctggcccctgccgacagtctcaacgacccagccattgagagcaattgcctcaatgagctggccggcacggtccccagcactgtggcgctgctgccctcaacggccactgagagcctggctccatccaacacatttgtggccccccagccggttgtggtggccagcccagccaagctgcaggctgcagctaccctgaccgaagtggccaatggcatcgagtccctgggtgtgaagccagacctgccgcccccacccagcaaagcccccatgaagaaggaaaaccagtggtttgatgtgggagtcattaagggcaccaatgtaatggtgacacactatttcctgccaccagatgatgctgtcccatcagacgatgatttgggcaccgtccctgactataaccagctgaagaagcaggagctgcagccaggcacagcctataagtttcgtgttgccggaatcaatgcctgtgcgcgggggcccttcagcgaaatctcagcctttaagacgtgcctgcctggtttcccaggggccccttgtgccattaaaatcagcaaaagtccggatggtgctcacctcacctgggagccaccctctgtgacctccggcaagattatcgagtactccgtgtacctggccatccagagctcacaggctgggggcgagctcaagagctccaccccggcccagctggccttcatgcgggtgtactgcgggcccagcccctcctgcctggtgcagtcctccagcctttccaacgcccacatcgactacaccaccaagcccgccatcatcttccgcatcgccgcccgcaatgagaagggctatggcccggccacacaagtgaggtggctgcaggaaaccagtaaagacagctctggcaccaagccagccaacaagcggcccatgtcctctccagaaatgaaatctgctccaaagaaatctaaggccgatggtcagtgagaggaagctgactagcccctggattcttctccagacccccctgcttcaggaacacccgccagggcccacccctcccaccccgtcccagcattcgcacttcaccctcgcgagccgctgttcactcctctcccctttctctttctctctgtttttaaaataatctaaagaaagcacattttaccattgctgttgggaggaagcagaggcagatgggaaagcagagagaggagcgcgcttcctttcctccccgctgccgcccaccctggggagagacttttgcggggagggaaggcggacgtgaggacagccagctccccctcccaaggctgtgcgttcctgagggccaggtcgggggcaggcatggaggggaggaaaggcgtccctcttggccctccccagagtggctttcctggcaccctggcctgggtgtctggttctgttttcttttcttccccttgtgtttccagtcacctaacttcccttcctcaggctcccccggcccaccctgctcagtgaccccacaggaagcttacacattttctcagaggcctttgtgctcccacctcttctaccctccccctcttctttcccattttaaaaaagaaaagaaggaaaaagaaaaaaggggcaaggagccccgcggcggcctgggcagcgcctgtgcagacctccctgcaggccgcactgccaactgctgcatttgttgtgttttttaggttgcaattggtgaagttcacactttcattgtaattttagcgtgtggggttttgtcccttttttgttgttgttagctgtgtacagaatgtgtaatcttttttcttttctcttttttttgttttgttttgttttgtttttgtttttttacttttttcttcttggctaattcttggcagggatctttctggaggaaaagctggggccagccagggcaggagaggtgtgaaatctgccacgaggggcctgctgtttgccacccagcccaacttcctgttgctggcccctgccctctgcccttttgcctgtcctcaggccgctggaacaaaggaaggacagctcattcctcatgggcgatcactccgcatctatagggtcgagcctaggggagcttgagggagggctggggcctccttgtcctggatttccagctctccccatgccccctccctgagcaccaccggcaccgcctcccaaacagggctgctggtttccgcagccactgctccacctcccccaaatcgtcatggaaagggtggagaatggaggggaaccaggcgtccttggaggcagcttgggagggtgactgtgtagtgtcacccacaagggaggctagggcaatggagcaggccaccagcagcagctgtgcagcatggaactcaggccaggctccgaggctgggggatctgcttggagttttctgccccccaccccaaacttctgtcgaggagcaaggcttgccagcaagtcagaaggatttgaaccgagcagccaatctttccagccctcccctaccgacctctgcctggagacgcagcagcctgtgtcctccagggcctctggtttgttgtattatagtatatttcgctgtggaaaatgtcacgtttagtcaccttggagcccactcacctggtcctgttgttttaccccatcccttctctcgcgcgcctattgatttgtttctgaggagagtacaccgttcactattgtagagtaacccctgtgactcaatattaccatagtgcgatgtcgttttgtgctattttgaacaattaaaagactttttttgaaataa

SEQ ID NO: 14563 - DNA, 4411 bp, Homo sapiens
gcgcgcggagccgcctcccctgggtcaggtctgatgggccggtgggcgcgctagtggtggccgccaccgccgaaaccgtcgacctcctgggccccagttccgcgtccagccccgcggcagcatggactacctgacgacgttcaccgagaagagtgggcgccttctgcggggcacggccaaccgcctgttggggttcgggggcggcggcgaagcccggcaggtgcgcttcgaagattacctgagggagccagcccagggggacctcgggtgcgggtccccgccccaccggcccccggcgccgtccagcccggagggacctgacactggccaaaagaagaccctagacaagaaagatggaagacgaatgtcttttcagaaacctaaagggactattgagtatactgttgaatcaagggattctttgaatagcatagccctgaagtttgatacaacacctaacgaacttgttcaattaaataagttattctcccgagcagttgttactggacaggttctgtatgttcctgatcctgaatatgtctccagtgttgagagctctccatctctaagccccgtaagtcctctgtcaccaacatcatctgaggctgaatttgataagaccactaatcctgatgtccatccaacagaagcaactccctcatctactttcactggtattcgacctgcacgagttgtatcttcaacttctgaggaggaggaagcatttactgagaaatttcttaaaattaattgcaaatatattaccagtggcaagggcacagtcagtggtgtgctgctagttacaccaaataatataatgtttgatccacataaaaatgaccctttggttcaagagaatggctgtgaggaatatggcatcatgtgtccaatggaagaggtgatgtcagctgcaatgtacaaagaaattttggatagcaaaataaaggaatctttacccatagatatagatcagctatcaggaagggacttctgccattcaaagaaaatgacaggaagtaacactgaggaaatagactcaagaatccgagatgcaggtaatgatagtgccagcactgctcctaggagcactgaggagtctctttctgaagatgtgttcacagaatcagaactttcccctatacgagaggagcttgtatcttcagatgaactgcgacaagataaatcttctggtgcgtcatcagaatctgtgcaaactgtcaatcaggctgaagtagaaagtctgacagtcaaatcagaatctactggtactcctggtcacttaagatctgatactgaacattctacaaatgaagttgggactttatgtcataaaactgatttaaataatcttgaaatggccattaaggaagatcagattgcagataactttcaaggaatatcaggtcctaaagaagacagcacaagtataaaaggtaattcagaccaggattcttttcttcatgagaattcgttacaccaagaagagagtcaaaaagaaaatatgccttgtggggaaacagcagaatttaaacaaaagcaaagtgttaacaaaggaaaacaaggaaaggagcaaaatcaggactcacagacagaggcagaagagctacgcaaactttggaaaacccatactatgcaacaaactaaacagcaaagggaaaatattcaacaagtgtcacaaaaagaagctaagcataaaattacatctgctgatggacacatagaaagttctgcacttttaaaagaaaagcaaaggcatcgattacataagttcttgtgtctcagagttggaaaaccaatgaggaaaacgtttgtatctcaagcaagtgctacaatgcaacagtatgcacagagagataagaaacatgaatattggtttgctgtgccacaagaaaggacagatcacttgtatgccttcttcattcagtggagtccagaaatatatgcagaagatactggcgaatataccagagaacctggatttatagtagtaaaaaagattgaggagtctgaaacaattgaggattctagtaatcaagcagcagccagagaatgggagattactacaagggaagacataaattcaaagcaggttgctacagtgaaagcagacctggagtctgaatcttttcgaccaaacctaagtgatcccagtgaacttttactgccagatcaaattgaaaagcttaccaagcatcttccaccaagaacaattggctatccatggactcttgtttatggtactggaaaacatggcacaagcttgaaaactctttatcgaacaatgacaggtttagacaccccagtgctgatggtgattaaagacagtgatggacaggtttttggtgcgttagcatctgagccactgaaagtgagtgatggcttttatggtactggagagacctttgtttttacattctgtccggagtttgaggtctttaagtggacaggagataatatgttttttatcaaaggagacatggattcactagctttcggtggtggaggaggagaatttgcgctttggcttgatggagatctctaccatggaagaagccattcttgtaaaacgtttgggaatcgtacactttctaagaaggaagatttctttatccaagatattgaaatctgggcttttgaataaataaaatgctctctgtcttagcaggagaatggcccaaacctgacatggacaagcattgtttggaaagttcaagaagcaatacagtgtaacatgtcacttgtgctttaaaattagtctgtatcaccatttattacagttataattttggagtttatttttcaaatcatgttcttgtcccagagttctttaggttaacactagggactgcgtccatgtactagtataacagcttgggtttgttagaatttgggcaacattttgattataatgacaacttcattttcacatgttactcagttccctaataggatggtgctcttttgttgaacctgtattgatttttttttttttaactatattgattcgtttactagaacagtctaattggggcattgaggaaatgaagactggatacttctgtatctgtgaagttggcacaggtaacatttggacatgttcatcttattcttaggaaggaaaaaatcacttgccaaaataatacatacttcatagaccactgagttctagtttttattcacactacaacattctctttaacgatgttgcaggtattctcaatttccttttaagaaaaatgaaatgtgaggagaattctggttgtaatagatgacagtacatatgatctgcaggtttgggcatatgctttcatcattaaattatctgataaagttacaagtcacaaaggagaatgagaacttaatgattctattggatttaatatattagcaagaaaacatactatttacatatgtgtagcttagtaaggcattaacataagtacaaaaactatgaaacagatgcatatttcctcaacatactgtgtcaggtatactgttttataatttggttgttttagccttattgcacaccaactcccaaaatataggttactcttgttcaaaaggaaaaaaaaaattgtgattttctttgagtggtatatgttattaattaccattagcatttgctcttataaagggcaatgattatagtagacaatattgtaactcagtagacttgttgaatatgcaaacttactgtcaagtgacctcaaaaaaaaaatgaaaagatagaatacactagtagttcttatcctcttttgtaggaaaccaataatagccattgtggcaataattcatcagttgattttaaagcttcatgttatgcaaaaaagaatcctgctgttatacatgtgacagtgactttgtgctgaaatttcagctattccagataaacattgtatatcttgtaaattaatgtttaaaggtgtagttttgttcttacagaaagtgttgattgccaggttgcttatagcactttaagttattctaaaaatgaaattataagccaaatatttggcttaagtagatttagttgtatagcacttacatatttagttcttttgaaagtttagataattatttaaagaaagcataatgctaatggaaaagaaaatctgatgttctattataatatgctattgctgaatatgaatagaaatacagggcatcatttccttgtctcattataagttagtaacaatatatagattaaatgtttacaatatagggaattgtaaataaatatatcagtttttttccccttcggtcttccacagcagtattattgtctttgtggagttgactaatgataatttaaaaatcctgtaatggatttctactaaaataaggtcatagtggcatataccaaataaaatcaaatacagaaatacaagaaaaaaaaaaaaaaaaa

SEQ ID NO: 14564 - DNA, 1022 bp, Homo sapiens
cacccccacctgccagagccttgatccctccctaggccctgcctaaccttgagttggccccaatccctcttggctgcagaagtccctttcacccccaatgagaggaggggcaggaccagatcttttgagagctgagggttgagggcattgagcaacacacagatttgtcgcctctgtccccgaagacacctgcaccctccatgcggagccaagatggggaatggaactgaggaagattataactttgtcttcaaggtggtgctgatcggcgaatcaggtgtggggaagaccaatctactctcccgattcacgcgcaatgagttcagccacgacagccgcaccaccatcggggttgagttctccacccgcactgtgatgttgggcaccgctgctgtcaaggctcagatctgggacacagctggcctggagcggtaccgagccatcacctcggcgtactatcgtggtgcagtgggggccctcctggtgtttgacctaaccaagcaccagacctatgctgtggtggagcgatggctgaaggagctctatgaccatgctgaagccacgatcgtcgtcatgctcgtgggtaacaaaagtgacctcagccaggcccgggaagtgcccactgaggaggcccgaatgttcgctgaaaacaatggactgctcttcctggagacctcagccctggactctaccaatgttgagctagcctttgagactgtcctgaaagaaatctttgcgaaggtgtccaagcagagacagaacagcatccggaccaatgccatcactctgggcagtgccaggctggacaggagcctggcctggggagaagagggcctgttgcatcagcctctgaccttggccagcaccacctgcccccactggctttttgtgccccttgtccccacttcagccccaggacctttccttgccctttggttccagatatcagactgttccctgttcacagcaccctcagggtcttaaggtcttcatgccctatcacaaatacctcttttatctgt

SEQ ID NO: 14565 - DNA, 1634 bp, Homo sapiens
gacgccgcccgaccctgcgactacgctgcggactcccgcccgctcccgctcgctcccgcggtcctcgctcgcctcgcgccggtagttttgggcctacacctcccctccccccgccagccgccaaagacttgaccacgtaacgagcccaactcccccgaacgccgcccgccgctcgccatggatgccggtgtgactgaaagtggactaaatgtgactctcaccattcggcttcttatgcacggaaaggaagtaggaagcatcattgggaagaaaggggagtcggttaagaggatccgcgaggagagtggcgcgcggatcaacatctcggaggggaattgtccggagagaatcatcactctgaccggccccaccaatgccatctttaaggctttcgctatgatcatcgacaagctggaggaagatatcaacagctccatgaccaacagtaccgcggccagcaggcccccggtcaccctgaggctggtggtgccggccacccagtgcggctccctgattgggaaaggcgggtgtaagatcaaagagatccgcgagagtacgggggcgcaggtccaggtggcgggggatatgctgcccaactccaccgagcgggccatcaccatcgctggcgtgccgcagtctgtcaccgagtgtgtcaagcagatttgcctggtcatgctggagacgctctcccagtctccgcaagggagagtcatgaccattccgtaccagcccatgccggccagctccccagtcatctgcgcgggcggccaagatcggtgcagcgacgctgtgggctacccccatgccacccatgacctggagggaccacctctagatgcctactcgattcaaggacaacacaccatttctccgctcgatctggccaagctgaaccaggtggcaagacaacagtctcactttgccatgatgcacggcgggaccggattcgccggaattgactccagctctccagaggtgaaaggctattgggcaagtttggatgcatctactcaaaccacccatgaactcaccattccaaataacttaattggctgcataatcgggcgccaaggcgccaacattaatgagatccgccagatgtccggggcccagatcaaaattgccaacccagtggaaggctcctctggtaggcaggttactatcactggctctgctgccagtattagtctggcccagtatctaatcaatgccaggctttcctctgagaagggcatggggtgcagctagaacagtgtaggttccctcaataacccctttctgctgttctcccatgatccaactgtgtaatttctggtcagtgattccaggttttaaataatttgtaagtgttcagtttctacacaactttatcatccgctaagaatttaaaaatcacattctctgttcagctgttaatgctgggatccatatttagttttataagcttttccctgtttttagttttgttttgggttttttggctcatgaattttatttctgtttgtcgataagaaatgtaagagtggaatgttaataaatttcagtttagttctgtaatgtcaagaatttaagaattaaaaaacggattggttaaaaaatgcttcatatttgaaaaagctgggaattgctgtctt

SEQ ID NO: 14566 - DNA, 985 bp, Homo sapiens
ccaaggttcagtgttacccctcatcaaccagcccagcagcatcttcgggattcccaatggcattgccctttgctttaatgatggccctggtggtgctcagctgcaagtcaagctgctctctgggctgtaatctgtctcaaacccacagcctgaataacaggaggactttgatgctcatggcacaaatgaggagaatctctcctttctcctgcctgaaggacagacatgactttgaatttccccaggaggaatttgatggcaaccagttccagaaagctcaagccatctctgtcctccatgagatgatgcagcagaccttcaatctcttcagcacaaagaactcatctgctgcttgggatgagaccctcctagaaaaattctacattgaacttttccagcaaatgaatgacctggaagcctgtgtgatacaggaggttggggtggaagagactcccctgatgaatgaggactccatcctggctgtgaagaaatacttccaaagaatcactctttatctgatggagaagaaatacagcccttgtgcctgggaggttgtcagagcagaaatcatgagatccttctctttttcaacaaacttgcaaaaaagattaaggaggaaggattgaaaactggttcatcatggaaatgattctcattgactaatacatcatctcacactttcatgttcttccatttcaaagactcacttctataaccaccacaagttgaatcaaaatttccaaatgttttcaggagtgttaagaagcatcgtgtttacctgtgcaggcactagtcctttacagatgaccattctgatgtctcctttcatctatttatttaaatatttatttatttaactatttttattatttaaattattttttatgtaatatcatgagtacctttacattgtggttaatgtaacaaatatgttcttcatatttagccaatatattaatttcctttttcattaaatttttactat

SEQ ID NO: 14567 - DNA, 3634 bp, Homo sapiens
ggacgggacggagccggggcagccagaagaggtgggaaaagcggaggaggacgcccaggaggaggcggcggcggcggccgggaagtgaaaggtctcgcaaagttcagcggcggctgcgggcgccgagccccgggctagcggcagacgagcccgcagggccgctccgcggggcagcgcagccaggccggctatggtcccggggctcccgccgccccccaggtgcccgggacccgccaggccggtgcgcgagggtcaccccacctccccgcgcggtcccggcccctggctcccagctgccggcgaccgctgaccgagcccggcgccccaggaggaggaagaaaccagggccccgttccctcccgaggacggcggcgcttcatcccgcagcccagaggtctcggctccctccggcacccgcccggcccggctgctcccggctcctcccggccatggggagctgcgcgcggctgctgctgctctggggctgcacggtggtggccgcaggactgagtggagtagctggagtgagttcccgctgtgaaaaagcctgcaaccctcggatgggaaatttggctttggggcgaaaactctgggcagacaccacctgcggtcagaatgctaccgaactgtactgcttctacagtgagaacacggatctgacttgtcggcagcccaaatgtgacaagtgcaatgctgcctatcctcacctggctcacctgccatctgccatggcagactcatccttccggtttcctcgcacatggtggcagtctgcggaggatgtgcacagagaaaagatccagttagacctggaagctgaattctacttcactcacctaattgtgatgttcaagtcccccaggccggctgccatggtgctggaccgctcccaggactttgggaaaacatggaagccttataagtactttgcgactaactgctccgctacatttggcctggaagatgatgttgtcaagaagggcgctatttgtacttctaaatactccagtccttttccatgcactggaggagaggttattttcaaagctttgtcaccaccatacgatacagagaacccttacagtgccaaagttcaggagcagctgaagatcaccaaccttcgcgtgcagctgctgaaacgacagtcttgtccctgtcagagaaatgacctgaacgaagagcctcaacattttacacactatgcaatctatgatttcattgtcaagggcagctgcttctgcaatggccacgctgatcaatgcatacctgttcatggcttcagacctgtcaaggccccaggaacattccacatggtccatgggaagtgtatgtgtaagcacaacacagcaggcagccactgccagcactgtgccccgttatacaatgaccggccatgggaggcagctgatggcaaaacgggggctcccaacgagtgcagaacctgcaagtgtaatgggcatgctgatacctgtcacttcgacgttaatgtgtgggaggcatcagggaatcgtagtggtggtgtctgtgatgactgtcagcacaacacagaaggacagtattgccagaggtgcaagccaggcttctatcgtgacctgcggagacccttctcagctccagatgcttgcaaaccgtgttcctgccatccagtaggatcagctgtccttcctgccaactcagtgaccttctgcgaccccagcaatggtgactgcccttgcaagcctggggtggcagggcgacgttgtgacaggtgcatggtgggatactggggcttcggagactatggctgtcgaccatgtgactgtgcggggagctgtgaccctatcaccggagactgcatcagcagccacacagacatagactggtatcatgaagttcctgacttccgtcccgtgcacaataagagcgaaccagcctgggagtgggaggatgcgcaggggttttctgcacttctacactcaggtaaatgcgaatgtaaggaacagacattaggaaatgccaaggcattctgtggaatgaaatattcatatgtgctaaaaataaagattttatcagctcatgataaaggtactcatgttgaggtcaatgtgaagattaaaaaggtcttaaaatctaccaaactgaagattttccgaggaaagcgaacattatatccagaatcatggacggacagaggatgcacttgtccaatcctcaatcctggtttggaataccttgtagcaggacatgaggatataagaacaggcaaactaattgtgaatatgaaaagctttgtccagcactggaaaccttctcttggaagaaaagtcatggatattttaaaaagagagtgcaagtagcattaagatggatagcacataatggcacttgtctatgtacaaaacacaaactttagagcaagaagacctcagacaggaaactggaattttttaaagtgccaaaacatatagaaatgtttgaatgcatgggtcttatctaacttatctcttctggacccatgtttaaatacagttttatttcatgaagagaaatgaaaacccctacactgatatctgttttctatgggactgattctgaaattcttaactattaagaatattttaatagcagcatgacatttagcagtaatccattaagggcagtacctctaacaaggacgccttccagcttcagcgatgttacttacgtttgatgctacttaaagtaatgaatgacgttttaaggaatccctaaccctactatcagaaaaggtgtttgttaaagagccttctcttgtgtgttacgcatgaactttggtctgtaggtgttaaatggaacctctccatgtgtatatagtatttccttgtataaagcactttactacctaccacttgtgttgtgaacgtttggtgactgctgttgaaagaaggaaaagggtgtgtgagaaagcctactgaagcagcagcactgccactacatgtggacaaaagtgaccatataaaagaagttgtgctatttaactctgaatacttggagaaactaggtgaagatgcaaccagaaaggagaatatgtatgcgtgaagtctcagctttgagctggaggctagattccaagatgacagccatgatgaaactttttaaaaaactaaaccagaagagactttaaaataagagaaagaaatcataaatgtagacatatgcttggctaaaggggaaatggactttaaattttaaagagctcatttgcaatgcacttgtatacacttcaaaaattattgtagacacagaatttgttatatttttgtgcttagtatttaaacctgaacattgaaacagttttcctccttgtctttcttaacagtaatagtcattatatttacctgttttttaacacaatgtatgtgatagtcaaaaaatcacagtttttcattattattcatcttctgtacccacgcataaccactatacatagtttcttttgtacttgaatatacaaaacatgaacacagtgccatatgaataatttcacatacagaacctttttttctctgaagtcctgtggacttgcaaatatatatatatattgctttgttaatttgtttttatatttcatatatgtaataaaggaatatgatctgaaaaaaaaaaaaaaaaaaaa

SEQ ID NO: 14568 - DNA, 3939 bp, Homo sapiens
ggtcagggtagttccccaaccctccctttcgtgaattccccctcgtcctcgctcaccttaaaaccatcgtgcatcaccatggcgagttgctccttcactcgcgaccaagcgacaagaagactaagaggtgcagcagcggcggcagcggcagctctagcagcagtggtgaccaccccgcttctttcctcgggaaccccgaccgcactcattgggaccgggtcgtcttgtccgggagccatgtggctctccacggccactggctcccggtcagactccgagtccgaagaggaggacctgcccgtcggggaggaagtctgcaaacgcggctacctgcggaaacagaagcatgggcacaggcgctacttcgtgctcaaactcgagactgctgacgccccagctcggctggaatactacgaaaatgccaggaagttccggcacagtgtccgcgccgcggcggctgcagcagcggcggccgcctctggcgccgcgatccccccgctcattccaccgcggcgcgtgatcaccctataccagtgcttttccgtgagccagcgagcagatgcaaggtaccgacacctcattgctcttttcacccaagacgaatacttcgcgatggtggccgagaacgagtcggagcaggaaagctggtacttgctgctcagccgcctcatcctcgagagcaagcgccgccgctgcggcacgctcggcgcgcagccggacggagagccggccgcgctggcggcggcagcggcggcggagccacccttctataaagatgtgtggcaggtaatagtcaaacccagggggctggggcacagaaaagagctgagcggcgtgttccggctgtgtctaaccgacgaggaggtcgtgtttgtgaggctgaacaccgaagtggccagcgtggtcgtccagctcctgagcatccgtcgctgtggacactcggagcagtatttcttcttggaagtaggcaggtccactgtcatcggtccgggagagctctggatgcaggtcgatgactgtgtggttgcccaaaacatgcatgagctgtttttggagaagatgagagccttgtgtgcagacgaatacagagcccgctgccgcagctacagcatcagcatcggcgcccacctgttaaccctgctgtccgctaggaggcacctgggcttggtgccgctcgagccgggaggctggctcagaaggtcccgctttgagcagttttgccacctcagggccatcggcgacggggaagacgagatgcttttcaccaggcgcttcgtaacacccagcgagcctgtggcccactccaggcgaggaagactgcacctgcccagagggcgcaggtcaaggagagcggtttcagtgccggccagcttttttcgccgcttagcacccagcccagcacgtccccggcaccctgcagaagccccgaacaatggagctcgcctgtcttctgaagtgtctggttctggctctggcaactttggggaggaaggcaatccccagggcaaagaagatcaggaaggaagcggaggtgactacatgcctatgaacaattggggctcaggaaatggccggggctcaggaggtggccagggctcaaatggccaaggctccagtagccatagctcgggaggaaaccagtgttcaggcgagggacagggatcccgaggtggtcagggctcaaatggccagggctcaggaggaaaccagtgctctagagatggccagggcaccgcaggtgggcacggttcaggtggtggccagagacctggaggtgggcatggctcaggtggtggccagggacctggagatggccatggctcaggtggtggcaagaactctggggggggcaaaggctcaggaagtgggaaaggatccgatggtgatggtgaacgtggaaaatctctgaagaaaagatcctattttggcaaattaactcaaagcaagcaacagcaaatgccaccacctccaccacctcctcctccacccccaccagctggaggaactggtggaaaagggaagtctgggggaagattcagactttatttttgtgttgacagaggagccacgaaagaatgcaaagaagccaaagaagtgaaagatgcagagatcccagaaggtgcagctcgaggtccccacagagccagagcttttgatgaagatgaggatgacccatacgtgccaatgaggccaggggtggccacccctcttgtaagctccagtgattatatgccaatggctcctcaaaatgtctctgcttcaaaaaagcgccactctcgatccccttttgaagattcaagagggtacatgatgatgtttcccagagtgagcccaccacctgctccgagtcctccaaaagcacctgatactaataaagaggatgactcaaaggacaatgacagtgagagtgactacatgtttatggctcctggagccggtgcaattccaaaaaaccccagaaatcctcagggtggctcttcctccaaaagttggagctcctacttctctctaccaaacccttttcggagctcacctttgggacagaatgacaacagtgagtatgtgccaatgttacctggaaagttcctggggaggggcctagacaaagaagtctcctataactgggaccccaaagatgcagcttcaaagccttcaggtgagggatcattctcaaagcctggagatgggggatcaccttcaaagccttcagatcatgagcccccaaagaataaagctaagagacctaaccgactttcttttattacaaaaggatataaaatcaagccaaaaccacaaaagcccacacatgagcagagagaagctgacagctctagtgactacgtcaacatggacttcactaaaagagagagcaatacaccagctccctctactcaaggactaccagattcgtggggcataattgctgaacccagacagtcagccttttctaattatgtgaatgttgagtttggagtgccatttccaaatccagcaaacgacctctcagatcttttaagagctataccacgtgccaaccccttatctctggacagtgctaggtggccacttcctccccttcccctcagtgctacaggtagcaatgctattgaggaagagggtgactacattgaagtaattttcaactcagcaatgacaccagccatggctcttgctgacagtgccattcgctatgatgctgaaacaggtcgaatctatgtggtcgacccattttctgagtgctgtatggatatttctctctcccccagccgatgttctgaaccaccacctgtagctaggctgctgcaggaagaagagcaggagagaagacgcccacaaagccgttctcaaagtttctttgcagcagccagagccgctgtctctgcttttccaacagacagcctcgagagagacctttccccatcctcagccccggctgtcgcttcggctgcagagccgactttagccctcagccaagttgtagctgcggcctccgcgctcgccgcagccccgggcatcggcgcagcagccgcagctgctggatttgactccgcctctgcccgctggtttcaacctgttgctaatgctgctgatgccgaagcagtaaggggagcccaagacgttgccggtggctcgaaccctggagcccacaacccatctgcaaaccttgccagaggtgataaccaggctggcggggctgccgctgcagctgccgctccggaaccaccacctcgcagtcgccgggtgccaagacccccggagagagaagattctgacaacgacgacgacactcacgtgagaatggattttgccagacgtgataatcagttcgactctcccaaaagaggtcggtaattttagaattaatttccctaaagtgaatggtcattgtctaatgattcgatgcgctacagtctacagtgttagggtatatttcattaa

SEQ ID NO: 14569 - DNA, 5821 bp, Homo sapiens
gctttgcccagtagttggaaagtgaactcgactcgtgatggttctcctgtcactttggttgatagcagccgctctggtagaggttaggacttcagctgatggacaagctggtaatgaagaaatggtgcaaatagatttaccaataaagagatatagagagtatgagctggtgactccagtcagcacaaatctagaaggacgctatctctcccatactctttctgcgagtcacaaaaagaggtcagcgagggacgtgtcttccaaccctgagcagttgttctttaacatcacggcatttggaaaagattttcatctgcgactaaagcccaacactcaactagtagctcctggggctgttgtggagtggcatgagacatctctggtgcctgggaatataaccgatcccattaacaaccatcaaccaggaagtgctacgtatagaatccggaaaacagagcctttgcagactaactgtgcttatgttggtgacatcgtggacattccaggaacctctgttgccatcagcaactgtgatggtctggctggaatgataaaaagtgataatgaagagtatttcattgaacccttggaaagaggtaaacagatggaggaagaaaaaggaaggattcatgttgtctacaagagatcagctgtagaacaggctcccatagacatgtccaaagacttccactacagagagtcggacctggaaggccttgatgatctaggtactgtttatggcaacatccaccagcagctgaatgaaacaatgagacgccgcagacacgcgggagaaaacgattacaatatcgaggtactgctgggagtggatgactctgtggtccgtttccatggcaaagagcacgtccaaaactacctcctgaccctaatgaacattgtgaatgaaatttaccatgatgagtccctcggagtgcatataaatgtggtcctggtgcgcatgataatgctgggatatgcaaagtccatcagcctcatagaaaggggaaacccatccagaagcttggagaatgtgtgtcgctgggcgtcccaacagcaaagatctgatctcaaccactctgaacaccatgaccatgcaatttttttaaccaggcaagactttggacctgctggaatgcaaggatatgctccagtcaccggcatgtgtcatccagtgagaagttgtaccctgaatcatgaggatggtttttcatctgcttttgtagtagcccatgaaacgggccatgtgttgggaatggagcatgatggacaaggcaacaggtgtggtgatgagactgctatgggaagtgtcatggctcccttggtacaagcagcattccatcgttaccactggtcccgatgcagtggtcaagaactgaaaagatatatccattcctatgactgtctccttgatgacccttttgatcatgattggcctaaactcccagaacttcctggaatcaattattctatggatgagcaatgtcgttttgattttggtgttggctataaaatgtgcaccgcgttccgaacctttgacccatgtaaacagctgtggtgtagccatcctgataatccctacttttgtaagactaaaaagggacctccacttgatgggactgaatgtgctgctggaaaatggtgctataagggtcattgcatgtggaagaatgctaatcagcaaaaacaagatggcaattgggggtcatggactaaatttggctcctgttctcggacatgtggaactggtgttcgtttcagaacacgccagtgcaataatcccatgcccatcaatggtggtcaggattgtcctggtgttaattttgagtaccagctttgtaacacagaagaatgccaaaaacactttgaggacttcagagcacagcagtgtcagcagcgaaactcccactttgaataccagaataccaaacaccactggttgccatatgaacatcctgaccccaagaaaagatgccacctttactgtcagtccaaggagactggagatgttgcttacatgaaacaactggtgcatgatggaacgcactgttcttacaaagatccatatagcatatgtgtgcgaggagagtgtgtgaaagtgggctgtgataaagaaattggttctaataaggttgaggataagtgtggtgtctgtggaggagataattcccactgccgaaccgtgaaggggacatttaccagaactcccaggaagcttgggtaccttaagatgtttgatataccccctggggctagacatgtgttaatccaagaagacgaggcttctcctcatattcttgctattaagaaccaggctacaggccattatattttaaatggcaaaggggaggaagccaagtcgcggaccttcatagatcttggtgtggagtgggattataacattgaagatgacattgaaagtcttcacaccgatggacctttacatgatcctgttattgttttgattatacctcaagaaaatgatacccgctctagcctgacatataagtacatcatccatgaagactctgtacctacaatcaacagcaacaatgtcatccaggaagaattagatacttttgagtgggctttgaagagctggtctcagtgttccaaaccctgtggtggaggtttccagtacactaaatatggatgccgtaggaaaagtgataataaaatggtccatcgcagcttctgtgaggccaacaaaaagccgaaacctattagacgaatgtgcaatattcaagagtgtacacatccactctgggtagcagaagaatgggaacactgcaccaaaacctgtggaagttctggctatcagcttcgcactgtacgctgccttcagccactccttgatggcaccaaccgctctgtgcacagcaaatactgcatgggtgaccgtcccgagagccgccggccctgtaacagagtgccctgccctgcacagtggaaaacaggaccctggagtgagtgttcagtgacctgcggtgaaggaacggaggtgaggcaggtcctctgcagggctggggaccactgtgatggtgaaaagcctgagtcggtcagagcctgtcaactgcctccttgtaatgatgaaccatgtttgggagacaagtccatattctgtcaaatggaagtgttggcacgatactgctccataccaggttataacaagttatgttgtgagtcctgcagcaagcgcagtagcaccctgccaccaccataccttctagaagctgctgaaactcatgatgatgtcatctctaaccctagtgacctccctagatctctagtgatgcctacatctttggttccttatcattcagagacccctgcaaagaagatgtctttgagtagcatctcttcagtgggaggtccaaatgcatatgctgctttcaggccaaacagtaaacctgatggtgctaatttacgccagaggagtgctcagcaagcaggaagtaagactgtgagactggtcaccgtaccatcctccccacccaccaagagggtccacctcagttcagcttcacaaatggctgctgcttccttctttgcagccagtgattcaataggtgcttcttctcaggcaagaacctcaaagaaagatggaaagatcattgacaacagacgtccgacaagatcatccaccttagaaagatgagaaagtgaaccaaaaaggctagaaaccagaggaaaacctggacaacctctctcttcccatggtgcatatgcttgtttaaagtggaaatctctatagatcgtcagctcattttatctgtaattggaagaacagaaagtgctggctcactttctagttgctttcatcctccttttgttctgcattgactcatttaccagaattcattggaagaaatcaccaaagattattacaaaagaaaaatatgttgctaagattgtgttggtcgctctctgaagcagaaaagggactggaaccaattgtgcatatcagctgactttttgtttgttttagaaaagttacagtaaaaattaaaaagagataccaatggtttacactttaacaagaaattttggatatggaacaaagaattcttagacttgtattcctatttatctatattagaaatattgtatgagcaaatttgcagctgttgtgtaaatactgtatattgcaaaaatcagtattattttaagagatgtgttctcaaatgattgtttactatattacatttctggatgttctaggtgcctgtcgttgagtattgccttgtttgacattctataggttaattttcaaagcagagtattacaaaagagaagttagaattacagctactgacaatataaagggttttgttgaatcaacaatgtgatacgtaaattatagaaaaagaaaagaaacacaaaagctatagatatacagatatcagcttacctattgccttctatacttataatttaaaggattggtgtcttagtacacttgtggtcacagggatcaacgaatagtaaataatgaactcgtgcaagacaaaactgaaaccctctttccaggacctcagtaggcaccgttgaggtgtcctttgtttttgtgtgtgtgtgttcttttttaattttcgcattgttgacagatacaaacagttatactcaatgtactgtaataatcgcaaaggaaaaagttttgggataacttatttgtatgttggtagctgagaaaaatatcatcagtctagaattgatatttgagtatagtagagctttggggctttgaaggcaggttcaagaaagcatatgtcgatggttgagatatttattttccatatggttcatgttcaaatgttcacaaccacaatgcatctgactgcaataatgtgctaataatttatgtcagtagtcaccttgctcacagcaaagccagaaatgctctctccagggagtagatgtaaagtacttgtacatagaattcagaactgaagatatttattaaaagttgattttttttcttgatagtatttttatgtactaaatatttacactaatatcaattacatattttggtaaactagagagacataattagagatgcatgctttgttctgtgcatagagacctttaagcaaactactacagccaactcaaaagctaaaactgaacaaatttgatgttatgcaaacatcttgcatttttagtagttgatattaagttgatgacttgtttcccttcaaggaaacattaaattgtatggactcagctagctgttcaatgaaattgtgaattagaaacatttttaaaagtttttgaaagagataagtgcatcatgaattacatgtacatgagaggagatagtgatatcagcataatgattttgaggtcagtacctgagctgtctaaaaatatattatacaaactaaaatgtagatgaattaacctctcaaagcacagaatgtgcaagaacttttgcattttaatcgttgtaaactaacagcttaaactattgactctatacctctaaagaattgctgctactttgtgcaagaactttgaaggtcaaattaggcaaattccagatagtaaaacaatccctaagccttaagtcttttttttttcctaaaaattcccatagaataaaattctctctagtttacttgtgtgtgcatacatctcatccacaggggaagataaagatggtcacacaaacagtttccataaagatgtacatattcattatacttctgacctttgggctttcttttctactaagctaaaaattcctttttatcaaagtgtacactactgatgctgtttgttgtactgagagcacgtaccaataaaaatgttaacaaaatat

SEQ ID NO: 14570 - DNA, 5802 bp, Homo sapiens
tttatagcagcagcagaaatataccaccctagaggacacacctccttttagctaggtacctataaatgtccaggattttctattcaattgagaagaacccagcaaaatggggatctccacagtcatccttgaaatgtgtcttttatggggacaagttctatctacaggtgggtggatcccaaggactacagactacgcttcactgattccctcggaggtgcccttggatcaaactgtagcagaaggttctccatttccctcggagtcgaccctggagtcaactgcagcagaaggttctccgatttccttggagtcaaccctggagtcaactgtagcagaaggttctctgattccctcagagtcaaccctggagtcaactgtagcagaaggatctgattctggtttggccctgaggctggtgaatggagatggcaggtgtcagggccgagtggagatcctataccgaggctcctggggcaccgtgtgtgatgacagctgggacaccaatgatgccaacgtggtctgtaggcagctgggttgtggctgggccatgtcagctccaggaaatgcctggtttggccagggctcaggacccattgccctggatgatgtgcgctgctcaggacacgaatcctacctgtggagctgcccccacaatggctggctctcccataactgtggccatggtgaagatgctggtgttatctgctcagctgcccagcctcagtcaacactcaggccagaaagttggcctgtcaggatatcaccacctgtacccacagaaggatctgaatccagtttggccctgaggctggtgaatggaggcgacaggtgtcgaggccgagtggaggtcctataccgaggctcctggggcaccgtgtgtgatgactactgggacaccaatgatgccaatgtggtctgcaggcagctgggctgtggctgggccatgtcagccccaggaaatgcccagtttggccagggctcaggacccattgtcctggatgatgtgcgctgctcaggacacgagtcctacctgtggagctgcccccacaatggctggctcacccacaactgtggccatagtgaagacgctggtgtcatctgctcagctccccagtcccggccgacacccagcccagatacttggccgacctcacatgcatcaacagcaggacctgaatccagtttggccctgaggctggtgaatggaggtgacaggtgtcagggccgagtggaggtcctataccgaggctcctggggcaccgtgtgtgatgatagctgggacaccagtgacgccaatgtggtctgccggcagctgggctgtggctgggccacgtcagccccaggaaatgcccggtttggccagggttcaggacccattgtcctggatgacgtgcgctgctcaggctatgagtcctacctgtggagctgcccccacaatggctggctctcccataactgtcagcacagtgaagacgctggtgtcatctgctcagctgcccactcctggtcgacgcccagtccagacacattgccgaccatcaccttgcctgcatcgacagtaggatctgaatccagtttggccctgaggctggtgaatggaggtgacaggtgtcagggccgagtggaggtcctataccaaggctcctggggcaccgtgtgcgatgacagctgggacaccaatgatgccaatgtcgtctgcaggcaaccgggctgtggctgggccatgtcagccccaggaaatgcccggtttggtcagggctcaggacccattgtcctggatgatgtgcgctgctcaggacacgagtcttacccgtggagctgcccccacaatggctggctctcccacaactgtggccatagtgaagacgctggtgtcatctgctcagcttcccagtcccggccaacacctagtccagacacttggccaacctcacatgcatcaacagcaggatctgaatccagtttggccctgaggctggtgaatggaggtgacaggtgtcagggccgagtggaggtcctataccgaggctcctggggcaccgtgtgtgatgactactgggacaccaatgatgccaatgtggtttgcaggcagctgggctgtggctgggccatgtcagccccaggaaatgcccggtttggccagggttcaggacccattgtcctggatgatgtgcgctgctcaggacatgagtcctatctgtggagctgcccccacaatggctggctctcccacaactgtggccatcatgaagacgctggtgtcatctgctcagcttcccagtcccagccgacacccagcccagacacttggccaacctcacatgcatcaacagcaggatctgaatccagtttggccctgaggctggtgaatggaggtgacaggtgtcagggccgagtggaggtcctataccgaggctcctggggcaccgtgtgtgatgactactgggacaccaatgatgccaatgtggtttgcaggcagctgggctgtggctgggccacgtcagccccaggaaatgcccggtttggccagggttcaggacccattgtcctggatgatgtgcgctgctcaggacatgagtcctatctgtggagctgcccccacaatggctggctctcccacaactgtggccatcatgaagacgctggtgtcatctgctcagcttcccagtcccagccgacacccagcccagacacttggccaacctctcgtgcatcaacagcaggatctgaatccactttggccctgagactggtgaatggaggtgacaggtgtcgaggccgagtggaggtcctataccaaggctcctggggcaccgtgtgtgatgactactgggacaccaatgatgccaacgtggtctgcaggcagctgggctgtggctgggccatgtcagccccaggaaatgcccagtttggccagggctcaggacccattgtcctggatgatgtgcgctgctcaggacacgagtcttacctgtggagctgcccccacaatggctggctctcccacaactgtggccatcatgaagatgctggtgtcatctgctcagctgctcagtcccagtcaacgcccaggccagatacttggctgaccaccaacttaccggcattgacagtaggatctgaatccagtttggctctgaggctggtgaatggaggtgacaggtgtcgaggccgagtggaggtcctgtatcgaggctcctggggaaccgtgtgtgatgacagctgggacaccaatgatgccaatgtggtctgcaggcagctgggctgtggctgggccatgtcggccccaggaaatgcccggtttggccagggctcaggacccattgtcctggatgatgtgcgctgctcagggaatgagtcctacctgtggagctgcccccacaaaggctggctcacccacaactgtggccatcacgaagacgctggtgtcatctgctcagccacccaaataaattctactacgacagattggtggcatccaacaactacaaccactgcaagaccctcttcaaattgtggtggcttcttattctatgccagtgggacattctccagcccatcctaccctgcatactaccccaacaatgctaagtgtgtttgggaaatagaagtgaattctggttatcgcataaacctgggcttcagtaatctgaaattggaggcacaccataactgcagttttgattatgttgaaatctttgatggatcattgaatagcagtctcctgctggggaaaatctgtaatgataccaggcaaatatttacatcttcttacaaccgaatgaccattcactttcgaagtgacatcagtttccaaaacactggctttttggcttggtataactccttcccaagcgatgccaccttgaggttggtcaatttaaattcatcctatggtctatgtgccgggcgtgtagaaatttaccatggtggcacctgggggacagtttgtgatgactcctggaccattcaggaagctgaggtggtctgcagacagctagggtgtggacgtgcagtttcagcccttggaaatgcatattttggctctggctctggccccatcaccctggacgatgtagagtgctcagggacggaatccactctctggcagtgccggaaccgaggctggttctcccacaactgtaatcatcgtgaagatgctggtgtcatctgctcaggaaaccatctatcgacacctgctccttttctcaacatcacccgtccaaacacagattattcctgcggaggcttcctatcccaaccatcaggggacttttccagcccattctatcccgggaactatccaaacaatgccaagtgtgtgtgggacattgaggtgcaaaacaactaccgtgtgactgtgatcttcagagatgtccagcttgaaggtggctgcaactatgattatattgaagttttcgatggcccctaccgcagttcccctctcattgctcgagtttgtgatggggccagaggctccttcacttcttcctccaacttcatgtccattcgcttcatcagtgaccacagcatcacaaggagagggttccgggctgagtactactccagtccctccaatgacagcaccaacctgctctgtctgccaaatcacatgcaagccagtgtgagcaggagctatctccaatccttgggcttttctgccagtgaccttgtcatttccacctggaatggatactacgagtgtcggccccagataacgccgaacctggtgatattcacaattccctactcaggctgcggcaccttcaagcaggcagacaatgacaccatcgactattccaacttcctcacagcagctgtctcaggtggcatcatcaagaggaggacagacctccgtattcacgtcagctgcagaatgcttcagaacacctgggtcgacaccatgtacattgctaatgacaccatccacgttgctaataacaccatccaggtcgaggaagtccagtatggcaattttgacgtgaacatttccttttatacttcctcatctttcttgtatcctgtgaccagccgcccttactacgtggacctgaaccaggacttgtacgttcaggctgaaatcctccattctgatgctgtactgaccttgtttgtggacacctgcgtggcatcaccatactccaatgacttcacgtctttgacttatgatctaatccggagtggatgcgtgagggatgacacctacggaccctactcctcgccgtctcttcgcattgcccgcttccggttcagggccttccacttcctgaaccgcttcccctccgtgtacctgcgttgtaaaatggtggtgtgcagagcgtatgacccctcttcccgctgctaccgaggctgtgtgttgaggtcgaagagggatgtgggctcctaccaggaaaaggtggacgtcgtcctgggtcccatccagctgcagacccccccacgccgagaagaggagcctcggtaggtggtcgctctcagaccccactgtccaccggggcgcagacccctgactcggggacttgggatgttcctcttggtgtcatattccaactcagattgagccctacattgtgctgcacctggtcatacggagttgaatcagacctggttcccgcctcccccaaggctcatggtccttggaggacccgttgcagggcgaggtcaagagagttctgacctggatggcccatagacctgacgtcccagaatccatgcttctcatctgcaaaatgaaaatgtcaatacttacttcttagcactgttgagagggttacttacataaaggaattttggtgaaactgc

SEQ ID NO: 14571 - DNA, 7686 bp, Homo sapiens
tttatagcagcagcagaaatataccaccctagaggacacacctccttttagctaggtacctataaatgtccaggattttctattcaattgagaagaacccagcaaaatggggatctccacagtcatccttgaaatgtgtcttttatggggacaagttctatctacaggtgggtggatcccaaggactacagactacgcttcactgattccctcggaggtgcccttggatcaaactgtagcagaaggttctccatttccctcggagtcgaccctggagtcaactgcagcagaaggttctccgatttccttggagtcaaccctggagtcaactgtagcagaaggttctctgattccctcagagtcaaccctggagtcaactgtagcagaaggatctgattctggtttggccctgaggctggtgaatggagatggcaggtgtcagggccgagtggagatcctataccgaggctcctggggcaccgtgtgtgatgacagctgggacaccaatgatgccaacgtggtctgtaggcagctgggttgtggctgggccatgtcagctccaggaaatgcctggtttggccagggctcaggacccattgccctggatgatgtgcgctgctcaggacacgaatcctacctgtggagctgcccccacaatggctggctctcccataactgtggccatggtgaagatgctggtgttatctgctcagctgcccagcctcagtcaacactcaggccagaaagttggcctgtcaggatatcaccacctgtacccacagaaggatctgaatccagtttggccctgaggctggtgaatggaggcgacaggtgtcgaggccgagtggaggtcctataccgaggctcctggggcaccgtgtgtgatgactactgggacaccaatgatgccaatgtggtctgcaggcagctgggctgtggctgggccatgtcagccccaggaaatgcccagtttggccagggctcaggacccattgtcctggatgatgtgcgctgctcaggacacgagtcctacctgtggagctgcccccacaatggctggctcacccacaactgtggccatagtgaagacgctggtgtcatctgctcagctccccagtcccggccgacacccagcccagatacttggccgacctcacatgcatcaacagcaggacctgaatccagtttggccctgaggctggtgaatggaggtgacaggtgtcagggccgagtggaggtcctataccgaggctcctggggcaccgtgtgtgatgatagctgggacaccagtgacgccaatgtggtctgccggcagctgggctgtggctgggccacgtcagccccaggaaatgcccggtttggccagggttcaggacccattgtcctggatgacgtgcgctgctcaggctatgagtcctacctgtggagctgcccccacaatggctggctctcccataactgtcagcacagtgaagacgctggtgtcatctgctcagctgcccactcctggtcgacgcccagtccagacacgttgccgaccatcaccttacctgcatcgacagtaggatctgaatccagtttggccctgaggctggtgaatggaggtgacaggtgtcagggccgagtggaggtcctataccgaggctcctggggcaccgtgtgtgatgacagctgggacaccaatgatgccaatgtggtctgcaggcagctgggctgtggctgggccatgttggccccaggaaatgcccggtttggtcagggctcaggacccattgtcctggatgacgtgcgctgctcagggaatgagtcctacttgtggagctgcccccacaatggctggctctcccataactgtggccatagtgaagacgctggtgtcatctgctcaggacctgaatccagtttggccctgaggctggtgaatggaggtgacaggtgtcagggccgagtggaggtcctataccgaggctcttggggcaccgtgtgtgatgacagctgggacaccaatgatgccaatgtggtctgcaggcagctgggctgtggctgggccatgtcagccccaggaaatgcccggtttggtcagggctcaggacccattgtcctggatgatgtgcgctgctcaggacatgagtcctacctgtggagctgccccaacaatggctggctctcccacaactgtggccatcatgaagatgctggtgtcatctgctcagctgcccagtcccggtcgacgcccaggccagacacgttgtcgaccatcacgttacctccatcgacagtaggatctgaatccagtttgaccctgaggctggtgaatggaagtgacaggtgtcagggccgagtagaggtcctataccgaggctcctggggcaccgtgtgtgatgacagctgggataccaatgatgccaatgtggtctgcaggcagctgggctgtggctgggccatgtcagccccaggaaatgcccggtttggccagggctcaggacccattgttctggatgatgtgcgctgctcaggacacgagtcctacctgtggagctgcccccacaatggctggctctcccacaactgtggccatcatgaagatgctggtgtcatctgctcagtttcccagtcccggccgacacccagtccagatacttggccgacctcacatgcatcaacagcaggatctgaatccagtttggccctgaggctggtgaatggaggtgacaggtgtcagggccgagtggaggtcctataccgaggctcctggggcaccgtgtgtgatgatagctgggacaccagtgacgccaatgtggtctgccggcagctgggctgtggctgggccacgtcagccccaggaaatgcccggtttggccagggttcaggacccattgtcctggatgacgtgcgctgctcaggctatgagtcctacctgtggagctgcccccacaatggctggctctcccataactgtcagcacagtgaagacgctggtgtcatctgctcagctgcccactcctggtcgacgcccagtccagacacattgccgaccatcaccttgcctgcatcgacagtaggatctgaatccagtttggccctgaggctggtgaatggaggtgacaggtgtcagggccgagtggaggtcctataccaaggctcctggggcaccgtgtgcgatgacagctgggacaccaatgatgccaatgtcgtctgcaggcaaccgggctgtggctgggccatgtcagccccaggaaatgcccggtttggtcagggctcaggacccattgtcctggatgatgtgcgctgctcaggacacgagtcttacccgtggagctgcccccacaatggctggctctcccacaactgtggccatagtgaagacgctggtgtcatctgctcagcttcccagtcccggccaacacctagtccagacacttggccaacctcacatgcatcaacagcaggatctgaatccagtttggccctgaggctggtgaatggaggtgacaggtgtcagggccgagtggaggtcctataccgaggctcctggggcaccgtgtgtgatgactactgggacaccaatgatgccaatgtggtttgcaggcagctgggctgtggctgggccatgtcagccccaggaaatgcccggtttggccagggttcaggacccattgtcctggatgatgtgcgctgctcaggacatgagtcctatctgtggagctgcccccacaatggctggctctcccacaactgtggccatcatgaagacgctggtgtcatctgctcagcttcccagtcccagccgacacccagcccagacacttggccaacctcacatgcatcaacagcaggatctgaatccagtttggccctgaggctggtgaatggaggtgacaggtgtcagggccgagtggaggtcctataccgaggctcctggggcaccgtgtgtgatgactactgggacaccaatgatgccaatgtggtttgcaggcagctgggctgtggctgggccacgtcagccccaggaaatgcccggtttggccagggttcaggacccattgtcctggatgatgtgcgctgctcaggacatgagtcctatctgtggagctgcccccacaatggctggctctcccacaactgtggccatcatgaagacgctggtgtcatctgctcagcttcccagtcccagccgacacccagcccagacacttggccaacctcacatgcatcaacagcaggatctgaatccagtttggccctgaggctggtgaatggaggtgacaggtgtcagggccgagtggaggtcctataccgaggctcctggggcaccgtgtgtgatgactactgggacaccaatgatgccaatgtggtttgcaggcagctgggctgtggctgggccacgtcagccccaggaaatgcccggtttggccagggttcaggacccattgtcctggatgatgtgcgctgctcaggacatgagtcctatctgtggagctgcccccacaatggctggctctcccacaactgtggccatcatgaagacgctggtgtcatctgctcagcttcccagtcccagccgacacccagcccagacacttggccaacctctcgtgcatcaacagcaggatctgaatccactttggccctgagactggtgaatggaggtgacaggtgtcgaggccgagtggaggtcctataccaaggctcctggggcaccgtgtgtgatgactactgggacaccaatgatgccaacgtggtctgcaggcagctgggctgtggctgggccatgtcagccccaggaaatgcccagtttggccagggctcaggacccattgtcctggatgatgtgcgctgctcaggacacgagtcttacctgtggagctgcccccacaatggctggctctcccacaactgtggccatcatgaagatgctggtgtcatctgctcagctgctcagtcccagtcaacgcccaggccagatacttggctgaccaccaacttaccggcattgacagtaggatctgaatccagtttggctctgaggctggtgaatggaggtgacaggtgtcgaggccgagtggaggtcctgtatcgaggctcctggggaaccgtgtgtgatgacagctgggacaccaatgatgccaatgtggtctgcaggcagctgggctgtggctgggccatgtcggccccaggaaatgcccggtttggccagggctcaggacccattgtcctggatgatgtgcgctgctcagggaatgagtcctacctgtggagctgcccccacaaaggctggctcacccacaactgtggccatcacgaagacgctggtgtcatctgctcagccacccaaataaattctactacgacagattggtggcatccaacaactacaaccactgcaagaccctcttcaaattgtggtggcttcttattctatgccagtgggacattctccagcccatcctaccctgcatactaccccaacaatgctaagtgtgtttgggaaatagaagtgaattctggttatcgcataaacctgggcttcagtaatctgaaattggaggcacaccataactgcagttttgattatgttgaaatctttgatggatcattgaatagcagtctcctgctggggaaaatctgtaatgataccaggcaaatatttacatcttcttacaaccgaatgaccattcactttcgaagtgacatcagtttccaaaacactggctttttggcttggtataactccttcccaagcgatgccaccttgaggttggtcaatttaaattcatcctatggtctatgtgccgggcgtgtagaaatttaccatggtggcacctgggggacagtttgtgatgactcctggaccattcaggaagctgaggtggtctgcagacagctagggtgtggacgtgcagtttcagcccttggaaatgcatattttggctctggctctggccccatcaccctggacgatgtagagtgctcagggacggaatccactctctggcagtgccggaaccgaggctggttctcccacaactgtaatcatcgtgaagatgctggtgtcatctgctcaggaaaccatctatcgacacctgctccttttctcaacatcacccgtccaaacacagattattcctgcggaggcttcctatcccaaccatcaggggacttttccagcccattctatcccgggaactatccaaacaatgccaagtgtgtgtgggacattgaggtgcaaaacaactaccgtgtgactgtgatcttcagagatgtccagcttgaaggtggctgcaactatgattatattgaagttttcgatggcccctaccgcagttcccctctcattgctcgagtttgtgatggggccagaggctccttcacttcttcctccaacttcatgtccattcgcttcatcagtgaccacagcatcacaaggagagggttccgggctgagtactactccagtccctccaatgacagcaccaacctgctctgtctgccaaatcacatgcaagccagtgtgagcaggagctatctccaatccttgggcttttctgccagtgaccttgtcatttccacctggaatggatactacgagtgtcggccccagataacgccgaacctggtgatattcacaattccctactcaggctgcggcaccttcaagcaggcagacaatgacaccatcgactattccaacttcctcacagcagctgtctcaggtggcatcatcaagaggaggacagacctccgtattcacgtcagctgcagaatgcttcagaacacctgggtcgacaccatgtacattgctaatgacaccatccacgttgctaataacaccatccaggtcgaggaagtccagtatggcaattttgacgtgaacatttccttttatacttcctcatctttcttgtatcctgtgaccagccgcccttactacgtggacctgaaccaggacttgtacgttcaggctgaaatcctccattctgatgctgtactgaccttgtttgtggacacctgcgtggcatcaccatactccaatgacttcacgtctttgacttatgatctaatccggagtggatgcgtgagggatgacacctacggaccctactcctcgccgtctcttcgcattgcccgcttccggttcagggccttccacttcctgaaccgcttcccctccgtgtacctgcgttgtaaaatggtggtgtgcagagcgtatgacccctcttcccgctgctaccgaggctgtgtgttgaggtcgaagagggatgtgggctcctaccaggaaaaggtggacgtcgtcctgggtcccatccagctgcagacccccccacgccgagaagaggagcctcggtaggtggtcgctctcagaccccactgtccaccggggcgcagacccctgactcggggacttgggatgttcctcttggtgtcatattccaactcagattgagccctacattgtgctgcacctggtcatacggagttgaatcagacctggttcccgcctcccccaaggctcatggtccttggaggacccgttgcagggcgaggtcaagagagttctgacctggatggcccatagacctgacgtcccagaatccatgcttctcatctgcaaaatgaaaatgtcaatacttacttcttagcactgttgagagggttacttacataaaggaattttggtgaaactgc

SEQ ID NO: 14572 - DNA, 7656 bp, Homo sapiens
tttatagcagcagcagaaatataccaccctagaggacacacctccttttagctaggtacctataaatgtccaggattttctattcaattgagaagaacccagcaaaatggggatctccacagtcatccttgaaatgtgtcttttatggggacaagttctatctacaggtgggtggatcccaaggactacagactacgcttcactgattccctcggaggtgcccttggatacaactgtagcagaaggttctccatttccctcggagttgaccctggagtcaactgcagcagaaggttctccgatttccttggagtcaaccctggagtcaactgtagcagaaggttctctgattccctcagagtcaaccctggagtcaactgtagcagaaggatctgattctggtttggccctgaggctggtgaatggagatggcaggtgtcagggccgagtggagatcctataccgaggctcctggggcaccgtgtgtgatgacagctgggacaccaatgatgccaacgtggtctgtaggcagctgggttgtggctgggccatgtcagctccaggaaatgcctggtttggccagggctcaggacccattgccctggatgatgtgcgctgctcaggacacgaatcctacctgtggagctgcccccacaatggctggctctcccataactgtggccatggtgaagatgctggtgttatctgctcagctgcccagcctcagtcaacactcaggccagaaagttggcctgtcaggatatcaccacctgtacccacagaaggatctgaatccagtttggccctgaggctggtgaatggaggcgacaggtgtcgaggccgagtggaggtcctataccgaggctcctggggcaccgtgtgtgatgactactgggacaccaatgatgccaatgtggtctgcaggcagctgggctgtggctgggccatgtcagccccaggaaatgcccagtttggccagggctcaggacccattgtcctggatgatgtgcgctgctcaggacacgagtcctacctgtggagctgcccccacaatggctggctcacccacaactgtggccatagtgaagacgctggtgtcatctgctcagctcccctgtcccggccgacacccagcccagatacttggccgacctcacatgcatcaacagcaggacctgaatccagtttggccctgaggctggtgaatggaggtgacaggtgtcagggccgagtggaggtcctataccgaggctcctggggcaccgtgtgtgatgatagctgggacaccagtgacgccaatgtggtctgccggcagctgggctgtggctgggccacgtcagccccaggaaatgcccggtttggccagggttcaggacccattgtcctggatgacgtgcgctgctcaggctatgagtcctacctgtggagctgcccccacaatggctggctctcccataactgtcagcacagtgaagacgctggtgtcatctgctcagacacgttgccgaccatcaccttacctgcatcgacagtaggatctgaatccagtttggccctgaggctggtgaatggaggtgacaggtgtcagggccgagtggaggtcctataccgaggctcctggggcaccgtgtgtgatgacagctgggacaccaatgatgccaatgtggtctgcaggcagctgggctgtggctgggccatgttggccccaggaaatgcccggtttggtcagggctcaggacccattgtcctggatgacgtgcgctgctcagggaatgagtcctacttgtggagctgcccccacaatggctggctctcccataactgtggccatagtgaagacgctggtgtcatctgctcaggacctgaatccagtttggccctggggctggtgaatggaggtgacaggtgtcagggccgagtggaggtcctataccgaggctcttggggcaccgtgtgtgatgacagctgggacaccaatgatgccaatgtggtctgcaggcagctgggctgtggctgggccacgtcagccccaggaaatgcccggtttggtcagggctcaggacccattgtcctggatgatgtgcgctgctcaggacatgagtcctacctgtggagctgccccaacaatggctggctctcccacaactgtggccatcatgaagatgctggtgtcatctgctcagctgcccagtcccggtcgacgcccaggccagacacgttgtcgaccatcacgttacctccatcgacagtaggatctgaatccagtttgaccctgaggctggtgaatggaagtgacaggtgtcagggccgagtagaggtcctataccgaggctcctggggcaccgtgtgtgatgacagctgggataccaatgatgccaatgtggtctgcaggcagctgggctgtggctgggccacgtcggccccaggaaatgcccggtttggccagggctcaggacccattgttctggatgatgtgcgctgctcaggacacgagtcctacctgtggagctgcccccacaatggctggctctcccacaactgtggccatcatgaagatgctggtgtcatctgctcagtttcccagtcccggccgacacccagtccagatacttggccgacctcacatgcatcaacagcaggatctgaatccagtttggccctgaggctggtgaatggaggtgacaggtgtcagggccgagtggaggtcctataccgaggctcctggggcaccgtgtgtgatgatagctgggacaccagtgacgccaatgtggtctgccggcggctgggctgtggctgggccacgtcagccccaggaaatgcccggtttggccagggttcaggacccattgtcctggatgacgtgcgctgctcaggctatgagtcctacctgtggagctgcccccacaatggctggctctcccataactgtcagcacagtgaagacgctggtgtcatctgctcagctgcccactcctggtcgacgcccagtccagacacattgccgaccatcaccttgcctgcatcgacagtaggatctgaatccagtttggccctgaggctggtgaatggaggtgacaggtgtcagggccgagtggaggtcctataccaaggctcctggggcaccgtgtgcgatgacagctgggacaccaatgatgccaatgtcgtctgcaggcaactgggctgtggctgggccatgtcagccccaggaaatgcccggtttggtcagggctcaggacccattgtcctggatgatgtgcgctgctcaggacacgagtcttacctgtggagctgcccccacaatggctggctctcccacaactgtggccatagtgaagacgctggtgtcatctgctcagcttcccagtcccggccaacacctagtccagacacttggccaacctcacatgcatcaacagcaggatctgaatccagtttggccctgaggctggtgaatggaggtgacaggtgtcagggccgagtggaggtcctataccgaggctcctggggcaccgtgtgtgatgactactgggacaccaatgatgccaatgtggtttgcaggcagctgggctgtggctgggccatgtcagccccaggaaatgcccggtttggccagggttcaggacccattgtcctggatgatgtgcgctgctcaggacatgagtcctatctgtggagttgcccccacgatggctggctctcccacaactgtggccatcatgaagacgctggtgtcatctgctcagcttcccagtcccagccgacacccagcccagacacttggccaacctcacatgcatcaacagcaggatctgaatccagtttggccctgaggctggtgaatggaggtgacaggtgtcagggccgagtggaggtcctataccgaggcccctggggcaccgtgtgtgatgactactgggacaccaatgatgccaatgtggtttgcaggcagctgggctgtggctgggccacgtcagccccaggaaatgcccggtttggccagggttcaggacccattgtcctggatgatgtgcgctgctcaggacatgagtcctatctgtggagctgcccccacaatggctggctctcccacaactgtggccatcatgaagacgctggtgtcatctgctcagcttcccagtcccagccgacacccagcccagacacttggccaacctcgcatgcatcaacagcaggatctgaatccagtttggccctgaggctggtgaatggaggtgacaggtgtcagggccgagtggaggtcctataccgaggctcctggggcaccgtgtgtgatgactactgggacaccaatgatgccaatgtggtttgcaggcagctgggctgtggctgggccacgtcagccccaggaagtgcccggtttggccagggttcaggacccattgccctggatgatgtgcgctgctcaggacatgagtcctatctgtggagctgcccccacaatggctggctctcccacaactgtggccatcatgaagacgctggtgtcatctgctcagcttcccagtcccagccgacacccagcccagacacttggccaacctctcgtgcatcaacagcaggatctgaatccactttggccctgagactggtgaatggaggtgacaggtgtcgaggccgagtggaggtcctataccaaggctcctggggcaccgtgtgtgatgactactgggacaccaatgatgccaacgtggtctgcaggcagctgggctgtggctgggccatgtcagccccaggaaatgcccagtttggccagggctcaggacccattgtcctggatgatgtgcgctgctcaggacacgagtcttacctgtggagctgcccccacaatggctggctctcccacaactgtggccatcatgaagatgctggtgtcatctgctcagctgctcagtcccagtcaacgcccaggccagatacttggctgaccaccaacttaccggcattgacagtaggatctgaatccagtttggctctgaggctggtgaatggaggtgacaggtgtcgaggccgagtggaggtcctgtatcgaggctcctggggaaccgtgtgtgatgacagctgggacaccaatgatgccaatgtggtctgcaggcagctgggctgtggctgggccatgtcggccccaggaaatgcccggtttggccagggctcaggacccattgtcctggatgatgtgcgctgctcagggaatgagtcctacctgtggagctgcccccacaaaggctggctcacccacaactgtggccatcacgaagacgctggtgtcatctgctcagccacccaaataaattctactacgacagattggtggcatccaacaactacaaccactgcaagaccctcttcaaattgtggtggcttcttattctatgccagtgggacattctccagcccatcctaccctgcatactaccccaacaatgctaagtgtgtttgggaaatagaagtgaattctggttatcgcataaacctgggcttcagtaatctgaaattggaggcacaccataactgcagttttgattatgttgaaatctttgatggatcattgaatagcagtctcctgctggggaaaatctgtaatgataccaggcaaatatttacatcttcttacaaccgaatgaccattcactttcgaagtgacatcagtttccaaaacactggctttttggcttggtataactccttcccaagcgatgccaccttgaggttggtcaatttaaattcatcctatggtctatgtgccgggcgtgtagaaatttaccatggtggcacctgggggacagtttgtgatgactcctggaccattcaggaagctgaggtggtctgcagacagctagggtgtggacgtgcagtttcagcccttggaaatgcatattttggctctggctctggccccatcaccctggacgatgtagagtgctcagggacggaatccactctctggcagtgccggaaccgaggctggttctcccacaactgtaatcatcgtgaagatgctggtgtcatctgctcaggaaaccatctatcgacacctgctccttttctcaacatcacccgtccaaacacagattattcctgcggaggcttcctatcccaaccatcaggggacttttccagcccattctatcccgggaactatccaaacaatgccaagtgtgtgtgggacattgaggtgcaaaacaactaccgtgtgactgtgatcttcagagatgtccagcttgaaggtggctgcaactatgattatattgaagttttcgatggcccctaccgcagttcccctctcattgctcgagtttgtgatggggccagaggctccttcacttcttcctccaacttcatgtccattcgcttcatcagtgaccacagcatcacaaggagagggttccgggctgagtactactccagtccctccaatgacagcaccaacctgctctgtctgccaaatcacatgcaagccagtgtgagcaggagctatctccaatccttgggcttttctgccagtgaccttgtcatttccacctggaatggatactacgagtgtcggccccagataacgccgaacctggtgatattcacaattccctactcaggctgcggcaccttcaagcaggcagacaatgacaccatcgactattccaacttcctcacagcagctgtctcaggtggcatcatcaagaggaggacagacctccgtattcacgtcagctgcagaatgcttcagaacacctgggtcgacaccatgtacattgctaatgacaccatccacgttgctaataacaccatccaggtcgaggaagtccagtatggcaattttgacgtgaacatttccttttatacttcctcatctttcttgtatcctgtgaccagccgcccttactacgtggacctgaaccaggacttgtacgttcaggctgaaatcctccattctgatgctgtactgaccttgtttgtggacacctgcgtggcatcaccatactccaatgacttcacgtctttgacttatgatctaatccggagtggatgcgtgagggatgacacctacggaccctactcctcgccatctcttcgcattgcccgcttccggttcagggccttccacttcctgaaccgcttcccctccgtgtacctgcgttgtaaaatggtggtgtgcagagcgtatgacccctcttcccgctgctaccgaggctgtgtgttgaggtcgaagagggatgtgggctcctaccaggaaaaggtggacgtcgtcctgggtcccatccagctgcagacccccccacgccgagaagaggagcctcggtaggtggtcgctctcagaccccactgtccaccggggcgcagacccctgactcggggacttgggatgttcctcttggtgtcatattccaactcagattgagccctacattgtgctgcacctggtcatacggagttgaatcagacctggttcccgcctcccccaaggctcatggtccttggaggacccgttgcagggtgaggtcaagagagttctgacctggatggcccatagacctgacgtcccagaatccatgcttctcatctgcaaaatgaaaatgtcaatacttacttcttagcactgttgagagggttacttacataaaggaattttggtgaaactgc

SEQ ID NO: 14573 - DNA, 2291 bp, Homo sapiens
ctttccgccccagccctgaaagcgttaaccctggagctttctgcacaccccccgaccgctcccgcccaagcttcctaaaaaagaaaggtgcaaagtttggtccaggatagaaaaatgactgatcaaaggcaggcgatacttcctgttgccgggacgctatatataacgtgatgagcgcacgggctgcggagacgcaccggagcgctcgcccagccgccgcctccaagcccctgaggtttccggggaccacaatgaacaagttgctgtgctgcgcgctcgtgtttctggacatctccattaagtggaccacccaggaaacgtttcctccaaagtaccttcattatgacgaagaaacctctcatcagctgttgtgtgacaaatgtcctcctggtacctacctaaaacaacactgtacagcaaagtggaagaccgtgtgcgccccttgccctgaccactactacacagacagctggcacaccagtgacgagtgtctatactgcagccccgtgtgcaaggagctgcagtacgtcaagcaggagtgcaatcgcacccacaaccgcgtgtgcgaatgcaaggaagggcgctaccttgagatagagttctgcttgaaacataggagctgccctcctggatttggagtggtgcaagctggaaccccagagcgaaatacagtttgcaaaagatgtccagatgggttcttctcaaatgagacgtcatctaaagcaccctgtagaaaacacacaaattgcagtgtctttggtctcctgctaactcagaaaggaaatgcaacacacgacaacatatgttccggaaacagtgaatcaactcaaaaatgtggaatagatgttaccctgtgtgaggaggcattcttcaggtttgctgttcctacaaagtttacgcctaactggcttagtgtcttggtagacaatttgcctggcaccaaagtaaacgcagagagtgtagagaggataaaacggcaacacagctcacaagaacagactttccagctgctgaagttatggaaacatcaaaacaaagaccaagatatagtcaagaagatcatccaagatattgacctctgtgaaaacagcgtgcagcggcacattggacatgctaacctcaccttcgagcagcttcgtagcttgatggaaagcttaccgggaaagaaagtgggagcagaagacattgaaaaaacaataaaggcatgcaaacccagtgaccagatcctgaagctgctcagtttgtggcgaataaaaaatggcgaccaagacaccttgaagggcctaatgcacgcactaaagcactcaaagacgtaccactttcccaaaactgtcactcagagtctaaagaagaccatcaggttccttcacagcttcacaatgtacaaattgtatcagaagttatttttagaaatgataggtaaccaggtccaatcagtaaaaataagctgcttataactggaaatggccattgagctgtttcctcacaattggcgagatcccatggatgagtaaactgtttctcaggcacttgaggctttcagtgatatctttctcattaccagtgactaattttgccacagggtactaaaagaaactatgatgtggagaaaggactaacatctcctccaataaaccccaaatggttaatccaactgtcagatctggatcgttatctactgactatattttcccttattactgcttgcagtaattcaactggaaattaaaaaaaaaaaactagactccattgtgccttactaaatatgggaatgtctaacttaaatagctttgagatttcagctatgctagaggcttttattagaaagccatatttttttctgtaaaagttactaatatatctgtaacactattacagtattgctatttatattcattcagatataagatttgtacatattatcatcctataaagaaacggtatgacttaattttagaaagaaaattatattctgtttattatgacaaatgaaagagaaaatatatatttttaatggaaagtttgtagcatttttctaataggtactgccatatttttctgtgtggagtatttttataattttatctgtataagctgtaatatcattttatagaaaatgcattatttagtcaattgtttaatgttggaaaacatatgaaatataaattatctgaatattagatgctctgagaaattgaatgtaccttatttaaaagattttatggttttataactatataaatgacattattaaagttttcaaattattttttaaaaaaaaaaaaaaaaaa

SEQ ID NO: 14574 - DNA, 1368 bp, Homo sapiens
atggtggattttccaggctacaatctgtctggtgcagtcgcctccttcctattcatcctgctgacaatgaagcagtcagaagactttagagtcattggccctgctcatcctatcctggccggggttggggaagatgccctgttaacctgccagctactccccaagaggaccacaatgcacgtggaggtgaggtggtaccgctcagagcccagcacacctgtgtttgtgcacagggatggagtggaggtgactgagatgcagatggaggagtacagaggctgggtagagtggatagagaatggcattgcaaagggaaatgtggcactgaagatacacaacatccagccctccgacaatggacaatactggtgccatttccaggatgggaactactgtggagaaacaagcttgctgctcaaagtagcaggtctggggtctgcccctagcatccacatggagggacctggggagagtggagtccagcttgtgtgcactgcaaggggctggttcccagagccccaggtgtattgggaagacatccggggagagaagctgctggccgtgtctgagcatcgcatccaagataaagatggcctgttctatgcggaagccaccctggtggtcaggaacgcctctgcagagtctgtgtcctgcttggtccacaaccccgtcctcactgaggagaaggggtcggtcatcagcctcccagagaaactccagactgagctggcttctttaaaagtgaatggaccttcccagcccatcctcgtcagagtgggagaagatatacagctaacctgttacctgtcccccaaggcgaatgcacagagcatggaggtgaggtgggaccgatcccaccgttaccctgctgtgcatgtgtatatggatggggaccatgtggctggagagcagatggcagagtacagagggaggactgtactggtgagtgacgccattgacgagggcagactgaccctgcagatactcagtgccagaccttcggacgacgggcagtaccgctgcctttttgaaaaagatgatgtctaccaggaggccagtttggatctgaaggtggtaagtctgggttcttccccactgatcactgtggaggggcaagaagatggagaaatgcagccgatgtgctcttcagatgggtggttcccacagccccacgtgccatggagggacatggaaggaaagacgataccatcatcttcccaggccctgactcaaggcagccacgggctgttccacgtgcagacattgctaagggtcacaaacatctccgctgtggacgtcacttgttccatcagcatcccctttttgggcgaggagaaaatcgcaactttttctctctcaggttggtga

SEQ ID NO: 14575 - DNA, 2425 bp, Homo sapiens
atcacccattttctgcatcagtcacactgggagctgcagaccggagctgttcctatttgcccatcctctccctgctttctttacctctgaggttggattctccctgtggatcctgcaatccttctgccccaaaaaactattatagcaggagggaacctgttcctgctcactctttgccttctccttctcatcctagacaagcctgaccgtgccctagttttcagaggagtgattgattctggggtgcggagaggatgaggaaactcaggctcagagagggtttttccacctaatgtgcctggaaaccatgggtagctacccaataaggcctttctatgttagaaggtcatggaccgagagtgcttggtatcggagctttgtagagacagtttgaccctgtacttagagcagagggtgtgtttgcctaggagagtgtgtgtgggcagctgtgtgtaagcctgtgtgagttgtgtgtatgttcctgtgtcttatatatgtgtgtgctccttcatggacactgcatgcatgtagtgggcatagcaaggcagagagaaaccaggagtctaggggcacagcccagtaggaagatagtatcttcctactgggcaggacttgaggtgtgcaaaggtgtgcatgagtactgcaaaagcagttcaaagagcagagaggtggggccagaataatatgttgcagaaaggcgatcatcagggaggaaagtgaggattccctgccaagatgcctgagggcttccctgcctaccacagccctctgtgttcttaaatcctcctgtctgaacagaggccagactctggtttcccccacagcctgtctgtgtctgtcctctgcaaagccatgtggctctacctggcggttttcgtgggcctgtactaccttctgcactggtaccgggagaggcaggtgctgagccacctgagagataagtatgtgttcatcacgggctgtgactctggcttcgggaaactgctggccagacagctggatgcacgaggcttgcgggtgctggctgcatgtctgacggagaaaggagccgagcagctgaggggccagacttcagacaggctggagacggtgaccctggatgttaccaagacagagagcgttgctgcagccgcccagtgggtgaaggagtgcgtgagagacaaaggactctggggcctggtgaataatgctggcatctccttgcccacggctcccaatgagttgctcaccaagcaggacttgctgaccatactggacgtgaacttgttgggggtgattgatgtgactctgaacctgctgcccttagtgaggagggccaggggccgtgtggtcaacgtcttcagtgtcatgggccgggtgtcactttttggtggaggctactgcatctccaagtatggcgtggaagccttctctgactccctcaggagggaactctcctactttggggtgaaggtggctatgattgaacctggctatttcaagactgctgtgaccagtaaggagagattcttaaagagcttcctggagatttgggaccggtccagtccagaggtcaaggaggcctatggcgagaagtttgttgcagactataagaaatcagctgaacaaatggagcagaagtgcacacaggatctgtcgttggtgaccaactgcatggagcatgcgctgattgcctgccacccccgtactcgctactcagctggctgggatgccaagcttctctacctccccatgagctacatgcccaccttcctggtggatgccattatgtactgggtctctccaagcccggccaaggctctatgaagctaaggttggatgcatggttgcatggatttggggtgtgctatgagggtggtgttatccttgggaaaatataaagtggaaggaaggaccgtccggtcagtaggcaccaatcccactccttcattactcctggccatgaatctcctgggaataattctgctctctggagatgttggtaggaaagtttcaagttacgcagctgaaaaacagggaccaaatagtgctcctgggtgcattgtcaccgtgggtggccactcaagggtccaagcctctagggccatccttgggctaacaactggggtgggtgtgagcaggtggaaggagcctcagcccatgccattacctcctgcttccttatcaggctgtgtgttaattctgggccagtctacaccctcccacggggtggaaatggcctggaggatgtgagggcacccctcctctgaagatccctgtacacgtggtgttgggactggaaccattatgcggccccataggcctcaggagtcatcccagaagcagtggctgggaggtggtgtcctaagtaaggatctgtgcagaggacaaataaatcagtttttgatttgtcttaaaaaaaaaaaaaaaaaaaaaaaaaaaaaaa

SEQ ID NO: 14576 - DNA, 1810 bp, Homo sapiens
ccagcgctgctccccgggcgctcctccccgggcgctcctccccaggcctcccgggcgcttggatcccggccatctccgcacccttcaagtgggtgtgggtgatttcctggcggggggagcagccaggtgagcccaagatgctgctgcgctcgaagcctgcgctgccgccgccgctgatgctgctgctcctggggccgctgggtcccctctcccctggcgccctgccccgacctgcgcaagcacaggacgtcgtggacctggacttcttcacccaggagccgctgcacctggtgagcccctcgttcctgtccgtcaccattgacgccaacctggccacggacccgcggttcctcatcctcctgggttctccaaagcttcgtaccttggccagaggcttgtctcctgcgtacctgaggtttggtggcaccaagacagacttcctaattttcgatcccaagaaggaatcaacctttgaagagagaagttactggcaatctcaagtcaaccaggatatttgcaaatatggatccatccctcctgatgtggaggagaagttacggttggaatggccctaccaggagcaattgctactccgagaacactaccagaaaaagttcaagaacagcacctactcaagaagctctgtagatgtgctatacacttttgcaaactgctcaggactggacttgatctttggcctaaatgcgttattaagaacagcagatttgcagtggaacagttctaatgctcagttgctcctggactactgctcttccaaggggtataacatttcttgggaactaggcaatgaacctaacagtttccttaagaaggctgatattttcatcaatgggtcgcagttaggagaagattttattcaattgcataaacttctaagaaagtccaccttcaaaaatgcaaaactctatggtcctgatgttggtcagcctcgaagaaagacggctaagatgctgaagagcttcctgaaggctggtggagaagtgattgattcagttacatggcatcactactatttgaatggacggactgctaccaaggaagattttctaaaccctgatgtattggacatttttatttcatctgtgcaaaaagttttccaggtggttgagagcaccaggcctggcaagaaggtctggttaggagaaacaagctctgcatatggaggcggagcgcccttgctatccgacacctttgcagctggctttatgtggctggataaattgggcctgtcagcccgaatgggaatagaagtggtgatgaggcaagtattctttggagcaggaaactaccatttagtggatgaaaacttcgatcctttacctgattattggctatctcttctgttcaagaaattggtgggcaccaaggtgttaatggcaagcgtgcaaggttcaaagagaaggaagcttcgagtataccttcattgcacaaacactgacaatccaaggtataaagaaggagatttaactctgtatgccataaacctccataatgtcaccaagtacttgcggttaccctatcctttttctaacaagcaagtggataaataccttctaagacctttgggacctcatggattactttccaaatctgtccaactcaatggtctaactctaaagatggtggatgatcaaaccttgccacctttaatggaaaaacctctccggccaggaagttcactgggcttgccagctttctcatatagtttttttgtgataagaaatgccaaagttgctgcttgcatctgaaaataaaatatactagtcctgacaaaaaaaaaaaaaaaaaa

SEQ ID NO: 14577 - DNA, 1493 bp, Homo sapiens
tgagcgggggatgatggcgccgcggagggtcaggtcgtttctgcgcgggctcccggcgctgctactgctgctgctcttcctcgggccctggcccgctgcgagccacggcggcaagtactcgcgggagaagaaccagcccaagccgtccccgaaacgcgagtccggagaggagttccgcatggagaagttgaaccagctgtgggagaaggcccagcgactgcatcttcctcccgtgaggctggccgagctccacgctgatctgaagatacaggagagggacgaactcgcctggaagaaactaaagcttgacggcttggacgaagatggggagaaggaagcgagactcatacgcaacctcaatgtcatcttggccaagtatggtctggacggaaagaaggacgctcggcaggtgaccagcaactccctcagtggcacccaggaagacgggctggatgaccccaggctggaaaagctgtggcacaaggcgaagacctctgggaaattctccggcgaagaactggacaagctctggcgggagttcctgcatcacaaagagaaagttcacgagtacaacgtcctgctggagaccctgagcaggaccgaagaaatccacgagaacgtcattagcccctcggacctgagcgacatcaagggcagcgtcctgcacagcaggcacacggagctgaaggagaagctgcgcagcatcaaccagggcctggaccgcctgcgcagggtcagccaccagggctacagcactgaggctgagttcgaggagcccagggtgattgacctgtgggacctggcgcagtccgccaacctcacggacaaggagctggaggcgttccgggaggagctcaagcacttcgaagccaaaatcgagaagcacaaccactaccagaagcagctggagattgcgcacgagaagctgaggcacgcagagagcgtgggcgacggcgagcgtgtgagccgcagccgcgagaagcacgccctgctggaggggcggaccaaggagctgggctacacggtgaagaagcatctgcaggacctgtccggcaggatctccagagctcggcacaacgaactctgaaggcactggggagcccagcccggcagggaagaggccagcgtgaaggacctgggctcttggccgtggcatttccgtggacagcccgccgtcagggtggctggggctggcacgggtgtcgaggcaggaaggattgtttctggtgactgcagccgctgccgtcgcgacacagggcttggtggtggtagcatttgggtctgagatcggcccagctctgactgaaggggcttggcttccactcagcatcagcgtggcagtcaccaccccagtgaggacctcgatgtccagctgctgtcaggtctgatagtcctctgctaaaacaacacgatttacataaaaaatcttacacatctgccaccggaaataccatgcacagagtccttaaaaaatagagtgcagtatttaaacc

SEQ ID NO: 14578 - DNA, 4745 bp, Homo sapiens
gagctgaggaggagctgaaaatgcagatttagcatcaagcacagacctacactcgctctttctctccggtacacacagctccccacattcgcacccctgcccgcgcgccgggccgcctgactgcacggcttcccctccagccagatgctggagaacacacactgattcgctgctttccaagaccctgttcagtctctttctctatacaaagatttttttaaaaactatatataagaattctttatttgcaccctccctccgagtcccctgctccgccagcctgcgcgcctcctagcaccacttttcactcccaaagaaggatgaagggtggttgtgtctcccagtggaaggcggccgccgggttcctcttctgtgtcatggtttttgcatctgctgagcgaccggtcttcacgaatcattttcttgtggagttgcataaagggggagaggacaaagctcgccaagttgcagcagaacacggctttggagtccgaaagcttccctttgctgaaggtctgtaccacttttatcacaatggccttgcaaaggccaagagaagacgcagcctacaccacaagcagcagctggagagagaccccagggtaaagatggctttgcagcaggaaggatttgaccgaaaaaagcgaggttacagagacatcaatgagatcgacatcaacatgaacgatcctctttttacaaagcagtggtatctgatcaatactgggcaagctgatggcactcctggccttgatttgaatgtggctgaagcctgggagctgggatacacagggaaaggtgttaccattggaattatggatgatgggattgactatctccacccggacctggcctccaactataatgccgaagcaagttacgacttcagcagcaacgacccctatccttaccctcggtacacagatgactggtttaacagccacgggacccgatgtgcaggagaagtttctgctgccgccaacaacaatatctgtggagttggagtagcatacaactccaaggttgcaggcatccggatgctggaccagccattcatgacagacatcatcgaggcctcctccatcagtcatatgccacagctgattgacatctacagcgccagctggggccccacagacaacggcaagacagtggatgggccccgggagctcacgctgcaggccatggccgatggcgtgaacaagggccgcggcggcaaaggcagcatctacgtgtgggcctccggggacggcggcagctatgacgactgcaactgcgacggctacgcctccagcatgtggaccatctccatcaactcagccatcaacgacggcaggactgccctgtacgacgagagctgctcttccaccttggcttccaccttcagcaacgggaggaaaaggaaccccgaggccggtgtggcaaccacagatttgtacggcaactgcactctgaggcattctgggacatctgcagctgcccccgaggcagctggtgtgtttgcactggctctggaggctaacctgggtctgacctggcgggacatgcagcatctgactgtgctcacctccaaacggaaccagcttcacgacgaggtccatcagtggcggcgcaatggggtcggcctggaatttaatcacctctttggctacggggtccttgatgcaggtgccatggtgaaaatggctaaagactggaaaaccgtgcctgagagattccactgtgtgggaggctccgtgcaggaccctgagaaaataccatccactggcaagttggtgctgacactcacaaccgacgcctgtgaggggaaggaaaattttgtccgctacctggagcatgtccaggctgtcatcacggtcaacgcaaccagaagaggagacctgaacatcaacatgacttcccctatgggcaccaagtccattttgctgagccggcgtccaagggatgacgactccaaggtgggctttgacaagtggcctttcatgaccactcacacgtggggggaagacgcccgaggcacctggaccctggagctgggatttgtcggcagcgccccgcagaagggggtgctgaaggagtggaccctgatgctgcatggcactcagagtgccccgtacatcgaccaggtggtgcgggattaccagtccaagttggccatgtccaagaaagaggagctggaggaagagctggacgaagccgtggagagaagcctgaaaagcatccttaacaagaactagcgctgcacatccgcctttcccaccgccctccctccccagctccgcctctgtcctcgctccacgtttcaggcaggcacctagcaattccatcacccgtacaggcaattccgtcttcttaatctgaagcttcactcactgtcaatgattattttcattacaatggaaacaatcttttttactctatgccccaaatatagcgttcccaacaacatccatgtcctatgtgtgactctaaattctttatttctgtcattcaaatgggtgatatcctgaaaaaaaaaaaaaaaaaaaaactgggacagctttcccctcatttttttttttgtttctgagaaaagaacgtattttaaaagccacatagagtgactccaagaacaattgtccatggtctcaaacaaggggctgttacataacaagaaaatcaaagctgaggacagggtgtgagcgccacatctctgaaagcacaggagacactgtgctataaatcctttggggagcgatgttttgaatttagtgagatttaccagggatgtagattaaggtgatgtgattcaaaagatgccattcatagagagccctagttactgcatggggaaagagatccaggaagcatgagtgctggatattttactaccaatgccaagataattcactctactcagccggcgtggcaaatataaaacttacagagcgtggctgtgctctcaccagctgctgctctgagttatgttaaaatccgctagagcagcccaaatttttctcagtttgtatagagttcatcccagccccaattttctggggctcctcacatagctacccaaaagagaaaaaaaattaagacaagcctggcaacacacctggtgaagagtagtttactagcttttcaaacaagaatgtcccttttcctaagtcactttgaggtgtctcaatctgatctgagtgagaggcgacaggagtatttttttttttttacagctttacacacacagatgtgggctttgatttccaagtaatataatggaagagaaatctcatactcccccacagtttgatgtcattaatgtgttgggaaaaaggcctctgtcccggaagagtcatgggaggtgaaaggggcacgtttgaagatgcgagcgctatcttcacatagttctccagttgtatggagcctcttctgccaagagagggccatgcaattcatcccagaggaacctgaggcctgaaggaggtgagagaagacctctgtgaggaaagcacacagtcaccttctcggcaactaagcagtccctgagaccatttaacatgcaacccgaaggttatggtcaatcccaaaagtcaccactccattcccaactagacattaccaaagtgacctacccagagattgcttctcatccccagtcccaatgcacatccattcccaagaaatgctttgtcttcagcctctccaggcaccatctcccttcctgtgggagcagagagcttagcctggagcacctttccttcaagccagcaacacagagcactaggttcaattccctgaaggtggccactttaagagagaaatctgaaaaccccatttgctttcttttctcccatattggcatggatttctgtcttctctaacaccttgtgaccttctctatatcatgctttaaagtgtaataatatgattttttaaaagaaatttattacttgttgcaaaggtctttttaaaccagtttagatttcaagaaaaaataaatggaaatcatcgaaaattcatttcacattaatggtctaaaaataaaccaaaggacattatgtgtgcatgtgtgtataagtgcacacagaaatatatatacatatgtagactatatacatgtgtgtatatatgtgtatatatacatacacttgtataaatgtatatacacatatacctataatgtgtgtatgtgtatttattgaagaaacagataccatactcatttctaaaagaatattcagagaatatcaagatgattctggctgaaaaaggccagtggaaattcaggtgaaaatgttcatcaattcccattgcatcacctctgtaatttttcagctctctgtataaacattaaatgtcttatatagcagcaaaaatataaaatagttgtccatattttcacaggtgtggtgtaatttataaaattagaaagcaacttatcagctacttaagagaaatggcaagttttgatatgagtatacaatatataaaaatatatatagtgctatatatataaatatttggtctctatttcattttttgcatcagtattaatactaaaatatgtctcgctagtgatgtttttatgatatccctgatcctaactgaagagacagttatttatagtcatttattttaaaaaatgaaaataagtgaataataattaggttaacattgttgctccctgtgacaaaattttataagcaaatttcaaaagacatgttgtaaattaggaggctcaacaataaaacattatgctccagaaa

SEQ ID NO: 14579 - DNA, 1793 bp, Homo sapiens
actcagaagggacttccctgctcggctggctttcggtttctctgctcacctccggataaatcacggggtctcccgcgccgctcatggcgcctcccgtccgtctcgagcgtccctttccttcccggcgctttcctgggttgcttctggcggccctggtgttgctgctgtcctccttctccgatcaatgcaatgtcccggaatggcttccatttgccaggcctaccaacctaactgatgactttgagtttcccattgggacatatctgaactatgaatgccgccctggttattccggaagaccgttttctatcatctgcctaaaaaactcagtctggacaagtgctaaggacaagtgcaaacgtaaatcatgtcgtaatcctccagatcctgtgaatggcatggcacatgtgatcaaagacatccagttcagatcccaaattaaatattcttgtcctaaaggataccgactcattggttcctcgtctgccacatgcatcatctcaggcaacactgtcatttgggataataaaacacctgtttgtgacagaattatttgtgggctaccccccaccatcgccaatggagatttcactagcatcagcagagagtattttcactatggatcagtggtgacctaccactgcaatcttggaagcagagggaaaaaggtgtttgagcttgtgggtgagccctccatatactgcaccagcaaagatgatcaagtgggcatctggagtggcccagcccctcagtgcattatacctaacaaatgcacgcctccaaatgtggaaaatggaatattggtatctgacaacagaagcttattttccttaaatgaagttgtggagtttaggtgtcagcctggctttggcatgaaagggccctcccatgtgaagtgccaggccctgaacaaatgggagccagagttaccaagctgctccagggtatgtcagccacctccagatgtcctgcatgctgagcgtacccaaagggacaaggacaacttttcacccgggcaggaagtgttctacagctgtgagcccggctacgacctcagaggatctacgtatttgcactgcacaccccagggagactggagccctgcagcccccagatgtgaagtgaaatcctgtgatgacttcctgggccaacttcctaatggccatgtgctatttccacttaatctccagcttggagcaaaagtggattttgtttgtgatgaaggatttcaattaaaaggcagctctgctagttactgtgttttggctggaatggaaagcctttggaatagcagtgttccagtgtgtgaacgtaaatcatgtgaaactcctccagttccagtgaatggcatggtgcatgtgatcacagacatccatgttggatccagaatcaactattcttgtactacagggcaccgactcattggtcactcatctgctgaatgtatcctctcgggcaatactgcccattggagcatgaagccaccaatttgtcaacaaatcttttgtccaaatcctccagctatccttaatgggagacacacaggaactccccttggagatattccctatggaaaagaagtatcttacacatgtgacccccacccagacagagggatgaccttcaacctcattggggagagcaccatccgccgcacaagtgaacctcatgggaatggggtttggagcagccctgcccctcgctgtgaacttcctgttggtgctggttcacatgatgctcttatagttggtaagttttatgaagtgtttgctgaggaattctgtcatctttaa

SEQ ID NO: 14580 - DNA, 3516 bp, Homo sapiens
ggatcctggagacaactttgccgtgtgacgcgccgggaggactgcagggcccgcggccgagggctcggcgccgcctgtgagcgggcccgcgcggccggctctcccgggcaccaagcttgctccgcgccactgcccgccggcccgcggcgaggacgacctgcccgtctccgccgccggcggcccttcctggcgcgaggcagtgagggcgaggcgctcaggtgcgagcgcggggccccgccgcagcgcccgccgcagcgccgcgccaagccgcgcccggctccgctccggggggctccagcgccttcgcttccgtctcagccaagttgcgtggacccgctctttcgccaccttccccagccgccggccgaaccgccgctcccactgacgctgctttcgcttcacccgaaccggggctgcggggcccccgacgcggaaaggatggggagaaggctgcagatgccgaggcgccccgagacgcccgtgcggcagtgacccgcgacctccgccccgcccggcgcgcccctcgggcccccggggccctcggcgccccttccctgccgcgcgggaacccccgaggcccggccggccccctccccctgcgagccggcggcagccctcccggcgggcgggcgggcggaggcccgggcgggcgcgggcgcgggcgggggcggggcggggcggcgcgcccggagcccggagcccggccctgcgctcggctcgactcggctcgcctcgcggcgggcgccctcgtcgccagcggcgcaccatggacgggctgcccggtcgggcgctgggggccgcctgccttctgctgctggcggccggctggctggggcctgaggcctggggctcacccacgcccccgccgacgcctgccgcgccgccgccacccccgccacccggagccccgggtggctcgcaggacacctgtacgtcgtgcggcggcttccggcggccagaggagctcggccgagtggacggcgacttcctggaggcggtgaagcggcacatcttgagccgcctgcagatgcggggccggcccaacatcacgcacgccgtgcctaaggccgccatggtcacggccctgcgcaagctgcacgcgggcaaggtgcgcgaggacggccgcgtggagatcccgcacctcgacggccacgccagcccgggcgccgacggccaggagcgcgtttccgaaatcatcagcttcgccgagacagatggcctcgcctcctcccgggtccgcctatacttcttcatctccaacgaaggcaaccagaacctgtttgtggtccaggccagcctgtggctttacctgaaactcctgccctacgtcctggagaagggcagccggcggaaggtgcgggtcaaagtgtacttccaggagcagggccacggtgacaggtggaacatggtggagaagagggtggacctcaagcgcagcggctggcataccttcccactcacggaggccatccaggccttgtttgagcggggcgagcggcgactcaacctagacgtgcagtgtgacagctgccaggagctggccgtggtgccggtgttcgtggacccaggcgaagagtcgcaccgaccctttgtggtggtgcaggctcggctgggcgacagcaggcaccgcattcgcaagcgaggcctggagtgcgatggccggaccaacctctgttgcaggcaacagttcttcattgacttccgcctcatcggctggaacgactggatcatagcacccaccggctactacggcaactactgtgagggcagctgcccagcctacctggcaggggtccccggctctgcctcctccttccacacggctgtggtgaaccagtaccgcatgcggggtctgaaccccggcacggtgaactcctgctgcattcccaccaagctgagcaccatgtccatgctgtacttcgatgatgagtacaacatcgtcaagcgggacgtgcccaacatgattgtggaggagtgcggctgcgcctgacagtgcaaggcaggggcacggtggtggggcacggagggcagtcccgggtgggcttcttccagccccccgcgggaacggggtacacggtgggctgagtacagtcattctgttgggctgtggagatagtgccagggtgcggcctgagatatttttctacagcttcatagagcaaccagtcaaaaccagagcgagaaccctcaactgacatgaaatactttaaaatgcacacgtagccacgcacagccagacgcatcctgccacccacacagcagcctccaggataccagcaaatggatgcggtgacaaatggcagcttagctacaaatgcctgtcagtcggagagaatggggtgagcagccaccattccaccagctggcccggccacgtctcgaagttgcgccttcccgagcacacataaaagcacaaagacagagacgcagagagagagagagagccacggagaggaaaagcagatgcaggggtggggagcgcagctcggcggaggctgcgtgtgccccgtggcttttaccaggcctgctctgcctggctcgatgtctgcttcttcccagcctgggatccttcgtgcttcaaggcctggggagcctgtccttccatgcccttgtcgagggaaagagacccagaaaggacacaacccgtcagagacctgggagcaggggcaatgaccgtttgactgtttgtggcttgggcctctgacatgacttatgtgtgtgtgtgtttttggggtggggagggagggagagaagagggggctaaatttgatgctttaactgatctccaacagttgacaggtcatccttgccagttgtataactgaaaaaggacttttctaccaggtatgaccttttaagtgaaaatctgaattgttctaaatggaaagaaaaaaagttgcaatctgtgcccttcattggggacattcctctaggactggtttggggacgggtgggaatgacccctaggcaaggggatgagaccgcaggaggaaatggcggggaggtggcattcttgaactgctgaggatggggggtgtcccctcagcggaggccaagggaggggagcagcctagttggtcttggagagatggggaaggctttcagctgatttgcagaagttgcccatgtgggcccaaccatcagggctggccgtggacgtggcccctgcccactcacctgcccgcctgcccgcccgcccgcatagcacttgcagacctgcctgaacgcacatgacatagcacttgccgatctgcgtgtgcccagaagtggcccttggccgagcgccgaactcgctcgccctctagatgtccaagtgccacgtgaactatgcaatttaaagggttgacccacactagacgaaactggactcgtacgactctttttatattttttatacttgaaatgaaatcctttgcttcttttttaagcgaatgattgcttttaatgtttgcactgatttagttgcatgattagtcagaaactgccatttgaaaaaaaagttatttttatagcagc

SEQ ID NO: 14581 - DNA, 2197 bp, Homo sapiens
gtcacatggggtgcgcgcccagactccgacccggaggcggaaccggcagtgcagcccgaagccccgcagtccccgagcacgcgtggccatgcgtcccctgcgcccccgcgccgcgctgctggcgctcctggcctcgctcctggccgcgcccccggtggccccggccgaggccccgcacctggtgcaggtggacgcggcccgcgcgctgtggcccctgcggcgcttctggaggagcacaggcttctgccccccgctgccacacagccaggctgaccagtacgtcctcagctgggaccagcagctcaacctcgcctatgtgggcgccgtccctcaccgcggcatcaagcaggtccggacccactggctgctggagcttgtcaccaccagggggtccactggacggggcctgagctacaacttcacccacctggacgggtacttggaccttctcagggagaaccagctcctcccagggtttgagctgatgggcagcgcctcgggccacttcactgactttgaggacaagcagcaggtgtttgagtggaaggacttggtctccagcctggccaggagatacatcggtaggtacggactggcgcatgtttccaagtggaacttcgagacgtggaatgagccagaccaccacgactttgacaacgtctccatgaccatgcaaggcttcctgaactactacgatgcctgctcggagggtctgcgcgccgccagccccgccctgcggctgggaggccccggcgactccttccacaccccaccgcgatccccgctgagctggggcctcctgcgccactgccacgacggtaccaacttcttcactggggaggcgggcgtgcggctggactacatctccctccacaggaagggtgcgcgcagctccatctccatcctggagcaggagaaggtcgtcgcgcagcagatccggcagctcttccccaagttcgcggacacccccatttacaacgacgaggcggacccgctggtgggctggtccctgccacagccgtggagggcggacgtgacctacgcggccatggtggtgaaggtcatcgcgcagcatcagaacctgctactggccaacaccacctccgccttcccctacgcgctcctgagcaacgacaatgccttcctgagctaccacccgcaccccttcgcgcagcgcacgctcaccgcgcgcttccaggtcaacaacacccgcccgccgcacgtgcagctgttgcgcaagccggtgctcacggccatggggctgctggcgctgctggatgaggagcagctctgggccgaagtgtcgcaggccgggaccgtcctggacagcaaccacacggtgggcgtcctggccagcgcccaccgcccccagggcccggccgacgcctggcgcgccgcggtgctgatctacgcgagcgacgacacccgcgcccaccccaaccgcagcgtcgcggtgaccctgcggctgcgcggggtgccccccggcccgggcctggtctacgtcacgcgctacctggacaacgggctctgcagccccgacggcgagtggcggcgcctgggccggcccgtcttccccacggcagagcagttccggcgcatgcgcgcggctgaggacccggtggccgcggcgccccgccccttacccgccggcggccgcctgaccctgcgccccgcgctgcggctgccgtcgcttttgctggtgcacgtgtgtgcgcgccccgagaagccgcccgggcaggtcacgcggctccgcgccctgcccctgacccaagggcagctggttctggtctggtcggatgaacacgtgggctccaagtgcctgtggacatacgagatccagttctctcaggacggtaaggcgtacaccccggtcagcaggaagccatcgaccttcaacctctttgtgttcagcccagacacaggtgctgtctctggctcctaccgagttcgagccctggactactgggcccgaccaggccccttctcggaccctgtgccgtacctggaggtccctgtgccaagagggcccccatccccgggcaatccatgagcctgtgctgagccccagtgggttgcacctccaccggcagtcagcgagctggggctgcactgtgcccatgctgccctcccatcaccccctttgcaatatatttttatattttattattttcttttatatcttggtaaaaaaaaaaaa

SEQ ID NO: 14582 - DNA, 2798 bp, Homo sapiens
cgttgctgtcgctctgcacgcacctatgtggaaactaaagcccagagagaaagtctgacttgccccacagccagtgagtgactgcagcagcaccagaatctggtctgtttcctgtttggctcttctaccactacggcttgggatctcgggcatggtggctttgccaatggtccttgttttgctgctggtcctgagcagaggtgagagtgaattggacgccaagatcccatccacaggggatgccacagaatggcggaatcctcacctgtccatgctggggtcctgccagccagccccctcctgccagaagtgcatcctctcacaccccagctgtgcatggtgcaagcaactgaacttcaccgcgtcgggagaggcggaggcgcggcgctgcgcccgacgagaggagctgctggctcgaggctgcccgctggaggagctggaggagccccgcggccagcaggaggtgctgcaggaccagccgctcagccagggcgcccgcggagagggtgccacccagctggcgccgcagcgggtccgggtcacgctgcggcctggggagccccagcagctccaggtccgcttccttcgtgctgagggatacccggtggacctgtactaccttatggacctgagctactccatgaaggacgacctggaacgcgtgcgccagctcgggcacgctctgctggtccggctgcaggaagtcacccattctgtgcgcattggttttggttcctttgtggacaaaacggtgctgccctttgtgagcacagtaccctccaaactgcgccacccctgccccacccggctggagcgctgccagtcaccattcagctttcaccatgtgctgtccctgacgggggacgcacaagccttcgagcgggaggtggggcgccagagtgtgtccggcaatctggactcgcctgaaggtggcttcgatgccattctgcaggctgcactctgccaggagcagattggctggagaaatgtgtcccggctgctggtgttcacttcagacgacacattccatacagctggggacgggaagttgggcggcattttcatgcccagtgatgggcactgccacttggacagcaatggcctctacagtcgcagcacagagtttgactacccttctgtgggtcaggtagcccaggccctctctgcagcaaatatccagcccatctttgctgtcaccagtgccgcactgcctgtctaccaggagctgagtaaactgattcctaagtctgcagttggggagctgagtgaggactccagcaacgtggtacagctcatcatggatgcttataatagcctgtcttccaccgtgacccttgaacactcttcactccctcctggggtccacatttcttacgaatcccagtgtgagggtcctgagaagagggagggtaaggctgaggatcgaggacagtgcaaccacgtccgaatcaaccagacggtgactttctgggtttctctccaagccacccactgcctcccagagccccatctcctgaggctccgggcccttggcttctcagaggagctgattgtggagttgcacacgctgtgtgactgtaattgcagtgacacccagccccaggctccccactgcagtgatggccagggacacctacaatgtggtgtatgcagctgtgcccctggccgcctaggtcggctctgtgagtgctctgtggcagagctgtcctccccagacctggaatctgggtgccgggctcccaatggcacagggcccctgtgcagtggaaagggtcactgtcaatgtggacgctgcagctgcagtggacagagctctgggcatctgtgcgagtgtgacgatgccagctgtgagcgacatgagggcatcctctgcggaggctttggtcgctgccaatgtggagtatgtcactgtcatgccaaccgcacgggcagagcatgcgaatgcagtggggacatggacagttgcatcagtcccgagggagggctctgcagtgggcatggacgctgcaaatgcaaccgctgccagtgcttggacggctactatggtgctctatgcgaccaatgcccaggctgcaagacaccatgcgagagacaccgggactgtgcagagtgtggggccttcaggactggcccactggccaccaactgcagtacagcttgtgcccataccaatgtgaccctggccttggcccctatcttggatgatggctggtgcaaagagcggaccctggacaaccagctgttcttcttcttggtggaggatgacgccagaggcacggtcgtgctcagagtgagaccccaagaaaagggagcagaccacacgcaggccattgtgctgggctgcgtagggggcatcgtggcagtggggctggggctggtcctggcttaccggctctcggtggaaatctatgaccgccgggaatacagtcgctttgagaaggagcagcaacaactcaactggaagcaggacagtaatcctctctacaaaagtgccatcacgaccaccatcaatcctcgctttcaagaggcagacagtcccactctctgaaggagggagggacacttacccaaggctcttctccttggaggacagtgggaactggagggtgagaggaagggtgggtctgtaagaccttggtaggggactaattcactggcgaggtgcggccaccaccctacttcattttcagagtgacacccaagagggctgcttcccatgcctgcaaccttgcatccatctgggctaccccacccaagtatacaataaagtcttacctcagaaaaaaaaaaaaaaaaaa

SEQ ID NO: 14583 - DNA, 1944 bp, Homo sapiens
gcagagcgggcggcggcggcggcggcagcggaggcggcggctccagccggcgcggcgcgaggctcggcggtgggatccggcgggcggtgctagctccgcgctccctgcctcgctcgctgccgggggcggtcggaaggcgcggcgcgaagcccgggtggcccgagggcgcgatggctgctcctgtcccgtgggcctgctgtgctgtgcttgccgccgccgccgcagttgtctacgcccagagacacagtccacaggaggcaccccatgtgcagtacgagcgcctgggctctgacgtgacactgccatgtgggacagcaaactgggatgctgcggtgacgtggcgggtaaatgggacagacctggcccctgacctgctcaacggctctcagctggtgctccatggcctggaactgggccacagtggcctctacgcctgcttccaccgtgactcctggcacctgcgccaccaagtcctgctgcatgtgggcttgccgccgcgggagcctgtgctcagctgccgctccaacacttaccccaagggcttctactgcagctggcatctgcccacccccacctacattcccaacaccttcaatgtgactgtgctgcatggctccaaaattatggtctgtgagaaggacccagccctcaagaaccgctgccacattcgctacatgcacctgttctccaccatcaagtacaaggtctccataagtgtcagcaatgccctgggccacaatgccacagctatcacctttgacgagttcaccattgtgaagcctgatcctccagaaaatgtggtagcccggccagtgcccagcaaccctcgccggctggaggtgacgtggcagaccccctcgacctggcctgaccctgagtcttttcctctcaagttctttctgcgctaccgacccctcatcctggaccagtggcagcatgtggagctgtccgacggcacagcacacaccatcacagatgcctacgccgggaaggagtacattatccaggtggcagccaaggacaatgagattgggacatggagtgactggagcgtagccgcccacgctacgccctggactgaggaaccgcgacacctcaccacggaggcccaggctgcggagaccacgaccagcaccaccagctccctggcacccccacctaccacgaagatctgtgaccctggggagctgggcagcggcgggggaccctcggcacccttcttggtcagcgtccccatcactctggccctggctgccgctgccgccactgccagcagtctcttgatctgagcccggcaccccatgaggacatgcagagcacctgcagaggagcaggaggccggagctgagcctgcagaccccggtttctattttgcacacgggcaggaggaccttttgcattctcttcagacacaatttgtggagaccccggcgggcccgggcctgccgccccccagccctgccgcaccaagctggccctccttcctccctcaggggaggtgggccatgcagctaacccacccaccaaagaccccctcaccctggccccttgggctggaccctccaatgccagcgactcccaggagcccttgggggacgtgaggggagcctctcacatccgatttctcctcctgccccagcctcctgtctatcccagggtctctgttgccaccatcagattataagctcctgatgctgggggggcccagccatccccctccccccagcacccacaattttcagtcccctcccctctgccctgttttgtatacccctcccctgaccctgctcctatcccacagtatttaatgccctgtcagtcccttctagtctgactcaatggtaacttgctgtatttgaattttttatagatgtatatacagggtggggggagtgggcggttctcattaaacgtcaccatttcatgaaaaaaaaaaaaaaaaaa

SEQ ID NO: 14584 - DNA, 2055 bp, Homo sapiens
gcagagcgggcggcggcggcggcggcagcggaggcggcggctccagccggcgcggcgcgaggctcggcggtgggatccggcgggcggtgctagctccgcgctccctgcctcgctcgctgccgggggcggtcggaaggcgcggcgcgaagcccgggtggcccgagggcgcgactctagccttgtcacctcatcttgcccccttggttttggaagtcctgaagagttggtctggaggaggaggaggacattgatgtgcttggtgtgtggccagtggtgaagagatggctgctcctgtcccgtgggcctgctgtgctgtgcttgccgccgccgccgcagttgtctacgcccagagacacagtccacaggaggcaccccatgtgcagtacgagcgcctgggctctgacgtgacactgccatgtgggacagcaaactgggatgctgcggtgacgtggcgggtaaatgggacagacctggcccctgacctgctcaacggctctcagctggtgctccatggcctggaactgggccacagtggcctctacgcctgcttccaccgtgactcctggcacctgcgccaccaagtcctgctgcatgtgggcttgccgccgcgggagcctgtgctcagctgccgctccaacacttaccccaagggcttctactgcagctggcatctgcccacccccacctacattcccaacaccttcaatgtgactgtgctgcatggctccaaaattatggtctgtgagaaggacccagccctcaagaaccgctgccacattcgctacatgcacctgttctccaccatcaagtacaaggtctccataagtgtcagcaatgccctgggccacaatgccacagctatcacctttgacgagttcaccattgtgaagcctgatcctccagaaaatgtggtagcccggccagtgcccagcaaccctcgccggctggaggtgacgtggcagaccccctcgacctggcctgaccctgagtcttttcctctcaagttctttctgcgctaccgacccctcatcctggaccagtggcagcatgtggagctgtccgacggcacagcacacaccatcacagatgcctacgccgggaaggagtacattatccaggtggcagccaaggacaatgagattgggacatggagtgactggagcgtagccgcccacgctacgccctggactgaggaaccgcgacacctcaccacggaggcccaggctgcggagaccacgaccagcaccaccagctccctggcacccccacctaccacgaagatctgtgaccctggggagctgggcagcggcgggggaccctcggcacccttcttggtcagcgtccccatcactctggccctggctgccgctgccgccactgccagcagtctcttgatctgagcccggcaccccatgaggacatgcagagcacctgcagaggagcaggaggccggagctgagcctgcagaccccggtttctattttgcacacgggcaggaggaccttttgcattctcttcagacacaatttgtggagaccccggcgggcccgggcctgccgccccccagccctgccgcaccaagctggccctccttcctccctcaggggaggtgggccatgcagctaacccacccaccaaagaccccctcaccctggccccttgggctggaccctccaatgccagcgactcccaggagcccttgggggacgtgaggggagcctctcacatccgatttctcctcctgccccagcctcctgtctatcccagggtctctgttgccaccatcagattataagctcctgatgctgggggggcccagccatccccctccccccagcacccacaattttcagtcccctcccctctgccctgttttgtatacccctcccctgaccctgctcctatcccacagtatttaatgccctgtcagtcccttctagtctgactcaatggtaacttgctgtatttgaattttttatagatgtatatacagggtggggggagtgggcggttctcattaaacgtcaccatttcatgaaaaaaaaaaaaaaaaaa

SEQ ID NO: 14585 - DNA, 3310 bp, Homo sapiens
gattccagctctcgcgcccgacgaggtggatttggctgtccaccgagctccggcgcctgtcgttctaattgggtttggatttgcaccgttaaggaggggggaagagaaggaagaggcgggcgaggaaggcgagtccagctagcggctgttgcggggaccgtagccccagctgcagctccgaagaatcccccgccacggtttcggtggagcgtctgggcacgggatggagtgaaagagcgagtgcctctccaagcgggggtgggagggggtcaggctgtgcagaggagagagacagcgagaagaagccgcggctggctactgcgaatttgggattcgattgggagggaccgctcactcgggggaaatggattctttaccacggctgaccagcgttttgactttgctgttctctggcttgtggcatttaggattaacagcgacaaactacaactgtgatgatccactagcatccctgctctctccaatggctttttccagttcctcagacctcactggcactcacagcccagctcaactcaactggagagttggaactggcggttggtccccagcagattccaatgctcaacagtggctccagatggacctgggaaacagagtagagattacagcagtggccacgcagggaagatacggaagctctgactgggtgacgagttacagcctgatgttcagtgacacaggacgcaactggaaacagtacaaacaagaagacagcatctggacctttgcaggaaacatgaatgctgacagcgtggtgcaccacaagctattgcactcagtgagagcccgatttgttcgctttgtgcccctggaatggaatcccagtgggaagattggcatgagagtcgaggtctacggatgttcctataaatcagatgttgctgactttgatggccgaagctcacttctgtacaggttcaatcagaagttgatgagtactctcaaagatgtgatctccctgaagttcaagagcatgcaaggagatggggtcctgttccatggagaaggtcagcgtggagaccacatcaccttggaactccagaaggggaggctcgccctacacctcaatttgggtgacagcaaagcgcggctcagcagcagcttgccctctgccaccctgggcagcctcctggatgaccagcactggcactcggtcctcattgagcgggtgggcaagcaggtgaacttcacggtggacaagcacacacagcacttccgcaccaagggcgagacggatgccttagacattgactatgagcttagttttggaggaattccagtaccaggaaaacctgggacctttttaaagaaaaacttccatggatgcatcgaaaacctttactacaatggagtaaacataattgacctggctaagagacgaaagcatcagatctatactggcaatgtcactttttcctgctccgaaccacagattgtgcccatcacatttgtcaactccagcggcagctatttgctgctgcccggcaccccccaaattgatgggctctcagtgagtttccagtttcgaacatggaacaaggatggtctgcttctgtccacagagctgtctgagggctcgggaaccctgctgctgagcctggagggtggaatcctgagactcgtgattcagaaaatgacagaacgcgtagctgaaatcctcacaggcagcaacttgaatgatggcctgtggcactcggttagcatcaacgccaggaggaaccgcatcacgctcactctggatgatgaagcagcacccccggctccagacagcacttgggtgcagatttattctggaaatagctactattttggagggtgccccgacaatctcaccgattcccaatgtttaaatcccattaaggctttccaaggctgcatgaggctcatctttattgataaccagcccaaggacctcatttcagttcagcaaggttccctggggaattttagtgatttacacattgatctgtgtagcatcaaagacaggtgtttgccaaactactgtgaacatggaggaagctgctcccagtcctggactaccttctattgtaactgcagtgacacaagttacactggtgccacctgccacaactccatctacgagcaatcctgcgaggtgtacaggcaccaggggaatacagccggcttcttctacatcgactcagatggcagcggcccactgggacctctccaggtgtactgcaatatcactgaggacaagatctggacatcagtgcagcacaacaatacagagctgacccgagtgcggggcgctaaccctgagaagccctatgccatggccttggactacgggggcagcatggaacagctggaggccgtgatcgacggctctgagcactgtgagcaggaggtggcctaccactgcaggaggtcccgcctgctcaacacgccggatggaacaccatttacctggtggattgggcggtccaatgaaaggcacccttactggggaggttcccctcctggggtccagcagtgtgagtgtggcctagacgagagctgcctggacattcagcacttttgcaattgcgacgctgacaaggatgaatggacaaatgatactggctttctttccttcaaagaccacttgcctgtcactcagatagttatcactgataccgacagatcaaactcagaagccgcttggagaattggtcccttgcgttgctatggtgaccgacgcttctggaacgccgtctcattttatacagaagcctcttacctccactttcctaccttccatgcggaattcagtgccgatatttccttcttttttaaaaccacagcattatccggagttttcctagaaaatcttggcattaaagacttcattcgactcgaaataagctctccttcagagatcacctttgccatcgatgttgggaatggtcctgtggagcttgtagtccagtctccttctcttctgaatgacaaccaatggcactatgtccgggctgagaggaacctcaaggagacctccctgcaggtggacaaccttccaaggagcaccagggagacgtcggaggagggccattttcgactgcagctgaacagccagttgtttgtagggggaacgtcatccagacagaaaggcttcctaggatgcattcgctccttacacttgaatggacagaaaatggacctggaagagagggcaaaggtcacatctggagtcaggccaggctgcagcataaagaaattgaaataaaagtttaaaatagtacccggttcaatgaaagagcctaaaccatcttaactcagcttt

SEQ ID NO: 14586 - DNA, 4574 bp, Homo sapiens
ggcggctgctcccattgagctgtctgctcgctgtgcccgctgtgcctgctgtgcccgcgctgtcgccgctgctaccgcgtctgctggacgcgggagacgccagcgagctggtgattggagccctgcggagagctcaagcgcccagctctgcccgaggagcccaggctgccccgtgagtcccatagttgctgcaggagtggagccatgagctgcgtcctgggtggtgtcatccccttggggctgctgttcctggtctgcggatcccaaggctacctcctgcccaacgtcactctcttagaggagctgctcagcaaataccagcacaacgagtctcactcccgggtccgcagagccatccccagggaggacaaggaggagatcctcatgctgcacaacaagcttcggggccaggtgcagcctcaggcctccaacatggagtacatgacctgggatgacgaactggagaagtctgctgcagcgtgggccagtcagtgcatctgggagcacgggcccaccagtctgctggtgtccatcgggcagaacctgggcgctcactggggcaggtatcgctctccggggttccatgtgcagtcctggtatgacgaggtgaaggactacacctacccctacccgagcgagtgcaacccctggtgtccagagaggtgctcggggcctatgtgcacgcactacacacagatagtttgggccaccaccaacaagatcggttgtgctgtgaacacctgccggaagatgactgtctggggagaagtttgggagaacgcggtctactttgtctgcaattattctccaaaggggaactggattggagaagccccctacaagaatggccggccctgctctgagtgcccacccagctatggaggcagctgcaggaacaacttgtgttaccgagaagaaacctacactccaaaacctgaaacggacgagatgaatgaggtggaaacggctcccattcctgaagaaaaccatgtttggctccaaccgagggtgatgagacccaccaagcccaagaaaacctctgcggtcaactacatgacccaagtcgtcagatgtgacaccaagatgaaggacaggtgcaaagggtccacgtgtaacaggtaccagtgcccagcaggctgcctgaaccacaaggcgaagatctttggaactctgttctatgaaagctcgtctagcatatgccgcgccgccatccactacgggatcctggatgacaagggaggcctggtggatatcaccaggaacgggaaggtccccttcttcgtgaagtctgagagacacggcgtgcagtccctcagcaaatacaaaccttccagctcattcatggtgtcaaaagtgaaagtgcaggatttggactgctacacgaccgttgctcagctgtgcccgtttgaaaagccagcaactcactgcccaagaatccattgtccggcacactgcaaagacgaaccttcctactgggctccggtgtttggaaccaacatctatgcagatacctcaagcatctgcaagacagccgtgcacgcgggagtcatcagcaacgagagtgggggtgacgtggacgtgatgcccgtggataaaaagaagacctacgtgggctcgctcaggaatggagttcagtctgaaagcctggggactcctcgggatggaaaggccttccggatctttgctgtcaggcagtgaatttccagcaccaggggagaaggggcgtcttcaggagggcttcggggttttgcttttatttttattttgtcattgcggggtatatggagagtcaggaaacttcctttgactgatgttcagtgtccatcactttgtggcctgtgggtgaggtgacatctcatcccctcactgaagcaacagcatcccaaggtgctcagccggactccctggtgcctgatcctgctggggcccgggggtctccatctggacgtcctctctcctttagagatctgagctgtctcttaaaggggacagttgcccaaaatgttccttgctatgtgttcttctgttggtggaggaagttgatttcaacctccctgccaaaagaacaaaccatttgaagctcacaattgtgaagcattcacggcgtcggaagaggccttttgagcaagcgccaatgagtttcaggaatgaagtagaaggtagttatttaaaaataaaaaacacagtccgtccctaccaatagaggaaaatggttttaatgtttgctggtcagacagacaaatgggctagagtaagagggctgcgggtatgagagaccccggctccgccctggcacgtgtccttgctggcggcccgccacaggcccccttcaatggccgcattcaggatggctctatacacagcagtgctggtttatgtagagttcagcagtcacttcagagatgtatcttgtctttgtcaggcccttcatcttcatggcccacctgttttctgccgtgacctttggtcccattgaggactaaggatcgggaccctttctttaccccctacccattgtggctcccaccctgcctcggactggtttacgtgtcctggttcacacccaggacttttctttgcaagcgaacctgtttgaagcccaagtcttaactcctggtctcgtaaggttccactgagacgagatgtctgagaacaaccaaagaaggcctgctctttgctgcttttaaaaaatgacaattaaatgtgcagattccccacgcacccgatgacctattttttcagccgtgggaggaatggagtctttggtacattcctcaccgaggttagcagctcagtttgtggttatgaaaccgtctgtggcctcatgacagcgagagatgggaatacactagaaggatctcttttcctgttttcgtgaaacgactcttgccaaacgttcccgaggcgccaaggagtgtagtacaccctggctgccatcactctataaaagtgcttcatgagcccagaccaaaagcccacagtgaaatgaagtacccttttgtaaatagcatttttttgcagaaggtgaaaattccactctctaccaccgggccagccaatagatcactttggtgaatgctagtttcaaatttgattcaaaatatttcttaggtgaaagaactagcagaaagtcaaaaactaagatactgtagactggacaagaaattctacctgggcacctaggtgatgccttctttctttgattgcctttctaataaatgcagaatctgaaggtaaataggtttaaaacaaaacaaaaacccacccctttaaggagttggtaaaaagcagttcaactcttagcttgactgagctaaaattcacaggactacgtgctttgtgcattgtagtctagtcgtaattcataggtactgactcctcagccccaaatgtcggagaggaagaattcggtcagcctgtcaggtcgtgagtccagttaccaccaaacatctgggaaacttctgggtgctgggtgctctgctgctggacttttgtggctgtgtctgtgtctgcaagataaattagatcgccctgtggggtttgcagaattagtgaagggtccaggacgatcccagtgggctcgcttccaaagcatcccactcaagggagacttgaaacttccagtgtgagttgaccccatcatttaaaaataaagtccccgggttccttaatgcctccttcactgggccttcctagcaggatagaaagtccttgcccagagcaggacctggctgtctttttttttttttttttcccgagaccaagtttcactctgttgcccaaggtagagtgcagtggcgtgatctctgctcattgcaactgccgcctcccgggttcaagcaattctcatgcatcagcctcccaagtacctgggactacaggcgtgagctaccatgcccggctaatttttgtatttttagtagagatggggtttcattatgttggccaggctggtctcgaactccttacctcaggtgatccacccaccttggcctcccgaagtgctgggattacaggcatgagccactgcgcccggccatggacctggctgtctttatcatccccacaaacattttgaaactggaatatttgtcttcagaaaatggaaacaagactataaatgataagccctgtccctagcaccacctctcctgtgtgtggaatagaggcccctcgtgctaccaacacttaccctgtgtttaaaaagatcttgtaccaagccaacggcgttcctggctctcctgcccacaggatgaacattttcggcttccttaggagttttgccctaccgtattccaaagcgtgtgctggtttctcatattgtctgtaggctcactcagcccgcagtttatgtgtgtgcttttttctatgaaaaatgatgtattttgctacttcctgtgtacaaagttttattgtaaatgttttttgtgctttgcatgaacaggggccacgttgttgcaattgtttcagtagaactggtttgatttctaaaatgttcctgtaacatatcttttatgaacaaatctgaacaatttgtgaaataaaacattgaaaaccaaaaaaaaaaaaaaaaa

SEQ ID NO: 14587 - DNA, 3299 bp, Homo sapiens
cggagggagcgctgggagcgagcaagcgagcgtttggagcccgggccagcagagggggcgcccggtcgctgcctgtaccgctcccgctggtcatctccgccgcgctcgggggccccgggaggagcgagaccgagtcggagagtccgggagccaagccgggcgaaacccaactgcggaggacgcccgccccactcagcctcctcctgcgtccgagccggggagcatcgccgagcgccccacgggccggagagctgggagcacaggtcccggcagccccagggatggtctaggagccggcgtaaggctcgctgctctgctccctgccggggctagccgcctcctgccgatcgcccggggctgcgagctgcggcggcccggggctgctcgccgggcggcgcaggccggagaagttagttgtgcgcgcccttagtgcgcggaaccagccagcgagcgagggagcagcgaggcgccgggaccatgggctgggggagccgctgctgctgcccgggacgtttggacctgctgtgcgtgctggcgctgctcgggggctgcctgctccccgtgtgtcggacgcgcgtctacaccaaccactgggcagtcaaaatcgccgggggcttcccggaggccaaccgtatcgccagcaagtacggattcatcaacataggacagataggggccctgaaggactactaccacttctaccatagcaggacgattaaaaggtcagttatctcgagcagagggacccacagtttcatttcaatggaaccaaaggtggaatggatccaacagcaagtggtaaaaaagcggacaaagagggattatgacttcagtcgtgcccagtctacctatttcaatgatcccaagtggcccagcatgtggtatatgcactgcagtgacaatacacatccctgccagtctgacatgaatatcgaaggagcctggaagagaggctacacgggaaagaacattgtggtcactatcctggatgacggaattgagagaacccatccagatctgatgcaaaactacgatgctctggcaagttgcgacgtgaatgggaatgacttggacccaatgcctcgttatgatgcaagcaacgagaacaagcatgggactcgctgtgctggagaagtggcagccgctgcaaacaattcgcactgcacagtcggaattgctttcaacgccaagatcggaggagtgcgaatgctggacggagatgtcacggacatggttgaagcaaaatcagttagcttcaacccccagcacgtgcacatttacagcgccagctggggcccggatgatgatggcaagactgtggacggaccagcccccctcacccggcaagcctttgaaaacggcgttagaatggggcggagaggcctcggctctgtgtttgtttgggcatctggaaatggtggaaggagcaaagaccactgctcctgtgatggctacaccaacagcatctacaccatctccatcagcagcactgcagaaagcggaaagaaaccttggtacctggaagagtgttcatccacgctggccacaacctacagcagcggggagtcctacgataagaaaatcatcactacagatctgaggcagcgttgcacggacaaccacactgggacgtcagcctcagcccccatggctgcaggcatcattgcgctggccctggaagccaatccgtttctgacctggagagacgtacagcatgttattgtcaggacttcccgtgcgggacatttgaacgctaatgactggaaaaccaatgctgctggttttaaggtgagccatctttatggatttggactgatggacgcagaagccatggtgatggaggcagagaagtggaccaccgttccccggcagcacgtgtgtgtggagagcacagaccgacaaatcaagacaatccgccctaacagtgcagtgcgctccatctacaaagcttcaggctgctcggataaccccaaccgccatgtcaactacctggagcacgtcgttgtgcgcatcaccatcacccaccccaggagaggagacctggccatctacctgacctcgccctctggaactaggtctcagcttttggccaacaggctatttgatcactccatggaaggattcaaaaactgggagttcatgaccattcattgctggggagaaagagctgctggtgactgggtccttgaagtttatgatactccctctcagctaaggaactttaagactccaggtaaattgaaagaatggtctttggtcctctacggcacctccgtgcagccatattcaccaaccaatgaatttccgaaagtggaacggttccgctatagccgagttgaagaccccacagacgactatggcacagaggattatgcaggtccctgcgaccctgagtgcagtgaggttggctgtgacgggccaggaccagaccactgcaatgactgtttgcactactactacaagctgaaaaacaataccaggatctgtgtctccagctgcccccctggccactaccacgccgacaagaagcgctgcaggaagtgtgcccccaactgtgagtcctgctttgggagccatggtgaccaatgcatgtcctgcaaatatggatactttctgaatgaagaaaccaacagctgtgttactcactgccctgatgggtcatatcaggataccaagaaaaatctttgccggaaatgcagtgaaaactgcaagacatgtactgaattccataactgtacagaatgtagggatgggttaagcctgcagggatcccggtgctctgtctcctgtgaagatggacggtatttcaacggccaggactgccagccctgccaccgcttctgcgccacttgtgctggggcaggagctgatgggtgcattaactgcacagagggctacttcatggaggatgggagatgcgtgcagagctgtagtatcagctattactttgaccactcttcagagaatggatacaaatcctgcaaaaaatgtgatatcagttgtttgacgtgcaatggcccaggattcaagaactgtacaagctgccctagtgggtatctcttagacttaggaatgtgtcaaatgggagccatttgcaaggatgcaacggaagagtcctgggcggaaggaggcttctgtatgcttgtgaaaaagaacaatctgtgccaacggaaggttcttcaacaactttgctgcaaaacatgtacatttcaaggctgagcagccatcttagatttctttgttcctgtagacttatagattattccatattattaaaaagaaaaaaaaaagccaaaaag

SEQ ID NO: 14588 - DNA, 8568 bp, Homo sapiens
cctcgctccctctccggtaatgagggggctgagctgtccctccgaggagggggcctggtgtggataaaagagacgaaaaagccgggggaggtttccaaaaataaaaccgtccgggtccccttcagacggctgcaggcacagggaggaggcgcgaaggtgcagcagccgtgcgagcccagctggagtaggagcgcggactcgaggctcggggcgcgcagccctcgttccgccgagagccgggcccccagtcggccgcttcagggccccctagactcagagaagctggccgccgggcggggccgggagaacagcccgcgggcgtccagcgtgccgaccacaaagctcttcgcggtgcccgcgcgcaccactctccagccgccccgcgccatgaggccgcggaccaaagcccgcagcccggggcgcgccctgcggaacccctggagaggcttcctgccgctcaccctggctctcttcgtgggcgcgggtcatgcccaaagggaccccgtagggagatacgagccggctggtggagacgcgaatcgactgcggcgccctgggggcagctacccggcagcggctgcagccaaggtgtacagtctgttccgggagcaggacgcgcctgtcgcgggcttgcagcccgtggagcgggcccagccgggctgggggagccccaggaggcccaccgaggcggaggccaggaggccgtcccgcgcgcagcagtcgcggcgtgtccagccacctgcgcagacccggagaagcactcccctgggccagcagcaaccagcaccccggacccgggccgcgccggctctcccacgcctggggaccccacagcggtctggggctgcgcccccaaccccgccgcgagggcggctcacggggaggaacgtctgcgggggacagtgctgcccaggatggacaacagcaaacagcaccaaccactgtatcaaacccgtttgcgagccgccgtgccagaaccggggctcctgcagccgcccgcagctctgtgtctgccgctctggtttccgtggagcccgctgcgaggaggtcattcccgatgaggaatttgacccccagaactccaggctggcacctcgacgctgggccgagcgttcacccaacctgcgcaggagcagtgcggctggagagggcaccttggccagagcacagccgccagcaccacagtcgccgcccgcaccacagtcgccaccagctgggaccctgagtggcctcagccagacccacccttcccagcagcacgtggggttgtcccgcactgtccgacttcacccgactgccacggccagtagccagctctcttccaacgccctgcccccgggaccaggccttgagcagagagatggcacccaacaggcggtacctctggagcacccctcatccccctgggggctgaacctcacggagaaaatcaagaagatcaagatcgtcttcactcccaccatctgcaagcagacctgtgcccgtggacactgtgccaacagctgtgagaggggcgacaccaccaccctgtacagccagggcggccatgggcacgatcccaagtctggcttccgcatctatttctgccagatcccctgcctgaacggaggccgctgcatcggcagggacgaatgctggtgccccgccaactccaccgggaagttctgccacctgcctatcccgcagccggacagggagcctccagggagggggtcccgccccagggccttgctggaagccccactgaagcagtccactttcacactgccgctctccaaccagctggcctccgtgaacccctccctggtgaaggtgcacattcaccacccacccgaggcctcagtgcagatccaccaggtggcccaggtgcggggcggggtggaggaggccctagtggagaacagcgtggagaccagacccccgccctggctgcctgccagccctggccacagcctctgggacagcaacaacatccctgctcggtctggagagccccctcggccactgcccccagcagcacccaggcctcgaggactgctgggccggtgttacctgaacactgtgaacggacagtgtgccaaccctctgctggagctgactacccaggaggactgctgtggcagtgtgggagccttctggggggtgactttgtgtgccccatgcccacccagaccagcctccccggtgattgagaatggccagctggagtgtcctcaggggtacaagagactgaacctcactcactgccaagatatcaacgagtgcttgaccctgggcctgtgcaaggacgcggagtgtgtgaataccaggggcagctacctgtgcacatgcagacctggcctcatgctggatccatcgcggagccgctgtgtgtcggacaaggcaatctccatgctgcagggactgtgctaccggtcgctggggcccggcacctgcaccctgcctttggcccagcggatcaccaagcagatatgctgctgcagccgcgtgggcaaagcatggggcagcgagtgtgagaaatgccctctgcctggcacagaggccttcagagagatctgccctgccggccacggctacacctacgcgagctccgacatccgcctgtccatgaggaaagccgaggaggaggaactggcaaggcccccaagggagcaagggcagaggagcagcggggcactgcccgggccagcagagaggcagcccctccgggtcgtcacggacacctggcttgaggccgggaccatccctgacaagggtgactctcaggctggccaggtcacgaccagtgtcactcatgcacctgcctgggtcacagggaatgccacaaccccaccaatgcctgaacaggggattgcagagatacaggaagaacaagtgaccccctccaccgatgtgctggtgaccctgagcaccccaggcattgacagatgcgctgctggagccaccaacgtctgtggccctggaacctgcgtgaacctccccgatggatacagatgtgtctgcagccctggctaccagctgcaccccagccaggcctactgcacagatgacaacgagtgtctgagggacccctgcaagggaaaagggcgctgcatcaaccgcgtggggtcctactcctgcttctgctaccctggctacactctggccacctcaggggcgacacaggagtgtcaagatatcaatgagtgtgagcagccaggggtgtgcagcggggggcagtgcaccaacaccgagggctcgtaccactgcgagtgtgatcagggctacatcatggtcaggaaaggacactgccaagatatcaacgaatgccgtcaccccggtacctgccctgatgggagatgcgtcaattcccctggctcctacacttgtctggcctgtgaggagggctaccggggccagagtgggagctgtgtagatgtgaatgagtgtctgactcccggggtctgtgcccatggaaagtgcaccaacctagaaggctccttcagatgctcttgtgagcagggctatgaggtcacctcagatgagaagggctgccaagatgtggatgagtgtgccagccgggcctcatgccccacaggcctctgcctcaacacggagggctccttcgcctgctctgcctgtgagaacgggtactgggtgaatgaagacggcactgcctgtgaagacctagatgagtgtgccttcccgggagtctgcccctccggagtctgcaccaacacggctggctccttctcctgcaaggactgcgatgggggctaccggcccagccccctgggtgactcctgtgaagatgtggatgaatgtgaagacccccagagcagctgcctgggaggcgagtgcaagaacactgtgggctcctaccagtgcctctgtccccagggcttccagctggccaatggcaccgtgtgtgaggatgtgaatgagtgcatgggggaggagcactgcgcaccccacggcgagtgcctcaacagccacgggtctttcttctgtctgtgcgcgcctggcttcgtcagcgcagaggggggcaccagctgccaggatgtggacgagtgtgccaccacagacccgtgtgtgggagggcactgtgtcaacaccgagggctccttcaactgtctatgtgagactggcttccagccctccccagagagtggagagtgtgtggatattgacgagtgtgaggactatggagacccggtgtgtggcacctggaagtgtgaaaacagccctggctcctaccgctgtgttctgggctgccagcctggcttccacatggccccgaacggagactgcattgacatagacgagtgcgccaacgacaccatgtgtggcagccacggcttctgtgacaacactgatggctccttccgctgcctctgtgaccagggcttcgagatctctccctcaggctgggactgtgtggatgtgaacgagtgtgagcttatgctggcggtatgtggggccgcgctctgtgagaacgtggagggctccttcctgtgcctctgtgccagtgacctggaggagtacgatgcccaggaggggcactgccgcccacggggggctggaggtcagagtatgtctgaggccccaacgggggaccatgccccggcccccacccgcatggactgctactccgggcagaagggccatgcgccctgctccagtgtcctgggccggaacaccacacaggctgaatgctgctgcacccagggcgctagctggggagatgcctgtgacctctgcccgtctgaggactcagctgaattcagcgagatctgccctagtggaaaaggctacattcctgtggaaggagcctggacgtttggacagaccatgtacacagatgcggatgagtgtgtgatattcgggcctggtctctgcccgaacggccggtgcctcaacaccgtgcctggttatgtctgcctgtgcaatcccggcttccactacgatgcttcccacaagaagtgtgaggatcacgatgagtgccaggacctggcctgtgagaatggcgagtgcgtcaacacggagggctccttccactgcttctgcagccccccgctcaccctggacctcagccagcagcgctgcatgaacagcaccagcagcacggaggacctccctgaccacgacatccacatggacatctgctggaaaaaagtcaccaatgatgtgtgcagcgaacccctgcgtgggcaccgcaccacctacacggaatgctgctgccaggacggcgaggcctggagccagcagtgtgctctgtgtcccccgaggagctctgaggtctatgctcagctgtgcaacgtggctcgcattgaggcagagcgggaggccggggtccacttccggccaggctatgagtatggccccgggcccgatgacctgcactacagcatctatggcccagatggggcccccttctacaactacctgggccccgaggacaccgtccctgagcctgccttccccaacacagccggtcactcagcggaccgcacacccatccttgagtctcctttgcagccctcagaactccagccccactacgtggccagccatccagagcccccagccggcttcgaagggcttcaggcggaggagtgcggcatcctgaacggctgtgagaatggccgctgtgtgcgcgtgcgggagggctacacctgtgactgttttgagggcttccagctggatgcggcccacatggcctgcgtagatgtgaatgagtgtgatgacttgaacgggcctgctgtgctctgtgtccatggttactgcgagaacacagagggctcctaccgctgccactgctccccgggatatgtggctgaggcagggcccccccactgcactgccaaggagtagcagtcaggggtcagtgtggcaactacctggaaatggcctccagtcacaggcaggggccttgaggatgatttcctagctgggaagacaccgtgacatcaggccagaggtttccaatcagccttgcctgctttcatctctcccagcttagcctctggctgtaagcttcggtcattgcctccatgcccttgcttggctcaagcaccaccaatcgctttaatgcttcagccaccgcatgaggccctgtccaccacctttcctggccttgctatgggatgcttaccaaaggatggccctcatccaccctcccaagctgtgcgagcatgcaaggccccatggcctcacactgcagacacccctttccagccacaatccaccatcatcctgacgatcccacaactgggacagaggctacatctgccctagggaggtccttcagaatctgtggagcaagaaaggatttggggaagcttggggactgactccagagccccctcctaagaaccatcaccaccactcagccaatctgttctgggccctgattttgccacacctccatcctgtagcccattctctgaccccaaggagtggcagaagatcccttcactcagagaagcaaggctgatattagcttgttgaatgtaagagacacaaatgaagaagaacaaagagcctgagaaagcagcaagaggacatgatgaaaaatacgtggagttgatgagaaaggggagccaaggctttatacgtctaaagaaaatattcagtagctgaatccgcccagtgatagcctgtgggcaccagcagcaagggctgccatgggatacagcacccatctacaaagacctctattacataaacactgcttcttacaggaaacaaacctcttctgggatctccttttgtgaaaaccagtttgatgtgctaaaagtaaaaagtctattttccagtgtggtcttgttcagaagcagccagatttccaatgttgtttttcccctccactcagaaacccctgccctttcccttcagaaaacgatggcaggcattcctctgagtttacaagcagagactcactccaacccaaactagctgggagttcagaaccatggtggaataaagaaatgtgcatctggtctcttctgttgtttttatttcatatcagattaaatttctttaccatgttggctaagtctaaatattagagatgaggctgtgcctactccctggccagctctgctgatagcctatgatgggttccaatgggaaatgactctttactattaaaagacaaggaaagctctgacttcgtacttctctgatgaatggcaatgtaaatgaacaaggctccatgtgactggagcatggaagtgaatgctactttcttaatttaatctgccctgtcctacctgctcctctgattgttagccatcacataacttattgaatgcttgccatgtgccaggcactgtgctgagtgccatacatacatttcatttaattatccaataatcctacttactattgtttattctcaatttacaggtgaggaaactgagacatagaaagcttaaataatttgctctaggtccctatactaattgagatgttttcagcagacaaaaataagtcactcttacgcatgtaaaaatattctttcactcataataaaagaaatgcaacttaaaaccatactgagatcctttttaaaactgtcagattggcaaagatcaaaaagcttgttaagactcctagctggcaagcatgtgggaaataggtactctcataacagctgacagaagtacatattgaagaggacaatatggcaatgtccttcaaaattataaaagcactaactctttgatccagtagtttccacttctaggaacttaaccttcagatatattttcaccagatataaaatgacatacgtaagaagttattactgcatcatttgtaatagctaaagattagaaacaattaattgctatggaacccttaaaaaaggtggctctaaattccttaagaaagatatccaaaacaaattaaggggaaaagggagggttgcataacagcatgtaacataacactatttgtctaaagaatggggaaagagaagcggttgtctgttcacctcatccttgccactccgccttatacctcaccatcggagaacttaccatcccccaaatatatcctgctggcactacaccttcgtaactgctgttcccactgcccccacaacactccaatctccaccttcctgccaaccttgagatattgtatgcatatatacatatttcctttgtttaaaatacaaatagcatactatgcatgctgttctgcactttgctttttttttatacttgcaattagagctgcctcatttcattttacagctgtatactattccattgaatggataaaccataatttatttaatcagtccctcactgacagacgtttccattgtttcctgtcttttgctataaataatgctgtaatgaatattcttgtgcatatttcacattaatttatgggattacatctgcaggataaattcttagaaccaatggtggtttgtggggagggtgacagggtggataggtacaggattgggagacttttcactgtatctccttttgtatttttttgaattttgtaccatatgtatcacctattcaaaaaaaataaaatatttttaaatacaaaaaaaaaaaaaaa

SEQ ID NO: 14589 - DNA, 3031 bp, Homo sapiens
aggaagatgtcgtaatgagcgatccacagaccagcatggctgccactgctgctgtgagtcccagtgactacctgcagcctgccgcctccaccacccaggactcccagccatctcccttagccctgcttgctgcaacatgtagcaaaattggccctccagcagttgaagctgctgtgacacctcctgctcccccacagcccacaccgcggaaacttgtccctatcaaacctgcccctctccctctcagccccggcaagaatagctttggaatcttgtcctccaaaggaaatatacttcagattcaggggtcacaactgagcgcctcctatcctggagggcagctggtgttcgctatccagaatcccaccatgatcaacaaagggacccgatcaaatgccaatatccagtaccaggcggtccctcagattcaggcaagcaattcccaaaccatccaagtacagcccaatctcaccaaccagatccagatcatccctggcaccaaccaagccatcatcaccccctcaccgtccagtcacaagcctgtccccatcaagccagcccccatccagaagtcgagtacgaccaccacccccgtgcagagcggggccaatgtggtgaagttgacaggtgggggcggcaatgtgacgctcactctgcccgtcaacaacctcgtgaacgccagtgacaccggggcccctactcagctcctcactgaaagccccccaaccccactgtctaagactaacaagaaagcaaggaagaagagccttcctgcctcccagccccctgtggctgtggctgagcaggtggagacggtgctgatcgagaccaccgcggacaacatcatccaggcaggaaataacctgctcattgttcagagccctggtgggggccagccagctgtggtccagcaggtccaggtggtgccccccaaggccgagcagcagcaggtggtacagatcccccagcaggctctgcgggtggtgcaggcggcatctgccaccctccccactgtaccccagaagccctcccagaactttcagatccaggcagctgagccgacacctactcaggtctacatccgcacgccttccggtgaggtgcagacagtccttgtccaggacagccccccagcaacagctgcagccacctctaacaccacctgtagcagccctgcatcccgtgctccccatctgagtgggaccagcaaaaagcactcagctgcaattctccgaaaagagcgtcccctgccaaagattgccccagccgggagcatcatcagcctgaatgcagcccagttggcggcagctgcccaggcaatgcagaccatcaacatcaatggtgtccaggtccagggcgtgcctgtcaccatcaccaacacaggcgggcagcagcagctgacagtgcagaatgtttctgggaacaacctgaccatcagtgggctgagccccacccagatccagctgcaaatggaacaagccctggccggagagacccagcccggggagaagcggcgccgcatggcctgcacgtgtcccaactgcaaggatggggagaagaggtctggagagcagggcaagaagaagcacgtttgccacatccccgactgtggcaagacgttccgtaagacgtccttgctgcgtgcccatgtgcgcctgcacactggcgagcggccctttgtctgcaactggttcttctgtgggaagaggttcacacggagtgacgagctccaacggcatgctcgcacccacacaggggacaaacgcttcgagtgcgcccagtgtcagaagcgcttcatgaggagtgaccacctcaccaagcattacaagacccacctggtcacgaagaacttgtaaggccaactgcggcgggaggccctgaagatgcagtcccccacctgtgtcctccctgggcccctggtggaaaggagccctgtggctgccttgggcctgccctcagccccactcctgttctgcaactgtccccacaggaaggggctctgttccctgtattgtcctccttctgaagccccttggctctgccttggcccttcccctcaccacgagctcccggcctgcccagactgtggacactggccgtgcccaatgagacgttctaaaccaggacgcgtgggaacccttatttccaaaggaaaaacatgcatttcactccgtcgaggagcaaagtgagcccctaccccccaccccgatccccgctcccaacactgccggagtcgcgtcatgccatgccccctctcctgcacctccctggccctgccggccactgtggacgccctggggcttggcacccacctctggagaaactcggggccacctccactccatgtgcccagccccgccacaacctctcctccagcacattccagctctatttaaaaagtaaagacacccaccgactcctgatccccctctttttctatggagaacgttgccttatactctctacttcagatgatgaacactgtgtactgtgtgtgctttaaagaagttttatttaattgctcccttcttcctttccttgttattcacctccctgatgcctgctttcagttgagggttgggggcaatgatgagcatatgaattttttctcactctagcaattcccttttctaaatgacacagcatttaaactcaaatctggattcagataacagcacctgcacatcctgcacctcctccctctcccttcacctcacccctgcccggcccaagctctacttgtgtacagtgtatattgtataatagacaattgtgtctactacatgtttaaaaacacattgcttgttatttttgaggcttttaaattaaacaaaaatccaactttatttttagttgtaactgcttgaggtatgttttatgaattaagtgacagatttgttatcctttattaacgtactttgttggtcagcactgggctgacaaaaattttttcttgctaataaatttagttgcctgaggcaaaatcttcaaaaaaaaaaaaaaaaaaaaaaaaaaaaaaaaaaaaaaaaaa

SEQ ID NO: 14590 - DNA, 15229 bp, Homo sapiens
ggctcctccatcgtgggtgccgaggcggcgatgggtgtcctcaaagtgtggctcgggctggccctagcgttggcggaatttgcagtattgcctcatcattccgaaggcgcttgtgtctatcagggttccttgttggcggatgccacaatttggaagcccgattcatgccagagctgccgttgccatggtgatattgttatctgcaaacctgctgtttgcagaaaccctcaatgtgcctttgagaagggagaagtgcttcaaatagctgccaaccaatgctgtcctgagtgtgttttgaggactccaggatcttgccatcatgaaaagaaaatccatgagcatgggacagaatgggcctcttctccatgtagtgtgtgctcttgcaatcatggggaagtccgatgtaccccccaaccatgcccaccgctgtcatgtggacaccaggagctggcattcatccctgaaggaagctgctgcccagtttgtgtgggccttgggaaaccctgttcctatgaaggccatgtgtttcaggatggggaggactggcggctgagccggtgtgccaaatgtctgtgtagaaatggggttgcccagtgcttcacagctcagtgtcagcctctattttgtaaccaggatgagactgtagtccgagtccctggaaaatgttgcccgcagtgctctgcaagatcctgctctgcagctggccaagtatacgagcatggtgagcagtggagcgaaaatgcctgcaccacgtgtatatgtgaccggggtgaggtcaggtgtcacaagcaggcctgcctgcccctgagatgcggaaagggtcagagcagggctcggcgtcatgggcaatgctgtgaggaatgtgtgtctcctgccgggagctgctcctatgatggagttgtgcggtaccaggacgaaatgtggaagggctcggcctgtgagttctgcatgtgtgatcatggccaagtgacctgccagactggagagtgtgccaaagtggagtgtgcccgggatgaagaattaattcacttagatggaaagtgttgtcctgaatgcatttcaaggaatggttattgtgtttatgaagaaactggagaatttatgtcatcaaatgctagtgaagttaaacgtattccagagggagagaagtgggaagatggcccttgcaaggtgtgtgagtgccgaggggctcaggtaacttgctacgagccctcttgcccaccatgtccagtgggcacactggccttagaggtgaagggacagtgctgtccagactgcacatcagttcattgccatccagattgtttgacatgctctcagtctccagaccactgtgacctctgccaagatcctaccaagttactgcagaatggatggtgtgtgcacagctgtggactgggtttttaccaagctggcagtctctgtttagcctgccagccccagtgctccacgtgtaccagtgggctggagtgctcatcctgccagcctcccctgctgatgcggcacgggcagtgtgtgcctacctgtggggacggcttctaccaagatcgccattcctgtgcagtctgccatgagtcctgtgcaggttgctggggcccaacggagaagcactgcttggcctgcagagatcccctccacgtgctgagagatggcggctgtgagagcagctgtggaaaaggcttctacaacaggcagggcacctgtagcgcttgtgaccaatcctgtgacagttgtggccccagtagccccaggtgtcttacctgtactgagaagacagtgctgcatgatgggaaatgcatgtctgaatgccctggcgggtactatgctgatgccactggcaggtgcaaagtttgtcataactcatgtgccagctgctctgggcccacaccctctcactgtacagcctgcagcccccccaaggctctgcgtcaaggccactgtctgccccgctgtggagagggtttctactctgaccacggagtctgcaaagcctgtcactcctcctgcctggcttgtatgggtcccgcaccctctcactgtactgggtgtaagaagccagaggaaggactgcaagtggagcagctgtctgacgtgggcatcccctctggcgagtgtctagcccagtgtagagcccatttttacttggagagcactggcatatgtgaagcttgccaccagtcctgtttcagatgtgcagggaaaagcccacataactgcacagactgtgggccttcccatgtgctgttggatgggcagtgcctctcccagtgcccagatggctactttcaccaggaaggtagttgcacagagtgtcacccaacctgcaggcagtgtcatgggccgttggagtctgactgcatctcctgttaccctcacatctctcttaccaatggtaactgcaggaccagctgcagggaagagcagttcctcaacctcgtgggatactgtgctgactgccatcacctgtgccagcactgtgcagctgatctccacaacactgggagcatctgcctcaggtgccagaatgcccactacctgctgctcggggaccactgtgttcctgactgcccttcaggatactatgcagagagaggagcttgtaaaaaatgccactcctcctgcagaacctgccagggcagaggacctttctcctgctcctcatgtgacaccaacctcgtgctgtcccacactggcacctgcagcaccacctgcttccctgggcactatcttgatgacaatcatgtttgccagccatgcaacacacactgtggaagctgtgattcacaggccagctgtacctcctgccgagatccaaacaaggttctgctctttggggaatgtcaatacgagagctgcgccccacagtactatcttgacttctccaccaacacgtgcaaagagtgtgattggagctgcagtgcatgcagtgggcccctgaaaacagactgcctgcagtgcatggatggctatgttctccaggatggggcctgcgtggagcagtgcttgtcatcattttaccaggactcgggcctctgcaagtgtgacagctactgtctccagtgccaaggtccccatgagtgtacccgctgcaaagggccatttctcctcttggaagcccagtgtgtccaggaatgtgggaaggggtactttgcagatcatgcaaagcacaaatgcacagcctgccctcaggggtgcttgcagtgcagccacagggaccgttgtcacctctgtgaccatgggttctttctgaagagtggcctctgtgtttacaactgtgttcctggcttttctgtccacacctctaatgaaacatgttctggcaaaatacacacccctagtcttcatgtgaatggttccctgatcctcccaattggttcaataaagccactggatttttccctcctgaatgtccaagaccaggagggtagggtcgaagatctcctatttcatgttgtgagcactcccaccaatggtcagctagtgctctcaagaaatggaaaagaggttcagctggacaaggctggccgttttagctggaaagatgtgaacgagaagaaagtgcgttttgtgcacagcaaagaaaaactcaggaaaggttaccttttcctgaaaattagtgaccagcagttcttctctgagccacagctgatcaacatacaagcattttcaacacaggccccctatgtgctgagaaatgaagttctccacattagcagaggagagagggcaaccatcaccacccagatgcttgacatccgagatgatgacaacccacaggatgtggtcattgaaataatcgatcctccacttcatggccaattgcttcagacacttcagtccccggcaacccctatctatcaattccagctggatgaactctctagaggccttctccactatgctcatgatggttcagacagcacatccgatgttgcagtcttgcaggccaatgatggacactccttccataatatactgttccaagtgaagaccgtgcctcagaatgacaggggtcttcagcttgtggctaattcgatggtgtgggttccagaaggggggatgctgcagatcaccaacagaatcttacaggccgaggctcctggtgccagtgctgaagaaatcatctacaagattacacaagactacccccagtttggggaggtggtccttctagtgaatatgcctgcagacagccctgcagatgaagggcagcacctgcctgatgggaggacagctacccccaccagcaccttcacccagcaggacatcaatgaaggcatcgtatggtacaggcactcaggagccccagcccagagcgactccttccgcttcgaggtgtccagtgcctccaatgcccagacccgcctggagagccacatgttcaacatcgcgatcttaccacagacacctgaagcacctaaagtgtctctggaagcatctctccatatgactgctagagaagatggcctgactgttattcagcctcattccctctccttcataaactctgagaagccaagtggaaagattgtctacaacatcactctacctctgcatccaaatcaaggtatcatcgagcaccgggaccaccctcactctcctatccggtatttcacgcaagaggatattaaccagggcaaagtcatgtaccgccctcccccggcagcaccccacctccaggagctcatggccttctcgttcgctggtctcccagaatcagtgaaattccacttcacagtttcagatggagaacacacaagtccggagatggtcctcaccattcacttacttcccagtgatcagcaactgccagtgttccaggtcacagctccacggctggcggtcagcccaggaggcagcacttctgtaggacttcaggtggtagtaagagatgctgagacagcgcccaaagaactcttctttgagcttcggagacctccacagcatggtgtgcttcttaagcatacagctgagttccgaaggccgatggccacaggtgacactttcacctatgaggatgttgagaaaaatgctctacagtatatacatgatggttcctctacccgggaagacagcatggagatctcagtcacagatggcctcacagtgacaatgctggaggtgagagtagaggtgtccctgtcagaagaccgagggcctcgactggctgctggctcctctctgagcattactgttgccagtaaaagcacagccataatcactaggtcacaccttgcttacgtggatgattcttcccccgacccagagatctggattcagttaaattatctgccctcatatggtactctcttaagaatctcaggatctgaggtggaagagctctcagaagtttccaatttcacaatggaagacatcaataacaagaaaatcagatactcagctgtgtttgaaactgatggtcatctggttactgatagcttctatttctctgtctctgacatggaccacaaccatctggataatcagatatttaccatcatgatcactcctgctgaaaatccacctccagtcattgcttttgctgaccttatcacggttgatgagggagggagagcaccactctcatttcaccatttttttgctactgatgatgatgacaacctccagagagatgccatcattaaactaagtgctctgcccaaatatggctgcattgagaacacaggaacaggtgatcgttttggccctgaaactgccagtgacctagaggcatcatttcctattcaagacgtcctggaaaactacatttactactttcagagtgttcatgaaagcattgagccaacccatgatatttttagtttttatgtgagtgatggaaccagtcgttcagaaattcacagcatcaatatcaccattgagaggaagaacgatgagcctcccaggatgaccttgcagcccctcagagtgcagctgagctcgggagtggtgataagcaattcttctttgagcctgcaagacctggacaccccagataatgagctcatttttgtattgacaaaaaagcctgaccacggtcatgtactctggaggcaaactgcttctgagcctctggagaatgggagagttttagtccagggctcaaccttcacctaccaggatatcctagctgggctggttgggtatgtgcctagtgtccctggcatggtcgtggatgagttccagttctccctcactgatggcctccacgtggacacagggaggatgaagatctacacagaactgcctgcaagtgacacacctcacttggctataaaccaaggcctacagctctcagcagggtctgtagcacgcatcacagaacagcacttgaaagtgacagatattgactcagatgaccatcaggttatgtacatcatgaaggaagatcctggtgcagggcgcctgcagatgatgaagcatggcaacctggagcaaatttctattaaaggccccatccgaagtttcacccaggcagacattagccaaggtcagccagaatatagtcatggaacaggagaacctggagggagctttgcttttaaatttgatgtggttgatggagaaggcaacagattgattgacaagtcattttccatcagcatttcagaagacaaatccccaccagtcatcaccaccaataaaggactggtcttggatgaaaactcagtgaagaaaatcaccaccctgcagctgtctgccactgaccaggacagtgggcctacagaattgatctacagaatcaccagacagccccagctgggccacttggaacatgcagcatcaccaggtatccagattagttcctttactcaagctgatctgacttcacgaaatgttcagtatgtccattctagtgaggctgagaaacattcagatgccttcagctttacactgtctgatggagtcagtgaggtgactcagactttccatatcactcttcaccctgtcgatgattcgctgcccgtcgtacagaacttaggaatgcgggtgcaggagggcatgaggaagaccatcacagagtttgagcttaaggcggtggatgctgacacagaggccgagtctgtcacattcaccatcgtgcagcctccacgccatggcaccatcgagcgaaccagcaatgggcagcatttccacctcacctccaccttcaccatgaaagatatctaccagaaccgggtcagctacagccatgacggcagtaactccctcaaggaccggttcaccttcactgtttctgatgggacaaaccccttctttatcattgaggaagggggaaaagagattatgacagcagcacctcagccgttccgagtagacatcctcccggtagatgatggcacgcctagaattgtcaccaacctgggactccagtggctggaatacatggatggcaaggcaaccaacctgatcaccaagaaggaactgctgaccatggacccagacaccgaggacgcgcagcttgtctatgagataacgacgggccctaagcatggctttgtggagaacaagctgcagcctggcagagctgctgccactttcacccaggaggatgtgaacttggggttgattcgttatgtgttgcacaaggagaagatccgtgagatgatggatagttttcagtttctggtgaaagacagtaaacccaatgtggtcagcgacaatgtcttccatatccagtggtcactcatcagctttaaatataccagctacaatgtcagtgagaaggcagggtctgtcagtgtcacggtgcagaggactgggaacctgaaccaatatgccatcgtcctgtgtcgcaccgagcaaggcaccgccagctccagctccagggtcagctcccaacctgggcaacaggactatgtagagtatgctggccaggtccagtttgatgagcgagaggacaccaagtcctgcaccattgtcatcaacgatgatgacgtgtttgaaaatgttgagagtttcactgtggagctcagcatgccagcttatgccctgttaggggaattcacccaggcgaaggtcattatcaacgataccgaggatgaacccacattagagtttgacaagaagatctactgggttaacgagagcgctggttttctgtttgcacctattgaaagaaaaggagatgcaagcagcattgtatctgcaatttgctacacagtccctaagtcagctatgggaagtagcctctatgctctagaatcaggctctgattttaaatctagagggatgtctgccgcgagtcgtgtgatattcgggcctggtgtgaccatgtccacctgtgatgtcatgcttattgatgacagcgagtatgaagaggaagaagagtttgagattgccttggcagatgcctctgacaatgcccgcattggaagggtggcgacagccaaggtgctcattagtggtcccaacgatgcctcgactgtgtccctgggcaacacggctttcactgtcagtgaggacgcaggcacagtaaagattccagttatccgccatggtactgacctctctactttcgcatctgtctggtgtgcaacgcggccctcagacccagcttctgccacaccaggagttgactacgttcccagctctcggaaggtggaatttgggcctggtgtcattgaacagtattgcaccttgactatcttggatgacactcagtatccggtaattgaaggactggagacatttgtggttttcctcagctcagcacaaggagccgaactgaccaaacccttccaggcagtcattgcaattaatgacacattccaagatgtgcccagcatgcagtttgccaaggatttgctcctagtgaaggagaaggagggtgtcctgcatgtccctatcactcggagcggagacctgagctatgagtcatcagtgaggtgctatactcagagccattccgctcaggtcatggaggactttgaggagagacaaaatgcagactcttcacggattacatttctcaaaggggacaaagtgaagaactgtacggtctatatccacgatgactccatgtttgagccagaggaacagttcagggtctacctcggccttcctcttggaaaccactggagtggagctagaattggaaagaataacatggccaccatcaccatatccaatgatgaagatgcccccaccattgagtttgaagaagctgcataccaagtccgggaacccgcaggcccagatgccattgcgattctgaacatcaaggtgatccgcagaggggatcagaacaggacctccaaggttcgctgcagcacgcgggatggctctgcccagtctggtgtggattattacccaaagagccgagtcttgaagttcagtcccggtgtggatcatatcttttttaaagttgagatcctgtccaatgaagaccgggaatggcatgaatctttctcactagtccttggcccagatgacccagtggaagcagttcttggggatgtgactactgccacggtgacaattctagaccaggaggcagcagggagcctcatattgccagcaccacccattgtggtcacacttgctgactatgaccatgtggaagaagttaccaaggaaggagtcaagaaatccccctccccaggctacccactggtctgtgtcaccccctgcgaccctcatttccccagatacgctgtcatgaaggagcgctgcagtgaggccggcatcaaccagacatctgtgcagttcagctgggaagtggctgcccccactgatggcaatggggcccggtctccctttgaaaccatcactgacaacacaccattcaccagtgtcaaccacatggtcctggacagcatttacttcagccggaggttccatgtgcgttgtgtggccaaggctgtggacaaggtgggccatgtggggacccccttaaggagcaacattgttaccattggaacagacagtgctatctgccacacaccagtggtggctgggacatccagaggcttccaggctcagtccttcatcgcaaccttgaaatacctggatgtcaaacataaggagcatccgaacagaatccacatttcggtgcagatcccacaccaggatggaatgctgccccttatctccaccatgccgttgcacaacttacattttctactgtctgagtccatctacagacaccagcacgtctgctccaatttagttaccacctatgacctgagaggcctggcagaggcagggttcctggatgatgtggtctatgatagcactgccctggggcctggctacgatcgccccttccagtttgaccccagcgtgcgagagccgaagaccatccagctctacaaacacctgaacctgaagagctgcgtgtggacctttgatgcttattatgacatgactgagctgattgacgtctgtgggggctctgtaaccgctgacttccaggtgagggactctgcccagtccttcttgacagtgcacgtgcctctatatgtgtcctacatctatgtgacagcccccaggggctgggcctccttggagcaccacaccgagatggagttttctttcttctatgacactgttctctggagaacaggaatccagacagacagcgtgctctctgcaaggcttcagataataagaatctacattcgagaggatggccgtcttgtcattgaattcaagacccatgccaaattcagaggacagtttgtgatggagcatcacactctcccagaagtgaaatctttcgtattgactccagaccacctaggaggaattgaatttgacttgcagctattatggagcgctcagacttttgattctccacatcaactctggagagccacaagctcttataacaggaaggactactcaggagagtacaccatctacctgatcccttgcacagtgcagcccacacagccatgggttgacccaggagagaagcctttggcctgcactgcacatgccccagaaagattcctgatacccattgcattccagcagaccaaccgccctgtgccagttgtgtattcacttaacactgaatttcagctctgcaataatgagaaggtgttcctaatggatcccaatacatctgatatgtcactagcagaaatggattacaaaggagccttttcaaaaggtcaaatcctttatggccgagtactttggaatccagaacaaaatcttaattctgcttacaaactccagctggagaaagtctatctttgtacgggcaaggatggttatgtgcctttctttgatcccacggggacaatctacaatgaagggccccagtatggatgcattcagccaaacaaacacctaaaacacagattcctgctgttggaccgcaatcagccagaggtaactgataagtacttccatgatgtgccttttgaggctcactttgcctctgagttgcctgatttccatgtggtcagtaacatgccaggtgtggatggatttactctaaaagtagatgcactctataaggtggaagcaggacaccagtggtatctccaggtcatctacatcattggccctgacaccatctcagggccccgggtccagcgctctctcacagctccactcagacgcaaccgaagggacctggtagagcccgatggccagctgatccttgatgattccctcatctatgacaatgaaggagaccaagtcaagaatggcaccaatatgaagtccctgaatctggagatgcaagagttggcggtagctgcgtccctgtcacagactggggcgtccattggcagtgccctggctgcaatcatgcttctacttctggtgtttttggtggcttgttttatcaacaggaaatgccagaaacagaggaagaagaagcccgcagaggacattttggaagaatatcctctgaataccaaggtagaagtgcccaagaggcacccggaccgggtggagaagaacgtgaatagacactactgcactgtgcggaacgtcaacatcctgagtgagcctgaggcggcttacacgttcaaaggtgctaaagtcaaaagactgaatctagaagtcagagttcacaacaatttacaagatggaacagaagtttaatggaggagacctatgtgtatttttttctaaaatcatttttataaaatggggggaaatactggtatttttataatctcgcagataaaaaagggaaaactatagctttgagtggcagacagcacacatcacatgcatcaactcacaactgagctacctcattcagcaaagaaccactgagaaccccagagtattacagttatttccgtagatccctttaatagtgtcaacaactgtacacagctccttctgtaaggctggtcttagaaaacaagtactttagtatcaggacaggagttgaacaattaggttagcagatggagatgagaggactgggtagagtaccatggcagatctcagagagaagaagtaggtacgggcctttggttccctcccccagccccagctttctcctacagggcttttcctgagtccccagacagcagagtatgaactgctgacacccagattccattaaaaattctgctaatcgacacaacacatatatttgctcatgatttcacttgacagcgtatgctccttggcctctaattgtactttgcttttccagagccctttttacctggggatttcagtgtgcttaagtaaaatcctctgaaaaccacgggagcctctgcctcctcagccacagagaactccctcctacaaagggggagactgaaacccgagttaaggaggggcctggcaggcgtatcagagcacattagtgatgcccttcaccccagggaggtgtctgttcccaactagtttatgtggcactgagacatccatccctgaccaaggatgctgcgaaacaggatcaatgtactacggccttttaattcaacattgccataaatgctttaaagaaaacccaccacactttcctcctactccggtctttgcccgttcctgtaacagacaatcccatgtcctaggtatggttttttattctgttagtgcttcgggaaagtaagtgattcatttgaataaggcaaattaggagaaagcccaggttggggtgaaatcagacttaacagatacatgctggttctccttgctgtgtgtgacacagcagacagaggcactattcctggtgcagtatttcagggatttctctttgaggggttcttttctggtagctcaggcaattatttttaccatatcagcacatgacaaggccatgaacacatggctctaaaataatttagtgttcaagtatcagcttaactattttgtgtaggctacacacagcttgcttttgtttctcttctgtttctgccttattggcggaaacataagcgtgcatgccatgttgttttgaattggaggcacaatttcattattcgagagtaaaagacatgtcctcttctgatgcatggcacaccatagtcaccaagcaaataacagagccttcacattgtgtaatatttgtatgagaatgactcaagctctttgagaacattccaaactagtaacatttcgctactaaaagctagaaaggatgaactgtgaaaggttctaggcagctctgtgagactccaagctccttgaaagtaggacctttgtgagccacgcctttcattcttcaacagtgccttgcatgtaacaagcactccagaaatgtttgttgaatgaatgaatggtgtcatgggtgaatgatggggagtaaatttaggaaggggaagtgagagagtatggtggcaatatcacaagggaggagagaggaaaacaattatcttctctacttggattatgagataaccttttcttggaggaaagaaacaccgctttacaaaggcatgactctggcggtggtcctaaggaagcatgagcagaaaattcataaaaatgtatcatcagcaggagatgagactatgaattggcatccagaacaggagatttagagcaaaatctaatttagcattctgagatgagtgtcaggttttcaggagagaatgagttggggtgagcccagagtctgaaactcctgactggtcaggtgctacttaagaccagcttgggcaattcagggcagaactcctgtatcagcctcatggacacccagaattggtatctcatggctggagagctgatcagccaggcacagaatctccagaacaacctagagagtgaatgctaatttgtagagcgaacttccatttggcccattatttgtaactgtgtaactgctccaagtgccagaatgcttacacgttaaagcagcacctttccatttgcccacatattcttcttgcacaccccttccattactgctgaataggacattgcatgggaagagtacagaggtggcagaatgaagctagagtgggaaggactaaagactgagccccagagtgctcccagcaaccgccacgtacaaggtctgaaatgacaagggcaagagtgagataggaaactgtgtgtgaaaggaaagcccttgcagtatttctgcctccctttctttctgcctttcaccccactaaatgtatgttattgaatgccagtacttctctagtggatgcacacttgttaaatagtgttaagagatgtggagatgagatatacccctttgatgtagaattattcatttggtttgtttcatacttcattataggaatcaagtaatttgatgactaatgtggattatatttcagtcaaagctctgctttcaatttctctgatttgctcactaatgccttgtgtgtgttttactaaccttttatatcttgccttcaagtgagaaggaacaaacaactctcagtggttactacttgcttttatatgctggctgtgaaggttaaaagaaagaatggtctgtaccattctgctttgctgcccttttattgtaccccaggcctcctagaggactcctgcagattctattgttgggtgggaaatagtgttggaatgtgtttgcacagtcttatgatattcagtctcagtctgctataggtatttgttattcttggatactacacacctgctcagactgagtaaacatttgtggtgctgtcaacctgatttcttgactctcaaatgatttttgtatttccaatatgaatttgtgtgttatgaatttctgatttctccaatagtatatgccactatataaatttgtattaataaatgacagtcttgttggttaaaaaaaaaaaaaaaaaaa

SEQ ID NO: 14591 - DNA, 4143 bp, Homo sapiens
agcagcgagtccttgcctcccggcggctcaggacgagggcagatctcgttctggggcaagccgttgacactcgctccctgccaccgcccgggctccgtgccgccaagttttcattttccaccttctctgcctccagtcccccagcccctggccgagagaagggtcttaccggccgggattgctggaaacaccaagaggtggtttttgttttttaaaacttctgtttcttgggagggggtgtggcggggcaggatgagcaactccgttcctctgctctgtttctggagcctctgctattgctttgctgcggggagccccgtaccttttggtccagagggacggctggaagataagctccacaaacccaaagctacacagactgaggtcaaaccatctgtgaggtttaacctccgcacctccaaggacccagagcatgaaggatgctacctctccgtcggccacagccagcccttagaagactgcagtttcaacatgacagctaaaacctttttcatcattcacggatggacgatgagcggtatctttgaaaactggctgcacaaactcgtgtcagccctgcacacaagagagaaagacgccaatgtagttgtggttgactggctccccctggcccaccagctttacacggatgcggtcaataataccagggtggtgggacacagcattgccaggatgctcgactggctgcaggagaaggacgatttttctctcgggaatgtccacttgatcggctacagcctcggagcgcacgtggccgggtatgcaggcaacttcgtgaaaggaacggtgggccgaatcacaggtttggatcctgccgggcccatgtttgaaggggccgacatccacaagaggctctctccggacgatgcagattttgtggatgtcctccacacctacacgcgttccttcggcttgagcattggtattcagatgcctgtgggccacattgacatctaccccaatgggggtgacttccagccaggctgtggactcaacgatgtcttgggatcaattgcatatggaacaatcacagaggtggtaaaatgtgagcatgagcgagccgtccacctctttgttgactctctggtgaatcaggacaagccgagttttgccttccagtgcactgactccaatcgcttcaaaaaggggatctgtctgagctgccgcaagaaccgttgtaatagcattggctacaatgccaagaaaatgaggaacaagaggaacagcaaaatgtacctaaaaacccgggcaggcatgcctttcagagtttaccattatcagatgaaaatccatgtcttcagttacaagaacatgggagaaattgagcccaccttttacgtcaccctttatggcactaatgcagattcccagactctgccactggaaatagtggagcggatcgagcagaatgccaccaacaccttcctggtctacaccgaggaggacttgggagacctcttgaagatccagctcacctgggagggggcctctcagtcttggtacaacctgtggaaggagtttcgcagctacctgtctcaaccccgcaaccccggacgggagctgaatatcaggcgcatccgggtgaagtctggggaaacccagcggaaactgacattttgtacagaagaccctgagaacaccagcatatccccaggccgggagctctggtttcgcaagtgtcgggatggctggaggatgaaaaacgaaaccagtcccactgtggagcttccctgagggtgcccgggcaagtcttgccagcaaggcagcaagacttcctgctatccaagcccatggaggaaagttactgctgaggacccacccaatggaaggattcttctcagccttgaccctggagcactgggaacaactggtctcctgtgatggctgggactcctcgcgggaggggactgcgctgctatagctcttgctgcctctcttgaatagctctaactccaaacctctgtccacacctccagagcaccaagtccagatttgtgtgtaagcagctgggtgcctggggcctctcgtgcacactggattggtttctcagttgctgggcgagcctgtactctgcctgacgaggaacgctggctccgaagaggccctgtgtagaaggctgtcagctgctcagcctgctttgagcctcagtgagaagtccttccgacaggagctgactcatgtcaggatggcaggcctggtatcttgctcgggccctagctgttggggttctcatgggttgcactgaccatactgcttacgtcttagccattccgtcctgctccccagctcactctctgaagcacacatcattggctttcctatttttctgttcattttttaattgagcaaatgtctattgaacacttaaaattaattagaatgtggtaatggacatattactgagcctctccatttggaacccagtggagttgggatttctagaccctctttctgtttggatggtgtatgtgtatatgcatggggaaaggcacctggggcctgggggaggctataggatataagcattagggaccctgaggctttaagtggtttctatttcttcttagttattatgtgccaccttcttagttattatgtgccacctcccctatgagtgacgtgtttgatcactagcagaatagcaagcagagtatcattcatgctggggccagaatgatggccggttgccagatataactgctttggagcaaatctcttctgtttagagagatagaagttatgacatatgtaatacacatctgtgtacacagaaaccggcacctgccagacagagctggttctaagatttaatacagtgctttttttcctctttgaaatattttactttaataccagtgccttttcttgttgaacttcttggaaaagccaccaattctagatcttgatttgaattaatacacacaatatctgagacacttacacttttcaaaagatttgtgtatgcattgcctaattagagtagggggagaagggcaactattattatccctattttacaaaactgaggcttagtgaggttcagccacatgcctagacttatatactagttagtggtgcagccagggagaggactcagatttcctggaggcaaagtctatctctgaaactccatgaagacttttgcagccagttcccaccaatatgccccagacgtgagacaaacaaggacttttttttttatatagagccatccataaaatcctaagcccttttattaatgtataaccaggagaacatctgtgccaacggttggactttttatggctgagattcgggaggaagtgtgacaccaagcaggagaggaagaatgattttctttgtacttaggttttctaaggacattgttttaatctgtatcgtgccaaagttgtatcactgttaaacttctgaagacataaccagttgagtcttatttcaagatatgttctcaagccaattgtgtgcttctcttgtttctgtgattgctttctagccaaagcgaagcttgtacaggttgagtatcccttatccaaaatgcttggaaccagaagtgtttcaaattttagattattttcagattttggaatgtttgcatatacataatgagatattttgggaataggacccgagcctaaacacaaaattcattgatgtgtcagttacaccttatccacatagcctgagggtaattttatacgatattttaaatagttgtgtacatgaagcatggtttgtggtaacttatgtgaggggttttcccattttttgtcttgttggtgctcaaaaagttttggattttggagcatttcggattttggatttttggattagggttgctcaacccatattattggctgtacatcctggtcacttctgacttctgtttttactaatggaagctttgcaaattgaattctcagtgagttgtatatttatacacctggcttgaagccttaattgtatataatgatgctttttaaaaaatgctatttggaagactatttatttctcgtgtatataatgtatataaaaaaatatggttagtgtttacctaaggttaaccaatttcaagattaaaatttttaaatagtaaaataataaaaaattataaagttcttaaaa

SEQ ID NO: 14592 - DNA, 817 bp, Homo sapiens
gaaggaggcccagacagtgagggcaggagggagagaagagacgcagaaggagagcgagcgagagagaaagggttctggattggaggggagagcaagggagggaggaaggcggtgagagaggcgggggcctcgggagggtgaaaggagggaggagaagggcggggcacggaggcccgagcgagggacaagactccgactccagctctgacttttttcgcggctctcggcttccactgcagccatgtcactcctcttgctggtggtctcagcccttcacatcctcattcttatactgcttttcgtggccactttggacaagtcctggtggactctccctgggaaagagtccctgaatctctggtacgactgcacgtggaacaacgacaccaaaacatgggcctgcagtaatgtcagcgagaatggctggctgaaggcggtgcaggtcctcatggtgctctccctcattctctgctgtctctccttcatcctgttcatgttccagctctacaccatgcgacgaggaggtctcttctatgccaccggcctctgccagctttgcaccagcgtggcggtgtttactggcgccttgatctatgccattcacgccgaggagatcctggagaagcacccgcgagggggcagcttcggatactgcttcgccctggcctgggtggccttccccctcgccctggtcagcggcatcatctacatccacctacggaagcgggagtgagcgccccgcctcgctcggctgcccccgccccttcccggcccccctcgccgcgcgtcctccaaaaaaataaaactttaacggcgg

SEQ ID NO: 14593 - DNA, 5065 bp, Homo sapiens
ggtcgctgggctccgctcggttgcggcgggagccccgggacgggccggacgggccggggcagaggaggcgaggcgagctcgcgggtggccagccacaaagcccgggcggcgagacagacggacagccagccctcccgcgggacgcacgcccgggacccgcgcgggccgtgcgctctgcactccggagcggttccctgagcgccgcggccgcagagcctctccggccggcgcccattgttccccgcgggggcggggcgcctggagccgggcggcgcgccgcgcccctgaacgccagagggagggagggaggcaagaagggagcgcggggtccccgcgcccagccgggcccgggaggaggtgtagcgcggcgagcccggggactcggagcgggactaggatcctccccgcggcgcgcagcctgcccaagcatgggcgcctgaggctgcccccacgccggcggcaaaggacgcgtccccacgggcggactgaccggcgggcggacctggagcccgtccgcggcgccgcgctcctgcccccggcccggtccgaccccggcccctggcgccatggacaagctgccgccgtccatgcgcaagcggctctacagcctcccgcagcaggtgggggccaaggcgtggatcatggacgaggaagaggacgccgaggaggagggggccgggggccgccaagaccccagccgcaggagcatccggctgcggccactgccctcgccctccccctcggcggccgcgggtggcacggagtcccggagctcggccctcggggcagcggacagcgaagggccggcccgcggcgcgggcaagtccagcacgaacggcgactgcaggcgcttccgcgggagcctggcctcgctgggcagccggggcggcggcagcggcggcacggggagcggcagcagtcacggacacctgcatgactccgcggaggagcggcggctcatcgccgagggcgacgcgtcccccggcgaggacaggacgcccccaggcctggcggccgagcccgagcgccccggcgcctcggcgcagcccgcagcctcgccgccgccgccccagcagccaccgcagccggcctccgcctcctgcgagcagccctcggtggacaccgctatcaaagtggagggaggcgcggctgccggcgaccagatcctcccggaggccgaggtgcgcctgggccaggccggcttcatgcagcgccagttcggggccatgctccaacccggggtcaacaaattctccctaaggatgttcggcagccagaaagccgtggagcgcgaacaggagagggtcaagtcggccggattttggattatccacccctacagtgacttcagattttactgggacctgaccatgctgctgctgatggtgggaaacctgattatcattcctgtgggcatcaccttcttcaaggatgagaacaccacaccctggattgtcttcaatgtggtgtcagacacattcttcctcatcgacttggtcctcaacttccgcacagggatcgtggtggaggacaacacagagatcatcctggacccgcagcggattaaaatgaagtacctgaaaagctggttcatggtagatttcatttcctccatccccgtggactacatcttcctcattgtggagacacgcatcgactcggaggtctacaagactgcccgggccctgcgcattgtccgcttcacgaagatcctcagcctcttacgcctgttacgcctctcccgcctcattcgatatattcaccagtgggaagagatcttccacatgacctacgacctggccagcgccgtggtgcgcatcgtgaacctcatcggcatgatgctcctgctctgccactgggacggctgcctgcagttcctggtacccatgctacaggacttccctgacgactgctgggtgtccatcaacaacatggtgaacaactcctgggggaagcagtactcctacgcgctcttcaaggccatgagccacatgctgtgcatcggctacgggcggcaggcgcccgtgggcatgtccgacgtctggctcaccatgctcagcatgatcgtgggtgccacctgctacgccatgttcattggccacgccactgccctcatccagtccctggactcctcccggcgccagtaccaggaaaagtacaagcaggtggagcagtacatgtcctttcacaagctcccgcccgacacccggcagcgcatccacgactactacgagcaccgctaccagggcaagatgttcgacgaggagagcatcctgggcgagctaagcgagcccctgcgggaggagatcatcaactttaactgtcggaagctggtggcctccatgccactgtttgccaatgcggaccccaacttcgtgacgtccatgctgaccaagctgcgtttcgaggtcttccagcctggggactacatcatccgggaaggcaccattggcaagaagatgtacttcatccagcatggcgtggtcagcgtgctcaccaagggcaacaaggagaccaagctggccgacggctcctactttggagagatctgcctgctgacccggggccggcgcacagccagcgtgagggccgacacctactgccgcctctactcgctgagcgtggacaacttcaatgaggtgctggaggagtaccccatgatgcgaagggccttcgagaccgtggcgctggaccgcctggaccgcattggcaagaagaactccatcctcctccacaaagtccagcacgacctcaactccggcgtcttcaactaccaggagaatgagatcatccagcagattgtgcagcatgaccgggagatggcccactgcgcgcaccgcgtccaggctgctgcctctgccaccccaacccccacgcccgtcatctggaccccgctgatccaggcaccactgcaggctgccgctgccaccacttctgtggccatagccctcacccaccaccctcgcctgcctgctgccatcttccgccctcccccaggatctgggctgggcaacctcggtgccgggcagacgccaaggcacctgaaacggctgcagtccctgatcccttctgcgctgggctccgcctcgcccgccagcagcccgtcccaggtggacacaccgtcttcatcctccttccacatccaacagctggctggattctctgcccccgctggactgagcccactcctgccctcatccagctcctccccaccccccggggcctgtggctccccctcggctcccacaccatcagctggcgtagccgccaccaccatagccgggtttggccacttccacaaggcgctgggtggctccctgtcctcctccgactctcccctgctcaccccgctgcagccaggcgcccgctccccgcaggctgcccagccatctcccgcgccacccggggcccggggaggcctgggactcccggagcacttcctgccacccccaccctcatccagatccccgtcatctagccccgggcagctgggccagcctcccggggagttgtccctaggtctggccactggcccactgagcacgccagagacacccccacggcagcctgagccgccgtcccttgtggcaggggcctctgggggggcttcccctgtaggctttactccccgaggaggtctcagcccccctggccacagcccaggccccccaagaaccttcccgagtgccccgccccgggcctctggctcccacggatccttgctcctgccacctgcatccagccccccaccaccccaggtcccccagcgccggggcacacccccgctcacccccggccgcctcacccaggacctcaagctcatctccgcgtctcagccagccctgcctcaggacggggcgcagactctccgcagagcctccccgcactcctcaggggagtccatggctgccttcccgctcttccccagggctgggggtggcagcgggggcagtgggagcagcgggggcctcggtccccctgggaggccctatggtgccatccccggccagcacgtcactctgcctcggaagacatcctcaggttctttgccaccccctctgtctttgtttggggcaagagccacctcttctggggggccccctctgactgctggaccccagagggaacctggggccaggcctgagccagtgcgctccaaactgccatccaatctatgagctgggcccttccttccctcttctttcttcttttctctcccttccttcttccttcaggtttaactgtgattaggagatataccaataacagtaataattatttaaaaaaccacacacaccagaaaaacaaaagacagcagaaaataaccaggtattcttagagctatagatttttggtcacttgcttttatagactattttaatactcagcactagagggagggagggggagggaggagggagcaggcaggtcccaaatgcaaaagccagagaaaggcagatggggtctccggggctgggcaggggtgggagtggccagtgttggcggttcttagagcagatgtgtcattgtgttcatttagagaaacagctgccatcagcccgttagctgtaacttggagctccactctgcccccagaaaggggctgccctggggtgtgccctggggagcctcagaagcctgcgaccttgggagaaaagggccagggccctgagggcctagcattttttctactgtaaacgtagcaagatctgtatatgaatatgtatatgtatatgtatgtaagatgtgtatatgtatagctatgtagcgctctgtagagccatgtagatagccactcacatgtgcgcacacgtgtgcggtctagtttaatcccatgttgacaggatgcccaggtcaccttacacccagcaacccgccttggcccgcaggctgtgcactgcatggtctagggacgttctctctccagtcctcagggaagaggacgccaggacttcgcagcaggccccctctctccccatctctggtctcaaagccagtcccagcctgacctctcaccacacggaagtggaagactcccctttcctagggcctcaagcacacaccg

SEQ ID NO: 14594 - DNA, 1854 bp, Homo sapiens
ctccaaccctctgctcccgtttctccctctggttcatagcccgcgggacagagcagccctggattgggaggctcctcaggtctcaggctcaggtgcagaagcagagcccctaactggaaggctcggaggtgggccggtgaggcaagcaagccctgtggggggttgaggacagcttgggttggatgtccctcactgcagcctgtccgtggatgtctctgccttaagggaattggaggtggaaccatccagtcttgaaggtcaacggagcgtgaagagaggagcgtgcagcttgagggtctaaggataactctggggccatgacagccatgagtctcacagaggaccccgagacttctgtgctgcgagtaaccggacttgttctgagacctttgccctagaggatggccaaggggctcctggtgacctatgccctctgggctgtggggggccctgctgggctccaccacctgtacctgggaagggacagccacgccctgctctggatgctgaccctggggggaggtgggctgggctggctctgggagttctggaagctcccaagctttgtagctcaggccaacagagcccagggacagaggcagagccccagaggggtgacaccccctctgagtcccattcgctttgctgcccaggtgatagttggcatctattttggccttgtggcactgattagcctttcttccatggtcaacttctatattgtggccctcccactggcagttggcttaggggtcttgctggtggctgctgttggcaaccagacctcagactttaagaacactctggggtcagcatttctcacttcacctatcttctatggccgccccatagccatactgcccattagcgtggccgccagcattacagctcagaggcatcgccgctacaaagctttggtggcatcagagccgctcagtgtgcggctctatcgtctgggcttggcttaccttgctttcacaggcccactggcatacagtgccctctgcaacacagctgccaccctcagctatgtggcagaaacctttggctccttcttgaattggttcagcttcttcccccttcttggccgcctcatggagtttgtcctccttctgccttaccggatctggaggctactgatgggggagactggcttcaacagcagctgctttcaggagtgggcgaagctctatgagtttgttcacagttttcaggatgagaagcgtcagctggcttaccaggttttgggcctctcagaaggggcaacaaatgaagaaatacatcggagttaccaggagctagtgaaggtctggcacccagaccacaacctggaccagacagaggaggcacagaggcacttcctggagatccaggctgcgtatgaagtcctgagtcaacccaggaagccctggggatcccggaggtgaaaagaaacttccccctgaggactgactcttcctagcagagctgggcaacttgtcccaaatctagctttgcccacgaatggcatcccaacagagttaaagaaactgcttgcaggggctgggcgtggtggctcatgcctgtaatcccggcactttgggaggccgaggcgggcagatcacgaggtcaggagttcgagaccagcagcctggccaatatggtgaaacttcgtctctactaaaaatacaaaaaattggccaggagtggtggcaggcacctgtagtcccagctacttgggaggctgaggcaggagaatcacctgaacctgagaggcggaggttgcagtgagccgagatcacgccactgcactccagcctgggcaacaagagtgaaactccgtctcaaaaaaaaaaaaaaaaaaaaaaaaaaaaa

SEQ ID NO: 14595 - DNA, 3652 bp, Homo sapiens
attccttctcattcattttgcccagaaagttcctgcttcagagctgaaggtgattgggagattttaacttagatctccagcaagtgctacaaggaagaaaagatcctgaagaatcaatcaagttttccgtgaagtcaagtccaagtaacatccccgccttaaccacaagcaggagaaatgaagcacattatcaactcgtatgaaaacatcaacaacacagcaagaaataattccgactgtcctcgtgtggttttgccggaggagatatttttcacaatttccattgttggagttttggagaatctgatcgtcctgctggctgtgttcaagaataagaatctccaggcacccatgtactttttcatctgtagcttggccatatctgatatgctgggcagcctatataagatcttggaaaatatcctgatcatattgagaaacatgggctatctcaagccacgtggcagttttgaaaccacagccgatgacatcatcgactccctgtttgtcctctccctgcttggctccatcttcagcctgtctgtgattgctgcggaccgctacatcaccatcttccacgcactgcggtaccacagcatcgtgaccatgcgccgcactgtggtggtgcttacggtcatctggacgttctgcacggggactggcatcaccatggtgatcttctcccatcatgtgcccacagtgatcaccttcacgtcgctgttcccgctgatgctggtcttcatcctgtgcctctatgtgcacatgttcctgctggctcgatcccacaccaggaagatctccaccctccccagagccaacatgaaaggggccatcacactgaccatcctgctcggggtcttcatcttctgctgggccccctttgtgcttcatgtcctcttgatgacattctgcccaagtaacccctactgcgcctgctacatgtctctcttccaggtgaacggcatgttgatcatgtgcaatgccgtcattgaccccttcatatatgccttccggagcccagagctcagggacgcattcaaaaagatgatcttctgcagcaggtactggtagaatggctgatccctggttttagaatccatgggaataacgttgccaagtgccagaatagtgtaacattccaacaaatgccagtgctcctcactggccttccttccctaatggatgcaaggatgatcccaccagctagtgtttctaatagctaggttctatgtgaacagtcttattgtaggggcaacctcttaactttgtgactggacagataaaacgatgtagtaaaagaaggatagaatacaaagtattaggtaggtacaaaagtaattaaggtttttgccattactttcaatgaccaaaaattgcaattacttttgcaccaatctagtaaaacagcaataaaaattcaagggctttgggctaaggcaaagacttgctttcctgtggacatctaacaagccagttctgaggtggcctttccaggtggaggccattgcagccaatttccagaagttaagtacctggacatgcgactccaggcagaagatgtagggtctctgtaagccaataataaattggaaggaatgcattgctgcagctgaatttgtctgtctcccacagccatgtggaatctccaccctcctctttctccctgttagtctgatgtattgatgccacctcagtttcagaaagtaggctgagtataaactataaatgtcaaataacgagcttcgagtttccaatgataaatggaccttctctgttagtcttctttgctcactcagtatcccactggccttaaaaccctttcctgttacatttcctcatgctttatgagcatacatttcaaaggaagaaatgaaaatttaatccatttagttcccatgtgggaatacataaaggccagatgaaaattgtcactatttgaagaagctgtaaccaaactatgtgtgttacaatgtagaagtacaagaaaagagccccaacatgtattttaagaaataaagagagagagacagagacagacagagagagagagagagagagagagagagagtgtgtgtgtgtgtgtgtgtgtgtgtgtgtgtgtgtgtgtgtgtgtgtgtgtattttccccatgcttttggactatggggaaaaccaaaaccaaagcaagacatcaagcaatggtgctgttattatagccccaagtcaaagacctgagggaggcaaacaccacctcattctgcagatgaatgtgaaagcagacccagtcactgggaaatgtcatcctcccatcagccaagatgccagcaatggaagagtggcaaccccagtaggaataaaagaaacataatttgcaagttcattcatttttaatagctaaaaatcagcttaaaggagaagcacatcctgattgtaagtccccactaagttggagggtgacttgaatggggtgaaaggtgaaagggacagaggagagcagtggggcttcagaggccaccaggctcaggatctgcaggatggatggtatcttccagaacaggcaatgctttgccctcaggagaatttcccagagctgctgaggggagaagacagccacacacaggacagaccatttggtgatgggtttgatattagaagtggcagggacaggaacttcagaagcaaaggaggcaaggcagctggagtcaagtgaggacagtggcaggcgtgctttcacatggcctgtcccacagatggaggtgaaaggtgcaccttcttgtcctctgttctgtagaaatccttccctgtttgatccttcccctgccaaatgaactatgttactctaatactaacctgtattaattaatatatgagatatatataagttaatttttcatgaaatctaaagcacaaccctagaactaatttttaaaagtgttatttctaccattgaaaaagtaatgtataacatattttatgtgattaaagtgcgtattctcaataagaggtaacctttttttgatgctgcaatgctctgtgataccacagaggtaagcaatgccacttaacctgtatcataaatagtcccaaactgctcttcctataaaattctgcctttgtcaacagctttgctgtctcctaatcactctcaagctctctgctgtgcatgtgactgttgtcagaaggaaaatcaccaagaaacttcacctctcactgcctttgatttgttgcagttaatctaagaaacaaaatgaagatggctagtctaatggtggatgaaacaaaaatgaagtctgagtgctaattcagagaacttgcaattccagacattttcaattctaggtcttctgctatattccaatcagaacagaagcttcagggctcatagttactgagaaaactcacgtttttctacctctaacttcatatagaattccaaatgaaagcaccaccaaactgcacatatttgtgtgaggaagatcaacaagcttcagacttttcccatgaggacttaattcttttatcaaattacccaatttttaaactgctgtgtggatactgtgagtgttcagctttatcgatgacctagccttggaccagatagctgaaaatgttcaggatgtgtactcaagctgatagtaattctgagccctgtctaataaaaaaggaaggatgt

SEQ ID NO: 14596 - DNA, 6899 bp, Homo sapiens
ggatgacaggagccggggagccgaggagggaggagccgccgccgcagccgagcgctgggctgaggagcagagagagcggggcgccgagtgcgggcggctgggagcgcgctgagcgggggagaggcgctgccgcacggccggccacaggaccacctccccggagaatagggcctctttatggcatgtggctggtaactttcctcctgctcctggactctttacacaaagcccgccctgaagatgttggcaccagcctctactttgtaaatgactccttgcagcaggtgaccttttccagctccgtgggggtggtggtgccctgcccggccgcgggctcccccagcgcggcccttcgatggtacctggccacaggggacgacatctacgacgtgccgcacatccggcacgtccacgccaacgggacgctgcagctctaccccttctccccctccgccttcaatagctttatccacgacaatgactacttctgcaccgcggagaacgctgccggcaagatccggagccccaacatccgcgtcaaagcagttttcagggaaccctacaccgtccgggtggaggatcaaaggtcaatgcgtggcaacgtggccgtcttcaagtgcctcatcccctcttcagtgcaggaatatgttagcgttgtatcttgggagaaagacacagtctccatcatcccagaacacaggttttttattacctaccacggcgggctgtacatctctgacgtacagaaggaggacgccctctccacctatcgctgcatcaccaagcacaagtatagcggggagacccggcagagcaatggggcacgcctctctgtgacagaccctgctgagtcgatccccaccatcctggatggcttccactcccaggaagtgtgggccggccacaccgtggagctgccctgcaccgcctcgggctaccctatccccgccatccgctggctcaaggatggccggcccctcccggctgacagccgctggaccaagcgcatcacagggctgaccatcagcgacttgcggaccgaggacagcggcacctacatttgtgaggtcaccaacaccttcggttcggcagaggccacaggcatcctcatggtcattgatccccttcatgtgaccctgacaccaaagaagctgaagaccggcattggcagcacggtcatcctctcctgtgccctgacgggctccccagagttcaccatccgctggtatcgcaacacggagctggtgctgcctgacgaggccatctccatccgcgggctcagcaacgagacgctgctcatcacctcggcccagaagagccattccggggcctaccagtgcttcgctacccgcaaggcccagaccgcccaggactttgccatcattgcacttgaggatggcacgccccgcatcgtctcgtccttcagcgagaaggtggtcaaccccggggagcagttctcactgatgtgtgcggccaagggcgccccgccccccacggtcacctgggccctcgacgatgagcccatcgtgcgggatggcagccaccgcaccaaccagtacaccatgtcggacggcaccaccatcagccacatgaacgtcacaggcccccagatccgcgacgggggcgtgtaccggtgcacagcgcggaacttggtgggcagtgctgaatatcaggcgcgaataaacgtaagaggcccacccagcatccgggctatgcggaacatcacagcagtcgccgggcgggacacccttatcaactgcagggtcatcggctatccctactactccatcaagtggtacaaggatgccctgctgctgccagacaaccaccgccaggtggtgtttgagaatgggaccctcaagctgactgacgtgcagaagggcatggatgagggggagtacctgtgcagtgtcctcatccagccccagctctccatcagccagagcgttcacgtagccgtcaaagtgccccctctgatccagcccttcgaattcccacccgcctccatcggccagctgctctacattccctgtgtggtgtcctcgggggacatgcccatccgtatcacctggaggaaggacggacaggtgatcatctcaggctcgggcgtgaccatcgagagcaaggaattcatgagctccctgcagatctctagcgtctccctcaagcacaacggcaactatacatgcatcgccagcaacgcagccgccaccgtgagccgggagcgccagctcatcgtgcgtgtgccccctcgatttgtggtgcaacccaacaaccaggatggcatctacggcaaagctggtgtgctcaactgctcggtggacggctaccccccacccaaggtcatgtggaagcatgccaaggggagcgggaacccccagcagtaccaccctgtgcccctcactggccgcatccagatcctgcccaacagctcgctgctgatccgccacgtcctagaagaggacatcggctactacctctgccaggccagcaacggcgtaggcaccgacatcagcaagtccatgttcctcacagtcaagatcccggccatgatcacttcccaccccaacaccaccatcgccatcaagggccatgcgaaggagctaaactgcacggcacggggtgagcggcccatcatcatccgctgggagaagggggacacagtcatcgaccctgaccgcgtcatgcggtatgccatcgccaccaaggacaacggcgacgaggtcgtctccacactgaagctcaagcccgctgaccgtggggactctgtgttcttcagctgccatgccatcaactcgtatggggaggaccggggcttgatccaactcactgtgcaagagccccccgaccccccagagctggagatccgggaggtgaaggcccggagcatgaacctgcgctggacccagcgattcgacgggaacagcatcatcacgggcttcgacattgaatacaagaacaaatcagattcctgggacttcaagcagtccacacgcaacatctcccccaccatcaaccaggccaacattgtggacttgcacccggcatctgtgtacagcatccgcatgtactctttcaacaagattggccgcagtgaaccaagcaaggagctcaccatcagcactgaggaggccgctcccgatgggccccccatggatgttaccttgcagccagtgacctcacagagcatccaggtgacctggaaggcacccaagaaggagctgcagaacggtgtcatccggggctaccagattggctacagagagaacagccccggcagcaacgggcagtacagcatcgtggagatgaaggccacgggggacagcgaggtctacaccctggacaacctcaagaagttcgcccagtatggggtggtggtccaagccttcaatcgggctggcacggggccctcttccagcgagatcaatgccaccactctggaggatgtgcccagccagccccctgagaacgtccgggccctgtccatcacttctgacgtggccgtcatctcctggtcagagcccccgcgcagcaccctcaatggcgtcctcaaaggctatcgggtcatcttctggtccctctatgttgatggggagtggggcgagatgcagaacatcaccaccacgcgggagcgggtggagctgcggggcatggagaagttcaccaactacagcgtccaggtgctggcctacacccaggctggggacggcgtacgcagcagtgtgctctacatccagaccaaggaggacgttccaggtccccctgctggcatcaaagctgtcccttcatcagctagcagtgtggttgtgtcttggctcccccctaccaagcccaacggggtgatccgcaagtacaccatcttctgttccagccccgggtctggccagccggctcccagcgagtacgagacgagtccagagcagctcttctaccggatcgcccacctaaaccgcggtcagcagtatctgctgtgggtggccgccgtcacctctgccggccggggcaacagcagcgagaaggtgaccatcgagcctgctggcaaggccccagcaaagatcatctcctttgggggcaccgtgacaacaccttggatgaaagatgttcggctgccttgcaattcagtgggagatccagcccctgctgtgaagtggaccaaggacagtgaagactcggccattccagtgtccatggatgggcaccggctcatccacaccaatggcacactgctgctgcgtgcagtgaaggctgaggactctggctactacacgtgcacggccaccaacactggtggctttgacaccatcatcgtcaaccttctggtgcaagttcccccggaccagccccgcctcactgtctccaaaacctcagcttcgtccatcaccctgacctggattccaggtgacaatgggggcagctccatccgaggcttcgtgctacagtactcggtggacaacagcgaggagtggaaggatgtgttcatcagctccagcgagcgctccttcaagctggacagcctcaagtgtggcacgtggtacaaggtgaagctggcagccaagaacagcgtgggctctgggcgcatcagcgagatcatcgaggccaagacccacgggcgggagccctccttcagcaaagaccaacacctcttcacccacatcaactccacgcatgctcggcttaacctgcagggctggaacaatgggggctgccctatcacagccatcgttctggagtaccggcccaaggggacctgggcctggcagggcctccgggccaacagctccggggaggtgtttctgacggaactgcgagaggccacgtggtacgagctgcgcatgagggcttgcaacagtgcgggctgcggcaatgaaacagcccagttcgccaccctggactacgatggcagcaccattccacccatcaagtctgctcaaggtgaaggggatgatgtgaagaagctgttcaccatcggctgccctgtcatcctggccacactgggggtggcactgctcttcatcgtacgcaagaagaggaaggagaaacggctgaagcgactccgagatgcaaagagtttggcagaaatgttgataagcaagaacaatagaagctttgacacccctgtgaaagggccaccccagggcccacggctacacattgacatccccagggtccagctgctcatcgaggacaaagaaggcatcaagcaactgggagatgacaaggccaccatccctgtgacagatgctgagttcagccaagctgtcaacccacagagcttctgtactggcgtctccttgcaccacccaaccctcatccagagcacaggacccctcatcgacatgtctgacatccggccaggaaccaatccagtgtccaggaagaatgtgaagtcagcccacagcacccggaaccggtactcaagccagtggaccctgaccaagtgccaggcctccacacctgcccgcaccctcacctccgactggcgcaccgtgggctcccagcatggtgtcacggtcactgagagtgacagctacagtgccagcctgtcccaggacacagacaaaggaaggaacagcatggtgtccactgagagtgcctcttccacctacgaggagctggcccgggcctatgagcatgccaagctggaggagcagctgcagcacgccaagtttgagatcaccgagtgcttcatctctgacagttcctctgaccagatgaccacaggcaccaacgagaacgccgacagcatgacatccatgagcacaccctcagagcctggcatctgccgctttaccgcctcaccacccaagccccaggatgcggaccggggcaaaaacgtggctgtgcccatccctcaccgggccaacaagagtgactactgcaacctgcccctgtatgccaagtcagaggccttctttcgaaaggcagatggacgtgagccctgccccgtggtcccaccccgtgaggcctccatccggaacctggctcgaacctaccacacccaggctcgccacctgaccctggaccctgccagcaagtccttgggccttccccacccaggggcccccgctgccgcctccacagccaccttacctcagaggactctggccatgccagcccccccagccggcacagcccccccagcccccggccccacccctgctgagccacccaccgcccccagcgctgcccctccggcccccagcaccgagcctccacgagccgggggcccacacaccaaaatggggggctccagggactcgcttctcgagatgagcacatcgggggtagggaggtctcagaagcagggggccggggcctactccaaatcctacaccctggtgtagggccggcaggaagagcagccacgcctgggccgcgccgcgccgcagccccacacgccagctcggctgtttttctgcattatttatattcaactgacagacaaaaaccaaccaacgacaaaacaaaaacccccaatcatgaacgcctgtacatagaactcttttgtacaaatgaaactattttcttcttctccatgaagccagggcacaaagaatttgacagtacaagtcaaatcccccaccccacaaaatatgtgtggagatatatatacatatatagacagacaggaacgcgtccacgagctatatatctatatatttctctcaccctattttgagacagaggcacaaagactcagcaatttttttccctcctcctcaccttccccccagtctaggtggttttgacaaagaccaaaatcccaactcagagacactgcatgcgattttactgttccaagaaaaccaggagttgcttcaatttgcagatgcttatgtgttaatacctttttctatgaaaaaagacccagcgccgtgtgcaataaaggttatgtttct

SEQ ID NO: 14597 - DNA, 3110 bp, Homo sapiens
tggtgaactgcaactggctgttcctgaagtctgtgccccacttctccatggcagcaccccgtggcaatgtcaccagcctttccttgtcctccaaccgcatccaccacctccatgattctgactttgcccacctgcccagcctgcggcatctcaacctcaagtggaactgcccgccggttggcctcagccccatgcacttcccctgccacatgaccatcgagcccagcaccttcttggctgtgcccaccctggaagagctaaacctgagctacaacaacatcatgactgtgcctgcgctgcccaaatccctcatatccctgtccctcagccataccaacatcctgatgctagactctgccagcctcgccggcctgcatgccctgcgcttcctattcatggacggcaactgttattacaagaacccctgcaggcaggcactggaggtggccccgggtgccctccttggcctgggcaacctcacccacctgtcactcaagtacaacaacctcactgtggtgccccgcaacctgccttccagcctggagtatctgctgttgtcctacaaccgcatcgtcaaactggcgcctgaggacctggccaatctgaccgccctgcgtgtgctcgatgtgggcggaaattgccgccgctgcgaccacgctcccaacccctgcatggagtgccctcgtcacttcccccagctacatcccgataccttcagccacctgagccgtcttgaaggcctggtgttgaaggacagttctctctcctggctgaatgccagttggttccgtgggctgggaaacctccgagtgctggacctgagtgagaacttcctctacaaatgcatcactaaaaccaaggccttccagggcctaacacagctgcgcaagcttaacctgtccttcaattaccaaaagagggtgtcctttgcccacctgtctctggccccttccttcgggagcctggtcgccctgaaggagctggacatgcacggcatcttcttccgctcactcgatgagaccacgctccggccactggcccgcctgcccatgctccagactctgcgtctgcagatgaacttcatcaaccaggcccagctcggcatcttcagggccttccctggcctgcgctacgtggacctgtcggacaaccgcatcagcggagcttcggagctgacagccaccatgggggaggcagatggaggggagaaggtctggctgcagcctggggaccttgctccggccccagtggacactcccagctctgaagacttcaggcccaactgcagcaccctcaacttcaccttggatctgtcacggaacaacctggtgaccgtgcagccggagatgtttgcccagctctcgcacctgcagtgcctgcgcctgagccacaactgcatctcgcaggcagtcaatggctcccagttcctgccgctgaccggtctgcaggtgctagacctgtcccacaataagctggacctctaccacgagcactcattcacggagctaccacgactggaggccctggacctcagctacaacagccagccctttggcatgcagggcgtgggccacaacttcagcttcgtggctcacctgcgcaccctgcgccacctcagcctggcccacaacaacatccacagccaagtgtcccagcagctctgcagtacgtcgctgcgggccctggacttcagcggcaatgcactgggccatatgtgggccgagggagacctctatctgcacttcttccaaggcctgagcggtttgatctggctggacttgtcccagaaccgcctgcacaccctcctgccccaaaccctgcgcaacctccccaagagcctacaggtgctgcgtctccgtgacaattacctggccttctttaagtggtggagcctccacttcctgcccaaactggaagtcctcgacctggcaggaaaccagctgaaggccctgaccaatggcagcctgcctgctggcacccggctccggaggctggatgtcagctgcaacagcatcagcttcgtggcccccggcttcttttccaaggccaaggagctgcgagagctcaaccttagcgccaacgccctcaagacagtggaccactcctggtttgggcccctggcgagtgccctgcaaatactagatgtaagcgccaaccctctgcactgcgcctgtggggcggcctttatggacttcctgctggaggtgcaggctgccgtgcccggtctgcccagccgggtgaagtgtggcagtccgggccagctccagggcctcagcatctttgcacaggacctgcgcctctgcctggatgaggccctctcctgggactgtttcgccctctcgctgctggctgtggctctgggcctgggtgtgcccatgctgcatcacctctgtggctgggacctctggtactgcttccacctgtgcctggcctggcttccctggcgggggcggcaaagtgggcgagatgaggatgccctgccctacgatgccttcgtggtcttcgacaaaacgcagagcgcagtggcagactgggtgtacaacgagcttcgggggcagctggaggagtgccgtgggcgctgggcactccgcctgtgcctggaggaacgcgactggctgcctggcaaaaccctctttgagaacctgtgggcctcggtctatggcagccgcaagacgctgtttgtgctggcccacacggaccgggtcagtggtctcttgcgcgccagcttcctgctggcccagcagcgcctgctggaggaccgcaaggacgtcgtggtgctggtgatcctgagccctgacggccgccgctcccgctatgtgcggctgcgccagcgcctctgccgccagagtgtcctcctctggccccaccagcccagtggtcagcgcagcttctgggcccagctgggcatggccctgaccagggacaaccaccacttctataaccggaacttctgccagggacccacggccgaatagccgtgagccggaatcctgcacggtgccacctccacactcacctcacctctgcctgcctggtctgaccctcccctgctcgcctccctcaccccacacctgacacagagcaggcactcaataaatgctaccgaaggc

SEQ ID NO: 14598 - DNA, 3868 bp, Homo sapiens
ggaggtcttgtttccggaagatgttgcaaggctgtggtgaaggcaggtgcagcctagcctcctgctcaagctacaccctggccctccacgcatgaggccctgcagaactctggagatggtgcctacaagggcagaaaaggacaagtcggcagccgctgtcctgagggcaccagctgtggtgcaggagccaagacctgagggtggaagtgtcctcttagaatggggagtgcccagcaaggtgtacccgctactggtgctatccagaattcccatctctccctgctctctgcctgagctctgggccttagctcctccctgggcttggtagaggacaggtgtgaggccctcatgggatgtaggctgtctgagaggggagtggaaagaggaaggggtgaaggagctgtctgccatttgactatgcaaatggcctttgactcatgggaccctgtcctcctcactgggggcagggtggagtggagggggagctactaggctggtataaaaatcttacttcctctattctctgagccgctgctgcccctgtgggaagggacctcgagtgtgaagcatccttccctgtagctgctgtccagtctgcccgccagaccctctggagaagcccctgccccccagcatgggtttctgccgcagcgccctgcacccgctgtctctcctggtgcaggccatcatgctggccatgaccctggccctgggtaccttgcctgccttcctaccctgtgagctccagccccacggcctggtgaactgcaactggctgttcctgaagtctgtgccccacttctccatggcagcaccccgtggcaatgtcaccagcctttccttgtcctccaaccgcatccaccacctccatgattctgactttgcccacctgcccagcctgcggcatctcaacctcaagtggaactgcccgccggttggcctcagccccatgcacttcccctgccacatgaccatcgagcccagcaccttcttggctgtgcccaccctggaagagctaaacctgagctacaacaacatcatgactgtgcctgcgctgcccaaatccctcatatccctgtccctcagccataccaacatcctgatgctagactctgccagcctcgccggcctgcatgccctgcgcttcctattcatggacggcaactgttattacaagaacccctgcaggcaggcactggaggtggccccgggtgccctccttggcctgggcaacctcacccacctgtcactcaagtacaacaacctcactgtggtgccccgcaacctgccttccagcctggagtatctgctgttgtcctacaaccgcatcgtcaaactggcgcctgaggacctggccaatctgaccgccctgcgtgtgctcgatgtgggcggaaattgccgccgctgcgaccacgctcccaacccctgcatggagtgccctcgtcacttcccccagctacatcccgataccttcagccacctgagccgtcttgaaggcctggtgttgaaggacagttctctctcctggctgaatgccagttggttccgtgggctgggaaacctccgagtgctggacctgagtgagaacttcctctacaaatgcatcactaaaaccaaggccttccagggcctaacacagctgcgcaagcttaacctgtccttcaattaccaaaagagggtgtcctttgcccacctgtctctggccccttccttcgggagcctggtcgccctgaaggagctggacatgcacggcatcttcttccgctcactcgatgagaccacgctccggccactggcccgcctgcccatgctccagactctgcgtctgcagatgaacttcatcaaccaggcccagctcggcatcttcagggccttccctggcctgcgctacgtggacctgtcggacaaccgcatcagcggagcttcggagctgacagccaccatgggggaggcagatggaggggagaaggtctggctgcagcctggggaccttgctccggccccagtggacactcccagctctgaagacttcaggcccaactgcagcaccctcaacttcaccttggatctgtcacggaacaacctggtgaccgtgcagccggagatgtttgcccagctctcgcacctgcagtgcctgcgcctgagccacaactgcatctcgcaggcagtcaatggctcccagttcctgccgctgaccggtctgcaggtgctagacctgtcccacaataagctggacctctaccacgagcactcattcacggagctaccacgactggaggccctggacctcagctacaacagccagccctttggcatgcagggcgtgggccacaacttcagcttcgtggctcacctgcgcaccctgcgccacctcagcctggcccacaacaacatccacagccaagtgtcccagcagctctgcagtacgtcgctgcgggccctggacttcagcggcaatgcactgggccatatgtgggccgagggagacctctatctgcacttcttccaaggcctgagcggtttgatctggctggacttgtcccagaaccgcctgcacaccctcctgccccaaaccctgcgcaacctccccaagagcctacaggtgctgcgtctccgtgacaattacctggccttctttaagtggtggagcctccacttcctgcccaaactggaagtcctcgacctggcaggaaaccagctgaaggccctgaccaatggcagcctgcctgctggcacccggctccggaggctggatgtcagctgcaacagcatcagcttcgtggcccccggcttcttttccaaggccaaggagctgcgagagctcaaccttagcgccaacgccctcaagacagtggaccactcctggtttgggcccctggcgagtgccctgcaaatactagatgtaagcgccaaccctctgcactgcgcctgtggggcggcctttatggacttcctgctggaggtgcaggctgccgtgcccggtctgcccagccgggtgaagtgtggcagtccgggccagctccagggcctcagcatctttgcacaggacctgcgcctctgcctggatgaggccctctcctgggactgtttcgccctctcgctgctggctgtggctctgggcctgggtgtgcccatgctgcatcacctctgtggctgggacctctggtactgcttccacctgtgcctggcctggcttccctggcgggggcggcaaagtgggcgagatgaggatgccctgccctacgatgccttcgtggtcttcgacaaaacgcagagcgcagtggcagactgggtgtacaacgagcttcgggggcagctggaggagtgccgtgggcgctgggcactccgcctgtgcctggaggaacgcgactggctgcctggcaaaaccctctttgagaacctgtgggcctcggtctatggcagccgcaagacgctgtttgtgctggcccacacggaccgggtcagtggtctcttgcgcgccagcttcctgctggcccagcagcgcctgctggaggaccgcaaggacgtcgtggtgctggtgatcctgagccctgacggccgccgctcccgctatgtgcggctgcgccagcgcctctgccgccagagtgtcctcctctggccccaccagcccagtggtcagcgcagcttctgggcccagctgggcatggccctgaccagggacaaccaccacttctataaccggaacttctgccagggacccacggccgaatagccgtgagccggaatcctgcacggtgccacctccacactcacctcacctctgcctgcctggtctgaccctcccctgctcgcctccctcaccccacacctgacacagagcaggcactcaataaatgctaccgaaggc

SEQ ID NO: 14599 - DNA, 2797 bp, Homo sapiens
acccacgcgtctggccgcgggccgcctctgcggcagcgctagtcgccttctccgaatcggctccgcacagctaggagaaaagatgttcactgtgctgacccgccaaccatgtgagcaagcaggcctcaaggccctctaccgaactccaaccatcattgccttggtggtcttgcttgtgagtattgtggtacttgtgagtatcactgtcatccagatccacaagcaagaggtcctccctccaggactgaagtatggtattgtgctggatgccgggtcttcaagaaccacagtctacgtgtatcaatggccagcagaaaaagagaataataccggagtggtcagtcaaaccttcaaatgtagtgtgaaaggctctggaatctccagctatggaaataacccccaagatgtccccagagcctttgaggagtgtatgcaaaaagtcaaggggcaggttccatcccacctccacggatccacccccattcacctgggagccacggctgggatgcgcttgctgaggttgcaaaatgaaacagcagctaatgaagtccttgaaagcatccaaagctacttcaagtcccagccctttgactttaggggtgctcaaatcatttctgggcaagaagaaggggtatatggatggattacagccaactatttaatgggaaatttcctggagaagaacctgtggcacatgtgggtgcacccgcatggagtggaaaccacgggtgccctggacttaggtggtgcctccacccaaatatccttcgtggcaggagagaagatggatctgaacaccagcgacatcatgcaggtgtccctgtatggctacgtatacacgctctacacacacagcttccagtgctatggccggaatgaggctgagaagaagtttctggcaatgctcctgcagaattctcctaccaaaaaccatctcaccaatccctgttaccctcgggattatagcatcagcttcaccatgggccatgtatttgatagcctgtgcactgtggaccagaggccagaaagttataaccccaatgatgtcatcacttttgaaggaactggggacccatctctgtgtaaggagaaggtggcttccatatttgacttcaaagcttgccatgatcaagaaacctgttcttttgatggggtttatcagccaaagattaaagggccatttgtggcttttgcaggattctactacacagccagtgctttaaatctttcaggtagcttttccctggacaccttcaactccagcacctggaatttctgctcacagaattggagtcagctcccactgctgctccccaaatttgatgaggtatatgcccgctcttactgcttctcagccaactacatctaccacttgtttgtgaacggttacaaattcacagaggagacttggccccaaatacactttgaaaaagaagtggggaatagcagcatagcctggtctcttggctacatgctcagcctgaccaaccagatcccagctgaaagccctctgatccgtctgcccatagaaccacctgtctttgtgggcaccctcgctttcttcacagtggcagccttgctgtgtctggcatttcttgcatacctgtgttcagcaaccagaagaaagaggcactccgagcatgcctttgaccatgcagtggattctgactgagccttcaaagcagctcctggagtccaatggctgcttagagtcagcctgggtggcaccaggcaatgcaggtgaagtggctgccttcaggaaatacaactaactaaaatcaaacacctaggtcacgtgcctctcaaatactgatttctgccacagcacctcttgaggcatcccttggctattctgtgcatattgttcttcagagacctcactacccacatgctgatctattggggaacagagaagagacaggccactaaggtcaggctctttatattaagttccccagaggaagagtaagttgagaaggtatcagtttaatgttgaagaattgacctcagggctcagtttccatttccctccctcagtattcttcctggcaagatacccattaagcatttcgccaatcagaatctcattttatagtttttcccattggtctttaactaagactttcttgtagcaatctcgtaagcagtgaaccccctcagatcagtagaatatagtatctgggggagaagacttacttccttcagggcagcagccacagccaggcttctgtcatacaggtagatcccgaagcacagagacataaaaaaggtctcccagaaaactatagaccattctccaagtggaattcccacttagggctctggtcactagattgcaacctgtgtgtttgtcatcatcctcatctcaccattgtattgctatgccctcccataaaaacacattgatccctagcaagattattgcattccagattttactgcctttgctaggcttttgcttagcaaagggctgactttccattgttatcatggtgtatatatttttgtcaccattcccacaagtatacttgatgttgtcatagaacgaacatcctactctatgatttactaaccaattactttcccagatcatagacctctctgcatagtagtcataggtcttgactttggggaaagaaaaggaagctgcaggaatatttatctccaaagtcgaatgagaaagaactccagcaaatccaatggctacaaactaaaaatcagcattatttcatattgctgtttcttagctgaatatggaataaagaactattattttattttgaaaaaaaaaaaaaaa

SEQ ID NO: 14600 - DNA, 4535 bp, Homo sapiens
acccacgacgacagaaggcgccgatggccgcgcctgctgagccctgcgcggggcagggggtctggaaccagacagagcctgaacctgccgccaccagcctgctgagcctgtgcttcctgagaacagcaggggtctgggtaccccccatgtacctctgggtccttggtcccatctacctcctcttcatccaccaccatggccggggctacctgtggatgtccccactcttcaaagccaagatggtgcttggattcgccctcatagtcctgtgtacctccagcgtggctgtcgctctttggaaaatccaacagggaacgcctgaggccccagaattcctcattcatcctactgtgtggctcaccacgatgagcttcgcagtgttcctgattcacaccgagaggaaaaagggagtccagtcatctggagtgctgtttggttactggcttctctgctttgtcttgccagctaccaacgctgcccagcaggcctccggagcgggcttccagagcgaccctgtccgccacctgtccacctacctatgcctgtctctggtggtggcacagtttgtgctgtcctgcctggcggatcaaccccccttcttccctgaagacccccagcagtctaacccctgtccagagactggggcagccttcccctccaaagccacgttctggtgggtttctggcctggtctggaggggatacaggaggccactgagaccaaaagacctctggtcgcttgggagagaaaactcctcagaagaacttgtttcccggcttgaaaaggagtggatgaggaaccgcagtgcagcccggaggcacaacaaggcaatagcatttaaaaggaaaggcggcagtggcatgaaggctccagagaccgagcccttcctacggcaagaagggagccagtggcgcccactgctgaaggccatctggcaggtgttccattctaccttcctcctggggaccctcagcctcatcatcagtgatgtcttcaggttcactgtccccaagctgctcagccttttcctggagtttattggtgatcccaagcctccagcctggaagggctacctcctcgccgtgctgatgttcctctcagcctgcctgcaaacgctgtttgagcagcagaacatgtacaggctcaaggtgctgcagatgaggttgcggtcggccatcactggcctggtgtacagaaaggtcctggctctgtccagcggctccagaaaggccagtgcggtgggtgatgtggtcaatctggtgtccgtggacgtgcagcggctgaccgagagcgtcctctacctcaacgggctgtggctgcctctcgtctggatcgtggtctgcttcgtctatctctggcagctcctggggccctccgccctcactgccatcgctgtcttcctgagcctcctccctctgaatttcttcatctccaagaaaaggaaccaccatcaggaggagcaaatgaggcagaaggactcacgggcacggctcaccagctctatcctcaggaactcgaagaccatcaagttccatggctgggagggagcctttctggacagagtcctgggcatccgaggccaggagctgggcgccttgcggacctccggcctcctcttctctgtgtcgctggtgtccttccaagtgtctacatttctggtcgcactggtggtgtttgctgtccacactctggtggccgagaatgctatgaatgcagagaaagcctttgtgactctcacagttctcaacatcctcaacaaggcccaggctttcctgcccttctccatccactccctcgtccaggcccgggtgtcctttgaccgtctggtcaccttcctctgcctggaagaagttgaccctggtgtcgtagactcaagttcctctggaagcgctgccgggaaggattgcatcaccatacacagtgccaccttcgcctggtcccaggaaagccctccctgcctccacagaataaacctcacggtgccccagggctgtctgctggctgttgtcggtccagtgggggcagggaagtcctccctgctgtccgccctccttggggagctgtcaaaggtggaggggttcgtgagcatcgagggtgctgtggcctacgtgccccaggaggcctgggtgcagaacacctctgtggtagagaatgtgtgcttcgggcaggagctggacccaccctggctggagagagtactagaagcctgtgccctgcagccagatgtggacagcttccctgagggaatccacacttcaattggggagcagggcatgaatctctccggaggccagaagcagcggctgagcctggcccgggctgtatacagaaaggcagctgtgtacctgctggatgaccccctggcggccctggatgcccacgttggccagcatgtcttcaaccaggtcattgggcctggtgggctactccagggaacaacacggattctcgtgacgcacgcactccacatcctgccccaggctgattggatcatagtgctggcaaatggggccatcgcagagatgggttcctaccaggagcttctgcagaggaagggggccctcgtgtgtcttctggatcaagccagacagccaggagatagaggagaaggagaaacagaacctgggaccagcaccaaggaccccagaggcacctctgcaggcaggaggcccgagcttagacgcgagaggtccatcaagtcagtccctgagaaggaccgtaccacttcagaagcccagacagaggttcctctggatgaccctgacagggcaggatggccagcaggaaaggacagcatccaatacggcagggtgaaggccacagtgcacctggcctacctgcgtgccgtgggcacccccctctgcctctacgcactcttcctcttcctctgccagcaagtggcctccttctgccggggctactggctgagcctgtgggcggacgaccctgcagtaggtgggcagcagacgcaggcagccctgcgtggcgggatcttcgggctcctcggctgtctccaagccattgggctgtttgcctccatggctgcggtgctcctaggtggggcccgggcatccaggttgctcttccagaggctcctgtgggatgtggtgcgatctcccatcagcttctttgagcggacacccattggtcacctgctaaaccgcttctccaaggagacagacacggttgacgtggacattccagacaaactccggtccctgctgatgtacgcctttggactcctggaggtcagcctggtggtggcagtggctaccccactggccactgtggccatcctgccactgtttctcctctacgctgggtttcagagcctgtatgtggttagctcatgccagctgagacgcttggagtcagccagctactcgtctgtctgctcccacatggctgagacgttccagggcagcacagtggtccgggcattccgaacccaggccccctttgtggctcagaacaatgctcgcgtagatgaaagccagaggatcagtttcccgcgactggtggctgacaggtggcttgcggccaatgtggagctcctggggaatggcctggtgtttgcagctgccacgtgtgctgtgctgagcaaagcccacctcagtgctggcctcgtgggcttctctgtctctgctgccctccaggtgacccagacactgcagtgggttgttcgcaactggacagacctagagaacagcatcgtgtcagtggagcggatgcaggactatgcctggacgcccaaggaggctccctggaggctgcccacatgtgcagctcagcccccctggcctcagggcgggcagatcgagttccgggactttgggctaagataccgacctgagctcccgctggctgtgcagggcgtgtccttcaagatccacgcaggagagaaggtgggcatcgttggcaggaccggggcagggaagtcctccctggccagtgggctgctgcggctccaggaggcagctgagggtgggatctggatcgacggggtccccattgcccacgtggggctgcacacactgcgctccaggatcagcatcatcccccaggaccccatcctgttccctggctctctgcggatgaacctcgacctgctgcaggagcactcggacgaggctatctgggcagccctggagacggtgcagctcaaagccttggtggccagcctgcccggccagctgcagtacaagtgtgctgaccgaggcgaggacctgagcgtgggccagaaacagctcctgtgtctggcacgtgcccttctccggaagacccagatcctcatcctggacgaggctactgctgccgtggaccctggcacggagctgcagatgcaggccatgctcgggagctggtttgcacagtgcactgtgctgctcattgcccaccgcctgcgctccgtgatggactgtgcccgggttctggtcatggacaaggggcaggtggcagagagcggcagcccggcccagctgctggcccagaagggcctgttttacagactggcccaggagtcaggcctggtctga

SEQ ID NO: 14601 - DNA, 3715 bp, Homo sapiens
gaagagaaaagcataggaaaggaaacagtggtaataggaattggggtaaaatgaggatccttccccacaaacattgctattattcagctcatttcaaaggattccgctgctgccatttgtgagagccgctggaggctgagtgaaagtcattttgaaagactgatccaaagaagaatggaggccagagtggagcgtgctgtgcagaaaaggcaagtcttatttctttgtgtatttctgggaatgtcttgggctggcgccgaaccgcttcggtattttgtggcggaggaaaccgagagaggcacctttcttaccaacttggcaaaagacctagggttaggggtaggggaactgagagcccggggaactagaattgtttcagaccagaacatgcaaattttactgctcagttcgcttactggtgatctacttctaaatgagaaattggaccgagaggaactgtgtggccccagagagccctgtgtgctgcctttccagttgttattggaaaaaccttttcagattttccgtgctgaactatgggtcagagacatcaatgatcacgctccagtatttctagacagagagatttccttgaaaatattagaaagtaccactccaggggcggcatttctcctagagagtgcacaggattcagatgttggaaccaacagcctgagtaactacaccatcagccccaatgcctatttccatattaatgtccatgatagcggggaggggaatatctatcccgaattggtgctgaatcaagtgctggatcgggaagagataccagagttcagtttaaccctcaccgctttagacggcggctctcctccaagatcagggaccgccctcgtgcgcattctggttctagacgtaaatgacaacgcccctgattttgtgcggtcgctctacaaggtgcaggtgcccgaaaatagccccgttggttccatggttgtctccgtgtcagccagagatttagataccggaagtaatggggaaatagcctatgcattttcttacgccactgaaagaattctcaaaacgtttcaaatcaatccaacatctggcagtcttcatcttaaagcgcaattggactatgaggcaattcaaacttacacattaactattcaggccaaagacggcggcgggctttctggaaaatgcactgtagtggttgatgtaacagatataaacgataatcgacccgagctgctcctgtcttcacttactagcccaattgcagaaaactcacccgagacagtcgtggctgtttttaggattagagacagagattccgggaacaatggaaagacagtgtgctccatccaggacgatgtccccttcatcctgaagccatctgtcgaaaacttctatactctggtaacagagaaacctttggatcgagagaggaacactgagtacaacatcaccatcaccgtcaccgacttggggacacccaggctgaaaaccgagcacaacataaccgtgctggtctccgacgtcaatgacaacgctcccgccttcacccaaacctcctacaccctgtttgtccgtgagaacaacagccccgccctgcccatcggcagtgtcagcgccacagacagagactcgggcaccaacgcccaggtcatctactccctgctgccgtcccaggacccgcacctgcccctcgcctccctggtctccatcaacgcggacaacggccacctgtttgccctcaggtccctggactacgaggccctgcaggcgttcgagttccgcgtgggcgccacagaccgcggctcccccgcgctgagcagcgaggcgctggtgcgcgtgctggtgctggacgccaacgacaactcgcccttcgtgctgtacccgctgcagaacagctccgcgccctgcaccgagccgttgccccgggcggccgagccgggctacctggtgaccaaggtggtggcggtggacggcgactcgggccagaacgcctggctgtcgtaccagctgctcaaggccacggagcccgggctattcggcgtgtgggcgcacaatggcgaggtgcgtaccgccaggctgctgagcgagcgcgacgcagccaagcagaggctggtggtgctggtcaaggacaatggcgagcctccgcgctcggccaccgccacgctgcacgtgctcctggtggacggcttctcccagccctacctgcggctcccggaggcggccccggaccaggccaactcgctcaccgtctacctggtggtggcgttggcctcggtgtcttcgctcttcctcctctcggtgctcctgttcgtggcggtgcggctgtgcaggaggagcagggcggccccggtgggtcgctgctcggtgcctgagggcccctttccacgacatctggtggacttgagcggcaccgggaccctatcccagagctaccagtatgaggtgtgcctgactggaggctccgggacaaatgagttcaagtttctgaaaccaattatccccaacctgctaccccagagcacaggcagggaagtggaagaaaatcgcccatttcagaataatttgggtttctgataaagaatgtaaactaaatccgcgtctgtgaatacgtttctgattaggaacttattgcgaggttcccttaagggagtgtctttacatcatttcaaatatgtactcttgaagtcaagcaataaatttctatacataaaataggatcctgatttagtatcaagaacccttcacaaagcatgaaatgtatatgtgtaatgttttatgtcaaacaattatgcttaatatacagtctattaaatgtaagtcttgtttgagatattttaaattgctttccattgttttcaatctctactgagacttcctgagttgattagaaagctgtatgagtgtacctaccctagtctcagaagcatagactgtagagtatctttttaagcatttttaaaaaatgcttttaatgcatcatacactattttaacacttttaatctgagaagaagcatatgaggcatggtattttaggaatgaacaaatagatggtcttagagattcagtaagttcactaagttccactaactaataagtgacaaaactgagcatccatcccagatctgtctgactctgggtcagtgaccctgctccgattccatactgttttctgtcattagatatcacctggcaagtttctgcctaattaaggagaagtcttttatcatatttatactgctgtccaatcttttctatatttagaaataataatgtacatatttatctatggttttattttcttatacaccaaaagtcctgcttttctgggtcaattttcaactattattactaatgctctgatctgtccaaactcaagcggaaaacaaaattgaaagggcaacctgtgccttctcctttcttcagaacatatgactttcatttcccagaaaaaagattaatggtcctgagtaggaatattacataattttgattgcatcattagttaattattttcttcatattgtagattttctgcagtcacccatacttaacatttgtaatacattttcctgatttgaaagtttgtttttaaaagttttctattaattatagtgcactattgaatcaggaaaatttaagaaaaagaatagttagttttaaatgcataatatcaaagagaatcatagatgatcattaaatttttagaaattctcggaagttaaggagaagca

SEQ ID NO: 14602 - DNA, 4827 bp, Homo sapiens
caaagctctaagtatgctgggacagatactacaaatgaactttatgatgagcgaattaacctgatttatagtcctgtactttctctacgtgccatatccattattaaagaaatgagtctaagtaggaagtagagttaacctatagtttcatttcttgaatttcttattctctttcttcagtctttttcagttaacctacacacacacacacacacacacacacacacacacacatatgtttataagtgggatgggagaacgggtacggtgataattaaaagaggtaaggtttctcttgagatgaaaatgttctaaaattgtgatggcggatgcacacctctgaatatattaaaagccattgaaatgaaaaaagggtggggggaatccaaaagtgtagcagacccaaccttgagatttgcttgtttgggaatgaattttccaataacttgaaagttgtaaaaactcacacttctcagggttaggtgtcagaaagaaaaggaagtaatttattctttaataaagcaattgttaaatactctttagaactaccactgattgcaattttgcagtgtctactcatagtgtctatataggtaccatgaaaaagatgtacttgtgaaactgttctcatgttacttcagaaaaattttgcttctaagtgtgtattctatgtctggttaaatgttcattgaattttatttaatcattaatctcaacagcattaaacagtcaataacataaatgacagtcttctctttgtactcctccctgtacaacatcacagagctccatctgtatacacgaaagtcacatgaaaatagaactcagtgttttgtattacatagtctattcagtacatttagaagtattttgcctccaatattcaaccacagtaaaagactcagtgagaacgcgtggtggcgctgcaggttaagatgacggaaaatacaactgcctacgcagctccaggatccagcaaaccgtttcccaaagcctggaagcaaaagaatagctgagccagagcgaacgtgagtgtgaaacctctttaagacaccgttgggctgcttggttctgacattctggactgcaaaacagttctactaggatcctggggatacatgaagcttctgtgaaccaacttttcaagaaaaagcaatggagattggatggatgcacaatcggagacaaaggcaagtccttgttttctttgttttgctgagcttgtctggggcgggcgccgagttggggtcctattccgtagtggaagaaacggagagaggctcttttgtggcaaatctaggaaaagacctggggttggggttgacagagatgtccacccgcaaggccaggatcatttcccaggggaacaaacagcatttgcagctcaaggctcaaactggggatttgctcataaatgagaagctagatcgagaggagctatgcggtcccactgagccttgcatactacatttccaagtgttaatggaaaaccctttagaaatatttcaggctgaactgagggtgatagatataaatgaccattctcccatgttcactgaaaaggaaatgattctaaaaataccggaaaacagtcctctaggaactgagttccctctgaatcatgctttggacttggacgtaggaagcaataatgttcaaaactataaaatcagcccaagctctcatttccgggttctaatccatgaattcagagatggcaggaaataccctgagctagtgttggataaagagctggatcgggaggaggagcctcaactaagattaaccctgacagcgctggatggtggctctccaccgcgatctggaactgctcaggtccgtattgaagtggtggacatcaatgataacgctcctgagtttgagcagcccatctacaaagtgcagattccagagaacagtcctcttggctccctggttgccaccgtctccgccagggatttagacggcggagccaatggaaaaatatcatacacactctttcagccttcggaggatattagtaaaactttggaggtaaatcctatgacaggggaagttcgactgagaaagcaagtagatttcgaaatggttacgtcttatgaagtgcgcatcaaagccacagatgggggaggtctttcaggaaagtgcactcttctcctgcaggtggtggacgtgaatgacaatcccccacaggtgaccatgtctgcactcaccagccccatcccagagaactcgcctgagatagtagttgctgttttcagcgtttcagatcctgactccggaaacaatgggaagacgatttcctccatccaggaagaccttccctttcttctaaaaccttcagtcaagaacttttacaccttggtaacggagagagcactcgacagagaagcaagagctgaatataatatcaccctcaccgtcacagatatggggactccaaggctgaaaacggagcacaacataacagtgcagatatcagatgtcaatgataacgcccccactttcacccaaacctcctacaccctgttcgtccgcgagaacaacagccccgccctgcacatcggcagcgtcagcgccacagacagagactcaggcaccaacgcccaggtcacctactcgctgctgccgccccaggacccgcacctgcccctcgcctccctggtctccatcaacgcagacaacggccacctgttcgccctcaggtcgctggactacgaggccctgcgggagttcgagttccgcgtgagcgccacagaccgcggctccccggctttgagcagcgaggcgctggtgcgcgtgctggtgctggacgccaacgacaactcgcccttcgtgctgtacccgctgcagaacggctccgcgccctgcactgagctggtgccccgggcggccgagccgggctacctggtgaccaaggtggtggcggtggacggcgactcgggccagaatgcctggctgtcgtaccagctgctcaaggccacggagcccgggctgttcggtgtgtgggcgcacaatggcgaggtgcgcaccgccaggctgctgagcgagcgcgacgcagccaagcagaggctggtggtgctggtcaaggacaatggcgagcctccgcgctcggccaccgccacgctgcacgtgctcctggtggacggcttctcccagcccttcctgccgctcccagaggcggcccccggccagacccaggccaactcgctcactgtctacctggtggtggcgttggcctcggtgtcgtcgctcttcctcttttcggtgctcctgttcgtggcggtgcggctgtgcaggaggagcagggcggcctcggtgggccgctgctcgatgcctgagggcccctttccagggcgtctggtggacgtaagcggcaccgggaccctgtcccagagctaccaatacgaggtgtgtctgacaggaggctcagaaacaagtgagttcaagttcctgaagccgattatccccaacttctctccttagggcactaggaaagaaatagattaaaattccacccttcacaatagctttggatttaattattgataggaacccatttgataaattccttaacttcttatgattgtcttgttgattaaattgttcatgctcaccaccaccaataaggtatttttctctgattgttagttcaaattatattgttaattccagtttcccttttcctcatatttaccccgaagaggtgttgcatatagaatcccaattaacaaaatatactttatcttcaaagttgatgtcatttaaaatttttccgtctttatattttatttacttcctattcattttttgctccatttttcatgttacttctcagtttcctagaacttcaagtattaaaataacctgttgcatgtattaggcatatttcctatgttacatttcttttgtctattttcctttcaaaattggtatttttgttgggctcaattttcattataatacttttcttaaagtttctttctttcttttcttttctttctttttttttttttcctttttgagacagggtcttactcttgtcacccaggctggagtgcagtggcacaatcttggctcactgcaacctctgcctcctgggctcaacggatccttccacctcagcctcccaagtagcttggactataggtgcatgccaccatgcctggctaatcttttgcagcgatgagattttgccaagttgcccaggctgatcttgaactcctgggctcaagccatcctccctcctcagcctcccaaaattctgggattacaggcataagccaatgtgcccatccaaagttttatttatttatttttttgagatggagtctcgtaaagttacctttaaaaaaaaagttctattttccctgtattggtatctccttaaataaaataaaatattcctattgtaagtgatatgagaaatctttaaccagccttatctaaaaataaaaagagaagccattgtaagacattcagtatgtgtaaatgtgtttgtgtttgtagacaaaaggcaaaggtattatgtaaaaatatttaataatttattctttctattactgaattaaaaaatcagaggtccctgttatatttttaatggctaacaactcaatctcattaagttggaaaaaaaacttatcaaagagacatttacatggtttggcttttatattcatcatagtatacattggcggtatctagccctttctctgtaaaatatccctatgtttaatctgtatttcttgcttattatatgtaaagttgagcttctttctagatattaggcctttgaataaaattctatgtgagtcagaaaaaaaaaaa

SEQ ID NO: 14603 - DNA, 1285 bp, Homo sapiens
ggggcccagggccctcctatggaccctgcccgctcccctcccattgtccacggctgtccgcccacccccattctccaagcttcagccccctccttagttcggcatctgcacagcactgaagaacctgggaatcagaccctgagaccctgagcaatcccaggtccagcgccagccctatcatgaccaaggagtatcaagaccttcagcatctggacaatgaggagagtgaccaccatcagctcagaaaagggccacctcctccccagcccctcctgcagcgtctctgctccggacctcgcctcctcctgctctccctgggcctcagcctcctgctgcttgtggttgtctgtgtgatcggatcccaaaactcccagctgcaggaggagctgcggggcctgagagagacgttcagcaacttcacagcgagcacggaggcccaggtcaagggcttgagcacccagggaggcaatgtgggaagaaagatgaagtcgctagagtcccagctggagaaacagcagaaggacctgagtgaagatcactccagcctgctgctccacgtgaagcagttcgtgtctgacctgcggagcctgagctgtcagatggcggcgctccagggcaatggctcagaaaggacctgctgcccggtcaactgggtggagcacgagcgcagctgctactggttctctcgctccgggaaggcctgggctgacgccgacaactactgccggctggaggacgcgcacctggtggtggtcacgtcctgggaggagcagaaatttgtccagcaccacataggccctgtgaacacctggatgggcctccacgaccaaaacgggccctggaagtgggtggacgggacggactacgagacgggcttcaagaactggaggccggagcagccggacgactggtacggccacgggctcggaggaggcgaggactgtgcccacttcaccgacgacggccgctggaacgacgacgtctgccagaggccctaccgctgggtctgcgagacagagctggacaaggccagccaggagccacctctcctttaatttatttcttcaatgcctcgacctgccgcaggggtccgggattgggaatccgcccatctgggggcctcttctgctttctcgggaattttcatctaggattttaagggaaggggaaggatagggtgatgttccgaaggtgaggagcttgaaacccgtggcgctttctgcagtttgcaggttatcattgtgaactttttttttttttaagagtaaaaagaaatatacctaaa

SEQ ID NO: 14604 - DNA, 4600 bp, Homo sapiens
ggatttttcctagcgagctggaggaaaggcaggtacccggagtggagttatattacctgtttctttgttctgatgggaccccagagaggacatcacgctttgtaactggttcttcaaggggagaagcaaatgtgtccctgaaaacttcagctgccgcgtttggcaccagtgatttgccttcaaggaaactggggagtcagaaaattgggaactcatatcaacatggcaaacctattgaaaacagtggtgactggctgctcgtgtcctctacttagcaatttggggtcctgtaagggtctacgtgtgaagaaggattttttacgaacattttatactcaccaagaactgtggtgtaaagcgcctgtaaaaccaggaattccatataagcaactgactgttggagtccccaaagagatattccaaaatgagaagcgagtggcattgtctcctgctggtgttcagaacttggtcaagcagggttttaatgttgtcgtggaatcgggtgcgggcgaagcttccaagttctcagatgatcactatagagtggcaggtgcccaaatccaaggggcaaaggaagtgctggcttctgatttggtggtcaaagtgcgagcccctatggttaatccaacattaggtgttcatgaagctgaccttttaaagacatcaggaacgctgattagttttatttacccagcccaaaatccagagttgctaaataaactttcccaaagaaaaactacagttctggcaatggaccaggttccaagagtcacaattgctcagggatatgatgcgctaagctccatggccaacattgcgggttataaggctgttgtcctagcagcaaatcattttgaacgtttttttactggtcagatcacagctgctggaaaagttcctccagctaagattctgatagttggtggtggtgttgctgggcttgcttctgcaggcgcagcaaagtcgatgggtgcaattgttcgaggatttgacacaagagctgcagctttggaacagttcaagtctcttggtgctgagcccttggaggtggacttgaaggaatctggtgagggacaaggaggatatgcaaaagagatgtccaaagagttcattgaagctgaaatgaaactctttgctcaacaatgcaaggaggtagacatccttatcagcacagcacttattccaggtaaaaaagctccagttttatttaataaagaaatgattgagtcaatgaaggaaggttcagttgttgtggatttagctgctgaggctggtggaaactttgaaaccactaagccaggagaactctacattcataagggaattactcacataggctacacagacctgcccagccgaatggccactcaggccagcaccctatattccaacaacatcaccaaactcctgaaggccatcagcccggacaaagataatttttattttgatgtgaaagatgactttgactttggtacgatgggtcatgtcattagaggaactgtagtgatgaaagatggtaaagtgattttcccagctcccacaccgaaaaatattcctcaaggtgccccagtaaaacagaagacagtggctgagctggaagctgaaaaagcagctaccattacacccttcaggaagacaatgtcaacggcttctgcatatacagcaggtctcacagggatactgggtttgggcattgcggctcccaatctagccttttctcagatggtgaccacttttggcttggctggcattgtggggtatcataccgtctggggagtgacccctgctctccactcaccactgatgtctgtgacaaatgcaatctcagggctgactgcagttggtgggttggcactgatgggaggacatttgtatccttccacaacttctcagggccttgctgctcttgctgcattcatatcctctgtcaacattgcaggtggctttctggtgactcagagaatgctggacatgttcaagcgtcccactgaccccccagaatacaactacctgtacctgctccctgccggcacctttgttggtggatatttagctgccctctacagtggttataacattgaacagatcatgtacctaggctcgggtttgtgctgtgtcggtgccttggctggcctctccacccagggaacagcacgtcttggcaatgcactgggcatgattggggttgctggaggactggcagccaccctcggagtcctaaaaccgggcccagaattactagctcagatgtctggagcgatggctttgggtggtaccattggattgacaattgccaaacgcatccagatttctgatttacctcaattagttgctgcttttcacagtttagtgggtttggcagctgtacttacttgcatagctgagtacattatagaatatccacattttgctacggacgcagcagcaaatctcaccaagattgtggcctacctcggcacttacattggtggcgtcacctttagtgggtctctcattgcctatggaaaattgcagggtctcctgaaatctgcccctctcctactgcctggaaggcacttactcaatgcaggcttactggctgctagtgtgggcgggataatcccattcatggtggacccaagctttactactggcatcacctgtctgggttcagtgtctgctctctctgctgtcatgggtgtgactttgacagctgctattgggggtgctgacatgcccgtcgttatcactgtgctgaacagctactcaggctgggccctgtgtgcagagggcttcctgctcaacaacaatctgctgaccatcgtgggtgcactcataggctcgtctggtgctatcctgtcatacatcatgtgtgtggcaatgaatcgctccctggctaatgtgattcttggaggctatggcaccacttcaacagctggtggaaaacccatggaaatttctggcacacatacggaaatcaaccttgacaatgcaattgacatgattcgagaagctaatagcattattattacaccaggctatggtctctgtgcagccaaagctcaataccccattgctgatttggtaaagatgctcactgagcaaggcaaaaaagtcaggtttggaattcacccagttgcaggccgaatgcctggtcagcttaatgtgctgctggctgaggctggtgtgccatatgacattgtgttggaaatggatgagatcaaccatgattttccagatactgatttggtccttgtaattggagctaatgacactgttaattcagcagctcaagaagatcccaactctattattgcaggcatgccagtccttgaggtctggaaatcaaagcaggtgattgttatgaagaggtctttgggtgttggctatgctgcagtggacaatccaatcttctacagacctaacacggccatgcttctaggtgatgccaagaaaacatgtgacgcgctccaggcgaaagttagagaatcctatcagaagtaaatattaaggatcaagctgttagctaataatgccacctctgcagttttgggaacaggcaaataaagtatcagtatacatggtgatgtacatctgtagcaaagctcttggagaaaatgaagactgaagaaagcaaagcaaaaactgtatagagagatttttcaaaagcagtaatccctcaattttaaaaaaggattgaaaattctaaatgtctttctgtgcatattttttgtgttaggaatcaaaagtattttataaaaggagaaagaacagcctcattttagatgtagtcctgttggattttttatgcctcctcagtaaccagaaatgttttaaaaaactaagtgtttaggatttcaagacaacattatacatggctctgaaatatctgacacaatgtaaacattgcaggcacctgcattttatgtttttttttttcaacaaatgtgactaatttgaaacttttatgaacttctgagctgtccccttgcaattcaaccgcagtttgaattaatcatatcaaatcagttttaattttttaaattgtacttcagagtctatatttcaagggcacattttctcactactattttaatacattaaaggactaaataatctttcagagatgctggaaacaaatcatttgctttatatgtttcattagaataccaatgaaacatacaacttgaaaattagtaatagtatttttgaagatcccatttctaattggagatctctttaatttcgatcaacttataatgtgtagtactatattaagtgcacttgagtggaattcaacatttgactaataaaatgagttcatcatgttggcaagtgatgtggcaattatctctggtgacaaaagagtaaaatcaaatatttctgcccgttacaaatatcaaggaagacctgctactatgaaatagatgacattaatctgtcttcactgtttataatacggatggattttttttcaaatcagtgtgtgttttgaggtcttatgtaattgatgacatttgagagaaatggtggctttttttagctacctctttgttcatttaagcaccagtaaagatcatgtctttttaaaaaaaaaaaaaaaaaaaaaaaaaaaaaaaaa

SEQ ID NO: 14605 - DNA, 2556 bp, Homo sapiens
aacttgctctaacttcctcggccgagccgggccgcgccgccgctgccgccgccgcgcgcggattctgcttctcagaagatgcactattatagatactctaacgccaaggtcagctgctggtacaagtacctccttttcagctacaacatcatcttctggttggctggagttgtcttccttggagtcgggctgtgggcatggagcgaaaagggtgtgctgtccgacctcaccaaagtgacccggatgcatggaatcgaccctgtggtgctggtcctgatggtgggcgtggtgatgttcaccctggggttcgccggctgcgtgggggctctgcgggagaatatctgcttgctcaactttttctgtggcaccatcgtgctcatcttcttcctggagctggctgtggccgtgctggccttcctgttccaggactgggtgagggaccggttccgggagttcttcgagagcaacatcaagtcctaccgggacgatatcgatctgcaaaacgtcatcgactcccttcagaaagctaaccagtgctgtggcgcatatggccctgaagactgggacctcaacgtctacttcaattgcagcggtgccagctacagccgagagaagtgcggggtccccttctcctgctgcgtgccagatcctgcgcaaaaagttgtgaacacacagtgtggatatgatgtcaggattcagctgaagagcaagtgggatgagtccatcttcacgaaaggctgcatccaggcgctggaaagctggctcccgcggaacatttacattgtggctggcgtcttcatcgccatctcgctgttgcagatatttggcatcttcctggcaaggacgctgatctcagacatcgaggcagtgaaggccggccgtcacttctgaggagcagagttgagggagccgagctgagccacgctgggaggccagagcctttctctgccatcagccctacgtccagagggagaggagccgacacccccagagccagtgccccatcttaagcatcagcgtgacgtgacctctctgtttctgcttgctggtgctgaagaccaagggtcccccttgttacctgcccaaacttgtgactgcatccctctggagtctacccagagacagagaatgtgtctttatgtgggagtggtgactctgaaagacagagagggctcctgtggctgccaggagggcttgactcagaccccctgcagctcaagcatgtctgcaggacaccctggtcccctctccactggcatccagacatctgctttgggtcatccacatctgtgggtgggccgtgggtagagggacccacaggcgtggaccgggcatctccctccatcaagcaaagcagcatgggggcctgcccgtaacgggaggcggacgtggccccgctgggcctctgagtgccagcgcagtctgctgggacatgcacatatcaggggttgtttgcaggatcctcagccatgttcaagtgaagtaagcctgagccagtgcgtggactggtgccacgggagtgccttgtccactgtccccctgtgtccaccagctattctcctggcgccggaactgcctctggtcttgatagcattaagccctgatggcgccggtggcgcggtgggcatggttcttcactgagagccggctctccttttcttaaagtgtgtaaatagtttatttataggggtaagaatgttctcacaccatttcacttcctcttcctctcctccagcattctcctctgagcagccttagatagtgtccatggctggagccgaccctttgagtccccttgagtgtcttaagaaccagcccacaacagcctctctttctcctccacatactgcagcctccctccatgcatcccacatacaagcactcccccactccccagcgtggcctcactgtcttctggtcttggtgctactgaaattgtcacccagaatttgaatcctgaccctccccactgcaagcccagggagccccagcccaagatggccagcctgaaactgttggccagggctcctcttgtggccatgtacccagggctggctggcctgccatttgcctctccccggagacagccgttcttctgcaaccacaccccgtgcctagccacaaccccaggctgcagctgctcagaagctccaggcattttgtttctggtgaccgcccctaatgggatatcggtgatcactggtccacccttcctgtcagggcttttctggggctgctcttggaaatgaagtcttaagtactgaataactcccctggggatagctggggcatttgtctagctgggctaccttctaacactttgccatagctcagaccacttctcatcgttcagggatggactgcaaccttaatttacttgccggagtgtacattctagtgtggtgtatactggtggctgttgatgacgattttttttttttttttacacaattctctgtagactaggagaagaatgcttgtgtttttcggaagtgtgatgcttctctttgactgccaaactcttttatggaatatatctttatattaaaaaaaaaa

SEQ ID NO: 14606 - DNA, 2304 bp, Homo sapiens
ttgtgtttagaaaaggctcgggcaaagccagcccaagttcgctctctgcacacctcgagcacctcgcggacggcgtgggtccgccagctccgggacctgccgccgctgcctgcgcgccccggggcggaggacggtgccagccgcccacgaggagaccccgctcccgcaggaggccgagctgaagcggcggagcgcgccgccagccagccggggtgagtgccccgggcgaggccggcggccgccaaagcccccgcgggctcgcccgggcgcccggatgccagccccgagccccgccgccgggtgcatgcctcccccgcggcgcgcccccgcaggctgctgcccgctgtgaccgcccttccccgcaggcgggcgccggccaggctctccccgagatcagcgcacgggtggcacccgccggacccccagcggcagcggcggcggcggctgcagggggcgcggggcggaggctgcgagggcgcgcgcggggaggatggacgggtccggggagcgcagcctcccggagccgggcagccagagctccgctgccagcgacgacatagagatagtcgtcaacgtggggggcgtgcggcaggtgctgtacggggacctcctcagtcagtaccctgagacccggctggcggagctcatcaactgcttggctgggggctacgacaccatcttctccctgtgcgacgactacgaccccggcaagcgcgagttctactttgacagggacccggacgccttcaagtgtgtcatcgaggtgtactatttcggggaggtccacatgaagaagggcatctgccccatctgcttcaagaacgagatggacttctggaaggtggacctcaagttcctggacgactgttgcaagagccacctgagcgagaagcgcgaggagctggaggagatcgcgcgccgcgtgcagctcatcctggacgacctgggcgtggacgcagccgagggccgctggcgccgctgccagaagtgcgtctggaagttcctggagaagcccgagtcgtcgtgcccggcgcgggtggtggccgtgctctccttcctgctcatcctcgtctcgtccgtggtcatgtgcatgggcaccatccccgagctgcaggtgctggacgccgagggcaaccgcgtggagcacccgacgctggagaacgtggagacggcgtgcattggctggttcaccctggagtacctgctgcgcctcttctcgtcacccaacaagctgcacttcgcgctgtccttcatgaacattgtggacgtgctggccatcctccccttctacgtgagcctcacgctcacgcacctgggtgcccgcatgatggagctgaccaacgtgcagcaggccgtgcaggcgctgcggatcatgcgcatcgcgcgcatcttcaagctggcccgccactcctcgggcctgcagaccctcacctatgccctcaagcgcagcttcaaggaactggggctgctgctcatgtacctggcagtgggtatcttcgtcttctctgccctgggctacaccatggagcagagccatccagagaccctgtttaagagcatcccccagtccttctggtgggccatcatcaccatgaccaccgtcggctacggcgacatctaccccaagaccacgctgggcaagctcaacgcggccatcagcttcttgtgtggtgtcatcgccatcgccctgcccatccaccccatcatcaacaactttgtcaggtactacaacaagcagcgcgtcctggagaccgcggccaagcacgagctggagctgatggaactcaactccagcagcgggggcgagggcaagaccgggggctcccgcagtgacctggacaacctccctccagagcctgcggggaaggaggcgccgagctgcagcagccggctgaagctctcccacagcgacaccttcatccccctcctgaccgaggagaagcaccacaggacccggctccagagttgcaagtgacaggagggcccctcaggcagagatggaccaggcggtggacagatgggtagatgtggcaggcatgtcatcgacagcacagaagggctgtcctgtgtccccccaaccctcccctggacagactctgaaggccctcccggcacctctgccaaggctgggtaagactcctctatgttgcctgctgtccaggagcccgggagggaggggtgtgcaggagccgcagggccgtgtgggacgagtggaggccgcggcctggctggcacgagagcccacgcccgcttctgtatctccctcaataaagcctcctgctctgtgcaaaaaaaaaaaaaaaa

SEQ ID NO: 14607 - DNA, 2051 bp, Homo sapiens
cggcgccgagtagccgggccgggccggagcgcgggcgcggcggaggcagctgcgcccggctcctcccctcccaggccccgccccccgcccgggccccggcgatggtgacacatgcggcggcggccgcgcggcaggaccatggttgagcgcgccagcaagttcgtgctggtggtggcgggctcggtgtgcttcatgctcatcttgtaccagtacgcgggcccaggactgagcctgggcgcgcccggcggccgcgcgccgcccgacgacctgtacctgttccccacgcccgacccccactacgagaagaagtactacttcccggtccgcgagctggagcgctcgctgcgcttcgacatgaagggcgacgacgtgatcgtcttcctgcacatccagaagacgggcggcaccaccttcggccgccacctcgtgcagaacgtacgcctcgaggtgccgtgcgactgccggcccggccagaagaagtgcacctgctaccggcccaaccgccgcgagacttggctcttctcccgcttctccaccggctggagctgcgggctgcacgccgactggaccgagctcaccaactgcgtgcccggcgtgctggaccgccgcgactccgccgcgctgcgcacgcccaggaagttctactacatcaccctgctacgagaccccgtgtcccgctacctgagcgagtggcggcatgtgcagaggggtgccacgtggaagacgtctttgcatatgtgtgatgggcgcacgcccacgcctgaggagctgccgccctgctacgagggcacggactggtcgggctgcacgctacaggagttcatggactgcccgtacaacctggccaacaaccgccaggtgcgcatgctggccgacctgagcctggtgggctgctacaacctgtccttcatccccgagggcaagcgggcccagctgctgctcgagagcgccaagaagaacctgcggggcatggccttcttcggcctgaccgagttccagcgcaagacgcagtacctgttcgagcggacgttcaacctcaagttcatccggcccttcatgcagtacaatagcacgcgggcgggcggcgtggaggtggatgaagacaccatccggcgcatcgaggagctcaacgacctggacatgcagctgtacgactacgccaaggacctcttccagcagcgctaccagtacaagcggcagctggagcgcagggagcagcgcctgaggagccgcgaggagcgtctgctgcaccgggccaaggaggcactgccgcgggaggatgccgacgagccgggccgcgtgcccaccgaggactacatgagccacatcattgagaagtggtagtggcggtggtggccacggggaggcctcttggggggtgtgggggataaaacaggacagacgacaggtccacccaagactgtcaagggatgagcatcccaaacctgctccacagaggtagctgcgtcctgaaaaaaaacagagcagggatgtagtggggctgggcagggatgggggcttgagaaatcaacaggtgcagcccagtgggtcagaggaaagcgtgctcgaaggatgccatggtcagggcagggcctccagagcaggtgttgtgcctggagctgctctcctggcctccttggatttatcgcaaaaactgaaggtttgcgcaagagacgaggacagcggaaagtggacctgccaggccgggagtgtgtccctcaccaactatgcacacagcactcgctcttaactcctctgtccgggctactaggagtgagaccagcttctggcaactgccccagctccaggccatcccatagcccctcctcttctggctgcccccaatgccccgaggcctggggagcccccagctcacccatctgtagctccctcaaagtcagggcccaccccatctgaggcagagaagactcgagtccagcccccaggaagcctgctcccctctctggcccatggtcctgcttcatgctttgggtcaggaggccaaagctgatgttcaggccccacccactccctacagtcctcagaccccg

SEQ ID NO: 14608 - DNA, 969 bp, Homo sapiens
atgaattccctgaaggacgggaatcacaccgctctgacggggttcatcctattgggcttaacagatgatccaatccttcgagtcatcctcttcatgatcatcctatctggtaatctcagcataattattcttatcagaatttcttctcagctccatcatcctatgtatttctttctgagccacttggcttttgctgacatggcctattcatcttctgtcacacccaacatgcttgtaaacttcctggtggagagaaatacagtctcctaccttggatgtgccatccagcttggttcagcggctttctttgcaacagtcgaatgcgtccttctggctgccatggcctatgaccgctttgtggcaatttgcagtccactgctttattcaaccaaaatgtccacacaagtcagtgtccagctactcttagtagtttacatagctggttttctcattgctgtctcctatactacttccttctattttttactcttctgtggaccaaatcaagtcaatcattttttctgtgatttcgctcccttacttgaactctcctgttctgatatcagtgtctccacagttgttctctcattttcttctggatccatcattgtggtcactgtgtgtgtcatagccgtctgctacatctatatcctcatcaccatcctgaagatgcgctccactgaggggcaccacaaggccttctccacctgcacttcccacctcactgtggttaccctgttctatgggaccattaccttcatttatgtgatgcccaattttagctactcaactgaccagaacaaggtggtgtctgtgttgtacacagtggtgattcccatgttgaaccccctgatctacagcctcaggaacaaggagattaagggggctctgaagagagagcttgttagaaaaatactttctcatgatgcttgttattttagtagaacttcaaataatgatattacatag

SEQ ID NO: 14609 - DNA, 5610 bp, Homo sapiens
aacatttttgaaagatcactcagctttaacacaccttggctgggtctggataaaaaaaaagtgagcactgcaaatttctagaagaaaacatcaggagaagaaagagagagggggatttattcaaagttgtttccaattccttcaaaacctcaaaccaggtggctatggtatggatgtaaccaagaaaaacaaacgagatggaactgaagtcactgagagaattgtcactgaaacagtaaccacaagacttacatccttaccaccaaaaggcgggaccagcaatggctatgctaaaacagcctctcttggtggagggagccggctggagaaacaaagcctgactcatggcagcagcggctacataaactcaactggaagcacacgaggccatgcctccacctctagttacaggagggctcactcacctgcctccactctgcccaactccccaggctcaacctttgaaaggaaaactcacgttacccgccatgcgtatgaagggagctccagtggcaactcttctccggagtaccctcggaaggaatttgcatcttcttcaaccagaggacggagtcaaacacgagagagtgaaattcgagttcgactgcagagtgcgtccccatccacccgatggacagaattggatgatgttaagcgtttgctcaaggggagtcgatcggcaagtgtgagccccacccggaattcctccaacacactccccatccccaagaaaggcactgtggagaccaaaattgtgacagcgagctcccagtcggtgtcaggcacctacgatgcaacgatcctggatgccaaccttccctcccatgtgtggtcctccaccctgcccgcggggtcctccatggggacctatcacaacaacatgacaacccagagctcatccctcctcaacaccaatgcctactctgcgggatcagtcttcggagttccaaacaacatggcgtcctgctcacccactttgcaccctggactcagcacatcctcctcagtgtttggcatgcagaacaatctggcccccagcttgaccaccctgtcccatggcaccaccaccacttccacagcatatggggtgaagaaaaacatgccccagagtcctgcggctgtgaacactggcgtttccacctccgccgcctgcaccacaagtgtgcagagcgatgaccttttgcacaaggactgcaagttcctgatcctagagaaagacaacacacctgctaagaaggagatggagctgctcatcatgaccaaggacagcgggaaggtctttacagcctcccctgccagcatcgctgcaacttctttttcagaagacaccctaaaaaaagaaaagcaagctgcctacaatgctgactcaggcctaaaagccgaagctaatggagacctgaagactgtgtccacaaagggcaagaccaccactgcagatatccacagctacagcagcagtggtggtggtggcagtggaggaggtggcggtgttggtggcgctggcggcggcccttggggaccagcgccagcctggtgcccctgcggctcctgctgcagctggtggaagtggctgctgggcctgctgctcacctggctgctactcctggggctgctcttcggcctcattgctctggcggaggaggtgaggaagctgaaggcgcgtgtggatgagctggagaggatcaggaggagcatactgccctatggggacagcatggatagaatagaaaaggaccgcctccagggcatggcacccgcggcgggagcagacctggacaaaattgggctgcacagtgacagccaggaggagctctggatgttcgtgaggaagaagctaatgatggaacaggaaaatggaaatctccgaggaagccctggccctaaaggtgacatgggaagtccaggccctaaaggagatcgagggttccctgggactccaggtatccctgggcccttgggccacccaggtccacaaggaccaaagggtcaaaaaggcagcgtgggagatcctggcatggaaggccccatgggccagagagggcgagaaggccccatgggacctcgtggtgaggcagggcctcctggatctggagagaaaggggaaagaggggctgctggtgaaccaggtcctcatggcccacctggtgtcccaggttctgtgggtcccaaaggttccagcggctctcctggcccacagggccctccaggtcctgtaggtctccaagggctccgaggtgaagtaggacttcctggtgtcaaaggtgacaaaggaccaatgggaccaccaggacccaaaggtgaccagggtgagaaaggacctcgaggcctcacaggcgagcctggcatgagaggtttgcctggtgctgttggtgagcccggggctaaaggagcaatgggtcctgctggcccagacggacaccaaggcccaagaggtgaacaaggtcttactgggatgcctggaatccgtggcccaccaggaccttctggagacccaggaaagccaggtctcacaggaccccagggacctcagggacttcccggtacccctggccgaccaggaataaaaggtgaaccaggagctccaggcaagatcgtgacttcggaggggtcatcgatgctcactgtcccaggccccccaggacctcctggagccatgggacccccaggacctccaggtgccccaggccctgccggcccagctggtctcccaggacatcaagaagttcttaatttacaaggtcccccaggcccacccggcccacgtgggccaccagggccttccattccaggcccaccaggaccccgaggcccaccaggggagggtttgccaggcccaccaggcccaccaggatcgttcctgtccaactcagaaaccttcctcttcggccccccaggcccacctggccccccaggtcccaagggagaccaaggtcccccaggccccagaggacaccaaggcgagcaaggcctcccaggtttctcaacctcagggtccagttctttcggactcaaccttcagggaccaccaggcccacctggcccccagggaccaaaaggtgacaaaggtgatccgggtgttccaggggctcttggcattcctagtggtccttctgaagggggatcatcaagtaccatgtacgtgtcaggcccgccagggccccctgggccccctgggcctccgggctctatcagcagctctggccaggagattcagcagtacatctctgagtacatgcagagtgacagtattagatcttacctatccggagttcagggtcccccaggcccacctggtcccccaggacctgtcaccaccatcacaggcgagactttcgactactcagagctggcaagccacgttgtgagctacttacggacttcggggtacggtgtcagcttgttctcgtcctccatctcttctgaagacatcctggctgtgctgcagcgggatgacgtgcgtcagtacctacgtcagtacttgatgggccctcggggtccgccagggccaccaggagccagtggagatgggtccctcctgtctttggactatgcagagctgagtagtcgcattctcagctacatgtcgagttctgggatcagcattgggcttcctggtcccccggggccccctggcttgccgggaacctcctatgaggagctcctctccttgctgcgagggtctgaattcagaggcatcgttggacccccaggtcccccgggtccaccagggatcccaggcaatgtgtggtccagcatcagcgtggaggacctctcgtcttacttacatactgccggcttgtcattcatcccaggccctccaggacctcctggtcccccagggcctcgagggcccccgggtgtctcaggagccctggcaacctatgcagctgaaaacagcgacagcttccggagcgagctgatcagctacctcacaagtcctgatgtgcgcagcttcattgttggccccccaggccctcctgggccgcagggaccccctggggacagccgcctcctgtccacggatgcctcccacagtcggggtagcagctcctcctcacacagctcatctgtcaggcggggcagctcctacagctcttccatgagcacaggaggaggtggtgcaggctccctgggtgcaggcggtgcctttggtgaagctgcaggagacaggggtccctatggcactgacatcggcccaggcggaggctatggggcagcagcagaaggcggcatgtatgctggcaatggcggactattgggagctgactttgctggagatctggattacaatgagctggctgtgagggtgtcagagagcatgcagcgtcagggcctactgcaagggatggcctacactgtccagggcccaccaggccagcctgggccacaggggccacccggcatcagcaaggtcttctctgcctacagcaacgtgactgcggacctcatggacttcttccaaacttatggagccattcaaggaccccctgggcaaaaaggagagatgggcactccaggacccaaaggtgacaggggccctgctgggccaccaggtcatcctgggccacctggccctcgaggacacaagggagaaaaaggagacaaaggtgaccaagtctatgctgggcggagaaggagaagaagtattgctgtcaagccgtgagctagccatggcaggacagctcctggaccaggtctcataatgcatgtggcacttaggtccaaggtctccagagggtgaaagctggagtctgtcaatgtcctactgagacagcacagccaacctagctagcaacatttgttttagtctgaacaatatatacttatagaattcagtcaaagatacacaatctgaaacagcttcatggggtggactctaacagtagttgcaatgttttagaatgagacttacttctctgctatctagatctgaactccttggcttctttacttagttcaagccccagcctaggaaagccagttacataaaagttggctcaggagtcttagagctttacctaaatatgagcccagaaaacggaggatgggggtggggcgccttcctggaggtgacacttgatgggggtgtgttctggttactgttctaaggctgtgccatcagctccttcctcccctgttcattctgcattctctagtcagttggctaagaagtgactcttgcaactaaaaaaattaagaaattcacttcccctctaggaggtgatgatagggtttctaatggttatatgtatatcacattcccatttgcttagaaagtctgattgtagctatgattgtccgtaggcccatactagagttcatggatatgttatactgaaccaggccagagcaaacagaaaaagaaggttgagggcaatggacaaggaaggaataaagggagaagagggaaaacagaaaacctgatgctggggacacagcatcagctcaagacgtcaccctccattctgcactcagaaaatggcacttgggggactgggcgcagttggtctttaaccacttttcaatgtctaaaaacatttgtttgtggtctataagatgaaacatcatttcaatcgtaaaatttcccattaaagaagtttttttttctaa

SEQ ID NO: 14610 - DNA, 5000 bp, Homo sapiens
aacatttttgaaagatcactcagctttaacacaccttggctgggtctggataaaaaaaaagtgagcactgcaaatttctagaagaaaacatcaggagaagaaagagagagggggatttattcaaagttgtttccaattccttcaaaacctcaaaccaggtggctatggtatggatgtaaccaagaaaaacaaacgagatggaactgaagtcactgagagaattgtcactgaaacagtaaccacaagacttacatccttaccaccaaaaggcgggaccagcaatggctatgctaaaacagcctctcttggtggagggagccggctggagaaacaaagcctgactcatggcagcagcggctacataaactcaactggaagcacacgaggccatgcctccacctctagttacaggagggctcactcacctgcctccactctgcccaactccccaggctcaacctttgaaaggaaaactcacgttacccgccatgcgtatgaagggagctccagtggcaactcttctccggagtaccctcggaaggaatttgcatcttcttcaaccagaggacggagtcaaacacgagagagtgaaattcgagttcgactgcagagtgcgtccccatccacccgatggacagaattggatgatgttaagcgtttgctcaaggggagtcgatcggcaagtgtgagccccacccggaattcctccaacacactccccatccccaagaaaggcactgtggagaccaaaattgtgacagcgagctcccagtcggtgtcaggcacctacgatgcaacgatcctggatgccaaccttccctcccatgtgtggtcctccaccctgcccgcggggtcctccatggggacctatcacaacaacatgacaacccagagctcatccctcctcaacaccaatgcctactctgcgggatcagtcttcggagttccaaacaacatggcgtcctgctcacccactttgcaccctggactcagcacatcctcctcagtgtttggcatgcagaacaatctggcccccagcttgaccaccctgtcccatggcaccaccaccacttccacagcatatggggtgaagaaaaacatgccccagagtcctgcggctgtgaacactggcgtttccacctccgccgcctgcaccacaagtgtgcagagcgatgaccttttgcacaaggactgcaagttcctgatcctagagaaagacaacacacctgctaagaaggagatggagctgctcatcatgaccaaggacagcgggaaggtctttacagcctcccctgccagcatcgctgcaacttctttttcagaagacaccctaaaaaaagaaaagcaagctgcctacaatgctgactcaggcctaaaagccgaagctaatggagacctgaagactgtgtccacaaagggcaagaccaccactgcagatatccacagctacagcagcagtggtggtggtggcagtggaggaggtggcggtgttggtggcgctggcggcggcccttggggaccagcgccagcctggtgcccctgcggctcctgctgcagctggtggaagtggctgctgggcctgctgctcacctggctgctactcctggggctgctcttcggcctcattgctctggcggaggaggtgaggaagctgaaggcgcgtgtggatgagctggagaggatcaggaggagcatactgccctatggggacagcatggatagaatagaaaaggaccgcctccagggcatggcacccgcggcgggagcagacctggacaaaattgggctgcacagtgacagccaggaggagctctggatgttcgtgaggaagaagctaatgatggaacaggaaaatggaaatctccgaggaagccctggccctaaaggtgacatgggaagtccaggccctaaaggagatcgagggttccctgggactccaggtatccctgggcccttgggccacccaggtccacaaggaccaaagggtcaaaaaggcagcgtgggagatcctggcatggaaggccccatgggccagagagggcgagaaggccccatgggacctcgtggtgaggcagggcctcctggatctggagagaaaggggaaagaggggctgctggtgaaccaggtcctcatggcccacctggtgtcccaggttctgtgggtcccaaaggttccagcggctctcctggcccacagggccctccaggtcctgtaggtctccaagggctccgaggtgaagtaggacttcctggtgtcaaaggtgacaaaggaccaatgggaccaccaggacccaaaggtgaccagggtgagaaaggacctcgaggcctcacaggcgagcctggcatgagaggtttgcctggtgctgttggtgagcccggggctaaaggagcaatgggtcctgctggcccagacggacaccaaggcccaagaggtgaacaaggtcttactgggatgcctggaatccgtggcccaccaggaccttctggagacccaggaaagccaggtctcacaggaccccagggacctcagggacttcccggtacccctggccgaccaggaataaaaggtgaaccaggagctccaggcaagatcgtgacttcggaggggtcatcgatgctcactgtcccaggccccccaggacctcctggagccatgggacccccaggacctccaggtgccccaggccctgccggcccagctggtctcccaggacatcaagaagttcttaatttacaaggtcccccaggcccacccggcccacgtgggccaccagggccttccattccaggcccaccaggaccccgaggcccaccaggggagggtttgccaggcccaccaggcccaccaggatcgttcctgtccaactcagaaaccttcctcttcggccccccaggcccacctggccccccaggtcccaagggagaccaaggtcccccaggccccagaggacaccaaggcgagcaaggcctcccaggtttctcaacctcagggtccagttctttcggactcaaccttcagggaccaccaggcccacctggcccccagggaccaaaaggtgacaaaggtgatccgggtgttccaggggctcttggcattcctagtggtccttctgaagggggatcatcaagtaccatgtacgtgtcaggcccgccagggccccctgggccccctgggcctccgggctctatcagcagctctggccaggagattcagcagtacatctctgagtacatgcagagtgacagtattagatcttacctatccggagttcagggtcccccaggcccacctggtcccccaggacctgtcaccaccatcacaggcgagactttcgactactcagagctggcaagccacgttgtgagctacttacggacttcggggtacggtgtcagcttgttctcgtcctccatctcttctgaagacatcctggctgtgctgcagcgggatgacgtgcgtcagtacctacgtcagtacttgatgggccctcggggtccgccagggccaccaggagccagtggagatgggtccctcctgtctttggactatgcagagctgagtagtcgcattctcagctacatgtcgagttctgggatcagcattgggcttcctggtcccccggggccccctggcttgccgggaacctcctatgaggagctcctctccttgctgcgagggtctgaattcagaggcatcgttggacccccaggtcccccgggtccaccagggatcccaggcaatgtgtggtccagcatcagcgtggaggacctctcgtcttacttacatactgccggcttgtcattcatcccaggccctccaggacctcctggtcccccagggcctcgagggcccccgggtgtctcaggagccctggcaacctatgcagctgaaaacagcgacagcttccggagcgagctgatcagctacctcacaagtcctgatgtgcgcagcttcattgttggccccccaggccctcctgggccgcagggaccccctggggacagccgcctcctgtccacggatgcctcccacagtcggggtagcagctcctcctcacacagctcatctgtcaggcggggcagctcctacagctcttccatgagcacaggaggaggtggtgcaggctccctgggtgcaggcggtgcctttggtgaagctgcaggagacaggggtccctatggcactgacatcggcccaggcggaggctatggggcagcagcagaaggcggcatgtatgctggcaatggcggactattgggagctgactttgctggagatctggattacaatgagctggctgtgagggtgtcagagagcatgcagcgtcagggcctactgcaagggatggcctacactgtccagggcccaccaggccagcctgggccacaggggccacccggcatcagcaaggtcttctctgcctacagcaacgtgactgcggacctcatggacttcttccaaacttatggagccattcaaggaccccctgggcaaaaaggagagatgggcactccaggacccaaaggtgacaggggccctgctgggccaccaggtcatcctgggccacctggccctcgaggacacaagggagaaaaaggagacaaaggtgaccaagtctatgctgggcggagaaggagaagaagtattgctgtcaagccgtgagctagccatggcaggacagctcctggaccaggcccatactagagttcatggatatgttatactgaaccaggccagagcaaacagaaaaagaaggttgagggcaatggacaaggaaggaataaagggagaagagggaaaacagaaaacctgatgctggggacacagcatcagctcaagacgtcaccctccattctgcactcagaaaatggcacttgggggactgggcgcagttggtctttaaccacttttcaatgtctaaaaacatttgtttgtggtctataagatgaaacatcatttcaatcgtaaaatttcccattaaagaagtttttttttctaa

SEQ ID NO: 14611 - DNA, 6475 bp, Homo sapiens
ggcgaggcgaggtttgctggggtgaggcagcggcgcggccgggccgggccgggccacaggcggtggcggcgggaccatggaggcggcggtcgctgctccgcgtccccggctgctcctcctcgtgctggcggcggcggcggcggcggcggcggcgctgctcccgggggcgacggcgttacagtgtttctgccacctctgtacaaaagacaattttacttgtgtgacagatgggctctgctttgtctctgtcacagagaccacagacaaagttatacacaacagcatgtgtatagctgaaattgacttaattcctcgagataggccgtttgtatgtgcaccctcttcaaaaactgggtctgtgactacaacatattgctgcaatcaggaccattgcaataaaatagaacttccaactactgtaaagtcatcacctggccttggtcctgtggaactggcagctgtcattgctggaccagtgtgcttcgtctgcatctcactcatgttgatggtctatatctgccacaaccgcactgtcattcaccatcgagtgccaaatgaagaggacccttcattagatcgcccttttatttcagagggtactacgttgaaagacttaatttatgatatgacaacgtcaggttctggctcaggtttaccattgcttgttcagagaacaattgcgagaactattgtgttacaagaaagcattggcaaaggtcgatttggagaagtttggagaggaaagtggcggggagaagaagttgctgttaagatattctcctctagagaagaacgttcgtggttccgtgaggcagagatttatcaaactgtaatgttacgtcatgaaaacatcctgggatttatagcagcagacaataaagacaatggtacttggactcagctctggttggtgtcagattatcatgagcatggatccctttttgattacttaaacagatacacagttactgtggaaggaatgataaaacttgctctgtccacggcgagcggtcttgcccatcttcacatggagattgttggtacccaaggaaagccagccattgctcatagagatttgaaatcaaagaatatcttggtaaagaagaatggaacttgctgtattgcagacttaggactggcagtaagacatgattcagccacagataccattgatattgctccaaaccacagagtgggaacaaaaaggtacatggcccctgaagttctcgatgattccataaatatgaaacattttgaatccttcaaacgtgctgacatctatgcaatgggcttagtattctgggaaattgctcgacgatgttccattggtggaattcatgaagattaccaactgccttattatgatcttgtaccttctgacccatcagttgaagaaatgagaaaagttgtttgtgaacagaagttaaggccaaatatcccaaacagatggcagagctgtgaagccttgagagtaatggctaaaattatgagagaatgttggtatgccaatggagcagctaggcttacagcattgcggattaagaaaacattatcgcaactcagtcaacaggaaggcatcaaaatgtaattctacagctttgcctgaactctccttttttcttcagatctgctcctgggttttaatttgggaggtcaattgttctacctcactgagagggaacagaaggatattgcttccttttgcagcagtgtaataaagtcaattaaaaacttcccaggatttctttggacccaggaaacagccatgtgggtcctttctgtgcactatgaacgcttctttcccaggacagaaaatgtgtagtctacctttattttttattaacaaaacttgttttttaaaaagatgattgctggtcttaactttaggtaactctgctgtgctggagatcatctttaagggcaaaggagttggattgctgaattacaatgaaacatgtcttattactaaagaaagtgatttactcctggttagtacattctcagaggattctgaaccactagagtttccttgattcagactttgaatgtactgttctatagtttttcaggatcttaaaactaacacttataaaactcttatcttgagtctaaaaatgacctcatatagtagtgaggaacataattcatgcaattgtattttgtatactattattgttctttcacttattcagaacattacatgccttcaaaatgggattgtactataccagtaagtgccacttctgtgtctttctaatggaaatgagtagaattgctgaaagtctctatgttaaaacctatagtgtttgaattcaaaaagcttatttatctgggtaacccaaactttttctgttttgtttttggaagggtttttgtggtatgtcatttggtattctattctgaaaatgcctttctcctaccaaaatgtgcttaagccactaaagaaatgaagtggcattaattagtaaattattagcatggtcatgtttgaatattctcacatcaagcttttgcattttaattgtgttgtctaagtatacttttaaaaaatcaagtggcactctagatgcttatagtactttaatatttgtagcatacagactaatttttctaaaagggaaagtctgtctagctgcttgtgaaaagttatgtggtattctgtaagccatttttttctttatctgttcaaagacttattttttaagacatgaattacatttaaaattagaatatggttaatattaaataataggcctttttctaggaaggcgaaggtagttaataatttgaatagataacagatgtgcaagaaagtcacatttgttatgtatgtaggagtaaacgttcggtggatcctctgtctttgtaactgaggttagagctagtgtggttttgaggtctcactacactttgaggaaggcagcttttaattcagtgtttccttatgtgtgcgtacattgcaactgcttacatgtaatttatgtaatgcattcagtgcacccttgttacttgggagaggtggtagctaaagaacattctgagtataggtttttctccatttacagatgtctttggtcaaatattgaaagcaaacttgtcatggtcttcttacattaagttgaaactagcttataataactggtttttacttccaatgctatgaagtctctgcagggcttttacagttttcgaagtccttttatcactgtgatcttattctgaggggagaaaaaactatcatagctctgaggcaagacttcgactttatagtgctatcagttccccgatacagggtcagagtaacccatacagtattttggtcaggaagagaaagtggccatttacactgaatgagttgcattctgataatgtcttatctcttatacgtagaataaatttgaaagactatttgatcttaaaaccaaagtaattttagaatgagtgacatattacataggaatttagtgtcaatttcatgtgtttaaaaacatcatgggaaaaatgcttagaggttactattttgactacaaagttgagtttttttctgtagttaccataatttcattgaagcaaatgaatgagtttgagaggtttgtttttatagttgtgttgtattacttgtttaataataatctctaattctgtgatcaggtactttttttgtgggggttttttttttgtttttttttttttgttgttgtttttgggccatttctaagcctaccagatctgctttatgaaatccaggggaccaatgcattttatcactaaaactatttttatataattttaagaatataccaaaagttgtctgatttaaagttgtaatacatgatttctcactttcatgtaaggttatccacttttgctgaagatattttttattgaatcaaagattgagttacaattatacttttcttacctaagtggataaaatgtacttttgatgaatcagggaatttttttaaagttggagtttagttctaaattgactttacgtattactgcagttaattccttttttggctagggatggtttgataaaccacaattggctgatattgaaaatgaaagaaacttaaaaggtgggatggatcatgattactgtcgataactgcagataaatttgattagagtaataattttgtcatttaaaaacacagttgtttatactgcccatcctaggatgctcaccttccaagattcaacgtggctaaaacatcttctggtaaattgtgcgtccatattcattttgtcagtagccaggagaaatggggatgggggaaatacgacttagtgaggcatagacatccctggtccatcctttctgtctccagctgtttcttggaacctgctctcctgcttgctggtccctgacgcagagaccgttgcctcccccacagccgtttgactgaaggctgctctggagacctagagtaaaacggctgatggaagttgtgggacccacttccatttccttcagtcattagaggtggaagggaggggtctccaagtttggagattgagcagatgaggcttgggatgcccctgctttgacttcagccatggatgaggagtgggatggcagcaaggtggctcctgtggcagtggagttgtgccagaaacagtggccagttgtatcgcctataagacagggtaaggtctgaagagctgagcctgtaattctgctgtaataatgatagtgctcaagaagtgccttgagttggtgtacagtgccatggccatcaagaatcccagatttcaggttttattacaaaatgtaagtggtcacttggcgattttgtagtacatgcatgagttaccttttttctctatgtctgagaactgtcagattaaaacaagatggcaaagagatcgttagagtgcacaacaaaatcactatcccattagacacatcatcaaaagcttatttttattcttgcactggaagaatcgtaagtcaactgtttcttgaccatggcagtgttctggctccaaatggtagtgattccaaataatggttctgttaacactttggcagaaaatgccagctcagatattttgagatactaaggattatctttggacatgtactgcagcttcttgtctctgttttggattactggaatacccatgggccctctcaagagtgctggacttctaggacattaagatgattgtcagtacattaaacttttcaatcccattatgcaatcttgtttgtaaatgtaaacttctaaaaatatggttaataacattcaacctgtttattacaacttaaaaggaacttcagtgaatttgtttttattttttaacaagatttgtgaactgaatatcatgaaccatgttttgatacccctttttcacgttgtgccaacggaatagggtgtttgatatttcttcatatgttaaggagatgcttcaaaatgtcaattgctttaaacttaaattacctctcaagagaccaaggtacatttacctcattgtgtatataatgtttaatatttgtcagagcattctccaggtttgcagttttatttctataaagtatgggtattatgttgctcagttactcaaatggtactgtattgtttatatttgtaccccaaataacatcgtctgtactttctgttttctgtattgtatttgtgcaggattctttaggctttatcagtgtaatctctgccttttaagatatgtacagaaaatgtccatataaatttccattgaagtcgaatgatactgagaagcctgtaaagaggagaaaaaaacataagctgtgtttccccataagtttttttaaattgtatattgtatttgtagtaatattccaaaagaatgtaaataggaaatagaagagtgatgcttatgttaagtcctaacactacagtagaagaatggaagcagtgcaaataaattacatttttcccaagtgccagtggcatattttaaaataaagtgtatacgttggaatgagtcatgccatatgtagttgctgtagatggcaactagaacctttgagttacaagagtctttagaagttttctaaccctgcctagtgcaagttacaatattatagcgtgttcggggagtgccctcctgtctgcaggtgtgtctctgtgcctgggggcttttctccacatgcttaggggtgtgggtcttccattggggcatgatggacctgtctacaggtgatctctgttgcctttgggtcagcacatttgttagtctcctgggggtgaaaacttggcttacaagagaactggaaaaatgatgagatgtggtccccaaacccttgattgactctggggaggggctttgtgaataggattgctctcacattaaagatagttacttcaatttgaaggctggatttagggatttttttttttccttataacaaagacatcaccaggatatgaagcttttgttgaaagttggaaaaaaagtgaaattaaagacattcccagacaaa

SEQ ID NO: 14612 - DNA, 2655 bp, Homo sapiens
atggagcaggcgggcaccagacctgcggcgacagagcatccacggctccggcggcccatgccctggctgctgctactgcctctcctgctgctgttgctgctgctgctacctggccctgcggcctcccagctgcgatactctgtgccagaggagcaggcacccggcgcgctcgtgggcaacgtggctcgcgcgctggggcttgagctgcggcgcttggggccgggttgcttgcgcatcaaccatctgggtgcgcccagtccgcgctacctggagctggacctgacgagtggagcgctcttcgtcaacgagcgcattgatcgggaggcgctgtgtgagcagcggcctcgctgcctgctcagcttggaagtgctggcgcacaaccccgtggcggtgagcgccgttgaggtggaaatattggacatcaacgacaactcaccgcgtttcccgcggcccaactaccagcttcaggtaagcgaatcggtggcgcctggagcgcgctttcacatagagagtgcgcaggaccccgacgtgggcgccaactcagtacagacctacgagctcagccccagcgagcacttcgagctggaccttaagcccctgcaggagaacagtaaagtgcttgagctggtgctgcgtaagggcctagaccgggagcaggcagccttgcaccacctggttctcacagccgtggatgggggcatcccagcccgctcgggtacggcacagatctctgtgcgtgtcctggacactaacgacaactctcctgcctttgaccagtccacttatcgcgtccagctacgggaggactcacccccaggcacattggtggtgaagctgaatgcctcagacccggatgagggctccaatggtgagctcaggtactccttgagcagctacacgtcggaccgggagaggcagctcttcagcatagatgccagtaccggggaagtgcgagtaattggggggctggattatgaggaagcctcctcctaccagatctatgtgcaggcgactgaccggggtccagtgcccatggcaggtcactgcaaggtgctggtggacatcgtggacgtgaatgacaatgccccagaggtggtgctcacggacctgtatagcccagtgcctgagaatgctacacccaacaccattgtggccgttctcagtgtcaatgaccaagactcaggccccaaccggaaagtgagcctgggtctggaggccacactgcctttccgactgaatggctttggaaactcctatacactggtggtgagcggcccactggaccgagagcgggtggctgtctacaacatcacggtgacagccacagatgggggaataccgcagctcacatccctgcgtacactgaaggttgagatctctgacatcaatgacaatccaccaagcttcctggaggactcctattccatctacatacaggagaacaatttgccaggtgtgttgctctgtactgtgcaagccacagacccagatgaaaaggagaatgcagaggtgacctactcccttctggagagggagattcaagggctgccagtcacctcctatgtctccattaacagtgccagtggcagcctttatgctgtcaactcctttgactatgagaagtttcgggagttctttgtgactgtggaggctcaggacaaggggagcccaccactgagcagcactgtgactgccaacgtatatgtggtggacatgaatgaccatgcccctcacattctgtaccctacctcaaccaactcgtcagcagccttcgagatggtgcctcgaactgcccctgctggctacctggtcaccaaagtcatagctatggactcagactctgggcaaaatgcttggcttttttaccatctagcccagacttctgacctggacctctttaaggtagagctgcacacaggagaaattaggactaccaggaagatgggagatgagagtggtagcactttcaacctgaccgtggtggtccgagataatggagagccatcactatcagcctctgtggccattacagtagctgtggtggatagggtttccaaaatcctccctgacactcagaggcatgttaagagccctcggacatactctgaaattaccctttatctaataatagcattaagcacagtgtcttttatatttcttttgacaatcatcattttgagcatcatcaagtgctaccgctacactgcgtatggcactgcatgctgtggaggcttctgtggagtaagggaaaggtcccctgcagaactgtacaaacaagccaacaacaatattgatgccaggataccgcatggcctcaaagtgcagcctcacttcattgaagttcgagggaatggctccctcaccaagacctactgctacaaggcctgtctgacagcaggctcagggagtgacactttcatgttttacaatacaggggcccagacaggaccagggccttcgggagcccaagcagcagtgactgacagcaggaatctcacaggccaaagtggtcagaatgctgggaacctgattattctcaaaaatgaggctgtttctcaaaatgaggtgagacagtggtcagggggtcttctacaaactcatgcatttgttacacatcccccaatatcctgtgatttggctttattgagtcattaa

SEQ ID NO: 14613 - DNA, 1732 bp, Homo sapiens
aattctgcatttcagtgcactgcaggatggcgtcatctctgccctggctgtgcattattctgtggctagaaaatgccctagggaaactcgaagttgaaggcaacttctactcagaaaacgtcagtcggatcctggacaacttgcttgaaggctatgacaatcggctgcggccgggatttggaggtgctgtcactgaagtcaaaacagacatttatgtgaccagttttgggcccgtgtcagatgtggagatggagtatacgatggatgttttttttcgccagacctggactgatgagaggttgaagtttggggggccaactgagattctgagtctgaataatttgatggtcagtaaaatctggacgcctgacacctttttcagaaatggtaaaaagtccattgctcacaacatgacaactcctaataaactcttcagaataatgcagaatggaaccattttatacaccatgaggcttaccatcaatgctgactgtcccatgaggctggttaactttcctatggatgggcatgcttgtccactcaagtttgggagctatgcttatcccaaaagtgaaatcatatatacgtggaaaaaaggaccactttactcagtagaagtcccagaagaatcttcaagccttctccagtatgatctgattggacaaacagtatctagtgagacaattaaatctaacacaggtgaatacgttataatgacagtttacttccacttgcaaaggaagatgggctacttcatgatacagatatacactccttgcattatgacagtcattctttcccaggtgtctttctggattaataaggagtccgtcccagcaagaactgtttttgggatcaccactgttttaactatgaccactttgagcatcagtgcccggcactctttgccaaaagtgtcatatgccactgccatggattggttcatagctgtttgctttgcattcgtcttctctgctcttatcgagttcgcagctgtcaactactttaccaatcttcagacacagaaggcgaaaaggaaggcacagtttgcagccccacccacagtgacaatatcaaaagctactgaacctttggaagctgagattgttttgcatcctgactccaaatatcatctgaagaaaaggatcacttctctgtctttgccaatagtttcatcttccgaggccaataaagtgctcacgagagcgcccatcttacaatcaacacctgtcacacccccaccactcccgccagcctttggaggcaccagtaaaatagaccagtattctcgaattctcttcccagttgcatttgcaggattcaaccttgtgtactgggtagtttatctttccaaagatacaatggaagtgagtagcagtgttgaatagcttttccaggacaacctgaattctataagttcttgttttctgtttcctatgttttcttaaaaaatagcattgagacttgtgtagatgcttctcagaacatgaaatcaaattggaaatctgtaacgcagcttctgtaagcatgtgtgggcaaaaaagcaataatcctactcctcaaaatagaaagttgaagattgctgaaaaatatgacttttctgtatgttagagaaaaactttatgaggatgaaatgggttcaagatgaatttgtcaacttttgtcttccattgttcagtatttttaattatcactgtaaataacattaccacaaggcaaaaaaaaaagaaaa

SEQ ID NO: 14614 - DNA, 3898 bp, Homo sapiens
ctgttccagacttctcagggtttttacagcacaaacaactgcatacggcccgaggggaggctgaaaaggacttgtgtgtggtggttttattgcctgtcatcactttgctggcctcctcccgactggagcctggaggttcacagtggatttctttctgccgaagacaccaaggcactgaggaaggatcccttctccttctgttgactctttctatttttatggtttaagtttatctattcatggggctgaaaagcgtttgcaaatccatcaacggcgaagtgtggcaagccgcccagcgtcacgtcgtcgcctgcctgtggtcaggcattcctcactcccaccaggcagaaggtcaataaaaatggaggcaagctcttctggaatcactaatggaaaaaccaaagtcttccacccagtggccaaggatgtcaatattctttttgatgaattagaagctgtcagcagtccttgcaaagatgacgattctcttcttcaccctggaaacctgactagtacttcagatgatgccagcagattggaagccgggggagagacagtgccagaaagaaacaaatcaaatggactttactttcgagatggaaagtgtcgaattgactacatccttgtgtacagaaaatccaacccccagactgaaaagagagaagtatttgaaagaaacattagagcagaaggattgcaaatggagaaagagtcctctctaataaatagtgacattatctttgtgaagttgcatgccccatgggaagtccttggaagatatgcagaacaaatgaatgtaagaatgcctttcaggagaaaaatctattacctgccccgccgttacaagttcatgagcaggatcgataaacaaataagcaggcttcggagatggttacctaagaagccaatgaggctggacaaggagacactgccggacctggaggagaatgactgctacactgcccctttcagccagcaaaggatccatcacttcatcatacacaacaaagaaacgttcttcaacaatgccacaagaagtagaatcgtgcatcacattttacaaagaataaaatatgaagaaggaaaaaacaagattggtctgaatcgtttgcttaccaatggctcctatgaagctgcgtttcccctgcatgagggaagttatagaagtaaaaactccattcgaacccatggagcagaaaaccaccgacatctactctatgagtgctgggcctcctggggcgtgtggtataaataccaacctttggatcttgtaaggcggtactttggagagaagattgggttatattttgcctggttgggctggtacaccggcatgctcttcccagctgccttcattggattgtttgtctttttgtatggcgtcaccactctggatcacagccaagtcagtaaagaagtctgccaagctacagatatcatcatgtgtcctgtgtgtgataaatactgtccattcatgaggctgtcagacagctgtgtatatgccaaggtaacccacctttttgacaatggagccactgtcttctttgctgttttcatggcagtctgggcaacagttttcctggagttttggaaaagacggcgagcagtaattgcttatgactgggatttgatagactgggaagaagaggaggaagaaatacgaccccagtttgaagccaagtattccaagaaagagcggatgaatccaatttctggaaagccagaaccttatcaagcatttacagataaatgcagcagacttatcgtttctgcatctggaatattttttatgatctgcgtggtgattgctgccgtgttcgggatcgtcatttaccgggtggtgactgtcagcactttcgctgcctttaagtgggcgttaatcaggaataactctcaggttgcaaccacagggactgctgtgtgcatcaacttctgtatcattatgttgctgaatgtgctctatgaaaaagttgccctgcttctgacgaatttagaacagcctcgcacagagtctgagtgggagaacagcttcaccctgaaaatgtttctttttcagtttgtcaatctgaacagctccacattttacatcgcattcttcctcggaagatttacaggacacccaggtgcctacttgaggctgataaacaggtggagactagaagagtgccaccctagtggatgccttattgatctgtgtatgcaaatgggtattataatggtgctaaagcagacctggaataatttcatggaacttggctacccgttaattcagaattggtggactagaagaaaagtacgacaagaacatggacctgaaaggaaaataagtttcccacaatgggaaaaggactataaccttcagccgatgaatgcctatggactcttcgatgaatacttagaaatgattcttcagtttggattcacaactatctttgtggcagcttttcccctagcaccacttctggccttactgaataacataattgaaattcgacttgatgcttacaaatttgtcacacagtggaggagacctttagcttcaagggccaaagacataggaatttggtatggaattcttgaaggcattggaattctctctgttatcacaaatgcatttgtcatagcgataacatctgactttatccctcgcttggtgtatgcttataagtatggaccttgtgcaggccaaggagaagctgggcaaaagtgcatggttggctatgtgaatgccagcttgtctgtatttcgaatttctgactttgagaaccgatctgagcctgaatctgatggcagtgagttctcggggactcctcttaagtactgcagataccgggactaccgtgacccgcctcattcactggtgccctatggctacacactgcagttttggcatgtcctagctgctcgattagcttttatcattgtctttgagcacctcgtgttttgtataaagcacctcatttcatatctgatcccagacctcccaaaagacctaagggatcgaatgagaagagagaagtacttgattcaggagatgatgtatgaagcagaactggaacgtctccagaaggaacgaaaggagaggaagaagaatggaaaagcacaccacaacgagtggccgtgaccataaaatagtccctttccaggccaaggacctgaattctgtttacttcttctggctgtgcaaaagcacactcaagtgaatgactaaaaatgcaaccacagtgcatgttgcagataccggcggccgcaggaggggcagcatccagtagaggactggcgttggagtcacactgctgtgaaatcacgttgcagtccagcgcacaattgctatctatccatagaccattcttgaccaagcaagcatgcacattatgggcagttacattctcaagtttttaaaatcaaggggaacttgtatactgggcctgtttttcagcctgtttgctaccttttttgcattctatcccatgtgaattttacagacactgggctaaaaagggtattcagacacatggacacacattcctagaatgtcatcatatggtcctaattccatgtcaccaacaacacagacaagaccctgtttacaactttttctttccttttttttaattttagacctttctgagaagattattatatatgacatatctatagctatgtgtatggccatagatgtatttctgtgtgtacatatgtatagtcatgtattcctgcatatgtacatacaaatacagagatatataaagtacatagaaattccttacttgtaaatagccaaaaagtactgacatgagtgaattttcacatttaaatagtcatcaatatgaagccatgattaatgcttgtataatgtgatgcaataaaatttaaaataaatttctgcacatggaat

SEQ ID NO: 14615 - DNA, 2034 bp, Homo sapiens
gcggccgcgggggcccctcagcggtttcccgaacggcccgactcgggcgctcctccgtgtcgcggtcgccgaccctccgcgtcccgccaacgccgccgctgcaccagtctccgggccgggctcggcgggccccgcagccgcagccatggggtgttggggtcggaaccggggccggctgctgtgcatgctggcgctgaccttcatgttcatggtgctggaggtggtggtgagccgggtgacctcgtcgctggcgatgctctccgactccttccacatgctgtcggacgtgctggcgctggtggtggcgctggtggccgagcgcttcgcccggcggacccacgccacccagaagaacacgttcggctggatccgagccgaggtaatgggggctctggtgaacgccatcttcctgactggcctctgtttcgccatcctgctggaggccatcgagcgcttcatcgagccgcacgagatgcagcagccgctggtggtccttggggtcggcgtggccgggctgctggtcaacgtgctggggctctgcctcttccaccatcacagcggcttcagccaggactccggccacggccactcgcacgggggtcacggccacggccacggcctccccaaggggcctcgcgttaagagcacccgccccgggagcagcgacatcaacgtggccccgggcgagcagggtcccgaccaggaggagaccaacaccctggtggccaataccagcaactccaacgggctgaaattggaccccgcagacccagaaaaccccagaagtggtgatacagtggaagtacaagtgaatggaaatcttgtcagagaacctgaccatatggaactggaagaagatagggctggacaacttaacatgcgtggagtttttctgcatgtccttggagatgccttgggttcagtgattgtagtagtaaatgccttagtcttttacttttcttggaaaggttgttctgaaggggatttttgtgtgaatccatgtttccctgacccctgcaaagcatttgtagaaataattaatagtactcatgcatcagtttatgaggctggtccttgctgggtgctatatttagatccaactctttgtgttgtaatggtttgtatacttctttacacaacctatccattacttaaggaatctgctcttattcttctacaaactgttcctaaacaaattgatatcagaaatttgataaaagaacttcgaaatgttgaaggagttgaggaagttcatgaattacatgtttggcaacttgctggaagcagaatcattgccactgctcacataaaatgtgaagatccaacatcatacatggaggtggctaaaaccattaaagacgtttttcataatcacggaattcacgctactaccattcagcctgaatttgctagtgtaggctctaaatcaagtgtagttccgtgtgaacttgcctgcagaacccagtgtgctttgaagcaatgttgtgggacactaccacaagccccttctggaaaggatgcagaaaagaccccagcagttagcatttcttgtttagaacttagtaacaatctagagaagaagcccaggaggactaaagctgaaaacatccctgctgttgtgatagagattaaaaacatgccaaacaaacaacctgaatcatctttgtgagtcttgaaaaagatgtgatatttgacttttgctttaaactgcaagaggaaaaagactccactgaaattctaagtttgccaagtagtgtaattgaagtccttgtctggtcacacagtttaattctatttttgtaagaacataatgggactgcataacagagttctatattacaattttgtgattattagtacagagtacagctatgctgtgactgttttggaaagccagttttaacactatgttacatttttgtttaaagtaagttaaaccttatataacataatgacatttgatttctggatttttcccatgataaaaattagggggataaataaaattgttactggaaaaaaaaaaaaaaaaaa

SEQ ID NO: 14616 - DNA, 1258 bp, Homo sapiens
tccactcacagcctgaagcatacccggcaggggctgtccccaggcccaacaagcaaagggcccagtagcgagggccactggagcccatctccggggggctgggcaggaagtagggtggggtttggggtagggatctggtaccctgggactgctgcaactcaaactaaccaacccactgggagaagatgcctgggggtccaggagtcctccaagctctgcctgccaccatcttcctcctcttcctgctgtctgctgtctacctgggccctgggtgccaggccctgtggatgcacaaggtcccagcatcattgatggtgagcctgggggaagacgcccacttccaatgcccgcacaatagcagcaacaacgccaacgtcacctggtggcgcgtcctccatggcaactacacgtggccccctgagttcttgggcccgggcgaggaccccaatggtacgctgatcatccagaatgtgaacaagagccatgggggcatatacgtgtgccgggtccaggagggcaacgagtcataccagcagtcctgcggcacctacctccgcgtgcgccagccgccccccaggcccttcctggacatgggggagggcaccaagaaccgaatcatcacagccgaggggatcatcctcctgttctgcgcggtggtgcctgggacgctgctgctgttcaggaaacgatggcagaacgagaagctcgggttggatgccggggatgaatatgaagatgaaaacctttatgaaggcctgaacctggacgactgctccatgtatgaggacatctcccggggcctccagggcacctaccaggatgtgggcagcctcaacataggagatgtccagctggagaagccgtgacacccctactcctgccaggctgcccccgcctgctgtgcacccagctccagtgtctcagctcacttccctgggacattctcctttcagcccttctgggggcttccttagtcatattcccccagtggggggtgggagggtaacctcactcttctccaggccaggcctccttggactcccctgggggtgtcccactcttcttccctctaaactgccccacctcctaacctaatccccccgccccgctgcctttcccaggctcccctcaccccagcgggtaatgagcccttaatcgctgcctctaggggagctgattgtagcagcctcgttagtgtcaccccctcctccctgatctgtcagggccacttagtgataataaattcttcccaactgca

SEQ ID NO: 14617 - DNA, 1300 bp, Homo sapiens
ctgcagccggtgcagttacacgttttcctccaaggagcctcggacgttgtcacgggtttggggtcggggacagagcggtgaccatggccaggctggcgttgtctcctgtgcccagccactggatggtggcgttgctgctgctgctctcagctgagccagtaccagcagccagatcggaggaccggtaccggaatcccaaaggtagtgcttgttcgcggatctggcagagcccacgtttcatagccaggaaacggggcttcacggtgaaaatgcactgctacatgaacagcgcctccggcaatgtgagctggctctggaagcaggagatggacgagaatccccagcagctgaagctggaaaagggccgcatggaagagtcccagaacgaatctctcgccaccctcaccatccaaggcatccggtttgaggacaatggcatctacttctgtcagcagaagtgcaacaacacctcggaggtctaccagggctgcggcacagagctgcgagtcatgggattcagcaccttggcacagctgaagcagaggaacacgctgaaggatggtatcatcatgatccagacgctgctgatcatcctcttcatcatcgtgcctatcttcctgctgctggacaaggatgacagcaaggctggcatggaggaagatcacacctacgagggcctggacattgaccagacagccacctatgaggacatagtgacgctgcggacaggggaagtgaagtggtctgtaggtgagcacccaggccaggagtgagagccaggtcgccccatgacctgggtgcaggctccctggcctcagtgactgcttcggagctgcctggctcatggcccaacccctttcctggaccccccagctggcctctgaagctggcccaccagagctgccatttgtctccagcccctggtccccagctcttgccaaagggcctggagtagaaggacaacagggcagcaacttggagggagttctctggggatggacgggacccagccttctgggggtgctatgaggtgatccgtccccacacatgggatgggggaggcagagactggtccagagcccgcaaatggactcggagccgagggcctcccagcagagcttgggaagggccatggacccaactgggccccagaagagccacaggaacatcattcctctcccgcaaccactcccaccccagggaggccctggcctccagtgccttcccccgtggaataaacggtgtgtcctgagaaaccacaaaaaaaaaaaaaaaaaaaaaaaaaaaaaaaaaaaaaaaa

SEQ ID NO: 14618 - DNA, 1263 bp, Homo sapiens
ttcctttctctctcagctctccgtctctctttctctctcagcctctttctttctccctgtctcccccactgtcagcacctcttctgtgtggtgagtggaccgcttaccccactaggtgaagatgtcagcccaggagagctgcctcagcctcatcaagtacttcctcttcgttttcaacctcttcttcttcgtcctcggcagcctgatcttctgcttcggcatctggatcctcattgacaagaccagcttcgtgtcctttgtgggcttggccttcgtgcctctgcagatctggtccaaagtcctggccatctcaggaatcttcaccatgggcatcgccctcctgggttgtgtgggggccctcaaggagctccgctgcctcctgggcctgtattttgggatgctgctgctcctgtttgccacacagatcaccctgggaatcctcatctccactcagcgggcccagctggagcgaagcttgcgggacgtcgtagagaaaaccatccaaaagtacggcaccaaccccgaggagaccgcggccgaggagagctgggactatgtgcagttccagctgcgctgctgcggctggcactacccgcaggactggttccaagtcctcatcctgagaggtaacgggtcggaggcgcaccgcgtgccctgctcctgctacaacttgtcggcgaccaacgactccacaatcctagataaggtgatcttgccccagctcagcaggcttggacacctggcgcggtccagacacagtgcagacatctgcgctgtccctgcagagagccacatctaccgcgagggctgcgcgcagggcctccagaagtggctgcacaacaaccttatttccatagtgggcatttgcctgggcgtcggcctactcgagctcgggttcatgacgctctcgatattcctgtgcagaaacctggaccacgtctacaaccggctcgctcgataccgttaggccccgccctccccaaagtcccgccccgcccccgtcacgtgcgctgggcacttccctgctgcctgtaaatatttgtttaatccccagttcgcctggagccctccgccttcacattcccctggggacccacgtggctgcgtgcccctgctgctgtcacctctcccacgggacctggggctttcgtccacagcttcctgtccccatctgtcggcctaccaccacccacaagattatttttcacccaaacctcaaataaatcccctgcgtttttggtaaaaaaaaaaaaaaaaaaaaaa

SEQ ID NO: 14619 - DNA, 1846 bp, Homo sapiens
gcataactgatggagggccgggcgcggtaagagcgtctcgggggagtggggcaaggcggccgggcccctcccattccgccttttcttcagcgtcctacccgcggcactggctgcgagcgccgggccacctgcgagtgtgcgcagggactctggacacccgcggcggcgagctgagggagcagtctccacgaggacccaggcggaccctctggcgccatgcgcgccctccccggcctgctggaggccagggcgcgtacgccccggctgctcctcctccagtgccttctcgctgccgcgcgcccaagctcggcggacggcagtgccccagattcgccttttacaagtccacctctcagagaagaaataatggcaaataacttttccttggagagtcataacatatcactgactgaacattctagtatgccagtagaaaaaaatatcactttagaaaggccttctaatgtaaatctcacatgccagttcacaacatctggggatttgaatgcagtaaatgtgacttggaaaaaagatggtgaacaacttgagaataattatcttgtcagtgcaacaggaagcaccttgtatacccaatacaggttcaccatcattaatagcaaacaaatgggaagttattcttgtttctttcgagaggaaaaggaacaaaggggaacatttaatttcaaagtccctgaacttcatgggaaaaacaagccattgatctcttacgtaggggattctactgtcttgacatgtaaatgtcaaaattgttttcctttaaattggacctggtacagtagtaatgggagtgtaaaggttcctgttggtgttcaaatgaataaatatgtgatcaatggaacatatgctaacgaaacaaagctgaagataacacaacttttggaggaagatggggaatcttactggtgccgtgcactattccaattaggcgagagtgaagaacacattgagcttgtggtgctgagctatttggtgcccctcaaaccatttcttgtaatagtggctgaggtgattcttttagtggccaccattctgctttgtgaaaagtacacacaaaagaaaaagaagcactcagatgaggggaaagaatttgagcagattgaacagctgaaatcagatgatagcaatggtatagaaaataatgtccccaggcatagaaaaaatgagtctctgggccagtgaatacaaaacatcatgtcgagaatcattggaagatatacagagttcgtatttcagctttgtttatccttcctgttaagagcctctgagtttttagttttaaaaggatgaaaagcttatgcaacatgctcagcaggagcttcatcaacgatatatgtcagatctaaaggtatattttcattctgtaattatgttacataaaagcaatgtaaatcagaataaatatgttagaccagaataaaattaattatattctggtcttcaaaggacacacagaacagatatcagcagaatcacttaatacttcatagaacaaaaatcactcaaaacctgtttataaccaaagaattcatgaaaaagaaagcctttgccatttgtcttagaaagttatttttttaaaaaaaatcatacttactattagtatctatggaagtatatgtaacaatttttatgtaaaggtcatctttctgtgatagtgaaaaaatatgtctttactaagttgaaatgaatactttctgcctttgctaatgatagttattctacaatctccacaagaaaaatataccttttatccggaaatattggtttaaggcaaataaataaaactgtgcttgctctaaagctctgcactacaaaaaaaaaaaaaaaa

SEQ ID NO: 14620 - DNA, 2218 bp, Homo sapiens
cttctctctccattcagtgcacgcgttactttggctaaaaggaggtgagcggcactctgcccttccagagcaagcatggagcaacaggatcagagcatgaaggaagggaggctgacgcttgtgcttgccctggcaaccctgatagctgcctttgggtcatccttccagtatgggtacaacgtggctgctgtcaactccccagcactgctcatgcaacaattttacaatgagacttactatggtaggaccggtgaattcatggaagacttccccttgacgttgctgtggtctgtaaccgtgtccatgtttccatttggagggtttatcggatccctcctggtcggccccttggtgaataaatttggcagaaaaggggccttgctgttcaacaacatattttctatcgtgcctgcgatcttaatgggatgcagcagagtcgccacatcatttgagcttatcattatttccagacttttggtgggaatatgtgcaggtgtatcttccaacgtggtccccatgtacttaggggagctggcccctaaaaacctgcggggggctctcggggtggtgccccagctcttcatcactgttggcatccttgtggcccagatctttggtcttcggaatctccttgcaaacgtagatggctggccgatcctgctggggctgaccggggtccccgcggcgctgcagctccttctgctgcccttcttccccgagagccccaggtacctgctgattcagaagaaagacgaagcggccgccaagaaagccctacagacgctgcgcggctgggactctgtggacagggaggtggccgagatccggcaggaggatgaggcagagaaggccgcgggcttcatctccgtgctgaagctgttccggatgcgctcgctgcgctggcagctgctgtccatcatcgtcctcatgggcggccagcagctgtcgggcgtcaacgctatctactactacgcggaccagatctacctgagcgccggcgtgccggaggagcacgtgcagtacgtgacggccggcaccggggccgtgaacgtggtcatgaccttctgcgccgtgttcgtggtggagctcctgggtcggaggctgctgctgctgctgggcttctccatctgcctcatagcctgctgcgtgctcactgcagctctggcactgcaggacacagtgtcctggatgccatacatcagcatcgtctgtgtcatctcctacgtcataggacatgccctcgggcccagtcccatacccgcgctgctcatcactgagatcttcctgcagtcctctcggccatctgccttcatggtggggggcagtgtgcactggctctccaacttcaccgtgggcttgatcttcccgttcatccaggagggcctcggcccgtacagcttcattgtcttcgccgtgatctgcctcctcaccaccatctacatcttcttgattgtcccggagaccaaggccaagacgttcatagagatcaaccagattttcaccaagatgaataaggtgtctgaagtgtacccggaaaaggaggaactgaaagagcttccacctgtcacttcggaacagtgactctggagaggaagccagtggagctggtctgccaggggcttcccactttggcttatttttctgacttctagctgtctgtgaatatccagaaataaaacaactctgatgtggaatgcagtcctcatctccagcctccccaccccagtgggaactgtgcaaagggctgccttgctgttcttgaagctgggctgtctctctccatgttggcctgtcaccagacccgagtcaattaaacagctggtcctccactttgctggttcagccttcgtgtggctcctggtaacgtggctccaccttgatgggtcaacctttgtgtggctcctggtaacataacaacaacagttactatagtggtgagatggaaggaatcaaattttgccagagaaactaactcggtggccccaacaggtcttccggggccatgggcatttgtttagagccaaattcatcctcttaccagatccttttccagaaatacctgtctaggaaggtgtgatgtcagaaacaatgacatccagaaagctgaggaacaggttcctgtggagacactgagtcagaattcttcatccaaattattttgttagtggaaaatggaattgcttctgtgtagtcaataaaatgaacctgatcacttttc

SEQ ID NO: 14621 - DNA, 6891 bp, Homo sapiens
ggtggcctctgtggccgtccaggctagcggcggcccgcaggcggcggggagaaagactctctcacctggtcttgcggctgtggccaccgccggccaggggtgtggagggcgtgctgccggagacgtccgccgggctctgcagttccgccgggggtcgggcagctatggagccgcggcccacggcgccctcctccggcgccccgggactggccggggtcggggagacgccgtcagccgctgcgctggccgcagccagggtggaactgcccggcacggctgtgccctcggtgccggaggatgctgcgcccgcgagccgggacggcggcggggtccgcgatgagggccccgcggcggccggggacgggctgggcagacccttggggcccaccccgagccagagccgtttccaggtggacctggtttccgagaacgccgggcgggccgctgctgcggcggcggcggcggcggcggcagcggcggcggctggtgctggggcgggggccaagcagacccccgcggacggggaagccagcggcgagagcgagccggctaaaggcagcgaggaagccaagggccgcttccgcgtgaacttcgtggacccagctgcctcctcgtcggctgaagacagcctgtcagatgctgccggggtcggagtcgacgggcccaacgtgagcttccagaacggcggggacacggtgctgagcgagggcagcagcctgcactccggcggcggcggcggcagtgggcaccaccagcactactattatgatacccacaccaacacctactacctgcgcaccttcggccacaacaccatggacgctgtgcccaggatcgatcactaccggcacacagccgcgcagctgggcgagaagctgctccggcctagcctggcggagctccacgacgagctggaaaaggaaccttttgaggatggctttgcaaatggggaagaaagtactccaaccagagatgctgtggtcacgtatactgcagaaagtaaaggagtcgtgaagtttggctggatcaagggtgtattagtacgttgtatgttaaacatttggggtgtgatgcttttcattagattgtcatggattgtgggtcaagctggaataggtctatcagtccttgtaataatgatggccactgttgtgacaactatcacaggattgtctacttcagcaatagcaactaatggatttgtaagaggaggaggagcatattatttaatatctagaagtctagggccagaatttggtggtgcaattggtctaatcttcgcctttgccaacgctgttgcagttgctatgtatgtggttggatttgcagaaaccgtggtggagttgcttaaggaacattccatacttatgatagatgaaatcaatgatatccgaattattggagccattacagtcgtgattcttttaggtatctcagtagctggaatggagtgggaagcaaaagctcagattgttcttttggtgatcctacttcttgctattggtgatttcgtcataggaacatttatcccactggagagcaagaagccaaaagggttttttggttataaatctgaaatatttaatgagaactttgggcccgattttcgagaggaagagactttcttttctgtatttgccatcttttttcctgctgcaactggtattctggctggagcaaatatctcaggtgatcttgcagatcctcagtcagccatacccaaaggaacactcctagccattttaattactacattggtttacgtaggaattgcagtatctgtaggttcttgtgttgttcgagatgccactggaaacgttaatgacactatcgtaacagagctaacaaactgtacttctgcagcctgcaaattaaactttgatttttcatcttgtgaaagcagtccttgttcctatggcctaatgaacaacttccaggtaatgagtatggtgtcaggatttacaccactaatttctgcaggtatattttcagccactctttcttcagcattagcatccctagtgagtgctcccaaaatatttcaggctctatgtaaggacaacatctacccagctttccagatgtttgctaaaggttatgggaaaaataatgaacctcttcgtggctacatcttaacattcttaattgcacttggattcatcttaattgctgaactgaatgttattgcaccaattatctcaaacttcttccttgcatcatatgcattgatcaatttttcagtattccatgcatcacttgcaaaatctccaggatggcgtcctgcattcaaatactacaacatgtggatatcacttcttggagcaattctttgttgcatagtaatgttcgtcattaactggtgggctgcattgctaacatatgtgatagtccttgggctgtatatttatgttacctacaaaaaaccagatgtgaattggggatcctctacacaagccctgacttacctgaatgcactgcagcattcaattcgtctttctggagtggaagaccacgtgaaaaactttaggccacagtgtcttgttatgacaggtgctccaaactcacgtccagctttacttcatcttgttcatgatttcacaaaaaatgttggtttgatgatctgtggccatgtacatatgggtcctcgaagacaagccatgaaagagatgtccatcgatcaagccaaatatcagcgatggcttattaagaacaaaatgaaggcattttatgctccagtacatgcagatgacttgagagaaggtgcacagtatttgatgcaggctgctggtcttggtcgtatgaagccaaacacacttgtccttggatttaagaaagattggttgcaagcagatatgagggatgtggatatgtatataaacttatttcatgatgcttttgacatacaatatggagtagtggttattcgcctaaaagaaggtctggatatatctcatcttcaaggacaagaagaattattgtcatcacaagagaaatctcctggcaccaaggatgtggtagtaagtgtggaatatagtaaaaagtccgatttagatacttccaaaccactcagtgaaaaaccaattacacacaaagttgaggaagaggatggcaagactgcaactcaaccactgttgaaaaaagaatccaaaggccctattgtgcctttaaatgtagctgaccaaaagcttcttgaagctagtacacagtttcagaaaaaacaaggaaagaatactattgatgtctggtggctttttgatgatggaggtttgaccttattgataccttaccttctgacgaccaagaaaaaatggaaagactgtaagatcagagtattcattggtggaaagataaacagaatagaccatgaccggagagcgatggctactttgcttagcaagttccggatagacttttctgatatcatggttctaggagatatcaataccaaaccaaagaaagaaaatattatagcttttgaggaaatcattgagccatacagacttcatgaagatgataaagagcaagatattgcagataaaatgaaagaagatgaaccatggcgaataacagataatgagcttgaactttataagaccaagacataccggcagatcaggttaaatgagttattaaaggaacattcaagcacagctaatattattgtcatgagtctcccagttgcacgaaaaggtgctgtgtctagtgctctctacatggcatggttagaagctctatctaaggacctaccaccaatcctcctagttcgtgggaatcatcagagtgtccttaccttctattcataaatgttctatacagtggacagccctccagaatggtacttcagtgcctagtgtagtaactgaaatcttcaatgacacattaacatcacaatggcgaatggtgacttttctttcacgatttcattaatttgaaagcacacaggaaagttgctccattgataacgtgtatggagacttcggttttagtcaattccatatctcaatcttaatggtgattcttctctgttgaactgaagtttgtgagagtagttttcctttgctacttgaatagcaataaaagcgtgttaactttttgattgatgaaagaagtacaaaaagcctttagccttgaggtgccttctgaaattaaccaaatttcatccatatatcctcttttataaacttatagaatgtcaaactttgccttcaactgtttttatttctagtctcttccactttaaaacaaaatgaacactgcttgtcttcttccattgaccatttagtgttgagtactgtatgtgttttgttaattctataaaggtatctgttagatattaaaggtgagaattagggcaggttaatcaaaaatggggaaggggaaatggtaaccaaaaagtaaccccatggtaaggtttatatgagtatatgtgaatatagagctaggaaaaaaagcccccccaaatacctttttaacccctctgattggctattattactatatttattattatttattgaaaccttagggaagattgaagattcatcccatacttctatataccatgcttaaaaatcacgtcattctttaaacaaaaatactcaagatcatttatatttatttggagagaaaactgtcctaatttagaatttccctcaaatctgagggacttttaagaaatgctaacagatttttctggaggaaatttagacaaaacaatgtcatttagtagaatatttcagtatttaagtggaatttcagtatactgtactatcctttataagtcattaaaataatgtttcatcaaatggttaaatggaccactggtttcttagagaaatgtttttaggcttaattcattcaattgtcaagtacacttagtcttaatacactcaggtttgaacagattattctgaatattaaaatttaatccattcttaatattttaaaacttttgttaagaaaaactgccagtttgtgcttttgaaatgtctgttttgacatcatagtctagtaaaattttgacagtgcatatgtactgttactaaaagctttatatgaaattattaatgtgaagtttttcatttataattcaaggaaggatttcctgaaaacatttcaagggatttatgtctacatatttgtgtgtgtgtgtgtatatatatgtaatatgcatacacagatgcatatgtgtatatataatgaaatttatgttgctggtattttgcattttaaagtgatcaagattcattaggcaaactttggtttaagtaaacatatgttcaaaatcagattaacagatacaggtttcatagagaacaaaggtgatcatttgaagggcatgctgtaatttcacacaattttccagttcaaaaatggagaatacttcgcctaaaatactgttaagtgggttaattgatacaagtttctgtggtggaaaatttatgcaggttttcacgaatccttttttttttttttttttttttttgagacggagtcttgctctgttgccacgctggaatgcagtaacgtgatcttggctcactgcgacctccacctccccagttcaagcgattctcctgcctcagcctccctagtagctgggactacgggtgcacgccaccatgcccagctaatttttgtattttgagtagagacagggtttcaccgtgttggctaggatggtgtctatctcttgaccttgtgatccacccgcctcagcctcccagagtgctgggattacaggtgcgagccactgcgcctggctggttttcatgaatcttgatagacatctataacgttattattttcagtggtgtgcagcatttttgcttcatgagtatgacctaggtatagagatctgataacttgaattcagaatattaagaaaatgaagtaactgattttctaaaaaaaaaaaaaaaaaaaatttctacattataactcacagcattgttccattgcaggttttgcaatgtttgggggtaaagacagtagaaatattattcagtaaacaataatgtgtgaacttttaagatggataatagggcatggactgagtgctgctatcttgaaatgtgcacaggtacacttaccttttttttttttttttttaagtttttcccattcaggaaaacaacattgtgatctgtactacaggaaccaaatgtcatgcgtcatacatgtgggtataaagtacataaaatatatctaactattcataatgtggggtgggtaatactgtctgtgaaataatgtaagaagcttttcacttaaaaaaaatgcattactttcacttaacactagacaccaggtcgaaaattttcaaggttatagtacttatttcaacaattcttagagatgctagctagtgttgaagctaaaaatagctttatttatgctgaattgtgatttttttatgccaaattttttttagttctaatcattgatgatagcttggaaataaataattatgccatggcatttgacagttcattattcctataagaattaaattgagtttagagagaatggtggtgttgagctgattattaacagttactgaaatcaaatatttatttgttacattattccatttgtattttaggtttccttttacattctttttatatgcattctgacattacatattttttaagactatggaaataatttaaagatttaagctctggtggatgattatctgctaagtaagtctgaaaatgtaatattttgataatactgtaatatacctgtcacacaaatgcttttctaatgttttaaccttgagtattgcagttgctgctttgtacagaggttactgcaataaaggaagtggattcattaaacctatttaatgtccaaaaaaaaaaaaaaaaaaaaaaaaaaaaaaaa

SEQ ID NO: 14622 - DNA, 1099 bp, Homo sapiens
tcctgcgttgctgggaagttctggaaggaagcatgtgctccagaggttgggattcgtgtctggctctggaattgctactgctgcctctgtcactcctggtgaccagcattcaaggtcacttggtacatatgaccgtggtctccggcagcaacgtgactctgaacatctctgagagcctgcctgagaactacaaacaactaacctggttttatactttcgaccagaagattgtagaatgggattccagaaaatctaagtactttgaatccaaatttaaaggcagggtcagacttgatcctcagagtggcgcactgtacatctctaaggtccagaaagaggacaacagcacctacatcatgagggtgttgaaaaagactgggaatgagcaagaatggaagatcaagctgcaagtgcttgaccctgtacccaagcctgtcatcaaaattgagaagatagaagacatggatgacaactgttatttgaaactgtcatgtgtgatacctggcgagtctgtaaactacacctggtatggggacaaaaggcccttcccaaaggagctccagaacagtgtgcttgaaaccacccttatgccacataattactccaggtgttatacttgccaagtcagcaattctgtgagcagcaagaatggcacggtctgcctcagtccaccctgtaccctggcccggtcctttggagtagaatggattgcaagttggctagtggtcacggtgcccaccattcttggcctgttacttacctgagatgagctcttttaactcaagcgaaacttcaaggccagaagatcttgcctgttggtgatcatgctcctcaccaggacagagactgtataggctgaccagaagcatgctgctgaattatcaacgaggattttcaagttaacttttaaatactggttattatttaattttatatccctttgttgttttctagtacacagagatatagagatacacatgcttttttcccacccaaaattgtgacaacattatgtgaatgttttattattttttaaaataaacatttgatataattatcaattaactgaaaaaaaaaaaaaaaaaaaaaaaaaaaaaaa

SEQ ID NO: 14623 - DNA, 1318 bp, Homo sapiens
ctgagctctgagcgcctgcggtctcctgtgtgctgctctctgtggggtcctgtagacccagagaggctcagctgcactcgcccggctgggagagctgggtgtggggaacatggccgggcctccgaggctcctgctgctgcccctgcttctggcgctggctcgcggcctgcctggggccctggctgcccaagaggtgcagcagtctccccactgcacgactgtccccgtgggagcctccgtcaacatcacctgctccaccagcgggggcctgcgtgggatctacctgaggcagctcgggccacagccccaagacatcatttactacgaggacggggtggtgcccactacggacagacggttccggggccgcatcgacttctcagggtcccaggacaacctgactatcaccatgcaccgcctgcagctgtcggacactggcacctacacctgccaggccatcacggaggtcaatgtctacggctccggcaccctggtcctggtgacagaggaacagtcccaaggatggcacagatgctcggacgccccaccaagggcctctgccctccctgccccaccgacaggctccgccctccctgacccgcagacagcctctgccctccctgacccgccagcagcctctgccctccctgcggccctggcggtgatctccttcctcctcgggctgggcctgggggtggcgtgtgtgctggcgaggacacagataaagaaactgtgctcgtggcgggataagaattcggcggcatgtgtggtgtacgaggacatgtcgcacagccgctgcaacacgctgtcctcccccaaccagtaccagtgacccagtgggcccctgcacgtcccgcctgtggtccccccagcaccttccctgccccaccatgccccccaccctgccacacccctcaccctgctgtcctcccacggctgcagcagagtttgaagggcccagccgtgcccagctccaagcagacacacaggcagtggccaggccccacggtgcttctcagtggacaatgatgcctcctccgggaagccttccctgcccagcccacgccgccaccgggaggaagcctgactgtcctttggctgcatctcccgaccatggccaaggagggcttttctgtgggatgggcctgggcacgcggccctctcctgtcagtgccggcccacccaccagcaggcccccaacccccaggcagcccggcagaggacgggaggagaccagtcccccacccagccgtaccagaaataaaggcttctgtgcttcctttaaaaaaaaaaaaaaaaaaaaaaaaaaaaaaaaaaa

SEQ ID NO: 14624 - DNA, 2592 bp, Homo sapiens
cttccaggttgggtcggacctgaacccctaaaagcggaaccgcctcccgccctcgccatcccggagctgagtcgccggcggcggtggctgctgccagacccggagtttcctctttcactggatggagctgaactttgggcggccagagcagcacagctgtccggggatcgctgcacgctgagctccctcggcaagacccagcggcggctcgggatttttttgggggggcggggaccagccccgcgccggcaccatgttcctggcgaccctgtacttcgcgctgccgctcttggacttgctcctgtcggccgaagtgagcggcggagaccgcctggattgcgtgaaagccagtgatcagtgcctgaaggagcagagctgcagcaccaagtaccgcacgctaaggcagtgcgtggcgggcaaggagaccaacttcagcctggcatccggcctggaggccaaggatgagtgccgcagcgccatggaggccctgaagcagaagtcgctctacaactgccgctgcaagcggggtatgaagaaggagaagaactgcctgcgcatttactggagcatgtaccagagcctgcagggaaatgatctgctggaggattccccatatgaaccagttaacagcagattgtcagatatattccgggtggtcccattcatatcagtggagcacattcccaaagggaacaactgcctggatgcagcgaaggcctgcaacctcgacgacatttgcaagaagtacaggtcggcgtacatcaccccgtgcaccaccagcgtgtccaacgatgtctgcaaccgccgcaagtgccacaaggccctccggcagttctttgacaaggtcccggccaagcacagctacggaatgctcttctgctcctgccgggacatcgcctgcacagagcggaggcgacagaccatcgtgcctgtgtgctcctatgaagagagggagaagcccaactgtttgaatttgcaggactcctgcaagacgaattacatctgcagatctcgccttgcggatttttttaccaactgccagccagagtcaaggtctgtcagcagctgtctaaaggaaaactacgctgactgcctcctcgcctactcggggcttattggcacagtcatgacccccaactacatagactccagtagcctcagtgtggccccatggtgtgactgcagcaacagtgggaacgacctagaagagtgcttgaaatttttgaatttcttcaaggacaatacatgtcttaaaaatgcaattcaagcctttggcaatggctccgatgtgaccgtgtggcagccagccttcccagtacagaccaccactgccactaccaccactgccctccgggttaagaacaagcccctggggccagcagggtctgagaatgaaattcccactcatgttttgccaccgtgtgcaaatttacaggcacagaagctgaaatccaatgtgtcgggcaatacacacctctgtatttccaatggtaattatgaaaaagaaggtctcggtgcttccagccacataaccacaaaatcaatggctgctcctccaagctgtggtctgagcccactgctggtcctggtggtaaccgctctgtccaccctattatctttaacagaaacatcatagctgcattaaaaaaatacaatatggacatgtaaaaagacaaaaaccaagttatctgtttcctgttctcttgtatagctgaaattccagtttaggagctcagttgagaaacagttccattcaactggaacattttttttttttccttttaagaaagcttcttgtgatcctttggggcttctgtgaaaaacctgatgcagtgctccatccaaactcagaaggctttgggatatgctgtattttaaagggacagtttgtaacttgggctgtaaagcaaactggggctgtgttttcgatgatgatgatgatcatgatgatgatcatcatgatcatgatgatgatcatcatgatcatgatgatgattttaacagttttacttctggcctttcctagctagagaaggagttaatatttctaaggtaactcccatatctcctttaatgacattgatttctaatgatataaatttcagcctacattgatgccaagcttttttgccacaaagaagattcttaccaagagtgggctttgtggaaacagctggtactgatgttcacctttatatatgtactagcattttccacgctgatgtttatgtactgtaaacagttctgcactcttgtacaaaagaaaaaacacctgtcacatccaaatatagtatctgtcttttcgtcaaaatagagagtggggaatgagtgtgccgattcaatacctcaatccctgaacgacactctcctaatcctaagccttacctgagtgagaagccctttacctaacaaaagtccaatatagctgaaatgtcgctctaatactctttacacatatgaggttatatgtagaaaaaaattttactactaaatgatttcaactattggctttctatattttgaaagtaatgatattgtctcatttttttactgatggtttaatacaaaatacacagagcttctttcccctca

SEQ ID NO: 14625 - DNA, 2919 bp, Homo sapiens
ggccagaagaaatctggcctcggaacacgccattctccgcgccgcttccaataaccactaacatccctaacgagcatccgagccgagggctctgctcggaaatcgtcctggcccaactcggcccttcgagctctcgaagattaccgcatctatttttttttcttttttttcttttcctagcgcagataaagtgagcccggaaagggaaggagggggcggggacaccattgccctgaaagaataaataagtaaataaacaaactggctcctcgccgcagctggacgcggtcggttgagtccaggttgggtcggacctgaacccctaaaagcggaaccgcctcccgccctcgccatcccggagctgagtcgccggcggcggtggctgctgccagacccggagtttcctctttcactggatggagctgaactttgggcggccagagcagcacagctgtccggggatcgctgcacgctgagctccctcggcaagacccagcggcggctcgggatttttttgggggggcggggaccagccccgcgccggcaccatgttcctggcgaccctgtacttcgcgctgccgctcttggacttgctcctgtcggccgaagtgagcggcggagaccgcctggattgcgtgaaagccagtgatcagtgcctgaaggagcagagctgcagcaccaagtaccgcacgctaaggcagtgcgtggcgggcaaggagaccaacttcagcctggcatccggcctggaggccaaggatgagtgccgcagcgccatggaggccctgaagcagaagtcgctctacaactgccgctgcaagcggggtatgaagaaggagaagaactgcctgcgcatttactggagcatgtaccagagcctgcagggaaatgatctgctggaggattccccatatgaaccagttaacagcagattgtcagatatattccgggtggtcccattcatatcagatgtttttcagcaagtggagcacattcccaaagggaacaactgcctggatgcagcgaaggcctgcaacctcgacgacatttgcaagaagtacaggtcggcgtacatcaccccgtgcaccaccagcgtgtccaacgatgtctgcaaccgccgcaagtgccacaaggccctccggcagttctttgacaaggtcccggccaagcacagctacggaatgctcttctgctcctgccgggacatcgcctgcacagagcggaggcgacagaccatcgtgcctgtgtgctcctatgaagagagggagaagcccaactgtttgaatttgcaggactcctgcaagacgaattacatctgcagatctcgccttgcggatttttttaccaactgccagccagagtcaaggtctgtcagcagctgtctaaaggaaaactacgctgactgcctcctcgcctactcggggcttattggcacagtcatgacccccaactacatagactccagtagcctcagtgtggccccatggtgtgactgcagcaacagtgggaacgacctagaagagtgcttgaaatttttgaatttcttcaaggacaatacatgtcttaaaaatgcaattcaagcctttggcaatggctccgatgtgaccgtgtggcagccagccttcccagtacagaccaccactgccactaccaccactgccctccgggttaagaacaagcccctggggccagcagggtctgagaatgaaattcccactcatgttttgccaccgtgtgcaaatttacaggcacagaagctgaaatccaatgtgtcgggcaatacacacctctgtatttccaatggtaattatgaaaaagaaggtctcggtgcttccagccacataaccacaaaatcaatggctgctcctccaagctgtggtctgagcccactgctggtcctggtggtaaccgctctgtccaccctattatctttaacagaaacatcatagctgcattaaaaaaatacaatatggacatgtaaaaagacaaaaaccaagttatctgtttcctgttctcttgtatagctgaaattccagtttaggagctcagttgagaaacagttccattcaactggaacattttttttttttccttttaagaaagcttcttgtgatcctttggggcttctgtgaaaaacctgatgcagtgctccatccaaactcagaaggctttgggatatgctgtattttaaagggacagtttgtaacttgggctgtaaagcaaactggggctgtgttttcgatgatgatgatgatcatgatgatgatcatcatgatcatgatgatgatcatcatgatcatgatgatgattttaacagttttacttctggcctttcctagctagagaaggagttaatatttctaaggtaactcccatatctcctttaatgacattgatttctaatgatataaatttcagcctacattgatgccaagcttttttgccacaaagaagattcttaccaagagtgggctttgtggaaacagctggtactgatgttcacctttatatatgtactagcattttccacgctgatgtttatgtactgtaaacagttctgcactcttgtacaaaagaaaaaacacctgtcacatccaaatatagtatctgtcttttcgtcaaaatagagagtggggaatgagtgtgccgattcaatacctcaatccctgaacgacactctcctaatcctaagccttacctgagtgagaagccctttacctaacaaaagtccaatatagctgaaatgtcgctctaatactctttacacatatgaggttatatgtagaaaaaaattttactactaaatgatttcaactattggctttctatattttgaaagtaatgatattgtctcatttttttactgatggtttaatacaaaatacacagagcttctttcccctcaaaaaaaaaaaaaaaaaa

SEQ ID NO: 14626 - DNA, 1579 bp, Homo sapiens
accaacccctaagatgagctttccatgtaaatttgtagccagcttccttctgattttcaatgtttcttccaaaggtgcagtctccaaagagattacgaatgccttggaaacctggggtgccttgggtcaggacatcaacttggacattcctagttttcaaatgagtgatgatattgacgatataaaatgggaaaaaacttcagacaagaaaaagattgcacaattcagaaaagagaaagagactttcaaggaaaaagatacatataagctatttaaaaatggaactctgaaaattaagcatctgaagaccgatgatcaggatatctacaaggtatcaatatatgatacaaaaggaaaaaatgtgttggaaaaaatatttgatttgaagattcaagagagggtctcaaaaccaaagatctcctggacttgtatcaacacaaccctgacctgtgaggtaatgaatggaactgaccccgaattaaacctgtatcaagatgggaaacatctaaaactttctcagagggtcatcacacacaagtggaccaccagcctgagtgcaaaattcaagtgcacagcagggaacaaagtcagcaaggaatccagtgtcgagcctgtcagctgtccagagaaaggtctggacatctatctcatcattggcatatgtggaggaggcagcctcttgatggtctttgtggcactgctcgttttctatatcaccaaaaggaaaaaacagaggagtcggagaaatgatgaggagctggagacaagagcccacagagtagctactgaagaaaggggccggaagccccaacaaattccagcttcaacccctcagaatccagcaacttcccaacatcctcctccaccacctggtcatcgttcccaggcacctagtcatcgtcccccgcctcctggacaccgtgttcagcaccagcctcagaagaggcctcctgctccgtcgggcacacaagttcaccagcagaaaggcccgcccctccccagacctcgagttcagccaaaacctccccatggggcagcagaaaactcattgtccccttcctctaattaaaaaagatagaaactgtctttttcaataaaaagcactgtggatttctgccctcctgatgtgcatatccgtacttccatgaggtgttttctgtgtgcagaacattgtcacctcctgaggctgtgggccacagccacctctgcatcttcgaactcagccatgtggtcaacatctggagtttttggtctcctcagagagctccatcacaccagtaaggagaagcaatataagtgtgattgcaagaatggtagaggaccgagcacagaaatcttagagatttcttgtcccctctcaggtcatgtgtagatgcgataaatcaagtgattggtgtgcctgggtctcactacaagcagcctatctgcttaagagactctggagtttcttatgtgccctggtggacacttgcccaccatcctgtgagtaaaagtgaaataaaagctttgactagaaaaaaaaaaaaaaaaaaaaaaaaaaaaaaaaaaaaaaaaaaaaaaaaaaaaaaaaaaaaaaaaa

SEQ ID NO: 14627 - DNA, 5493 bp, Homo sapiens
gcggccgcgcggatcccacccagcccaccccgccccggccgacggctgcagctgacctggatccttcgagcgcccgccgaccgccagcgatcttccctcatcttccgggctggtttctgctgcgcgaggagcgctgccctcgccgcccctctcgccggacccccggcccccgatggctcggatggggcttgcgggcgccgctggacgctggtggggactcgctctcggcttgaccgcattcttcctcccaggcgtccactcccaggtggtccaggtgaacgactccatgtatggcttcatcggcacagacgtggttctgcactgcagctttgccaacccgcttcccagcgtgaagatcacccaggtcacatggcagaagtccaccaatggctccaagcagaacgtggccatctacaacccatccatgggcgtgtccgtgctggctccctaccgcgagcgtgtggaattcctgcggccctccttcaccgatggcactatccgcctctcccgcctggagctggaggatgagggtgtctacatctgcgagtttgctaccttccctacgggcaatcgagaaagccagctcaatctcacggtgatggccaaacccaccaattggatagagggtacccaggcagtgcttcgagccaagaaggggcaggatgacaaggtcctggtggccacctgcacctcagccaatgggaagcctcccagtgtggtatcctgggaaactcggttaaaaggtgaggcagagtaccaggagatccggaaccccaatggcacagtgacggtcatcagccgctaccgcctggtgcccagcagggaagcccaccagcagtccttggcctgcatcgtcaactaccacatggaccgcttcaaggaaagcctcactctcaacgtgcagtatgagcctgaggtaaccattgaggggtttgatggcaactggtacctgcagcggatggacgtgaagctcacctgcaaagctgatgctaaccccccagccactgagtaccactggaccacgctaaatggctctctccccaagggtgtggaggcccagaacagaaccctcttcttcaagggacccatcaactacagcctggcagggacctacatctgtgaggccaccaaccccatcggtacacgctcaggccaggtggaggtcaatatcacagaattcccctacaccccgtctcctcccgaacatgggcggcgcgccgggccggtgcccacggccatcattgggggcgtggcggggagcatcctgctggtgttgattgtggtcggcgggatcgtggtcgccctgcgtcggcgccggcacaccttcaagggtgactacagcaccaagaagcacgtgtatggcaacggctacagcaaggcaggcatcccccagcaccacccaccaatggcacagaacctgcagtaccccgacgactcagacgacgagaagaaggccggcccactgggtggaagcagctatgaggaggaggaggaggaggaggagggcggtggagggggcgagcgcaaggtgggcggcccccaccccaaatatgacgaggacgccaagcggccctacttcaccgtggatgaggccgaggcccgtcaggacggctacggggaccggactctgggctaccagtacgaccctgagcagctggacttggctgagaacatggtttctcagaacgacgggtctttcatttccaagaaggagtggtacgtgtagccccccttccagagcctctgtctgtgaccgctcctccccagcccctccccgcacgccccctgcccaccccccacctcccactccaggagctgaacagagacttgcccagctgcccaaagccagccccgaactcctggggggccaggggagcccagggcagccacgacttggctttgtgttttatttcctccctctcctccgcccttccccatggtgttgtgttcgactgtggctttagtgttactgtatcttccctttacgggccccacctgcctgccctctgtgtagggagccctgttctcgtcttgtgtacctgggcatccctccagggtttggggagccagcctcccccgcccccctacactggaatttgtttgtgtttcttcactgggggtggagggctcaaggggctctaagagggaaaagctccccacacccccagatgctgctcctcctcccggctagagggaacccaacacccaccagtgaaatctgatgcagctgggagtttggaccttgggtctagacagctggtgcgcccaagaggtagggggaggggtgcggcttctccccagttcccagggagtcttgtttgttaagcggggccttgggcagtgttttcctgctgagggtggttttacattttttttcctcattggcccacagagagtggagttggcctagctctgacgcgtcccctctttatccccaatgtgccccctccattaggggctccaggtgggctccagcccacacttgctctctgcctctgctgacacgtgcacacacacacacatgcacacactgctcctctctgcctgctttcccctggagtcccatgccctgccccatccagacactgcccaaggcccacccgtctatttccacctcattccccctttaagctgagaatggggtctgcctatagaagcttccagagacagctgagactgggtccccggtgcctccaccctaggatctcaggcctgccccaaactgcttcttacagcgtggaggtttctctgatttctcccttatctagcaacacttggttcttttggctagtcagggctgggatcccagggggatccacctgcaggagtcagaggtaaagaagcatccacacggagggtagtggggaaggaagcccacatggcagaagctctgcaaacacagtccgagggactgaggagtccatacaatgcctcacacacaaaggccattgtcaaagcctcgggcctggcagaaagtgaggggggtggggccgctaggccacctcctgctcagccacccctggtcctcattctgggatgaggggagggcctaggagaagccctccctttcagtgcagattcccttcttgaatgggacattgagttcctatcagccaccccagactgggtcttcccatgtatataatggaggaagacccctcccagccctctcagtcccccagctcaaagtgcctcagttcctccatctgctcccagatcccctggcactctagacaggcatgcccatgggaaggaccctgggatggagaggcaggcttcgcggcccttcatgcctgcccactgggattccagttaactcaccccagggtgtcaggggctctgcaggatggcaagtgttggggaggagggaggcagaccactctgtgccccacgggcactgacccaccctgccataggcttcctaagggagccccccaacccctcccctcccctccctggtgctgctattgaaccccctgccagctccatttctgccctggcaaccctgggcccagcaggtgggtcgtcgttgtctggccctcactgccctggccccagcccaggctgcccagtagccacgtagcagaagtctgaagccatgccagccctggtgcggctctcccctctacacatttggggtactggatagggtgaagttaggggagaaaattgtggagtctttccagccacagggcagagggaggtggaggagctgggctgcttttcccagcagtattagtgtcccccaggacaggggaccttttccacattacatcactgccccatcccaccttacaacactctggcccctctgcttggtccccttttcccccaggcaggaggcaatcccaggggcctgcctgatagaggcatttcctgtccctgtctcctcctgcatctcctttatcctgcactgccaccctctattccccattctgtgttggactttgaaggccccaagcccagccaaagcactgagttcccccttaagacacctccacaccctccccacaagcaaagcacaaattttggggtccatgtagcatgggccacgtaggaggctcctgacttgccaggggcccagcctcagcatacccaccgagcagctgccagcctgggctgagggtgggcatgaggcaggagtcagcacttggacctagggatgtgaggttttctgtgccccaagtttgtgggaaggtgggcactactgctgggcccacagacacagccagctggcaaaagggaggtctagcccagcagagagatgaggacattttgcttctccttcatgcccacagcatgagctgagcttctgctttgctggaaatgaaataaacttggtatgaattgtgccaaggcctccccagttgtcatcctgcctcttgttgccctccctgtccttgccccccaccccacacccatgcccctgtttccttacagattttgatattgttctaatgtgtaatagaaccagccgagtccccttttatcagaagggtctgaaaagcagcagcacagagtaggtgaacacaggcctgcaagtgcgaccacctcagacccagtacgtgtgcccacagtggacacactcacacctccaacacacccacgcgcaggcatgtgtacacgcatgtacacacgcatgcatgcacagccagatggccactcagcacagatgtggcagagggaatggtctgatcctgctgaaagccattaaggagaaacgaatttcccagtgcccgggctgcaagagagccttataggggccctgtttcctgggcatgcgcttcctctgccagccaacccccacttgcccaagtcactggtgcaataacttttctgccttcctcagagcagagaaattgggaattgtgttaggtgggtgtgggcagctctgctgagccaagcagacacggatgtcccctcttctgggaggagggtagtgctcccaggcctcaggagtccagacagagacccccaaagcctgactgccaacagaaaccctctcctagtgaggggcaggtgggtgtgccccaggtccccacacccacagggaggcttcacacactgcccagtaccggggatgccaggaggcaggcccctctgctgctgccactgctgccaacactgcccagcttgtgaggccaggaggagcccctgtcccactcggtgctgctgctcttctgacccctgctgtgaggaatgggattcttggtcgaaaaaattggttttccttttttgtataaatgaaaagaatccaggagaagctgccaccctcccctcccagcgtgatgcgctaccttgcttcggcgtcttgtcgccctttccgcctttggtccagggacagcccagcagatcctcctggttctgacctggggggtgtttgcatcacccccttttacttgtattaaaaaaaaatgatgggttgaaaatgtactgaggattaaaaatgtacttttttataaataaagtgtttaaaacaaaaaaaaaaaaaaa

SEQ ID NO: 14628 - DNA, 3260 bp, Homo sapiens
ccatcccatagtgagggaagacacgcggaaacaggcttgcacccagacacgacaccatgcatctcctcggcccctggctcctgctcctggttctagaatacttggctttctctgactcaagtaaatgggtttttgagcaccctgaaaccctctacgcctgggagggggcctgcgtctggatcccctgcacctacagagccctagatggtgacctggaaagcttcatcctgttccacaatcctgagtataacaagaacacctcgaagtttgatgggacaagactctatgaaagcacaaaggatgggaaggttccttctgagcagaaaagggtgcaattcctgggagacaagaataagaactgcacactgagtatccacccggtgcacctcaatgacagtggtcagctggggctgaggatggagtccaagactgagaaatggatggaacgaatacacctcaatgtctctgaaaggccttttccacctcatatccagctccctccagaaattcaagagtcccaggaagtcactctgacctgcttgctgaatttctcctgctatgggtatccgatccaattgcagtggctcctagagggggttccaatgaggcaggctgctgtcacctcgacctccttgaccatcaagtctgtcttcacccggagcgagctcaagttctccccacagtggagtcaccatgggaagattgtgacctgccagcttcaggatgcagatgggaagttcctctccaatgacacggtgcagctgaacgtgaagcacaccccgaagttggagatcaaggtcactcccagtgatgccatagtgagggagggggactctgtgaccatgacctgcgaggtcagcagcagcaacccggagtacacgacggtatcctggctcaaggatgggacctcgctgaagaagcagaatacattcacgctaaacctgcgcgaagtgaccaaggaccagagtgggaagtactgctgtcaggtctccaatgacgtgggcccgggaaggtcggaagaagtgttcctgcaagtgcagtatgccccggaaccttccacggttcagatcctccactcaccggctgtggagggaagtcaagtcgagtttctttgcatgtcactggccaatcctcttccaacaaattacacgtggtaccacaatgggaaagaaatgcagggaaggacagaggagaaagtccacatcccaaagatcctcccctggcacgctgggacttattcctgtgtggcagaaaacattcttggtactggacagaggggcccgggagctgagctggatgtccagtatcctcccaagaaggtgaccacagtgattcaaaaccccatgccgattcgagaaggagacacagtgaccctttcctgtaactacaattccagtaaccccagtgttacccggtatgaatggaaaccccatggcgcctgggaggagccatcgcttggggtgctgaagatccaaaacgttggctgggacaacacaaccatcgcctgcgcacgttgtaatagttggtgctcgtgggcctcccctgtcgccctgaatgtccagtatgccccccgagacgtgagggtccggaaaatcaagcccctttccgagattcactctggaaactcggtcagcctccaatgtgacttctcaagcagccaccccaaagaagtccagttcttctgggagaaaaatggcaggcttctggggaaagaaagccagctgaattttgactccatctccccagaagatgctgggagttacagctgctgggtgaacaactccataggacagacagcgtccaaggcctggacacttgaagtgctgtatgcacccaggaggctgcgtgtgtccatgagcccgggggaccaagtgatggaggggaagagtgcaaccctgacctgtgagagtgacgccaaccctcccgtctcccactacacctggtttgactggaataaccaaagcctcccccaccacagccagaagctgagattggagccggtgaaggtccagcactcgggtgcctactggtgccaggggaccaacagtgtgggcaagggccgttcgcctctcagcacccttactgtctactatagcccggagaccatcggcaggcgagtggctgtgggactcgggtcctgcctcgccatcctcatcctggcaatctgtgggctcaagctccagcgacgttggaagaggacacagagccagcaggggcttcaggagaattccagcggccagagcttctttgtgaggaataaaaaggttagaagggcccccctctctgaaggcccccactccctgggatgctacaatccaatgatggaagatggcattagctacaccaccctgcgctttcccgagatgaacataccacgaactggagatgcagagtcctcagagatgcagagacctccccggacctgcgatgacacggtcacttattcagcattgcacaagcgccaagtgggcgactatgagaacgtcattccagattttccagaagatgaggggattcattactcagagctgatccagtttggggtcggggagcggcctcaggcacaagaaaatgtggactatgtgatcctcaaacattgacactggatgggctgcagcagaggcactgggggcagcgggggccagggaagtccccgagtttccccagacaccgccacatggcttcctcctgcgtgcatgtgcgcacacacacacacacacgcacacacacacacacacactcactgcggagaaccttgtgcctggctcagagccagtctttttggtgagggtaaccccaaacctccaaaactcctgcccctgttctcttccactctccttgctacccagaaatcatctaaatacctgccctgacatgcacacctcccctgccccaccagcccactggccatctccacccggagctgctgtgtcctctggatctgctcgtcattttccttcccttctccatctctctggccctctacccctgatctgacatccccactcacgaatattatgcccagtttctgcctctgagggaaagcccagaaaaggacagaaacgaagtagaaaggggcccagtcctggcctggcttctcctttggaagtgaggcattgcacggggagacgtacgtatcagcggccccttgactctggggactccgggtttgagatggacacactggtgtggattaacctgccagggagacagagctcacaataaaaatggctcagatgccacttcaaagaaaaaaaaaa

SEQ ID NO: 14629 - DNA, 2329 bp, Homo sapiens
gttttctacccaagaatgctacttcaggagatcagtcaaaaggttagggtgatggtgacggtggaaatatagaaaaaggaatttattcaagaggtattcaaaaagaagtgaaatagagatgagttggagatagattggataaaaagagtgagggagagggaggtgtcaggctgcagcccaggttctgagttgccaaagaggagtcttttcctccaggaaattgagacacgccggttgtgaaacctactgaagtgagcggcggcgccaggattcctgggaccccgacctctttgcagctcgcacagctaagggcgagggcgcccttcggcagaagcagcaaaccgccggcaagcccagcgaggagggctgccggggtctgggcttgggaattggctggcacccagcggaaagggacgtgagctgagcggcgggggagaagagtgcgcaggtcagagggcggcgcgcagcggcgctccgcgaggtccccacgccgggcgatatggggtgcctgctgtttctgctgctctgggcgctcctccaggcttggggaagcgctgaagtcccgcaaaggcttttccccctccgctgcctccagatctcgtccttcgccaatagcagctggacgcgcaccgacggcttggcgtggctgggggagctgcagacgcacagctggagcaacgactcggacaccgtccgctctctgaagccttggtcccagggcacgttcagcgaccagcagtgggagacgctgcagcatatatttcgggtttatcgaagcagcttcaccagggacgtgaaggaattcgccaaaatgctacgcttatcctatcccttggagctccaggtgtccgctggctgtgaggtgcaccctgggaacgcctcaaataacttcttccatgtagcatttcaaggaaaagatatcctgagtttccaaggaacttcttgggagccaacccaagaggccccactttgggtaaacttggccattcaagtgctcaaccaggacaagtggacgagggaaacagtgcagtggctccttaatggcacctgcccccaatttgtcagtggcctccttgagtcagggaagtcggaactgaagaagcaagtgaagcccaaggcctggctgtcccgtggccccagtcctggccctggccgtctgctgctggtgtgccatgtctcaggattctacccaaagcctgtatgggtgaagtggatgcggggtgagcaggagcagcagggcactcagccaggggacatcctgcccaatgctgacgagacatggtatctccgagcaaccctggatgtggtggctggggaggcagctggcctgtcctgtcgggtgaagcacagcagtctagagggccaggacatcgtcctctactggggtgggagctacacctccatgggcttgattgccttggcagtcctggcgtgcttgctgttcctcctcattgtgggctttacctcccggtttaagaggcaaacttcctatcagggcgtcctgtgactcgccttgccacatctgtgtctctggaacccaggacctctggacctcaggttcccaagacttcagtcctggtctgctcaggaattgaagatgtaaggaattgaagataggagagataccttgaaaaagtagagaacagtcatgaggcagctttcatcacacccttttaacatttatctaaaagaatttaaattctttttcaaaaattacactacaagtttataagcccaaatggctctgtgaaatcagaagtgcaaaggtgtgcaaacttgtatctgaagacctaccagggacaagcaggtaagagctgatgtgagtgtgtgtgatgggatctgtaaggaactggaacacacatgtcctatccaaaggaatcagctgcagctgcttgttgtcaagtataaagtcaggacctggcttggctttaaccgtttttcaagaaaactggaaatctggattttcagcgaacatgcctgattttaaaaggttgactcaagtttttacaaaatactatgtgggacacctcaaatacatacctactgactgatgacaaacccaggagtttgtgtgtcttttataaaaagtttgccctggatgtcatattggcagttggaggacacagtttctattgtaaatttggatttacgactgaagaaggacattttctctttaaaagaaagttaggttataagaaacagaggcgtctcacatttttacttggtgtaattaataaacgaagataaatcataaaaaaaaaaaaaaaaaaaaaaaaaaaaaaaaaaaaaaaaaaaaaaaaaaaaaaaaaaaaaaaaaaaaaaaaaaaaa

SEQ ID NO: 14630 - DNA, 1207 bp, Homo sapiens
acagagatcagcaaacagcttttctgagagaaagaaacatctgcaaatgacatgctgtttctgcagtttctgctgctagctcttcttctcccaggtggtgacaatgcagacgcatcccaggaacacgtctccttccatgtcatccagatcttctcatttgtcaaccaatcctgggcacgaggtcagggctcaggatggctggacgagttgcagactcatggctgggacagtgaatcaggcacaataattttcctgcataactggtccaagggcaacttcagcaatgaagagttgtcagacctagagttgttatttcgtttctacctctttggattaactcgggagattcaagaccatgcaagtcaagattactcgaaatatccctttgaagtacaggtgaaagcgggctgtgagctgcattctggaaagagcccagaaggcttctttcaggtagctttcaacggattagatttactgagtttccagaatacaacatgggtgccatctccaggctgtggaagtttggcccaaagtgtctgtcatctactcaatcatcagtatgaaggcgtcacagaaacagtgtataatctcataagaagcacttgcccccgatttctcttgggtctcctggatgcagggaagatgtatgtacacaggcaagtgaggccagaagcctggctgtccagtcgccccagccttgggtctggccagctgttgctggtttgtcatgcctccggcttctacccaaagcctgtttgggtgacatggatgcggaatgaacaggagcaactgggcactaaacatggtgatattcttcctaatgctgatgggacatggtatcttcaggtgatcctggaggtggcatctgaggagcctgctggcctgtcttgtcgagtgagacacagcagtctaggaggccaggacatcatcctctactggggacaccactcttccatgaattggattgccttggtagtgatagtgcccttggtgattctaatagtccttgtgttatggtttaagaagcactgctcatatcaggacatcctgtgagactcttccccctgactcccccattgtgttaagaacccagcaacccaggagcctagtacaatatagtgatgccatcccgtcgactctccatttaaattgtttctctttctgcataataaacatttgttaataaaaaccaaaaaaaaaaaaaaaa

SEQ ID NO: 14631 - DNA, 3129 bp, Homo sapiens
cgtttcctgcatctccaaacatggcgacctaggagaaagggaagaacaattttttctcctcttttgggaaggtttgcgtctagtagtgcctgtgcccctgggcagattggagagaagagggacgactggagaatcgtcgagaaccagcggagaaaagaaaaagcaacgtttaattctagaaggcctcctgtccctgcctgctctgggtgctcatggaatcagctgctgccctgcacttctcccggccagcctccctcctcctcctcctcctcagcctgtgtgcactggtctcagcccagtttattgtcgtggggcccactgatcccatcttggccacggttggagaaaacactacgttacgctgccatctgtcacccgagaaaaatgctgaggacatggaggtgcggtggttccggtctcagttctcccccgcagtgtttgtgtataaaggtggcagagagagaacagaggagcagatggaggagtaccgaggaagaaccacctttgtgagcaaagacatcagcaggggcagcgtggccctggtcatacacaacatcacagcccaggaaaacggcacctaccgctgttacttccaagaaggcaggtcctacgatgaggccatcctgcacctcgtagtggcaggactaggctctaagcccctcatttcaatgaggggccatgaagacgggggcatccggctggagtgcatatctagagggtggtacccaaagcccctcacagtgtggagggacccctacggtggggttgcgcctgccctgaaagaggtctccatgcctgatgcagacggcctcttcatggtcaccacggctgtgatcatcagagacaagtctgtgaggaacatgtcctgctctatcaacaacaccctgctcggccagaagaaagaaagtgtcatttttattccagaatcctttatgcccagtgtgtctccctgtgcagtggccctgcctatcattgtggttattctgatgatacccattgccgtatgcatctattggatcaacaaactccaaaaggaaaaaaagattctgtcaggggaaaaggagtttgaacgggaaacaagagaaattgctctaaaggaactggagaaagaacgtgtgcaaaaagaggaagaacttcaagtaaaagagaaacttcaagaagaattgcgatggagaagaacattcttacatgctgagctccaattcttctcaaactgagagaactgcttctgtctctggagagacagaagtgcagcttcagtaattctcagtgtgtgagctgcctaggatcagagagccttcatggaagtggccactacgtggggatcccttcagagatatctgagacctctctggggatcaggaaccacacaatccccagggttcctgagaccccaggcctaaacctgagacttcctctgcagttgatgtggtcctggatccagacaccgctcatcccgatctcttcctgtcagaggaccggagaagtgtgagaaggtgccccttcaggcacctaggggagagcgtgcctgacaacccagagagattcgacagtcagccttgtgtcctaggccgggagagcttcgcttcagggaaacattactgggaggtggaggtggaaaacgtgattgagtggactgtgggggtctgtagagacagtgttgagaggaaaggggaggtcctgctgattcctcagaatggcttctggaccttggagatgcataaagggcaataccgggccgtgtcctcccctgataggattctccctttgaaggagtccctttgccgggtgggcgtcttcctggactatgaagctggagatgtctccttctacaacatgagggacagatcgcacatctacacatgtccccgttcagccttttccgtgcctgtgaggcccttcttcaggttggggtgtgaggacagccccatcttcatctgccctgcactcacaggagccaatggggtcacggtgcctgaagagggcctgacacttcacagagtggggacccaccagagcctatagaatcaattccttggtctcacagccatgtagacaagccctggtcatctcagcagccaccgcacaacacccctggtggaagacacgccctcctcccctctggtcacacaagagaacatcttccagctgcctctttcacacccactacagacctcagccccagttttctcctcctcactaggctgtgtttttagtagttcctttgcttgtaactatgggatgggatccaggcatagggaactagttgttacacagctcccagccaagaagaaagtgtgagaagttgatgggcagcaaacctgctgtttaacatcagggtgaccacattaagcccagtattccagttggcaccagaagatatggacttggaatgaggcctacagggttcaccaggatgtaagaggagagaggaatccacaggaccaccagagaggagagggaaccagatatgcagatcagagatagaggaagtggaaccagagagctgggagggaccaaggttgtaagggtggctaagtcccaccataacagctaaggggacctgggagatgatggctcatttccacccagccccaggatttccagagcgcacatccacaggcctggacctgggatgaagatgaatgaagaacatggatgcacgtggatgtagtttggctcaggtgtccctgcagttggcaaggagtcagtactcagtccctgagtgtggctgaaatttgaggtcctggctgagccaaggagtaatggaccagatctacctcagtattcaagttcagtggggacaccagtggcttcaaacttcctggtttcatgatatcttgagacgccttacaaatgatggaggattccaaagagtttttgtttatttgggttaatatttgttggtatttatggcatttgagattgaaactaagaaatgttttaatttattacctttacaacatttatttacattacatacatacatttacaacatttattaatttatattaaaatagcatgaataagccaattataggttaatataagtagaatgtttgtgaaaaataagtatggtatccaaagcaaaataaattttattgtgaagtgtgaaaaaaaaaaaaaaaa

SEQ ID NO: 14632 - DNA, 2906 bp, Homo sapiens
cgtttcctgcatctccgaacatggcgacctaggagaaagggaagaacaattttttctcctcttttgggaaggtttgcgtctagtagtgcctgtgcccctgggcagattggagagaagagggacgactggagaatcgtcgagaaccagcggagaaaagaaaaagcaacgtttaattctagaaggcctcctgtccctgcctgctctgggtgctcatggaatcagctgctgccctgcacttctcccggccagcctccctcctcctcctcctcctcagcctgtgtgcactggtctcagcccagtttattgtcgtggggcccactgatcccatcttggccacggttggagaaaacactacgttacgctgccatctgtcacccgagaaaaatgctgaggacatggaggtgcggtggttccggtctcagttctcccccgcagtgtttgtgtataaaggtggcagagagagaacagaggagcagatggaggagtaccgaggaagaaccacctttgtgagcaaagacatcagcaggggcagcgtggccctggtcatacacaacatcacagcccaggaaaacggcacctaccgctgttacttccaagaaggcaggtcctacgatgaggccatcctgcacctcgtagtggcaggactaggctctaagcccctcatttcaatgaggggccatgaagacgggggcatccggctggagtgcatatctagagggtggtacccaaagcccctcacagtgtggagggacccctacggtggggttgcgcctgccctgaaagaggtctccatgcctgatgcagacggcctcttcatggtcaccacggctgtgatcatcagagacaagtctgtgaggaacatgtcctgctctatcaacaacaccctgctcggccagaagaaagaaagtgtcatttttattccagaatcctttatgcccagtgtgtctccctgtgcagtggccctgcctatcattgtggttattctgatgatacccattgccgtatgcatctattggatcaacaaactccaaaaggaaaaaaagattctgtcaggggaaaaggagtttgaacgggaaacaagagaaattgctctaaaggaactggagaaagaacgtgtgcaaaaagaggaagaacttcaagtaaaagagaaacttcaagaagaattgcgatggagaagaacattcttacatgctgttgatgtggtcctggatccagacaccgctcatcccgatctcttcctgtcagaggaccggagaagtgtgagaaggtgccccttcaggcacctaggggagagcgtgcctgacaacccagagagattcgacagtcagccttgtgtcctaggccgggagagcttcgcttcagggaaacattactgggaggtggaggtggaaaacgtgattgagtggactgtgggggtctgtagagacagtgttgagaggaaaggggaggtcctgctgattcctcagaatggcttctggaccttggagatgcataaagggcaataccgggccgtgtcctcccctgataggattctccctttgaaggagtccctttgccgggtgggcgtcttcctggactatgaagctggagatgtctccttctacaacatgagggacagatcgcacatctacacatgtccccgttcagccttttccgtgcctgtgaggcccttcttcaggttggggtgtgaggacagccccatcttcatctgccctgcactcacaggagccaatggggtcacggtgcctgaagagggcctgacacttcacagagtggggacccaccagagcctatagaatcaattccttggtctcacagccatgtagacaagccctggtcatctcagcagccaccgcacaacacccctggtggaagacacgccctcctcccctctggtcacacaagagaacatcttccagctgcctctttcacacccactacagacctcagccccagttttctcctcctcactaggctgtgtttttagtagttcctttgcttgtaactatgggatgggatccaggcatagggaactagttgttacacagctcccagccaagaagaaagtgtgagaagttgatgggcagcaaacctgctgtttaacatcagggtgaccacattaagcccagtattccagttggcaccagaagatatggacttggaatgaggcctacagggttcaccaggatgtaagaggagagaggaatccacaggaccaccagagaggagagggaaccagatatgcagatcagagatagaggaagtggaaccagagagctgggagggaccaaggttgtaagggtggctaagtcccaccataacagctaaggggacctgggagatgatggctcatttccacccagccccaggatttccagagcgcacatccacaggcctggacctgggatgaagatgaatgaagaacatggatgcacgtggatgtagtttggctcaggtgtccctgcagttggcaaggagtcagtactcagtccctgagtgtggctgaaatttgaggtcctggctgagccaaggagtaatggaccagatctacctcagtattcaagttcagtggggacaccagtggcttcaaacttcctggtttcatgatatcttgagacgccttacaaatgatggaggattccaaagagtttttgtttatttgggttaatatttgttggtatttatggcatttgagattgaaactaagaaatgttttaatttattacctttacaacatttatttacattacatacatacatttacaacatttattaatttatattaaaatagcatgaataagccaattataggttaatataagtagaatgtttgtgaaaaataagtatggtatccaaagcaaaataaattttattgtgaagtgtgaaaaaaaaaaaaaaaaaaaaaa

SEQ ID NO: 14633 - DNA, 2143 bp, Homo sapiens
aattgcttccggggagttgcgagggagcgagggggaataaaggacccgcgaggaagggcccgcggatggcgcgtccctgagggtcgtggcgagttcgcggagcgtgggaaggagcggaccctgctctccccgggctgcgggccatggccacggcggagcggagagccctcggcatcggcttccagtggctctctttggccactctggtgctcatctgcgccgggcaagggggacgcagggaggatgggggtccagcctgctacggcggatttgacctgtacttcattttggacaaatcaggaagtgtgctgcaccactggaatgaaatctattactttgtggaacagttggctcacaaattcatcagcccacagttgagaatgtcctttattgttttctccacccgaggaacaaccttaatgaaactgacagaagacagagaacaaatccgtcaaggcctagaagaactccagaaagttctgccaggaggagacacttacatgcatgaaggatttgaaagggccagtgagcagatttattatgaaaacagacaagggtacaggacagccagcgtcatcattgctttgactgatggagaactccatgaagatctctttttctattcagagagggaggctaataggtctcgagatcttggtgcaattgtttactgtgttggtgtgaaagatttcaatgagacacagctggcccggattgcggacagtaaggatcatgtgtttcccgtgaatgacggctttcaggctctgcaaggcatcatccactcaattttgaagaagtcctgcatcgaaattctagcagctgaaccatccaccatatgtgcaggagagtcatttcaagttgtcgtgagaggaaacggcttccgacatgcccgcaacgtggacagggtcctctgcagcttcaagatcaatgactcggtcacactcaatgagaagcccttttctgtggaagatacttatttactgtgtccagcgcctatcttaaaagaagttggcatgaaagctgcactccaggtcagcatgaacgatggcctctcttttatctccagttctgtcatcatcaccaccacacactgtagcctccacaaaattgcatcaggccccacaacagctgcttgcatggaatagcagagaataccgcctgctccctccggacagcacactcctgaaaacggggagagaggagccaaacatgctcggtttacactttccttatttactgaatgagtggagggcagagacaggcctggagttacgcacactgagtgccccaacatggaaagaaacatcaggagggacaggaaacgttccctccttaaccaacagttttcaagaccttactggaggcactttattggctacataatcactccatgcggtgggcatcaggcagaatcctggtgcagacccaactttgaggtggaggatttcacagtttctttattttgaacttcccccaggctcccactaattcctctccattctatcctcctccctttcccacaaaagaaaacagaaaggagcagcagtgtttgataccgtatcatccagaggcctggttctctcccattatagggcaaacaagccctggcaagatatttcactcccgccccatgccatgcattaaaaatccaaaattgcctatattccacctgccaagcaagagatgctttcattattgaagttccaaatgtatacctttgagaacagtgccttctcgtcttaaaagagaggtcctcattttgtgagttgggagcagagggaattaaagaaagccatgatgcagggatttggccattcaagccgggcagccttcagagaatgtcatccctaatgacacatgcccgaatgaaggagcggggctgagcttgtcctgccttcgtattgaatgttgcctgtctgcctccttaatagcgggcctctgtgtgagcatttgacaagacttaaaactattcattgaagaaaatggatgatcccccaacaggaagatgcaaccccatgggctgcctgcttgaccacagaagtgcttccagctccagttgctcatctgagaactccccccaccacttgctgttaaaattgttaaaattaaaggccatgttgattgaaaaaaaaaaaaaaaaaaa

SEQ ID NO: 14634 - DNA, 1454 bp, Homo sapiens
aattgcttccggggagttgcgagggagcgagggggaataaaggacccgcgaggaagggcccgcggatggcgcgtccctgagggtcgtggcgagttcgcggagcgtgggaaggagcggaccctgctctccccgggctgcgggccatggccacggcggagcggagagccctcggcatcggcttccagtggctctctttggccactctggtgctcatctgcgccgggcaagggggacgcagggaggatgggggtccagcctgctacggcggatttgacctgtacttcattttggacaaatcaggaagtgtgctgcaccactggaatgaaatctattactttgtggaacagttggctcacaaattcatcagcccacagttgagaatgtcctttattgttttctccacccgaggaacaaccttaatgaaactgacagaagacagagaacaaatccgtcaaggcctagaagaactccagaaagttctgccaggaggagacacttacatgcatgaaggatttgaaagggccagtgagcagatttattatgaaaacagacaagggtacaggacagccagcgtcatcattgctttgactgatggagaactccatgaagatctctttttctattcagagagggaggctaataggtctcgagatcttggtgcaattgtttactgtgttggtgtgaaagatttcaatgagacacagctggcccggattgcggacagtaaggatcatgtgtttcccgtgaatgacggctttcaggctctgcaaggcatcatccactcaattttgaagaagtcctgcatcgaaattctagcagctgaaccatccaccatatgtgcaggagagtcatttcaagttgtcgtgagaggaaacggcttccgacatgcccgcaacgtggacagggtcctctgcagcttcaagatcaatgactcggtcacactcaatgagaagcccttttctgtggaagacacttatttactgtgtccagcgcctatcttaaaagaagttggcatgaaagctgcactccaggtcagcatgaacgatggcctctcttttatctccagttctgtcatcatcaccaccacacactgttctgacggttccatcctggccatcgccctgctgatcctgttcctgctcctagccctggctctcctctggtggttctggcccctctgctgcactgtgattatcaaggaggtccctccaccccctgccgaggagagtgaggaaaataaaataaaataacaagaagaagaaagaaagaaatcccacagaaacagataacctaacacagcccgtgcaacgtattttatacaatgctctgaaaatcatagtctcaatctagacagtcttttcctctagttccctgtattcaaatcccagtgtctaacattcaataaatagctatatgaaatcaaaaaaaaaaaaaaaaaaaaaaaaaaaaaaaaa

SEQ ID NO: 14635 - DNA, 5540 bp, Homo sapiens
aattgcttccggggagttgcgagggagcgagggggaataaaggacccgcgaggaagggcccgcggatggcgcgtccctgagggtcgtggcgagttcgcggagcgtgggaaggagcggaccctgctctccccgggctgcgggccatggccacggcggagcggagagccctcggcatcggcttccagtggctctctttggccactctggtgctcatctgcgccgggcaagggggacgcagggaggatgggggtccagcctgctacggcggatttgacctgtacttcattttggacaaatcaggaagtgtgctgcaccactggaatgaaatctattactttgtggaacagttggctcacaaattcatcagcccacagttgagaatgtcctttattgttttctccacccgaggaacaaccttaatgaaactgacagaagacagagaacaaatccgtcaaggcctagaagaactccagaaagttctgccaggaggagacacttacatgcatgaaggatttgaaagggccagtgagcagatttattatgaaaacagacaagggtacaggacagccagcgtcatcattgctttgactgatggagaactccatgaagatctctttttctattcagagagggaggctaataggtctcgagatcttggtgcaattgtttactgtgttggtgtgaaagatttcaatgagacacagctggcccggattgcggacagtaaggatcatgtgtttcccgtgaatgacggctttcaggctctgcaaggcatcatccactcaattttgaagaagtcctgcatcgaaattctagcagctgaaccatccaccatatgtgcaggagagtcatttcaagttgtcgtgagaggaaacggcttccgacatgcccgcaacgtggacagggtcctctgcagcttcaagatcaatgactcggtcacactcaatgagaagcccttttctgtggaagatacttatttactgtgtccagcgcctatcttaaaagaagttggcatgaaagctgcactccaggtcagcatgaacgatggcctctcttttatctccagttctgtcatcatcaccaccacacactgttctgacggttccatcctggccatcgccctgctgatcctgttcctgctcctagccctggctctcctctggtggttctggcccctctgctgcactgtgattatcaaggaggtccctccaccccctgccgaggagagtgaggaagaagatgatgatggtctgcctaagaaaaagtggccaacggtagacgcctcttattatggtgggagaggcgttggaggcattaaaagaatggaggttcgttggggagaaaagggctccacagaagaaggtgctaagttggaaaaggcaaagaatgcaagagtcaagatgccggagcaggaatatgaattccctgagccgcgaaatctcaacaacaatatgcgtcggccttcttccccccggaagtggtactctccaatcaagggaaaactcgatgccttgtgggtcctactgaggaaaggatatgatcgtgtgtctgtgatgcgtccacagccaggagacacggggcgctgcatcaacttcaccagggtcaagaacaaccagccagccaagtacccactcaacaacgcctaccacacctcctcgccgcctcctgcccccatctacactcccccacctcctgcgccccactgccctcccccgccccccagcgcccctacccctcccatcccgtccccaccttccacccttccccctcctccccaggctccacctcccaacagggcacctcctccctcccgccctcctccaaggccttctgtctagagcccaaagttcctgctctgggctctctcagaaacttcaggagatgttagaacaagtctttccagttagagaagaggagtggtgataaagcccactgaccttcacacattctaaaaattggttggcaatgccagtataccaacaatcatgatcagctgaaagaaacagatattttaaattgccagaaaacaaatgatgaggcaactacagtcagatttatagccagccatctatcacctctagaaggttccagagacagtgaaactgcaagatgctctcaacaggattatgtctcatggagaccagtaagaaaatcatttatctgaaggtgaaatgcagagttggataagaaatacattgctgggtttctaaaatgctgccttcctgcctctactccacctccatccctggactttggacccttggcctaggagcctaaggaccttcacccctgtgcaccacccaagaaagaggaaaactttgcctacaactttggaaatgctggggtccctggtgtggtaagaaactcaacatcagacgggtatgcagaaggatgttcttctgggatttgcaggtacataaaaaatgtatggcatcttttccttgcaaattcttccagtttccaagtgagaaggggagcaggtgtttactgatggaaaaggtatgttgctatgttgatgtgtaagtgaaatcagttgtgtgcaatagacaggggcgtattcatgggagcatcagccagtttctaaaacccacaggccatcagcagctagaggtggctggctttggccagacatggaccctaaatcaacagacaatggcattgtcgaagagcaacctgttaatgaatcatgttaaaaatcaaggtttggcttcagtttaaatcacttgaggtatgaagtttatcctgttttccagagataaacataagttgatcttcccaaaataccatcattaggacctatcacacaatatcactagttttttttgtttgtttgttttttgttttttttcttggtaaagccatgcaccacagacttctgggcagagctgagagacaatggtcctgacataataaggatctttgattaacccccataaggcatgtgtgtgtatacaaatatacttctctttggcttttcgacatagaacctcagctgttaaccaaggggaaatacatcagatctgcaacacagaaatgctctgcctgaaatttccaccatgcctaggactcaccccatttatccaggtctttctggatctgtttaatcaataagccctataatcacttgctaaacactgggcttcatcacccagggataaaaacagagatcattgtcttggacctcctgcatcagcctattcaaaattatctctctctctagctttccacaaatcctaaaattcctgtcccaagccacccaaattctcagatcttttctggaacaaggcagaatataaaataaatatacatttagtggcttgggctatggtctccaaagatccttcaaaaatacatcaagccagcttcattcactcactttacttagaacagagatataagggcctgggatgcatttattttatcaataccaatttttgtggccatggcagacattgctaatcaatcacagcactatttcctattaagcccactgatttcttcacaatccttctcaaattacaattccaaagagccgccactcaacagtcagatgaacccaacagtcagatgagagaaatgaaccctacttgctatctctatcttagaaagcaaaaacaaacaggagtttccagggagaatgggaaagccagggggcataaaaggtacagtcaggggaaaatagatctaggcagagtgccttagtcagggaccacgggcgctgaatctgcagtgccaacaccaaactgacacatctccaggtgtacctccaaccctagccttctcccacagctgcctacaacagagtctcccagccttctcagagagctaaaaccagaaatttccagactcatgaaagcaaccccccagcctctccccaaccctgccgcattgtctaatttttagaacactaggcttcttctttcatgtagttcctcataagcaggggccagaatatctcagccacctgcagtgacattgctggacccctgaaaaccattccataggagaatgggttccccaggctcacagtgtagagacattgagcccatcacaactgttttgactgctggcagtctaaaacagtccacccaccccatggcactgccgcgtgattcccgcggccattcagaagttcaagccgagatgctgacgttgctgagcaacgagatggtgagcatcagtgcaaatgcaccattcagcacatcagtcatatgcccagtgcagttacaagatgttgtttcggcaaagcattttgatggaatagggaactgcaaatgtatgatgattttgaaaaggctcagcaggatttgttcttaaaccgactcagtgtgtcatccccggttatttagaattacagttaagaaggagaaacttctataagactgtatgaacaaggtgatatcttcatagtgggctattacaggcaggaaaatgttttaactggtttacaaaatccatcaatacttgtgtcattccctgtaaaaggcaggagacatgtgattatgatcaggaaactgcacaaaattattgttttcagcccccgtgttattgtccttttgaactgttttttttttattaaagccaaatttgtgttgtatatattcgtattccatgtgttagatggaagcatttcctatccagtgtgaataaaaagaacagttgtagtaaattattataaagccgatgatatttcatggcaggttattctaccaagctgtgcttgttggtttttcccatgactgtattgcttttataaatgtacaaatagttactgaaatgacgagacccttgtttgcacagcattaataagaaccttgataagaaccatattctgttgacagccagctcacagtttcttgcctgaagcttggtgcaccctccagtgagacacaagatctctcttttaccaaagttgagaacagagctggtggattaattaatagtcttcgatatctggccatgggtaacctcattgtaactatcatcagaatgggcagagatgatcttgaagtgtcacatacactaaagtccaaacactatgtcagatgggggtaaaatccattaaagaacaggaaaaaataattataagatgataagcaaatgtttcagcccaatgtcaacccagttaaaaaaaaaattaatgctgtgtaaaatggttgaattagtttgcaaactatataaagacatatgcagtaaaaagtctgttaatgcacatcctgtgggaatggagtgttctaaccaattgccttttcttgttatctgagctctcctatattatcatactcagataaccaaattaaaagaattagaatatgatttttaatacacttaacattaaactcttctaactttcttctttctgtgataattcagaagatagttatggatcttcaatgcctctgagtcattgttataaaaaatcagttatcactataccatgctataggagactgggcaaaacctgtacaatgacaaccctggaagttgctttttttaaaaaaataataaatttcttaaatcaaaaaaaaaaaaaaaaaaaa

SEQ ID NO: 14636 - DNA, 2968 bp, Homo sapiens
cgccccccctccttcataaagtcctggcctcgggacagcctgcacagctgcctagcctgtggagacgggacagccctgtcccactcactctttcccctgccgctcctgccggcagctccaaccatgggaggccgcgtctttctcgcattctgtgtctggctgactctgccgggagctgaaacccaggactccaggggctgtgcccggtggtgccctcagaactcctcgtgtgtcaatgccaccgcctgtcgctgcaatccagggttcagctctttttctgagatcatcaccaccccgacggagacttgtgacgacatcaacgagtgtgcaacaccgtcgaaagtgtcatgcggaaaattctcggactgctggaacacagaggggagctacgactgcgtgtgcagcccgggatatgagcctgtttctggggcaaaaacattcaagaatgagagcgagaacacctgtcaagatgtggacgagtgcagctccgggcagcatcagtgtgacagctccaccgtctgcttcaacaccgtgggttcatacagctgccgctgccgcccaggctggaagcccagacacggaatcccgaataaccaaaaggacactgtctgtgaagatatgactttctccacctggaccccgccccctggagtccacagccagacgctttcccgattcttcgacaaagtccaggacctgggcagagactccaagacaagctcagccgaggtcaccatccagaatgtcatcaaattggtggatgaactgatggaagctcctggagacgtagaggccctggcgccacctgtccggcacctcatagccacccagctgctctcaaaccttgaagatatcatgaggatcctggccaagagcctgcctaaaggccccttcacctacatttccccttcgaacacagagctgaccctgatgatccaggagcggggggacaagaacgtcactatgggtcagagcagcgcacgcatgaagctgaattgggctgtggcagctggagccgaggatccaggccccgccgtggcgggcatcctctccatccagaacatgacgacattgctggccaatgcctccttgaacctgcattccaagaagcaagccgaactggaggagatatatgaaagcagcatccgtggtgtccaactcagacgcctctctgccgtcaactccatctttctgagccacaacaacaccaaggaactcaactcccccatccttttcgccttctcccaccttgagtcctccgatggggaggcgggaagagaccctcctgccaaggacgtgatgcctgggccacggcaggagctgctctgtgccttctggaagagtgacagcgacaggggagggcactgggccaccgagggctgccaggtgctgggcagcaagaacggcagcaccacctgccaatgcagccacctgagcagctttgcgatccttatggctcattatgacgtggaggactggaagctgaccctgatcaccagggtgggactggcgctgtcactcttctgcctgctgctgtgcatcctcactttcctgctggtgcggcccatccagggctcgcgcaccaccatacacctgcacctctgcatctgcctcttcgtgggctccaccatcttcctggccggcatcgagaacgaaggcggccaggtggggctgcgctgccgcctggtggccgggctgctgcactactgtttcctggccgccttctgctggatgagcctcgaaggcctggagctctactttcttgtggtgcgcgtgttccaaggccagggcctgagtacgcgctggctctgcctgatcggctatggcgtgcccctgctcatcgtgggcgtctcggctgccatctacagcaagggctacggccgccccagatactgctggttggactttgagcagggcttcctctggagcttcttgggacctgtgaccttcatcattttgtgcaatgctgtcattttcgtgactaccgtctggaagctcactcagaagttttctgaaatcaatccagacatgaagaaattaaagaaggcgagggcgctgaccatcacggccatcgcgcagctcttcctgttgggctgcacctgggtctttggcctgttcatcttcgacgatcggagcttggtgctgacctatgtgtttaccatcctcaactgcctgcagggcgccttcctctacctgctgcactgcctgctcaacaagaaggttcgggaagaataccggaagtgggcctgcctagttgctggggggagcaagtactcagaattcacctccaccacgtctggcactggccacaatcagacccgggccctcagggcatcagagtccggcatatgaaggcgcatggttctggacggcccagcagctcctgtggccacagcagctttgtacacgaagaccatccatcctcccttcgtccaccactctactccctccaccctccctccctgatcccgtgtgccaccaggagggagtggcagctatagtctggcaccaaagtccaggacacccagtggggtggagtcggagccactggtcctgctgctggctgcctctctgctccaccttgtgacccagggtggggacaggggctggcccagggctgcaatgcagcatgttgccctggcacctgtggccagtactcgggacagactaagggcgcttgtcccatcctggacttttcctctcatgtctttgctgcagaactgaagagactaggcgctggggctcagcttccctcttaagctaagactgatgtcagaggccccatggcgaggccccttggggccactgcctgaggctcacggtacagaggcctgccctgcctggccgggcaggaggttctcactgttgtgaaggttgtagacgttgtgtaatgtgtttttatctgttaaaatttttcagtgttgacacttaaaattaaacacatgcatacagaaaaaaaaaaaaaaaa

SEQ ID NO: 14637 - DNA, 4691 bp, Homo sapiens
gagaaggacgcgcggcccccagcgctcttgggggccgcctcggagcatgacccccgcgggccagcgccgcgcgcctgatccgaggagaccccgcgctcccgcagccatgggcaccgggggccggcggggggcggcggccgcgccgctgctggtggcggtggccgcgctgctactgggcgccgcgggccacctgtaccccggagaggtgtgtcccggcatggatatccggaacaacctcactaggttgcatgagctggagaattgctctgtcatcgaaggacacttgcagatactcttgatgttcaaaacgaggcccgaagatttccgagacctcagtttccccaaactcatcatgatcactgattacttgctgctcttccgggtctatgggctcgagagcctgaaggacctgttccccaacctcacggtcatccggggatcacgactgttctttaactacgcgctggtcatcttcgagatggttcacctcaaggaactcggcctctacaacctgatgaacatcacccggggttctgtccgcatcgagaagaacaatgagctctgttacttggccactatcgactggtcccgtatcctggattccgtggaggataatcacatcgtgttgaacaaagatgacaacgaggagtgtggagacatctgtccgggtaccgcgaagggcaagaccaactgccccgccaccgtcatcaacgggcagtttgtcgaacgatgttggactcatagtcactgccagaaagtttgcccgaccatctgtaagtcacacggctgcaccgccgaaggcctctgttgccacagcgagtgcctgggcaactgttctcagcccgacgaccccaccaagtgcgtggcctgccgcaacttctacctggacggcaggtgtgtggagacctgcccgcccccgtactaccacttccaggactggcgctgtgtgaacttcagcttctgccaggacctgcaccacaaatgcaagaactcgcggaggcagggctgccaccaatacgtcattcacaacaacaagtgcatccctgagtgtccctccgggtacacgatgaattccagcaacttgctgtgcaccccatgcctgggtccctgtcccaaggtgtgccacctcctagaaggcgagaagaccatcgactcggtgacgtctgcccaggagctccgaggatgcaccgtcatcaacgggagtctgatcatcaacattcgaggaggcaacaatctggcagctgagctagaagccaacctcggcctcattgaagaaatttcagggtatctaaaaatccgccgatcctacgctctggtgtcactttccttcttccggaagttacgtctgattcgaggagagaccttggaaattgggaactactccttctatgccttggacaaccagaacctaaggcagctctgggactggagcaaacacaacctcaccaccactcaggggaaactcttcttccactataaccccaaactctgcttgtcagaaatccacaagatggaagaagtttcaggaaccaaggggcgccaggagagaaacgacattgccctgaagaccaatggggacaaggcatcctgtgaaaatgagttacttaaattttcttacattcggacatcttttgacaagatcttgctgagatgggagccgtactggccccccgacttccgagacctcttggggttcatgctgttctacaaagaggccccttatcagaatgtgacggagttcgatgggcaggatgcgtgtggttccaacagttggacggtggtagacattgacccacccctgaggtccaacgaccccaaatcacagaaccacccagggtggctgatgcggggtctcaagccctggacccagtatgccatctttgtgaagaccctggtcaccttttcggatgaacgccggacctatggggccaagagtgacatcatttatgtccagacagatgccaccaacccctctgtgcccctggatccaatctcagtgtctaactcatcatcccagattattctgaagtggaaaccaccctccgaccccaatggcaacatcacccactacctggttttctgggagaggcaggcggaagacagtgagctgttcgagctggattattgcctcaaagggctgaagctgccctcgaggacctggtctccaccattcgagtctgaagattctcagaagcacaaccagagtgagtatgaggattcggccggcgaatgctgctcctgtccaaagacagactctcagatcctgaaggagctggaggagtcctcgtttaggaagacgtttgaggattacctgcacaacgtggttttcgtccccagaaaaacctcttcaggcactggtgccgaggaccctaggccatctcggaaacgcaggtcccttggcgatgttgggaatgtgacggtggccgtgcccacggtggcagctttccccaacacttcctcgaccagcgtgcccacgagtccggaggagcacaggccttttgagaaggtggtgaacaaggagtcgctggtcatctccggcttgcgacacttcacgggctatcgcatcgagctgcaggcttgcaaccaggacacccctgaggaacggtgcagtgtggcagcctacgtcagtgcgaggaccatgcctgaagccaaggctgatgacattgttggccctgtgacgcatgaaatctttgagaacaacgtcgtccacttgatgtggcaggagccgaaggagcccaatggtctgatcgtgctgtatgaagtgagttatcggcgatatggtgatgaggagctgcatctctgcgtctcccgcaagcacttcgctctggaacggggctgcaggctgcgtgggctgtcaccggggaactacagcgtgcgaatccgggccacctcccttgcgggcaacggctcttggacggaacccacctatttctacgtgacagactatttagacgtcccgtcaaatattgcaaaaattatcatcggccccctcatctttgtctttctcttcagtgttgtgattggaagtatttatctattcctgagaaagaggcagccagatgggccgctgggaccgctttacgcttcttcaaaccctgagtatctcagtgccagtgatgtgtttccatgctctgtgtacgtgccggacgagtgggaggtgtctcgagagaagatcaccctccttcgagagctggggcagggctccttcggcatggtgtatgagggcaatgccagggacatcatcaagggtgaggcagagacccgcgtggcggtgaagacggtcaacgagtcagccagtctccgagagcggattgagttcctcaatgaggcctcggtcatgaagggcttcacctgccatcacgtggtgcgcctcctgggagtggtgtccaagggccagcccacgctggtggtgatggagctgatggctcacggagacctgaagagctacctccgttctctgcggccagaggctgagaataatcctggccgccctccccctacccttcaagagatgattcagatggcggcagagattgctgacgggatggcctacctgaacgccaagaagtttgtgcatcgggacctggcagcgagaaactgcatggtcgcccatgattttactgtcaaaattggagactttggaatgaccagagacatctatgaaacggattactaccggaaagggggcaagggtctgctccctgtacggtggatggcaccggagtccctgaaggatggggtcttcaccacttcttctgacatgtggtcctttggcgtggtcctttgggaaatcaccagcttggcagaacagccttaccaaggcctgtctaatgaacaggtgttgaaatttgtcatggatggagggtatctggatcaacccgacaactgtccagagagagtcactgacctcatgcgcatgtgctggcaattcaaccccaagatgaggccaaccttcctggagattgtcaacctgctcaaggacgacctgcaccccagctttccagaggtgtcgttcttccacagcgaggagaacaaggctcccgagagtgaggagctggagatggagtttgaggacatggagaatgtgcccctggaccgttcctcgcactgtcagagggaggaggcggggggccgggatggagggtcctcgctgggtttcaagcggagctacgaggaacacatcccttacacacacatgaacggaggcaagaaaaacgggcggattctgaccttgcctcggtccaatccttcctaacagtgcctaccgtggcgggggcgggcaggggttcccattttcgctttcctctggtttgaaagcctctggaaaactcaggattctcacgactctaccatgtccagtggagttcagagatcgttcctatacatttctgttcatcttaaggtggactcgtttggttaccaatttaactagtcctgcagaggatttaactgtgaacctggagggcaaggggtttccacagttgctgctcctttggggcaacgacggtttcaaaccaggattttgtgttttttcgttccccccacccgcccccagcagatggaaagaaagcacctgtttttacaaattcttttttttttttttttttttttttttttgctggtgtctgagcttcagtataaaagacaaaacttcctgtttgtggaacaaaatttcgaaagaaaaaaccaaa

SEQ ID NO: 14638 - DNA, 4989 bp, Homo sapiens
ttttttttttttttgagaaagggaatttcatcccaaataaaaggaatgaagtctggctccggaggagggtccccgacctcgctgtgggggctcctgtttctctccgccgcgctctcgctctggccgacgagtggagaaatctgcgggccaggcatcgacatccgcaacgactatcagcagctgaagcgcctggagaactgcacggtgatcgagggctacctccacatcctgctcatctccaaggccgaggactaccgcagctaccgcttccccaagctcacggtcattaccgagtacttgctgctgttccgagtggctggcctcgagagcctcggagacctcttccccaacctcacggtcatccgcggctggaaactcttctacaactacgccctggtcatcttcgagatgaccaatctcaaggatattgggctttacaacctgaggaacattactcggggggccatcaggattgagaaaaatgctgacctctgttacctctccactgtggactggtccctgatcctggatgcggtgtccaataactacattgtggggaataagcccccaaaggaatgtggggacctgtgtccagggaccatggaggagaagccgatgtgtgagaagaccaccatcaacaatgagtacaactaccgctgctggaccacaaaccgctgccagaaaatgtgcccaagcacgtgtgggaagcgggcgtgcaccgagaacaatgagtgctgccaccccgagtgcctgggcagctgcagcgcgcctgacaacgacacggcctgtgtagcttgccgccactactactatgccggtgtctgtgtgcctgcctgcccgcccaacacctacaggtttgagggctggcgctgtgtggaccgtgacttctgcgccaacatcctcagcgccgagagcagcgactccgaggggtttgtgatccacgacggcgagtgcatgcaggagtgcccctcgggcttcatccgcaacggcagccagagcatgtactgcatcccttgtgaaggtccttgcccgaaggtctgtgaggaagaaaagaaaacaaagaccattgattctgttacttctgctcagatgctccaaggatgcaccatcttcaagggcaatttgctcattaacatccgacgggggaataacattgcttcagagctggagaacttcatggggctcatcgaggtggtgacgggctacgtgaagatccgccattctcatgccttggtctccttgtccttcctaaaaaaccttcgcctcatcctaggagaggagcagctagaagggaattactccttctacgtcctcgacaaccagaacttgcagcaactgtgggactgggaccaccgcaacctgaccatcaaagcagggaaaatgtactttgctttcaatcccaaattatgtgtttccgaaatttaccgcatggaggaagtgacggggactaaagggcgccaaagcaaaggggacataaacaccaggaacaacggggagagagcctcctgtgaaagtgacgtcctgcatttcacctccaccaccacgtcgaagaatcgcatcatcataacctggcaccggtaccggccccctgactacagggatctcatcagcttcaccgtttactacaaggaagcaccctttaagaatgtcacagagtatgatgggcaggatgcctgcggctccaacagctggaacatggtggacgtggacctcccgcccaacaaggacgtggagcccggcatcttactacatgggctgaagccctggactcagtacgccgtttacgtcaaggctgtgaccctcaccatggtggagaacgaccatatccgtggggccaagagtgagatcttgtacattcgcaccaatgcttcagttccttccattcccttggacgttctttcagcatcgaactcctcttctcagttaatcgtgaagtggaaccctccctctctgcccaacggcaacctgagttactacattgtgcgctggcagcggcagcctcaggacggctacctttaccggcacaattactgctccaaagacaaaatccccatcaggaagtatgccgacggcaccatcgacattgaggaggtcacagagaaccccaagactgaggtgtgtggtggggagaaagggccttgctgcgcctgccccaaaactgaagccgagaagcaggccgagaaggaggaggctgaataccgcaaagtctttgagaatttcctgcacaactccatcttcgtgcccagacctgaaaggaagcggagagatgtcatgcaagtggccaacaccaccatgtccagccgaagcaggaacaccacggccgcagacacctacaacatcaccgacccggaagagctggagacagagtaccctttctttgagagcagagtggataacaaggagagaactgtcatttctaaccttcggcctttcacattgtaccgcatcgatatccacagctgcaaccacgaggctgagaagctgggctgcagcgcctccaacttcgtctttgcaaggactatgcccgcagaaggagcagatgacattcctgggccagtgacctgggagccaaggcctgaaaactccatctttttaaagtggccggaacctgagaatcccaatggattgattctaatgtatgaaataaaatacggatcacaagttgaggatcagcgagaatgtgtgtccagacaggaatacaggaagtatggaggggccaagctaaaccggctaaacccggggaactacacagcccggattcaggccacatctctctctgggaatgggtcgtggacagatcctgtgttcttctatgtccaggccaaaacaggatatgaaaacttcatccatctgatcatcgctctgcccgtcgctgtcctgttgatcgtgggagggttggtgattatgctgtacgtcttccatagaaagagaaataacagcaggctggggaatggagtgctgtatgcctctgtgaacccggagtacttcagcgctgctgatgtgtacgttcctgatgagtgggaggtggctcgggagaagatcaccatgagccgggaacttgggcaggggtcgtttgggatggtctatgaaggagttgccaagggtgtggtgaaagatgaacctgaaaccagagtggccattaaaacagtgaacgaggccgcaagcatgcgtgagaggattgagtttctcaacgaagcttctgtgatgaaggagttcaattgtcaccatgtggtgcgattgctgggtgtggtgtcccaaggccagccaacactggtcatcatggaactgatgacacggggcgatctcaaaagttatctccggtctctgaggccagaaatggagaataatccagtcctagcacctccaagcctgagcaagatgattcagatggccggagagattgcagacggcatggcatacctcaacgccaataagttcgtccacagagaccttgctgcccggaattgcatggtagccgaagatttcacagtcaaaatcggagattttggtatgacgcgagatatctatgagacagactattaccggaaaggaggcaaagggctgctgcccgtgcgctggatgtctcctgagtccctcaaggatggagtcttcaccacttactcggacgtctggtccttcggggtcgtcctctgggagatcgccacactggccgagcagccctaccagggcttgtccaacgagcaagtccttcgcttcgtcatggagggcggccttctggacaagccagacaactgtcctgacatgctgtttgaactgatgcgcatgtgctggcagtataaccccaagatgaggccttccttcctggagatcatcagcagcatcaaagaggagatggagcctggcttccgggaggtctccttctactacagcgaggagaacaagctgcccgagccggaggagctggacctggagccagagaacatggagagcgtccccctggacccctcggcctcctcgtcctccctgccactgcccgacagacactcaggacacaaggccgagaacggccccggccctggggtgctggtcctccgcgccagcttcgacgagagacagccttacgcccacatgaacgggggccgcaagaacgagcgggccttgccgctgccccagtcttcgacctgctgatccttggatcctgaatctgtgcaaacagtaacgtgtgcgcacgcgcagcggggtggggggggagagagagttttaacaatccattcacaagcctcctgtacctcagtggatcttcagttctgcccttgctgcccgcgggagacagcttctctgcagtaaaacacatttgggatgttccttttttcaatatgcaagcagctttttattccctgcccaaacccttaactgacatgggcctttaagaaccttaatgacaacacttaatagcaacagagcacttgagaaccagtctcctcactctgtccctgtccttccctgttctccctttctctctcctctctgcttcataacggaaaaataattgccacaagtccagctgggaagccctttttatcagtttgaggaagtggctgtccctgtggccccatccaaccactgtacacacccgcctgacaccgtgggtcattacaaaaaaacacgtggagatggaaatttttacctttatctttcacctttctagggacatgaaatttacaaagggccatcgttcatccaaggctgttaccattttaacgctgcctaattttgccaaaatcctgaactttctccctcatcggcccggcgctgattcctcgtgtccggaggcatgggtgagcatggcagctggttgctccatttgagagacacgctggcgacacactccgtccatccgactgcccctgctgtgctgctcaaggccacaggcacacaggtctcattgcttctgactagattattatttgggggaactggacacaataggtctttctctcagtgaaggtggggagaagctgaaccggc

SEQ ID NO: 14639 - DNA, 582 bp, Homo sapiens
tttcctttcggccggaaccgccatcttccagtaattcgccaaaatgacgaacacaaagggaaagaggagaggcacccgatatatgttctctaggccttttagaaaacatggagttgttcctttggccacatatatgcgaatctataagaaaggtgatattgtagacatcaagggaatgggtactgttcaaaaaggaatgccccacaagtgttaccatggcaaaactggaagagtctacaatgttacccagcatgctgttggcattgttgtaaacaaacaagttaagggcaagattcttgccaagagaattaatgtgcgtattgagcacattaagcactctaagagccgagatagcttcctgaaacgtgtgaaggaaaatgatcagaaaaagaaagaagccaaagagaaaggtacctgggttcaactaaagcgccagcctgctccacccagagaagcacactttgtgagaaccaatgggaaggagcctgagctgctggaacctattccctatgaattcatggcataataggtgttaaaaaaaaaaataaaggacctctgggctacaaaaaaaaaaaaaaaaaa

SEQ ID NO: 14640 - DNA, 3675 bp, Homo sapiens
tagacctcagcttcctctgtcaccatggtgccggctcggctgggcccggcggtcgccatggtaactggggcgggtcgcagggtcctggcaggctgggcgcatgcgcgcggggactacaagccgcgccgcgctgccgctggcccctcagcaaccctcgacatggcgctgaggcggccaccgcgactccggctctgcgctcggctgcctgacttcttcctgctgctgcttttcaggggctgcctgataggggctgtaaatctcaaatccagcaatcgaaccccagtggtacaggaatttgaaagtgtggaactgtcttgcatcattacggattcgcagacaagtgaccccaggatcgagtggaagaaaattcaagatgaacaaaccacatatgtgttttttgacaacaaaattcagggagacttggcgggtcgtgcagaaatactggggaagacatccctgaagatctggaatgtgacacggagagactcagccctttatcgctgtgaggtcgttgctcgaaatgaccgcaaggaaattgatgagattgtgatcgagttaactgtgcaagtgaagccagtgacccctgtctgtagagtgccgaaggctgtaccagtaggcaagatggcaacactgcactgccaggagagtgagggccacccccggcctcactacagctggtatcgcaatgatgtaccactgcccacggattccagagccaatcccagatttcgcaattcttctttccacttaaactctgaaacaggcactttggtgttcactgctgttcacaaggacgactctgggcagtactactgcattgcttccaatgacgcaggctcagccaggtgtgaggagcaggagatggaagtctatgacctgaacattggcggaattattgggggggttctggttgtccttgctgtactggccctgatcacgttgggcatctgctgtgcatacagacgtggctacttcatcaacaataaacaggatggagaaagttacaagaacccagggaaaccagatggagttaactacatccgcactgacgaggagggcgacttcagacacaagtcatcgtttgtgatctgagacccgcggtgtggctgagagcgcacagagcgcacgtgcacatacctctgctagaaactcctgtcaaggcagcgagagctgatgcactcggacagagctagacactcattcagaagcttttcgttttggccaaagttgaccactactcttcttactctaacaagccacatgaatagaagaattttcctcaagatggacccggtaaatataaccacaaggaagcgaaactgggtgcgttcactgagttgggttcctaatctgtttctggcctgattcccgcatgagtattagggtgatcttaaagagtttgctcacgtaaacgcccgtgctgggccctgtgaagccagcatgttcaccactggtcgttcagcagccacgacagcaccatgtgagatggcgaggtggctggacagcaccagcagcgcatcccggcgggaacccagaaaaggcttcttacacagcagccttacttcatcggcccacagacaccaccgcagtttcttcttaaaggctctgctgatcggtgttgcagtgtccattgtggagaagctttttggatcagcattttgtaaaaacaaccaaaatcaggaaggtaaattggttgctggaagagggatcttgcctgaggaaccctgcttgtccaacagggtgtcaggatttaaggaaaaccttcgtcttaggctaagtctgaaatggtactgaaatatgcttttctatgggtcttgtttattttataaaattttacatctaaatttttgctaaggatgtattttgattattgaaaagaaaatttctatttaaactgtaaatatattgtcatacaatgttaaataacctatttttttaaaaaagttcaacttaaggtagaagttccaagctactagtgttaaattggaaaatatcaataattaagagtattttacccaaggaatcctctcatggaagtttactgtgatgttccttttctcacacaagttttagcctttttcacaagggaactcatactgtctacacatcagaccatagttgcttaggaaacctttaaaaattccagttaagcaatgttgaaatcagtttgcatctcttcaaaagaaacctctcaggttagctttgaactgcctcttcctgagatgactaggacagtctgtacccagaggccacccagaagccctcagatgtacatacacagatgccagtcagctcctggggttgcgccaggcgcccccgctctagctcactgttgcctcgctgtctgccaggaggccctgccatccttgggccctggcagtggctgtgtcccagtgagctttactcacgtggcccttgcttcatccagcacagctctcaggtgggcactgcagggacactggtgtcttccatgtagcgtcccagctttgggctcctgtaacagacctctttttggttatggatggctcacaaaatagggcccccaatgctattttttttttttaagtttgtttaattatttgttaagattgtctaaggccaaaggcaattgcgaaatcaagtctgtcaagtacaataacatttttaaaagaaaatggatcccactgttcctctttgccacagagaaagcacccagacgccacaggctctgtcgcatttcaaaacaaaccatgatggagtggcggccagtccagccttttaaagaacgtcaggtggagcagccaggtgaaaggcctggcggggaggaaagtgaaacgcctgaatcaaaagcagttttctaattttgactttaaatttttcatccgccggagacactgctcccatttgtggggggacattagcaacatcactcagaagcctgtgttcttcaagagcaggtgttctcagcctcacatgccctgccgtgctggactcaggactgaagtgctgtaaagcaaggagctgctgagaaggagcactccactgtgtgcctggagaatggctctcactactcaccttgtctttcagcttccagtgtcttgggttttttatactttgacagcttttttttaattgcatacatgagactgtgttgactttttttagttatgtgaaacactttgccgcaggccgcctggcagaggcaggaaatgctccagcagtggctcagtgctccctggtgtctgctgcatggcatcctggatgcttagcatgcaagttccctccatcattgccaccttggtagagagggatggctccccaccctcagcgttggggattcacgctccagcctccttcttggttgtcatagtgatagggtagccttattgccccctcttcttataccctaaaaccttctacactagtgccatgggaaccaggtctgaaaaagtagagagaagtgaaagtagagtctgggaagtagctgcctataactgagactagacggaaaaggaatactcgtgtattttaagatatgaatgtgactcaagactcgaggccgatacgaggctgtgattctgcctttggatggatgttgctgtacacagatgctacagacttgtactaacacaccgtaatttggcatttgtttaacctcatttataaaagcttcaaaaaaacccaaaaaaacccaaa

SEQ ID NO: 14641 - DNA, 6127 bp, Homo sapiens
agagagaggagagggagaaggagagaggggcagaggggaagggagagagggagagcacgcgagacggaaaggagcgcctcagagtctctgaagcacgcaagagataaccgattaggaatttttcgggcaactgtcacccggatagctgtcagagaatcatcatcaccgcaactctgacgtttcctacaagaagttagagacttaagcagtattggcatcggatggaaatggtatgcatgctgctgtggaaaatatccctgagctgaagaagtgcaactatgtgttgtgtgtgctaaatgcccagaagaacccagacccagtgggtaagagagacgaaatgtggagagaatgactaacgacaaatccgtgaatttgttctctggagttgctaatttgccagcccgaagcaacacattttacaaggaggaaacattttgctgcttctgatttctccccaaactggtgctaccagatgcatggctttctatgtgttggaacaaatcattcctaactgcagcatactgggaaaggggaaaggttgaggcaactaaccggctgtctccaaataagtgatgagatataatgcatcctccagtccatgcacgcttcctcttgcaatttgtgcatcattcctcagtggaaacctttaaaccctaaaatccaggaaaagaaaataaatacattatcatggacctgagggatttttacctgttggctgctctgattgcctgtttaaggctggattccgcaatagctcaagaacttatttacactattagagaggaattgcctgaaaatgtgcccataggaaacataccaaaggatctgaacatttctcacatcaatgctgccacagggaccagcgccagccttgtctacagactggtttctaaagctggggatgcccctttggtgaaagtatccagcagcactggggaaattttcacaacctccaacagaatagacagagaaaaactctgtgctggcgcctcatatgctgaggagaatgagtgtttctttgaacttgaggtggtgatcctccccaatgatttcttcaggctgatcaaaataaaaataattgtcaaggataccaatgataatgcccccatgtttccatctcctgtcatcaatatttccattccagaaaacactttgatcaacagccgctttccaattccatcagcaacagatcctgacacaggcttcaatggtgtacagcattatgaattgttaaatgggcagagtgtttttggactggatatcgtggaaactccagagggagagaagtggccacaactgattgttcagcaaaacttggatagagaacagaaagatacctatgtgatgaaaatcaaagtagaggatggaggcactccacagaaatccagtacggccatactgcaggtcacagtaagtgatgtaaatgacaacaggccagtgtttaaagagggtcaagtggaggtgcatattccagagaatgctcccgtaggtacctctgtaattcagctccatgccactgatgcagatataggcagtaatgctgaaatccggtacatttttggtgcccaggtcgcccctgcaaccaaaagactctttgctttaaataatactactgggctgattacagttcagaggtccttagatagagaggagacagccattcacaaagtgacagtgctggctagtgacggcagctccactcctgctcgagcaacggttaccatcaatgtcaccgatgtaaatgataaccctcctaatatagacctcaggtacattataagtcccatcaatggcaccgtgtatttatctgagaaagatcctgtcaatacaaagattgccctaattacagtttcagataaggacacagatgtgaatggcaaagtgatctgttttattgaaagagaggtcccatttcatttgaaggcggtatatgacaaccaatatttgttagagacctcttctttgttggactatgagggcaccaaagaattcagctttaaaattgttgcctctgattctgggaagcccagtttaaatcagactgccctggtaagggttaagcttgaggatgaaaatgacaacccaccaattttcaaccagcctgtaattgagctgtcagtttctgaaaacaaccgacgtgggttatacttaacaactattagtgccacagatgaagacagtgggaaaaatgcagacattgtttatcagcttggaccgaatgcctccttctttgatctggaccgaaaaacaggagttttgacagcctccagagtatttgacagagaagaacaagaacgattcatttttacagtaactgccagggacaatgggacccctcccctccaaagccaagcggctgtgattgttactgttctggatgagaatgacaatagccccaagtttactcataatcattttcaattttttgtgtctgagaatctgccaaagtatagtactgtgggggtaatcacagtgacagatgcagatgctggagagaataaagctgtgactctttccattctaaatgacaatgataattttgtgttggatccctattctggagtcataaagtcaaatgtctcatttgatagagagcagcagagttcctacacttttgatgtcaaagccactgatggaggacaaccacctcgttcctctactgcaaaagtaactatcaacgtcatggatgtcaatgacaacagcccagttgtcatttctccaccgtctaatacttcctttaagttggtgcccctctcagccattcctggctccgtggtagcagaagtttttgcagtggatgttgacactggaatgaacgctgaactaaagtatactatagtgagtggaaacaataaaggcttattccggattgatccagtaacaggtaacattactctggaagaaaaaccagcacctactgatgtgggattgcatcgtttggtggtcaacataagtgacctggggtaccctaagtctttgcacacgcttgtgcttgtattcctttatgttaacgacactgctggaaatgcctcctatatctatgacttgatccgcaggactatggagaccccgttggacaggaacataggggatagtagccaaccctatcaaaatgaggactatctaaccatcatgattgccatcatcgccggtgccatggtggtcattgttgtgatcttcgtcaccgttctggtgcgctgtcgccatgcatcaaggttcaaagcagctcagaggagcaagcaaggtgccgaatggatgtccccaaaccaggagaacaagcaaaacaagaaaaagaaaagaaagaaaaggaagtctcccaaaagctctcttttgaactttgttactatcgaagagtccaaacccgatgatgcagttcatgaacctatcaatgggacaataagcctgccggctgaactggaggagcaaagtataggaagatttgactggggcccggcacctccaacaacattcaagcctaacagtcctgacctggccaagcactacaaatctgcttctccacagcctgcttttcatctcaaaccagacactccagtttccgtgaaaaagcaccacgtgattcaggaactccctttggacaacacctttgttgggggttgtgacaccctttctaaacgctcttccactagttcagatcacttcagtgcctcagagtgcagttcccaaggaggcttcaagacaaagggccccttacacaccagacagtcgcagcgccgtgttacgtttcatctccctgatggctcccaggaaagctgcagtgacagtggtctaggagaccatgagccggtgggtagtggaaccctgatctcacaccctcttcctctggttcagccacaggacgaattctatgaccaggcctctccggacaagaggactgaagcagatggcaactctgatcccaactctgatgggcctttgggtccccgaggattagctgaagctacagagatgtgcactcaagagtgcttggttttgggtcactctgataattgctggatgcctcctggcttgggtccatatcaacaccccaaatctcctctctcaacctttgcaccccagaaagaatgggtgaagaaggacaagcttgtgaatgggcacaccctgaccagagcctggaaagaagacagcaacaggaaccagttcaatgaccgtaagcagtatggctccaatgaaggccatttcaacaatggcagccacatgacagacattcctctggcaaatctgaagtcttataagcaagcaggaggtgctactgagagtcctaaggagcaccaactctaagaaaaggctatatgggacctaataactttaaatagacatgctaataccgtgtgcgtcagagctttatgtattcaatagatctctacaactatgccccttctagcagggatacctataactttgtgttagcaccatggagaatacaatgtttttgcaacatatgagagaagatagttctagccatgcaattttgtttactagaattgattacactctccagagatctctccattgtgcaaattttttttattattgcattttattttgaccctggactgctgctatgaacaatagaatatgcatttggaaagtaagaaagtttcatggattagagtgactgaaaaacatatccagttagaaaattgtgcttttttttttttttttttttttttttgtcattgatttgtgctgggactgctatacttgacattatactgcaaacaaaacttaaagagataagcattaaacctattgtgctgttaacaacgttagtggacacttgtaagtcaatcagtgttaaagtatttgtaaatagaagcaagctattattaacaacttttgtgtacttataatgttcacctaaaaatgttgtagcataattctgtgttttatggttgcttctgtccttctttttatttacctctttgttgttatttttgttgtttctttcagtgaggtgtttctgtgttagtagtctgtcttgacacacattgttcaaacaatctcaagcacttgtgtttaaaaaaggttctgaaatcttgcttctcatatgatagcttatgatgccggaattctgtaaacaataaagatgaaagaaaaaatgaaaactttatacaaaaaaggacttctgcaaaagcttggaaattcagaacctattttttatcatcttattttcaaagtaggcaaaagcaaaatcacttaattagtaccattaagtgagagagtaatggaaaactgttatccatcaaaagtgatataatatcctgtacttgtcactcatgtaaaactaatgtatcaaaattagcatatatggaagaaaaatcactattcaaaaatagtttcaattgggcaaatgtgtgtctacaactttgttgaaatggcagagtctgtgttgatcctcatatacaataatgttgttgtaacacaagtgttattagaccatagccacaaaatatttaatgtgttgtgccttcatgatgtaacagaacattctccaggtagggtagttgggggaaataaagggataaatctctaattattgctgtttaactgtttgttatcatagttggtcaatgcctggcaggtaccagcatattgtcacttaggtcaaaccaataaagtgacaactaatgttaataagatctcagttgcacgtgcaaacaaatccaaattcgaacattcttaggaggtttttgttaaggcatgacagatgatttaaacaaataaatagcatgcaacaaaatgtctttattgaaagaagtggaagttatcttaatgccacggttcaccatcaatttaaaagtaaaaaaaacaaaaaaaaaacaaaaaatttaaaaaaaaggtttgctaatctgatagttaatttgttcttaccaaaaaataaaattactttgtaaatagcagttcacatttttccacagtataatggaaaataatgggtaggggtgcattgcttattgaagtacatttttgtcggtttgtgaggggtgtttgatgactttgacagaataaatatctaaacaattatccttgttactgctttgccagttctacgttatttacaattattcagctcttgcaataaatgttctgaattcctgaaaaaaaa

SEQ ID NO: 14642 - DNA, 2072 bp, Homo sapiens
gggcagtcgtaggagactctgaaaaagcaaataaatcaatgttaaatcagaaatgtgaatgtagtaaggggctgaagagacaggggaagagaatacatgggaaaatattgaaaaggacagagtgatcaaaaaaagcagggacatgggagcattgggcagcacactgggagccatttactttatgctcttattgtatgattgagaaaaaaaatgtccttagtggttaagtggcttttcaatgccacatcagacttgttccatagcagttgaattaggggaaggtgaataagttggaggttggtgacaaggagagaagctggaacagagaggagagtcagaaccagagggaaatgagagactgagtaggcatctcagggtttttgaaggagtggattttctttgttgcagtcaggggaggtttgtctgttggctgcagaaagaagtcagaatagagatatcgtggggtaggtttgtttggaacagaaatcaaagaccaatttttctgagagaaggaaataacatctgcaaatgatatgctgtttttgctacttccattgttagctgttctcccaggtgatggcaatgcagacgggctcaaggagcctctctccttccatgtcatctggatcgcatccttttacaaccattcctggaaacaaaatctggtctcaggttggctgagtgatttgcagactcatacctgggacagcaattccagcaccatcgttttcctgtggccctggtccaggggaaacttcagcaatgaggagtggaaggaactggaaacattattccgtatacgcaccattcggtcatttgagggaattcgtagatacgcccatgaattgcagtttgaatatccttttgagatacaggtgacaggaggctgtgagctgcactctggaaaggtctcaggaagcttcttgcagttagcttatcaaggatcagactttgtgagcttccagaacaattcatggttgccatatccagtggctgggaatatggccaagcatttctgcaaagtgctcaatcagaatcagcatgaaaatgacataacacacaatcttctcagtgacacctgcccacgtttcatcttgggtcttcttgatgcaggaaaggcacatctccagcggcaagtgaagcccgaggcctggctgtcccatggccccagtcctggccctggccatctgcagcttgtgtgccatgtctcaggattctacccaaagcccgtgtgggtgatgtggatgcggggtgagcaggagcagcagggcactcagcgaggggacatcttgcccagtgctgatgggacatggtatctccgcgcaaccctggaggtggccgctggggaggcagctgacctgtcctgtcgggtgaagcacagcagtctagagggccaggacatcgtcctctactgggagcatcacagttccgtgggcttcatcatcttggcggtgatagtgcctttacttcttctgataggtcttgcgctttggttcaggaaacgctgtttctgttaagacacaccatgagcctcctcgtcacccttctccttttggggtgagagaccagcagcccaagggctccagacacacctgaacacatcgtgatgatgacgtcctctcaactctctttgtaaaaattttgttatttttgcttgtttctgattaatgattgtttgtcaatataagctcaatttaattttgcaggatttgttgttctgacctgggttctgggacttttaaattcaaattttatctccagatggaatggggtcctagcaacctccacatgttcacctattaatggatcatcaggcctgttttagatatcccttactccagagggccttccctgacttacaagtgggaagcagtctcttcctggtctgaactcccgccacattttagccgtactttgctaactgtgctcctcacttcctcttcttcattgcagttatttagatcccccctttccttctaatttttcagctccttcaatgcaaagtacatgtatttttaatatatgcatccctggtgaaggatcttgcctgcatgaaacatgttctcaataaa

SEQ ID NO: 14643 - DNA, 2984 bp, Homo sapiens
gaggaggaacagaaaagaaaagaaaagaaaaagtgggaaacaaataatctaagaatgaggagaaagcaagaagagtgacccccttgtgggcactccattggttttatggcgcctctactttctggagtttgtgtaaaacaaaaatattatggtctttgtgcacatttacatcaagctcagcctgggcggcacagccagatgcgagatgcgtctctgctgatctgagtctgcctgcagcatggacctgggtcttccctgaagcatctccagggctggagggacgactgccatgcaccgagggctcatccatccacagagcagggcagtgggaggagacgccatgacccccatcctcacggtcctgatctgtctcgggctgagtctgggcccccggacccacgtgcaggcagggcacctccccaagcccaccctctgggctgaaccaggctctgtgatcacccaggggagtcctgtgaccctcaggtgtcaggggggccaggagacccaggagtaccgtctatatagagaaaagaaaacagcaccctggattacacggatcccacaggagcttgtgaagaagggccagttccccatcccatccatcacctgggaacatgcagggcggtatcgctgttactatggtagcgacactgcaggccgctcagagagcagtgaccccctggagctggtggtgacaggagcctacatcaaacccaccctctcagcccagcccagccccgtggtgaactcaggagggaatgtaaccctccagtgtgactcacaggtggcatttgatggcttcattctgtgtaaggaaggagaagatgaacacccacaatgcctgaactcccagccccatgcccgtgggtcgtcccgcgccatcttctccgtgggccccgtgagcccgagtcgcaggtggtggtacaggtgctatgcttatgactcgaactctccctatgagtggtctctacccagtgatctcctggagctcctggtcctaggtgtttctaagaagccatcactctcagtgcagccaggtcctatcgtggcccctgaggagaccctgactctgcagtgtggctctgatgctggctacaacagatttgttctgtataaggacggggaacgtgacttccttcagctcgctggcgcacagccccaggctgggctctcccaggccaacttcaccctgggccctgtgagccgctcctacgggggccagtacagatgctacggtgcacacaacctctcctccgagtggtcggcccccagcgaccccctggacatcctgatcgcaggacagttctatgacagagtctccctctcggtgcagccgggccccacggtggcctcaggagagaacgtgaccctgctgtgtcagtcacagggatggatgcaaactttccttctgaccaaggagggggcagctgatgacccatggcgtctaagatcaacgtaccaatctcaaaaataccaggctgaattccccatgggtcctgtgacctcagcccatgcggggacctacaggtgctacggctcacagagctccaaaccctacctgctgactcaccccagtgaccccctggagctcgtggtctcaggaccgtctgggggccccagctccccgacaacaggccccacctccacatctggccctgaggaccagcccctcacccccaccgggtcggatccccagagtggtctgggaaggcacctgggggttgtgatcggcatcttggtggccgtcatcctactgctcctcctcctcctcctcctcttcctcatcctccgacatcgacgtcagggcaaacactggacatcgacccagagaaaggctgatttccaacatcctgcaggggctgtggggccagagcccacagacagaggcctgcagtggaggtccagcccagctgccgatgcccaggaagaaaacctctatgctgccgtgaagcacacacagcctgaggatggggtggagatggacactcggagcccacacgatgaagacccccaggcagtgacgtatgccgaggtgaaacactccagacctaggagagaaatggcctctcctccttccccactgtctggggaattcctggacacaaaggacagacaggcggaagaggacaggcagatggacactgaggctgctgcatctgaagccccccaggatgtgacctacgcccagctgcacagcttgacccttagacggaaggcaactgagcctcctccatcccaggaagggccctctccagctgtgcccagcatctacgccactctggccatccactagcccagggggggacgcagaccccacactccatggagtctggaatgcatgggagctgcccccccagtggacaccattggaccccacccagcctggatctaccccaggagactctgggaacttttaggggtcactcaattctgcagtataaataactaatgtctctacaattttgaaataaagcaacagacttctcaataatcaatgaagtagctgagaaaactaagtcagaaagtgcattaaactgaatcacaatgtaaatattacacatcaagcgatgaaactggaaaactacaagccacgaatgaatgaattaggaaagaaaaaaagtaggaaatgaatgatcttggctttcctataagaaatttagggcagggcacggtggctcacgcctgtaattccagcactttgggaggccgaggcgggcagatcacgagttcaggagatcgagaccatcttggccaacatggtgaaaccctgtctctcctaaaaatacaaaaattagctggatgtggtggcagtgcctgtaatcccagctatttgggaggctgaggcaggagaatcgcttgaaccagggagtcagaggtttcagtgagccaagatcgcaccactgctctccagcctggcgacagagggagactccatctcaaattaaaaaaaaaaaaaaaaaagaaagaaaaaaaaaaaaaaaaaa

SEQ ID NO: 14644 - DNA, 1567 bp, Homo sapiens
gtcgtcacagcatgatcatattttttcacccttcacttctccttttacacaaatagccccggatatctgtgttaccagccttgtctcggccacctcaaggataatcactaaattctgccgaaaggactgaggaacggtgcctggaaaagggcaagaatatcacggcatgggcatgagtagcttgaaactgctgaagtatgtcctgtttttcttcaacttgctcttttggatctgtggctgctgcattttgggctttgggatctacctgctgatccacaacaacttcggagtgctcttccataacctcccctccctcacgctgggcaatgtgtttgtcatcgtgggctctattatcatggtagttgccttcctgggctgcatgggctctatcaaggaaaacaagtgtctgcttatgtcgttcttcatcctgctgctgattatcctccttgctgaggtgaccttggccatcctgctctttgtatatgaacagaagctgaatgagtatgtggctaagggtctgaccgacagcatccaccgttaccactcagacaatagcaccaaggcagcgtgggactccatccagtcatttctgcagtgttgtggtataaatggcacgagtgattggaccagtggcccaccagcatcttgcccctcagatcgaaaagtggagggttgctatgcgaaagcaagactgtggtttcattccaatttcctgtatatcggaatcatcaccatctgtgtatgtgtgattgaggtgttggggatgtcctttgcactgaccctgaactgccagattgacaaaaccagccagaccatagggctatgatctgcagtagtcctgtggtgaagagacttgtttcatctccggaaatgcaaaaccatttatagcatgaagccctacatgatcactgcaggatgatcctcctcccatcctttccctttttaggtccctgtcttatacaaccagagaagtgggtgttggccaggcacatcccatctcaggcagcaagacaatctttcactcactgacggcagcagccatgtctctcaaagtggtgaaactaatatctgagcatcttttagacaagagaggcaaagacaaactggatttaatggcccaacatcaaagggtgaacccaggatatgaatttttgcatcttcccattgtcgaattagtctccagcctctaaataatgcccagtcttctccccaaagtcaagcaagagactagttgaagggagttctggggccaggctcactggaccattgtcacaaccctctgtttctctttgactaagtgccctggctacaggaattacacagttctctttctccaaagggcaagatctcatttcaatttctttattagagggccttattgatgtgttctaagtctttccagaaaaaaactatccagtgatttatatcctgatttcaaccagtcacttagctgataatcacagtaagaagacttctggtattatctctctatcagataagattttgttaatgtactattttactcttcaataaataaaagtttattatctcaatcacaacattgcta

SEQ ID NO: 14645 - DNA, 2214 bp, Homo sapiens
cctgtttcccaggaacggtccccggcttcgcgccccaatttctaacagcctgcctgtcccccgggaacgttctaacatccttggggagcgccccagctacaagacactgtcctgagaacgctgtcatcacccgtagttgcaagtttcggagcggcagtgggaagcatgcgggactacgacgaggtgatcgccttcctgggcgagtgggggcccttccagcgcctcatcttcttcctgctcagcgccagcatcatccccaatggcttcaatggtatgtcagtcgtgttcctggcggggaccccggagcaccgctgtcgagtgccggacgccgcgaacctgagcagcgcctggcgcaacaacagtgtcccgctgcggctgcgggacggccgcgaggtgccccacagctgcagccgctaccggctcgccaccatcgccaacttctcggcgctcgggctggagccggggcgcgacgtggacctggggcagctggagcaggagagctgcctggatggctgggagttcagccaggacgtctacctgtccaccgtcgtgaccgagtggaatctggtgtgtgaggacaactggaaggtgcccctcaccacctccctgttcttcgtaggcgtgctcctcggctccttcgtgtccgggcagctgtcagacaggtttggcaggaagaacgttctcttcgcaaccatggctgtacagactggcttcagcttcctgcagattttctccatcagctgggagatgttcactgtgttatttgtcatcgtgggcatgggccagatctccaactatgtggtagccttcatactaggaacagaaattcttggcaagtcagttcgtattatattctctacattaggagtgtgcacattttttgcagttggctatatgctgctgccactgtttgcttacttcatcagagactggcggatgctgctgctggcgctgacggtgccgggagtgctgtgtgtcccgctgtggtggttcattcctgaatctccccgatggctgatatcccagagaagatttagagaggctgaagatatcatccaaaaagctgcaaaaatgaacaacatagctgtaccagcagtgatatttgattctgtggaggagctaaatcccctgaagcagcagaaagctttcattctggacctgttcaggactcggaatattgccataatgaccattatgtctttgctgctatggatgctgacctcagtgggttactttgctctgtctctggatgctcctaatttacatggagatgcctacctgaactgtttcctctctgccttgattgaaattccagcttacattacagcctggctgctattgcgaaccctgcccaggcgttatatcatagctgcagtactgttctggggaggaggtgtgcttctcttcattcaactggtacctgtggattattacttcttatccattggtctggtcatgctgggaaaatttgggatcacctctgctttctccatgctgtatgtcttcactgctgagctctacccaaccctggtcaggaacatggcggtgggggtcacatccacggcctccagagtgggcagcatcattgccccctactttgtttacctcggtgcttacaacagaatgctgccctacatcgtcatgggtagtctgactgtcctgattggaatcctcaccctttttttccctgaaagtttgggaatgactcttccagaaaccttagagcagatgcagaaagtgaaatggttcagatctgggaaaaaaacaagagactcaatggagacagaagaaaatcccaaggttctaataactgcattctgaaaaaatatctaccccatttggtgaagtgaaaaacagaaaaataagaccctgtggagaaattcgttgttcccactgaaatggactgactgtaacgattgacaccaaaatgaaccttgctatcaagaaatgctcgtcatacagtaaactctggatgattcttccagataatgtccttgctttacaaaccaaccatttctagagagtctccttactcattaattcaatgaaatggattggtaagatgtcttgaaaacatgttagtcaaggactggtaaaatacatataaagattaacactcatttccaatcatacaaatactatccaaataaaaataacatcattgtattaacgcaaatattaggtgacaacaaaaaaaaaaaaaaaaaaaaaaaa

SEQ ID NO: 14646 - DNA, 3252 bp, Homo sapiens
gcggcccaggcccgcaaccttccctggtcgtgcgccctatgtaaggccagccgcggcaggaccaaggcggcggtgtcagctcgcgagcctaccctccgcggacggtcttgggtcgcctgctgcctggcttgcctggtcggcggcgggtgccccgcgcgcacgcgcaaagcccgccgcgttccccgaccccaggccgcgctctgtgggcctctgagggcggcatgcgggactacgacgaggtgaccgccttcctgggcgagtgggggcccttccagcgcctcatcttcttcctgctcagcgccagcatcatccccaatggcttcaccggcctgtcctccgtgttcctgatagcgaccccggagcaccgctgccgggtgccggacgccgcgaacctgagcagcgcctggcgcaaccacactgtcccactgcggctgcgggacggccgcgaggtgccccacagctgccgccgctaccggctcgccaccatcgccaacttctcggcgcttgggctggagccggggcgcgacgtggacctggggcagctggagcaggagagctgtctggatggctgggagttcagtcaggacgtctacctgtccaccattgtgaccgagtggaacctggtgtgtgaggacgactggaaggccccactcacaatctccttgttcttcgtgggtgtgctgttgggctccttcatttcagggcagctgtcagacaggtttggccggaagaatgtgctgttcgtgaccatgggcatgcagacaggcttcagcttcctgcagatcttctcgaagaattttgagatgtttgtcgtgctgtttgtccttgtaggcatgggccagatctccaactatgtggcagcatttgtcctggggacagaaattcttggcaagtcagttcgtataatattctctacgttaggagtgtgcatattttatgcatttggctacatggtgctgccactgtttgcttacttcatccgagactggcggatgctgctggtggcgctgacgatgccgggggtgctatgcgtggcactctggtggttcatccctgagtccccccgatggctcatctctcagggacgatttgaagaggcagaggtgatcatccgcaaggctgccaaagccaatgggattgttgtgccttccactatctttgacccgagtgagttacaagacctaagttccaagaagcagcagtcccacaacattctggatctgcttcgaacctggaatatccggatggtcaccatcatgtccataatgctgtggatgaccatatcagtgggctattttgggctttcgcttgatactcctaacttgcatggggacatctttgtgaactgcttcctttcagcgatggttgaagtcccagcatatgtgttggcctggctgctgctgcaatatttgccccggcgctattccatggccactgccctcttcctgggtggcagtgtccttctcttcatgcagctggtacccccagacttgtattatttggctacagtcctggtgatggtgggcaagtttggagtcacggctgccttttccatggtctacgtgtacacagccgagctgtatcccacagtggtgagaaacatgggtgtgggagtcagctccacagcatcccgcctgggcagcatcctgtctccctacttcgtttaccttggtgcctacgaccgcttcctgccctacattctcatgggaagtctgaccatcctgacagccatcctcaccttgtttctcccagagagcttcggtaccccactcccagacaccattgaccagatgctaagagtcaaaggaatgaaacacagaaaaactccaagtcacacaaggatgttaaaagatggtcaagaaaggcccacaatccttaaaagcacagccttctaacatcgcttccagtaagggagaaactgaagaggaaagactgtcttgccagaaatggccagcttgtgcagactccgagtccttcagtgacaaaggcctttgctgtttgtcctcttgacctgtgtctgacttgctcctggatgggcacccacactcagaggctacatatggccctagagcaccaccttcctctagggacactggggctacctacagacaacttcatctaagtcctaactattacaatgatggactcagcacctccaaagcagttaatttttcactagaaccagtgagatctggaggaatgtgagaagcatatgctaaatgtacattttaattttagactacttgaaaaggcccctaataaggctagaggtctaagtcccccacccctttccccactcccctctagtggtgaactttagaggaaaaggaagtaattgcacaaggagtttgattcttaccttttctcagttacagaggacattaactggatcattgcttccccagggcaggagagcgcagagctagggaaagtgaaaggtaatgaagatggagcagaatgagcagatgcagatcaccagcaaagtgcactgatgtgtgagctcttaagaccactcagcatgacgactgagtagacttgtttacatctgatcaaagcactgggcttgtccaggctcataataaatgctccattgaatctactattcttgttttccactgctgtggaaacctccttgctactatagcgtcttatgtatggtttaaaggaaatttatcaggtgagagagatgagcaacgttgtcttttctctcaaagctgtaatgtgggttttgttttattgtttatttgtttgttgttgtatccttttctccttgttatttgcccttcagaatgcacttgggaaaggctggttccttagcctcctggtttgtgtctttttttttttttttttaaacacagaatcactctggcaattgtctgcagctgccactggtgcaaggccttaccagccctagcctctagcacttctctaagtgccaaaaacagtgtcattgtgtgtgttcctttcttgatacttagtcatgggaggatattacaaaaaagaaatttaaattgtgttcatagtctttcagagtagctcactttagtcctgtaactttattgggtgatattttgtgttcagtgtaattgtcttctctttgctgattatgttaccatggtactcctaaagcatatgcctcacctggttaaaaaagaacaaacatgtttttgtgaaagctactgaagtgccttgggaaatgagaaagttttaataagtaaaatgattttttaaatatcaaaaaaaaaaaaaaaa
